United States Patent Application Publication US 2011/0183924 A1 - sequence listing, part 297

SEQ ID NO: 1007886 - protein, 118 aa, Homo sapiens
RWKGCADGMRHMEQRDESRGSNGGLVITMCNETMGEHRVHVGDTINLFTNTVCSHIRCADALGELPYFAEKNMHQQIIYTPYFSCLTNVCCASPFSSCSLLPAAPLLSRAHLFPSAHE

SEQ ID NO: 1007887 - protein, 83 aa, Homo sapiens
MHDNVPDVSVDDLSSQCSRFIYTMAPITLDQFTMFNSASLHVAFPRYDVAVPPYDVSLSTLDCRLSTLARRLSTRGYRDSTFD

SEQ ID NO: 1007888 - protein, 53 aa, Homo sapiens
GSLPFCSAVAVGGQVELQVVLPSLSSAGGEVLLGALLYMDTDLGRRVRTLLML

SEQ ID NO: 1007889 - protein, 43 aa, Homo sapiens
ERVMRLLPAPLPPTHIWLMNTVEGDLTDESLTLFFCTLCCSND

SEQ ID NO: 1007890 - protein, 40 aa, Homo sapiens
TGDAVGSTAVIWAPVDSPSQPGGGQEDGSDGFSKICLEST

SEQ ID NO: 1007891 - protein, 47 aa, Homo sapiens
CVELSARRLRGVGGPGCSAKGTPCMCSRADEALLLLPAVSRVGCAWR

SEQ ID NO: 1007892 - protein, 48 aa, Homo sapiens
ALRIPNGVMRGGESLYWWAILSRTLAPLHQLATTPPSPWTSPVAPCDL

SEQ ID NO: 1007893 - protein, 193 aa, Homo sapiens
RLMRLGMVQAVLGLSPGWTSADMVSMKLTQLSFHSSPPESPSSAGLQDALEMRAVVVATQTQLLVNFSLGQLKRGSCGVGGGAFLCGRRAWGQGHPTGTTSHSLPVLPFSDTSKCTGVPPGACTSSEHCPSLGQDGGLVQQHILKNITVHVLDAQAQVCGPSVFHTLMSVSHVVGNADAIGRRVWINSVVVRR

SEQ ID NO: 1007894 - protein, 39 aa, Homo sapiens
TGDAVEGTAGERDLDEVDMSDLSPEEQWREICHINRITR

SEQ ID NO: 1007895 - protein, 52 aa, Homo sapiens
MAMPVPVSKPTVGIDVAKNELVIYHADLDLLEAIPNTKAAIKKWLRALPGSV

SEQ ID NO: 1007896 - protein, 113 aa, Homo sapiens
VFLQDTHRDQSVPHAGIFADDVHRSWVRRIVQLIDDRSGREHIGEYPLVLMIFGIDRNFHPEILVNHLELGGTIPQFVFPYSYYPLDVVLSSGLTGFKSAVVMRRGGSNFQAT

SEQ ID NO: 1007897 - protein, 81 aa, Homo sapiens
PVKREDNPSSPQRQSKLSRIQGSNEGYGKERRPDLGGPGYSIEPDKVGFQGNLIPWNPESWFFSYAIPNPELLPKACLAAS

SEQ ID NO: 1007898 - protein, 59 aa, Homo sapiens
RERGKRGDIQLSRQLYTHKHTQKETLLGYTSVVSLLLLQYIAEVLTSHRSAQKLMRLGR

SEQ ID NO: 1007899 - protein, 120 aa, Homo sapiens
IFLQDTAGQVLLKGNCGGERDPTPWKVTYSTERSTKLEESPDAEKSVAVSWSSEKQSENSTDHLNYWHSHQKLRRLGGGVGTETLALEASPWERAEGVEQRLLGRFMNQSVKFDRADTAW

SEQ ID NO: 1007900 - protein, 55 aa, Homo sapiens
GLHLQHMEVPRLWVESELELLAYATATATRDLNRVYDLHPNSWRCRILNPLSEAR

SEQ ID NO: 1007901 - protein, 31 aa, Homo sapiens
  misc_feature (16)..(16): Xaa can be any naturally occurring amino acid
MSIFPGEMSAIDEGVXLMRMLKRRVVPLPEP

SEQ ID NO: 1007902 - protein, 43 aa, Homo sapiens
DTGEYFESGTRTLICWVALGIVSWGIWVQQGLSPPPPYSYLDP

SEQ ID NO: 1007903 - protein, 62 aa, Homo sapiens
MTADAKSEAFVTQDIIYTTGDETPSLGDLKLVLLGAGTKELERIPLSEDDREEINALSQSSG

SEQ ID NO: 1007904 - protein, 46 aa, Homo sapiens
MKRVYERFCRGLKEVERLIPERGWEYMWNERLGYIFDLSFGTLEQD

SEQ ID NO: 1007905 - protein, 35 aa, Homo sapiens
KIPSQMRRIECIIYHRDPSADWQADSPLLGARGLP

SEQ ID NO: 1007906 - protein, 71 aa, Homo sapiens
ASPIHGQRLSCSSGKAMSKISRECSTKVQPPGPRVMQSCQDVESPFLVLELAERMHDDPISALARQEALLL

SEQ ID NO: 1007907 - protein, 54 aa, Homo sapiens
AYYSQRFILSQRLYFLNALYFLNALYFLNALYFLNALYCPQRFILSSTASHFHF

SEQ ID NO: 1007908 - protein, 36 aa, Homo sapiens
MGTYYRVEESTKSVEDSTPRVDGVPTHELRNSLVTT

SEQ ID NO: 1007909 - protein, 74 aa, Homo sapiens
EDPNAIYFSSLYFLNAYTSQRLYFLTLYTSSTLYTSQRFILPPTPLYSLKRFILSQRLYTFSQRFIHSCARFAS

SEQ ID NO: 1007910 - protein, 50 aa, Homo sapiens
ALYLSTLYTSLYALYFLYFLNALYFLYALYFLYFLNASHFISRYEVYSVE

SEQ ID NO: 1007911 - protein, 75 aa, Homo sapiens
  misc_feature (75)..(75): Xaa can be any naturally occurring amino acid
RFILPRLYFLNAYTSQRFILLNALYFLNALYFLNALYFLTRFIHSHTLYTLSSALYILKRFIHLVRRSPRTGYRX

SEQ ID NO: 1007912 - protein, 62 aa, Homo sapiens
ATLYILNALYFLNVYYFLNALYFLNALYFLNVLYFLNASHFISRYEDKALREYKALCEVYSV

SEQ ID NO: 1007913 - protein, 45 aa, Homo sapiens
NALLSQRFILLNAYTSSRLIGSDVLIAFAGMKYKAVRALRKYKAL

SEQ ID NO: 1007914 - protein, 110 aa, Homo sapiens
VGSSPRHILHSWFSRGRPRQNGSVLGAQDHAVTVLPSAILEAPRCRFWAYAGARLCLSLQTWLCAYPLRVGACRVGPASRHGRSKEGEAGCVPQALLSPPSLENTLTTIN

SEQ ID NO: 1007915 - protein, 37 aa, Homo sapiens
PADVAGYSFGSFADRLPARDGRSELSTSIPSAQLVDD

SEQ ID NO: 1007916 - protein, 39 aa, Homo sapiens
MAQVTVFGNREHIVATGITCKIPRTLLLALKASAQSCRD

SEQ ID NO: 1007917 - protein, 49 aa, Homo sapiens
QVISRYRISTVVHHTSLSPAREHDKLCAFECRTIQRVNITVLLSIDFNV

SEQ ID NO: 1007918 - protein, 33 aa, Homo sapiens
  misc_feature (12)..(12): Xaa can be any naturally occurring amino acid
LSDYALDGQDDXFEPRVKGYSEGNNDFVVIVDI

SEQ ID NO: 1007919 - protein, 45 aa, Homo sapiens
KNQKRHLYSKDLRIGIFSSDFNPDFINTFTITIFLGATYEALSPE

SEQ ID NO: 1007920 - protein, 50 aa, Homo sapiens
SSSVPSRHVVQRVEMEESKSQSDQDAPDEDESPPPEDAPFVPPIHLDPRF

SEQ ID NO: 1007921 - protein, 42 aa, Homo sapiens
PAQLRRHGGDVAIYTEDSPGLKCRPCSSSGYESSVHRFCIYV

SEQ ID NO: 1007922 - protein, 43 aa, Homo sapiens
MVLSESLAGQRRFLVAATDTPGRAQQASMRALSGTSLNSELWW

SEQ ID NO: 1007923 - protein, 40 aa, Homo sapiens
  misc_feature (11)..(11): Xaa can be any naturally occurring amino acid
IELGTRRTDGXWRYTFKKYLANFGAVMNRALAMLLFLKFE

SEQ ID NO: 1007924 - protein, 61 aa, Homo sapiens
HQRSRSHHSWLLISEGRFGTRGAAASSVSQSPSPHEMGGTYGHEFSQSQIIAVKVVTTWTG

SEQ ID NO: 1007925 - protein, 61 aa, Homo sapiens
MDPYVTSRPDGSAPGRYQSPEYLRVVIISVPAPVVDIRRSIYSRAAGLAAGACAARQKVVP

SEQ ID NO: 1007926 - protein, 126 aa, Homo sapiens
VRGCFPHYSASETGYLTHRCEARGVKETDVVSPQFLCVAPGGSRGQQGKPEPRDAAVWAGTSSLELQQMNSVRCHGCCLVCYFVSNLVLHQDTLRITIPSAEDKAKLLDVCFDYACDAASGGPENV

SEQ ID NO: 1007927 - protein, 36 aa, Homo sapiens
MIRPLRASQKGWDYRREPPHPAIFLPFNMGPTPGLC

SEQ ID NO: 1007928 - protein, 47 aa, Homo sapiens
  misc_feature (2)..(2): Xaa can be any naturally occurring amino acid
IXGVECVCLAVSPPGSMHPGQMTERGCRSHGAGAPVIPLDLVGTQCW

SEQ ID NO: 1007929 - protein, 58 aa, Homo sapiens
RCALLTLCSAGCQPTCVPFSTLHPVICVCDDTTLVYSWSCLRLTPLLPDRRFHLPDPL

SEQ ID NO: 1007930 - protein, 41 aa, Homo sapiens
MARHRTIETNSSVNRGAIKYALVVSLLVESLCHDEATTSQC

SEQ ID NO: 1007931 - protein, 46 aa, Homo sapiens
EHGLKGNDITDEVLDGLNPSRQMWKELRTPVGGHRTKTSNKALTRC

SEQ ID NO: 1007932 - protein, 39 aa, Homo sapiens
ANRARYRYRLCPIRLGTEEQQLSLAKTFTLKPSTCIDIL

SEQ ID NO: 1007933 - protein, 61 aa, Homo sapiens
AKTAKAVWNTFSQMTLEPKETKLSQSCLPMCLAHQTTPYAKNMREAFDGYYKLVADYRKDH

SEQ ID NO: 1007934 - protein, 35 aa, Homo sapiens
MSRRNVVLLDDGTATLRIKRYNNLTARGVVKSVFL

SEQ ID NO: 1007935 - protein, 49 aa, Homo sapiens
SDRARVPQGWLNARSWLSVSDEGSFCIFSIPTTPLHSPTQYLYWVSSSH

SEQ ID NO: 1007936 - protein, 44 aa, Homo sapiens
DEEGGNWLWRKQRAIRKAGYQHVSGQLTSTKKPPKKANEKTESS

SEQ ID NO: 1007937 - protein, 76 aa, Homo sapiens
  misc_feature (49)..(49): Xaa can be any naturally occurring amino acid
GKCADSPESIKAMGSMTVRTISSRSLFLNGTASPFRSRIRYTVRKSDLXEAPLLVHYGSHRGVFLDDGAHVTVRTE

SEQ ID NO: 1007938 - protein, 34 aa, Homo sapiens
YVLVAETGYSVTVNNSTQSPGDRCYPLAVGHMGS

SEQ ID NO: 1007939 - protein, 40 aa, Homo sapiens
CSVLGCEHDRISAVRNLSRNLSLQNEIAKETLPDLVSIIP

SEQ ID NO: 1007940 - protein, 45 aa, Homo sapiens
VKAAWNPCRNKWRLTQGVVTLLPPVGRESIVENHFVLQRDTHTYI

SEQ ID NO: 1007941 - protein, 56 aa, Homo sapiens
GSLDVCLQACPLDRPSVYKCRDVGGVDWYSGNLLKYFLYVVHFEYFYNKKMLVAYK

SEQ ID NO: 1007942 - protein, 35 aa, Homo sapiens
MGTFSYARDGEYSDDSLGLGITEERQVTVNGHAAC

SEQ ID NO: 1007943 - protein, 54 aa, Homo sapiens
THASTARTNTAHTKHISHTKHATTPYTTHTRHTTQSTYQIHTYTHTTHHTHTPH

SEQ ID NO: 1007944 - protein, 51 aa, Homo sapiens
MAPSQAALLTPGSLCPGPVTHLCPSSSHFHPVFVHTSPHPFQPCAHTVSRI

SEQ ID NO: 1007945 - protein, 42 aa, Homo sapiens
HVVREQEQELLRQFSDLLHLAWSVLYSGLIRAAVLFYGARVE

SEQ ID NO: 1007946 - protein, 96 aa, Homo sapiens
ECRRTTEDEQAEKQIATRSAASLAILGKTVQVVSKMRKMWCQRVHCQMLALRMLVLGQKNDNKLTRQESCLGNFSSSLRRKVNPRSPDGCGLHSNN

SEQ ID NO: 1007947 - protein, 65 aa, Homo sapiens
FDARYRTLDHVVTVLPRVVACGWTGPTHDTLDGRNQHDFTLNALTCLGPGTPCRRSLYCPHLVDD

SEQ ID NO: 1007948 - protein, 53 aa, Homo sapiens
IRLELGTESRTGGAVTEGGVIQCARKEEHMAEVREDMYVYQKCSETKERPRRS

SEQ ID NO: 1007949 - protein, 40 aa, Homo sapiens
GISLLILLDSTFSLAELLAGCMEGDAEGWWLTGRHGTAYF

SEQ ID NO: 1007950 - protein, 56 aa, Homo sapiens
MHKSHFSSIIDFISQGAEGTCSYRAVPVFVWVKRRTQLSLEGTFTLKPSTLIRYVS

SEQ ID NO: 1007951 - protein, 88 aa, Homo sapiens
VLTLLESSDPPTYCGSLKGFKQACVVNALVGLGGRMGPDSPCLCTPPLSSSLNGGNLLCAVDESKDHMLSVWDLVAERPTVVAVRVEG

SEQ ID NO: 1007952 - protein, 31 aa, Homo sapiens
  misc_feature (28)..(28): Xaa can be any naturally occurring amino acid
LCVGRGVCNNRKNCHCEAHWAPPFCDKXGFG

SEQ ID NO: 1007953 - protein, 30 aa, Homo sapiens
MPTATLCSKVLGLQAVSTDLAYLLLRITFV

SEQ ID NO: 1007954 - protein, 61 aa, Homo sapiens
YCPATKLAITIMQHQLAVSHSGSTFSSCTQIKSFLQQQSAIHSPSTFQHMRPPQCGKQRHH

SEQ ID NO: 1007955 - protein, 53 aa, Homo sapiens
  misc_feature (39)..(39): Xaa can be any naturally occurring amino acid
EIPEIDGFSASCFKTSASWDCVFLLQLLISSEFPPGKDXFFLGGEKGEFWEQH

SEQ ID NO: 1007956 - protein, 48 aa, Homo sapiens
CAGSRKSLMAPKHISLTLASWVLGTVFLYVVIEYACIEMTKKSSDNTW

SEQ ID NO: 1007957 - protein, 47 aa, Homo sapiens
  misc_feature (19)..(19): Xaa can be any naturally occurring amino acid
LQAEHCTGRESMFVGKYHXLVLDFGFDIQFRTYPSFQTITGEAHACS

SEQ ID NO: 1007958 - protein, 71 aa, Homo sapiens
  misc_feature (48)..(48): Xaa can be any naturally occurring amino acid
PLIDGFSHIDLVVTESVLSFTRKLISVAYHDSIMNPDYNVEFFRQFIXGYELLQDKQSCPKPMLIRMCLAA

SEQ ID NO: 1007959 - protein, 78 aa, Homo sapiens
TGQHGTSSPTVPPCSMGHHHQSLTCQSQGICLSPCVGGPNPGLPMQAHVGHCAGRLSVSHSVQPSATTLVAAFGGYPL

SEQ ID NO: 1007960 - protein, 67 aa, Homo sapiens
HITSTIPPSTVTVHLCSHSLTKLAPFHEPSMLSLAGFRTVCMHSQFSNICSLDTIVRSLRGILSAVA

SEQ ID NO: 1007961 - protein, 61 aa, Homo sapiens
VGAENVLVVVAEVVLVVVAEVVRGGRGRDVLVVGAEVLLGVNVSHGFSIVEGQLSSFIIQV

SEQ ID NO: 1007962 - protein, 79 aa, Homo sapiens
CAWAWAGGCGPCLSCLAVPVLCPFPQLRFPLARTPCIAPVRSPRTPPLPPHPLPPPPPPLTAPPLLHTLSQHRGILSHR

SEQ ID NO: 1007963 - protein, 69 aa, Homo sapiens
HDSSQSFAVVYNWGHCRECHIRWSHKHVIFEIIFLPPAESLGMPLREFMQGNHQTSRLLSVSIVCPCYC

SEQ ID NO: 1007964 - protein, 49 aa, Homo sapiens
MARNARRIIREPECFAGYIPYSTHVTDHVIKTREGDYLQIWKIAGIAFE

SEQ ID NO: 1007965 - protein, 102 aa, Homo sapiens
  misc_feature (15)..(15): Xaa can be any naturally occurring amino acid
SRIDGFSAVGIDPVXCRILFFGFGVFFGCFFEVESHSVSQAECSGAISAHCKLRLPGSSDYPASASRVAGITGTRHHVRLILVFLVETVFHHVVQAGLELLT

SEQ ID NO: 1007966 - protein, 47 aa, Homo sapiens
WDSNGSRMVWDGENGMENGREWEGEWNGMQNGEWNGNGRTEWNGEWN

SEQ ID NO: 1007967 - protein, 43 aa, Homo sapiens
LDGFSSESATTPGYQLNMRKLSCPQRSTVSGSQGPSEEKPAPV

SEQ ID NO: 1007968 - protein, 67 aa, Homo sapiens
SDVGIMGRIFFIRINYENVILLVTLGGGGLSSIITAIGYAFGSIFSLLGPHFFRGITNNLQHSTVHF

SEQ ID NO: 1007969 - protein, 107 aa, Homo sapiens
  misc_feature (94)..(94): Xaa can be any naturally occurring amino acid
  misc_feature (100)..(100): Xaa can be any naturally occurring amino acid
ESTVSLGCSFLRSDTFPFRPFILKDVLLMVIVLLNEVLDGNEEVIGNRNKRYIYVMLSANSLGALCPGPRNLWKFELKSDDLGYQGIWAEEISXAAKHSXMWPLADR

SEQ ID NO: 1007970 - protein, 34 aa, Homo sapiens
MTVSQQKWTWQPGFNPSSAFELFELNLTQALLVS

SEQ ID NO: 1007971 - protein, 98 aa, Homo sapiens
  misc_feature (32)..(32): Xaa can be any naturally occurring amino acid
  misc_feature (47)..(47): Xaa can be any naturally occurring amino acid
  misc_feature (79)..(79): Xaa can be any naturally occurring amino acid
  misc_feature (82)..(82): Xaa can be any naturally occurring amino acid
MIPYFTQAYGHKAIELWTATDVSYTQAQTTAXYGQDAMQLLMDSSHXLYYSNWPPGITASLSRGMALVLNDTTTATVTXNQXSYSAQSGLLDSSLRKS

SEQ ID NO: 1007972 - protein, 70 aa, Homo sapiens
RNPLSLTSTRHPLLSEKKWRKYKLEKRYSVNDPPDVLDRQKCLVALVYLRHAKWFQARANGLKSCVIVIR

SEQ ID NO: 1007973 - protein, 53 aa, Homo sapiens
MALVHEYWVVLLTSDGGFDMGLGSHTWSPERGIFSYKQLLCKLSHIKLSAQEF

SEQ ID NO: 1007974 - protein, 51 aa, Homo sapiens
  misc_feature (12)..(12): Xaa can be any naturally occurring amino acid
AYRIDGSLLSGXQVSAPSDSCSVPMTGARGQALEVVRSRVADAAALSCSNF

SEQ ID NO: 1007975 - protein, 114 aa, Homo sapiens
QRIRYNKTPYDCNACTARYHRRHSFLITHQRIHAGEKLYECDECGTVFTWDASLIQHTKSHTGEKPYVCSECAKEYIGTSMLLVHQRTHTGENTYICKECGKGYTMKSTLSIHQ

SEQ ID NO: 1007976 - protein, 80 aa, Homo sapiens
GSLDSTVSLLLMKTHLRLALQPAAPNQDQDQASPLLRPTSRCKLLSVCLIVGDEEVVNQMVPDLTCRMNGKDGQRCYRIA

SEQ ID NO: 1007977 - protein, 118 aa, Homo sapiens
RDGGGGIGAPGTGVKHISYSERVESARLPAIFMQRSRARKAGIGKHVDDQDFSLFFGLILYFPNWDHKRDFSRLGGGWQELGLWHMLEAVLSSFKSALRTELHPRGWALFLVWSSDVL

SEQ ID NO: 1007978 - protein, 93 aa, Homo sapiens
MWHQGYSKPIPLLMSKKGRQHLGQLPADQGHLRTMQHSYPAFDGSSIVCASSSAWTHLALAANSGYDILKSLCNPRDIFLAIGIATQDVHMST

SEQ ID NO: 1007979 - protein, 61 aa, Homo sapiens
  misc_feature (15)..(15): Xaa can be any naturally occurring amino acid
ARRWRSGLQIASRRXKRCWPAPRCCGFRRFVRQRGQLRGVRQLLLFHARRRQELRSLAVAQ

SEQ ID NO: 1007980 - protein, 74 aa, Homo sapiens
HAATGGADFLDDIIPGHCSPPVIPVRRSLRPSEEVAVRLQKVVSAWQEAANGLAELNCSSSCRALEYQLQHDLE

SEQ ID NO: 1007981 - protein, 63 aa, Homo sapiens
TAELAWISELQKLRCRPYSEVVAWYGLPNVEMGSTLGKLQKKLEAYVDTSNGMEPYDDKSTWC

SEQ ID NO: 1007982 - protein, 63 aa, Homo sapiens
MRHDQRDGGDRIARRGEFLDWARRTERKYLQECLINQERKSEVRRRSDTVVVPTINDAAWLKV

SEQ ID NO: 1007983 - protein, 65 aa, Homo sapiens
MGLELLVTTRSKMSPLLTDSVGGQLCPKTGHAADGDIIAAGHGFGGRAIELYRVISLTVKRGGFV

SEQ ID NO: 1007984 - protein, 36 aa, Homo sapiens
YVLSRGTLTDLDYRLTHHSYPLSNDFFYHVLTLLLL

SEQ ID NO: 1007985 - protein, 35 aa, Homo sapiens
YAIDGFSAGKYHYSYSLGNITSGFTSCHCKSKTDS

SEQ ID NO: 1007986 - protein, 80 aa, Homo sapiens
  misc_feature (66)..(66): Xaa can be any naturally occurring amino acid
  misc_feature (78)..(78): Xaa can be any naturally occurring amino acid
NLGTHGYLSDTLKKLKITAVDKTEDSLEDAWMVCFKPVVQNNTETSEKVQASGIPSAVGKVCGLHXSSCKAPKVANIXQQ

SEQ ID NO: 1007987 - protein, 42 aa, Homo sapiens
MYDGTYYRAVTYVLLTSYYRTDDVTTCDSTDDTVSYLRHPTT

SEQ ID NO: 1007988 - protein, 86 aa, Homo sapiens
LELGTISKVCTGGICGRTLQSTMSSGYVDQCDGDSGQVLRGTNYKVVFPQDLLEKVLDRNNFAMLGLGDVVIPGIFIALVLRFDIS

SEQ ID NO: 1007989 - protein, 46 aa, Homo sapiens
MAVSNWIKLIILPVPKSICTSIVHLDDRIWVGDGSSIMSHQVRDSL

SEQ ID NO: 1007990 - protein, 35 aa, Homo sapiens
NSRNVVQTVTGGTSCHPTRGWTFFPVQAQPLPGNV

SEQ ID NO: 1007991 - protein, 46 aa, Homo sapiens
  misc_feature (42)..(42): Xaa can be any naturally occurring amino acid
MRSSLVSHPRSNPNGPYYPLQAFLAQKVATQATAKDSYFPVXLWAA

SEQ ID NO: 1007992 - protein, 72 aa, Homo sapiens
MWGQFSQFCNRAAQLTFSQHTTVHHINSCPVSQAGTFHGMLVTCMRVRRSGNASIFIQHSRHSATHSQHSTL

SEQ ID NO: 1007993 - protein, 85 aa, Homo sapiens
HSQPVQRLRELERYVLAGLRKKPRKPYTIKKPVGETKEELAWEKEAGLRKAGTRCQRHSSMLLKSPPKKANEKTRVILCTTCSQI

SEQ ID NO: 1007994 - protein, 38 aa, Homo sapiens
MSGNDTAESGECEQGERPAEEAEVASGSKDGMSALTFR

SEQ ID NO: 1007995 - protein, 70 aa, Homo sapiens
AALSELLCAVATFAKILCSNPNTGAVLYELPSNTQWVLRYSVVSPEILLVLSAASYCMGVSSVYYSSMGR

SEQ ID NO: 1007996 - protein, 121 aa, Homo sapiens
HSSSCAHLSSLQEALQVVRVSGEEGCAHCLVLYWHKLCRVSLAYASSGPQSPVTWWACPSEGWLADWMSMELGEVVDRRDGDLLDLGRAASPSVKWVNCCCTCRTSVLCNLLSIGGKCLDL

SEQ ID NO: 1007997 - protein, 108 aa, Homo sapiens
RLYVLEGDAEISVHTVLTRTLRRITLDEYRNVVEELLTGNPHIEKESDRSIADGANDEEAASVCMGQMEPDQVEEGITFEDFLKIWQVIDIETKMHDRLLTIGNHGPL

SEQ ID NO: 1007998 - protein, 57 aa, Homo sapiens
SPTELISHGVSPTRRMPHYYLNFPKPKEEKCNACCTYRGHYQYNRLLLSRFFGNFKY

SEQ ID NO: 1007999 - protein, 64 aa, Homo sapiens
MSRGILSHISMNTYIFSQGRVSTKTKCIQKTKHYDQLEEPPGKKKTDSQNQTPITIIHSIQIKQ

SEQ ID NO: 1008000 - protein, 57 aa, Homo sapiens
YAIHRPQSEITDFMSFSGDSINLDNCSSSAVPGRLLGSASVPGVKQFKVNKAKCGGI

SEQ ID NO: 1008001 - protein, 66 aa, Homo sapiens
MRIPYTNAKVTASLPEPVEDHEPRAKNEQLQTHHLKSRNHSPRRSGSCTAMNQRRPQDPPGRTETS

SEQ ID NO: 1008002 - protein, 33 aa, Homo sapiens
MTGSPPTKRQRGGTSGAGPSWAVPQNGRREKGA

SEQ ID NO: 1008003 - protein, 62 aa, Homo sapiens
RKTHTRTHTHTQTFKTLINIGPLAGVHVVLDLTAGLTIHSSLLFHTFQLAIHSNHIQAWVVI

SEQ ID NO: 1008004 - protein, 60 aa, Homo sapiens
VSLQAGADISHDRPVRCWLSILLIRLLQKVHCDHQHITMHEPVTLGSPSSQGGIQWVAHQ

SEQ ID NO: 1008005 - protein, 76 aa, Homo sapiens
MTRLPYFFSYCRAERADENFYSSNFYLHKPLSYNISGDFCKRQSTDSKLNCYAISPDWLGLLFPSLLLLTTSLLLA

SEQ ID NO: 1008006 - protein, 44 aa, Homo sapiens
EQAVNQSISLSLSAASGSLTHQDSRVACQLIMALAFASWHLFPA

SEQ ID NO: 1008007 - protein, 66 aa, Homo sapiens
EDPALVSHLVLFLQGTMRTLFFSVLRFSQQKEVASGTPHATLIPNRQQLGQAFDCHLSERDHSTPS

SEQ ID NO: 1008008 - protein, 96 aa, Homo sapiens
DLEDRPWYPTHFNPNQLDNPGHALTELRALTQPEGLRLIALSSTNCPSIFRISLASLTDTLDPCRRYLTHCASPGRDGPTAMPGRARYAPTANAIS

SEQ ID NO: 1008009 - protein, 33 aa, Homo sapiens
MKLKPREEFAFAKITERSKAELGLTSMYLPALS

SEQ ID NO: 1008010 - protein, 62 aa, Homo sapiens
SKDRYTHDEPWEAKDVADTCLCGVNLYQFYGPSGQYTHEFDGDEEFYVDLETEGDCLAGGLE

SEQ ID NO: 1008011 - protein, 76 aa, Homo sapiens
  misc_feature (7)..(7): Xaa can be any naturally occurring amino acid
  misc_feature (17)..(17): Xaa can be any naturally occurring amino acid
  misc_feature (21)..(21): Xaa can be any naturally occurring amino acid
  misc_feature (51)..(51): Xaa can be any naturally occurring amino acid
YTFLEEXEKVADSASSXGAQXGGTVVSVSPGISFSPFFTMGYTTILIIKFXLWVLETKRIPAPPLDSSPKELRAGT

SEQ ID NO: 1008012 - protein, 35 aa, Homo sapiens
YHLETIIDFHKDQATGCIEVRGEVVCARSKGTGWY

SEQ ID NO: 1008013 - protein, 45 aa, Homo sapiens
MVHRQGGEQMTSLVTLYMVVSAADTNIDFQKHPISDMTLTAHDGD

SEQ ID NO: 1008014 - protein, 34 aa, Homo sapiens
MGKSLELSEFNDQTVATLATILCGIVVVYGWYSG

SEQ ID NO: 1008015 - protein, 42 aa, Homo sapiens
CTIHNLEGDVFSLYQFSGFDSSKPQQLKHTAIQEIFRVVSGV

SEQ ID NO: 1008016 - protein, 36 aa, Homo sapiens
ITLISKFQYDLPGKCLGQTLYHSIANDEHGRGASGS

SEQ ID NO: 1008017 - protein, 57 aa, Homo sapiens
QYSPALRGAGCCKGLLLWLFWFTGPIASSGYGNRPFWASHVSAWQCPSLGVASGRRS

SEQ ID NO: 1008018 - protein, 43 aa, Homo sapiens
RATLNTPPLIRTRCTSIFSQSVSSNFWWPYASHRKYEVGVHRP

SEQ ID NO: 1008019 - protein, 97 aa, Homo sapiens
AITRTQLDLRDSDGPPSEDWMQGCLMERVTYTPMTPGSYLISIKYGGPYHIGGSPFKDKVTMAPFRQEPQPPRDNHQCLKTSLTQGHHVPPSMGPRG

SEQ ID NO: 1008020 - protein, 41 aa, Homo sapiens
ISAYIYSQGCAITTYHLIPEHILSYPKRNLKTISRHPIISV

SEQ ID NO: 1008021 - protein, 49 aa, Homo sapiens
DSMENSLITPLSSVDCIGRREEQVTVYPPLAGILPPELRRLTISPYADA

SEQ ID NO: 1008022 - protein, 64 aa, Homo sapiens
IEDADEKLFEDDDSMKVVDEEEDSDEKLFDDSDEEGDYWVVSELYHLGMSPPNLGRHMDHFDHF

SEQ ID NO: 1008023 - protein, 57 aa, Homo sapiens
DVIYASPWSYEAELRDVRIFLFLSVFLVVSLPRIPDPILLCTLTSYPIGRTTVRVHG

SEQ ID NO: 1008024 - protein, 39 aa, Homo sapiens
QAADWVWTDLQALCDSVVEDPPQCTVGVKVETTEDLVVE

SEQ ID NO: 1008025 - protein, 49 aa, Homo sapiens
RDLYTHSTRIGNTSMAVIEHSEETDQKTKKDERVRGCAWFTPASGQGGI

SEQ ID NO: 1008026 - protein, 68 aa, Homo sapiens
KRHYTPIYPPSTPQTRAALPSINPPAPSTHVSISSRWFPCLCPVLLFSFFRVKAALLGWLLAAGYCTA

SEQ ID NO: 1008027 - protein, 58 aa, Homo sapiens
MSTPAVARSQYKYAAEFAILSNIFNAQHKLQCNSLLSMYKVRNLLTASMGGISVYHRT

SEQ ID NO: 1008028 - protein, 30 aa, Homo sapiens
MTKVIGSLHHQWDKATQRVDALVQIGHSHV

SEQ ID NO: 1008029 - protein, 36 aa, Homo sapiens
MTLALCYSCKIFLFLPHVMQAFFIQHIHNNHSKQTC

SEQ ID NO: 1008030 - protein, 63 aa, Homo sapiens
QDIELKLGTKGNQQIALCCKHEIRCKAESKKGKIPETKRQKDENEEEGGGVDGVIPLEDLSSG

SEQ ID NO: 1008031 - protein, 67 aa, Homo sapiens
  misc_feature (18)..(18): Xaa can be any naturally occurring amino acid
VDRSGDDLYQAQGAARRXDCLWISFLPFSFYFFFLWRQKLGIRQYEGWSPPLIVRKGSQGDDETMCT

SEQ ID NO: 1008032 - protein, 79 aa, Homo sapiens
IPNTLAHRSTSYLLPAAILHTLSIEGPFLGLPRGSRHMASRLASGFAEGAHLALILYAPGALQACMEHGLWSFPEALGA

SEQ ID NO: 1008033 - protein, 133 aa, Homo sapiens
HSKLCGFDISYFISLILCIRYLILFTYLFIYFLRQSFALSPMLECSGGISAHCNLRLPVSSDSPASASQSSWDYRCPPLRPANFCIFSGDGVSPRWPGCSRTPDLVIYPPRPAKSAGITGVKPPCPAGVGLFK

SEQ ID NO: 1008034 - protein, 43 aa, Homo sapiens
GRIPPPPGRIPPPPQSAETTRREPLAARPEAILLSKTRLCLGS

SEQ ID NO: 1008035 - protein, 52 aa, Homo sapiens
SSSSIPSVSSTETTSPGDRVETPVWERAPTPVSASSEVSPDEPMMDSENPMQ

SEQ ID NO: 1008036 - protein, 58 aa, Homo sapiens
MAYLYQAPSASDKQSYNLLLAYSSISHIALVVTAILSKAPEASPVQSILIIAQEEADF

SEQ ID NO: 1008037 - protein, 59 aa, Homo sapiens
SLKKKQLWTVGDVSSSRKNQSNCLPVFLQIQQMTSRTATIGITGEDRRSYFLQGARSEL

SEQ ID NO: 1008038 - protein, 40 aa, Homo sapiens
MRRLLHVFTFEQFSVNEGLVTLWVPWLICKALKPEYCVVT

SEQ ID NO: 1008039 - protein, 52 aa, Homo sapiens
MGFTLLPGWSRSPDLVIRPPRLPKAEEENGVNPGDGACSEPRSRHCPRNLGD

SEQ ID NO: 1008040 - protein, 39 aa, Homo sapiens
ILGDTLHNDACEKVLANVLKRNGNKKQRIDKWDLIKLKS

SEQ ID NO: 1008041 - protein, 100 aa, Homo sapiens
TDFVTETATGGSGTRNRSCQEWRSGIPLAVGCRKKHPQHLQREGWATSPPLLLQSKQDPDPKTRRTATHREYNSELIGIVRGAAVAARGIGLLDIAIQVD

SEQ ID NO: 1008042 - protein, 90 aa, Homo sapiens
MLLAPEDYHMYDPQDRELRTHHKTVQRALGPAKRKTTRRQDLTRASQMEQPYYEAETDPFPLVPIFLCTFLPATLQGELDEARPEGAISL

SEQ ID NO: 1008043 - protein, 107 aa, Homo sapiens
LTMLSSRWWACSFSSGAASREGPHVSISASLLGLATGLGWYAPRTLLCQDNDFPCPCRCGRGCPPSRDHSGQPAPGTTIGERPASALALIYAAPLSSDPFLPCKGNS

SEQ ID NO: 1008044 - protein, 76 aa, Homo sapiens
FFHPQHVLVFNPVSVFHDASCYTVLEKSGGDYDKELTFWDSVIVKINWSNEDSQCLSQNLEYLAVTVTTEFAYLHA

SEQ ID NO: 1008045 - protein, 88 aa, Homo sapiens
DEGLYAREREKNQASPQRGAIAGLADLVKLLAASATTAYTTTSRRTTQQALPNLLRDSTKLIDATTYERLDAETENPNSRHIVHNRLT

SEQ ID NO: 1008046 - protein, 125 aa, Homo sapiens
HGVIDFVPRQLEPVQLLLGENPILTTPAMFDTLLLCYESGVCAPSCPPIRVPWRMMLIHPLSLTELRLGSFGLEVTLLRSSCLPQCHLLSILCSSSLFPWRMVGPGHCLLAVTCARFQVVKGRVA

SEQ ID NO: 1008047 - protein, 71 aa, Homo sapiens
TRVSAGCGAPLGCQGRRAVLETSVPIQKRKAQAGGRSTQPGGSASSAPTPSLLSSCGAPHVVWRESCVVGP

SEQ ID NO: 1008048 - protein, 47 aa, Homo sapiens
SRDDVSSIELCGPLWDEGSVSSIFIAFTVPQTIPGRAKANSFIYAYL

SEQ ID NO: 1008049 - protein, 112 aa, Homo sapiens
SPDNFTISGNARKTVIPSPCTSNHALSGIRLHSTCEPYMCSELDVFFNDVIAEILSGLSSPAWFPAVGTVWSRSALRCATPAQREAEKHGYTGYGMFPRMRTPGTSSDLVEA

SEQ ID NO: 1008050 - protein, 39 aa, Homo sapiens
RPVRMFPMDIFSAEAQIELKSYVYVGGRSELNLAVSVES

SEQ ID NO: 1008051 - protein, 72 aa, Homo sapiens
WPCDDEMGVQPHVYLLCLSGNVYHLCACSCVVLDSDKPILYQYTTTPRIIVHYTPKPKGETSYQGPNVLFIT

SEQ ID NO: 1008052 - protein, 36 aa, Homo sapiens
NRHMCSDSHGHIMLTLTHVLTHGYSCSLSPMCSRTL

SEQ ID NO: 1008053 - protein, 40 aa, Homo sapiens
  misc_feature (39)..(39): Xaa can be any naturally occurring amino acid
YEHGQIIQNSSLCLSIEAYVEDGSEWVCAGGAGATGRAXS

SEQ ID NO: 1008054 - protein, 88 aa, Homo sapiens
MSEVMQPLQAEEHFLDSWKRFVTQKRMEHFYLNFYTAEQLVYLSTELRKQPPSDAALTMLSFIKSNCTLRDVLSGLLEGCGEVSARPV

SEQ ID NO: 1008055 - protein, 43 aa, Homo sapiens
MHVVVAVYSASRAGPASLCVTGRHLLKHVVNEIDEGPKEKGRT

SEQ ID NO: 1008056 - protein, 99 aa, Homo sapiens
MAIWSNLPASSFSHHQQLLGRTVAGQLREAHYVRIEDADILVAYLTYRLVRTSIVRHAATVTMLLEPYDDSQLHAHRDMGRKHSQRHVLLLARLDAQLP

SEQ ID NO: 1008057 - protein, 32 aa, Homo sapiens
CAARDVSLPRLLPAVLFASLVVWRTSRHELMT

SEQ ID NO: 1008058 - protein, 89 aa, Homo sapiens
VKSTCSGSYSRASASTSSSPLSVALLADLLQYPPQPEIMGIEAVGSIVHRLELSFSAATGAMATTDPKSMEVEVLVGRITIKVHHGRDI

SEQ ID NO: 1008059 - protein, 158 aa, Homo sapiens
GISGLAALVVGLSWGLGLGSAPRFRIWSKSSSTLNSSLWASLWLEAVCGPSHSHQAGGQHEGVTQGGETRRGQDHPIASGGPWMTRNSEGSCGDSFLPGAKSPSSGYTSSSKIGSRGEGLAFTGHYGMFLVGFLERIIARGSHASSSSQDISGSSPFR

SEQ ID NO: 1008060 - protein, 115 aa, Homo sapiens
KIGKNCGEDESAGKGEEMEASKSLEVDGDKQVERCIWNLMRQRNRNLENSNGFANELGIPVFAKKSIKLLSNGLANGLCIFVNLAKSWDGLAYMQARDGLAFRLMRYSRVRSSLS

SEQ ID NO: 1008061 - protein, 43 aa, Homo sapiens
PELSCGDSMLAKGFPTLSPGQGCQTFLSAPRRGWGVSGCPLAR

SEQ ID NO: 1008062 - protein, 80 aa, Homo sapiens
MIARPVMTESVPIILDVPTLLHSPSPETTGSRQGSSPLSIPGEDVRLGDCIIQGDQRYVVAPHHVLVENLLPVLQLYLNQ

SEQ ID NO: 1008063 - protein, 103 aa, Homo sapiens
IKVAPPECRSSRLELFLPPGGFLVSLALGVKLQTFVVSVTALKGGTDPKSQQQQHLAGRTKELSFHSMKSCCCWLRWPAFIPLSGPNHILLIGPFYRELIGPI

SEQ ID NO: 1008064 - protein, 68 aa, Homo sapiens
STACMTSLQCKDGGIPPHYRQTPRWKHYRGDHGRDKASLSALTHLQPHAHLGTSHTHWHTQASILHGA

SEQ ID NO: 1008065 - protein, 36 aa, Homo sapiens
LDVVSYYRNEYSQYSLQLLEAFRAGPFSLATSLYCL

SEQ ID NO: 1008066 - protein, 43 aa, Homo sapiens
SSLSGQLLNLAGPPGPDSASRRPLQSQRLPHSRFFTPSIYLTV

SEQ ID NO: 1008067 - protein, 102 aa, Homo sapiens
HHIISDSNTQPGRYVAHLGEKQNIYSPGTGTRTLTLLDIGPGHGKGAQVCVPGGPRAALLGSWSLGDGRHHPLQHPCTCKPIIDRTAAPLNPKEYRTQSSQV

SEQ ID NO: 1008068 - protein, 39 aa, Homo sapiens
GDGGRTHLRECHRSPRRVLPWASTRYASPDDPFPKGTAR

SEQ ID NO: 1008069 - protein, 48 aa, Homo sapiens
ARYRSADVNILTLQQSPGIVPRVLISTQASASFPSYWRSCPCAEALLV

SEQ ID NO: 1008070 - protein, 39 aa, Homo sapiens
EFSTPARWALMEDVDGYCYNGICRLTSVTVGAEHHLLHL

SEQ ID NO: 1008071 - protein, 62 aa, Homo sapiens
SLSPKNSIPRSALCTFGPGLGRGRGEECPAEGNARCSVCDTQRGGGRQRRGVPETNGNPNGE

SEQ ID NO: 1008072 - protein, 77 aa, Homo sapiens
LEDLRILLLLGNSPPPGESSSSYSSSSYIYIPPQEGHVGQARWLTPVIPTLVDGKAGRSLEEQEFKTSLANMVKPHL

SEQ ID NO: 1008073 - protein, 71 aa, Homo sapiens
MADLLYWLPRVPAPATSLHNGLPPAPRLMAVPLPIASSGAQWLATCNGCIPCQLSPSEICPYFHSSTWEAI

SEQ ID NO: 1008074 - protein, 65 aa, Homo sapiens
RDGSQVTHPSSCYDTFLSITGYANSLPVTDTYPQHPQVTPPLFLYQCFLIIHTSHLGGHHTWEDI

SEQ ID NO: 1008075 - protein, 35 aa, Homo sapiens
KKFNEARVSGVDAVSGVGCSQRRGMQSGALDAVSG

SEQ ID NO: 1008076 - protein, 42 aa, Homo sapiens
MLPITFDVVACYIVTRCRDQGRSGEELRNGTTSKEGSGALDA

SEQ ID NO: 1008077 - protein, 40 aa, Homo sapiens
ELITRTDCINAAHTFTNIPQLHPLSLDCSSLPLAGPKRPP

SEQ ID NO: 1008078 - protein, 68 aa, Homo sapiens
LHPYAADCILRRWMEREDSSRDKSGGTQMMMVVVTMVMDDVTLVVVTSSDKRTLLFTLNGASGGRWMQ

SEQ ID NO: 1008079 - protein, 36 aa, Homo sapiens
KEQEVNSQEYVTFLGALDLIYNEALKGVKINSGVGC

SEQ ID NO: 1008080 - protein, 62 aa, Homo sapiens
ILLLWYDADQYGGPPMMPMMGLLLPGMMPVGPAPGTEAAHGTAYAIMMPGPPSDETILPDPM

SEQ ID NO: 1008081 - protein, 36 aa, Homo sapiens
KAPHYVLSQLTTDNKGNSKAGNGTLQNQKGTGVTEE

SEQ ID NO: 1008082 - protein, 36 aa, Homo sapiens
MVMSGPVPGGSFVCGARALEWQESQYLPKRDIQNLF

SEQ ID NO: 1008083 - protein, 52 aa, Homo sapiens
MYVPATREAEAGGSLEIQEFWAVVRYADRVSALKFGIKYGDLPGAGGPPVLP

SEQ ID NO: 1008084 - protein, 42 aa, Homo sapiens
RAYDLSLIFSEHRVQLAGEIKQSGPPPAEKALSRQGPELLRE

SEQ ID NO: 1008085 - protein, 45 aa, Homo sapiens
MSRILVTEYVGALCLAQIGPGSVSKKCDDMPGTGDWKAQDFSELT

SEQ ID NO: 1008086 - protein, 71 aa, Homo sapiens
  misc_feature (33)..(33): Xaa can be any naturally occurring amino acid
  misc_feature (47)..(47): Xaa can be any naturally occurring amino acid
HGTRSVLPYSERCCLDGDGCCILVPKPFYESLXQAEARATSTPFFPXRPHIAPCHLENQERTLLCGSSDWL

SEQ ID NO: 1008087 - protein, 45 aa, Homo sapiens
MNDPRQTLNVPVCRSATLRPCMTQLSSFNANISGKIPCLGLVFNL

SEQ ID NO: 1008088 - protein, 44 aa, Homo sapiens
GGDIDGEHDRHGGQTGSRARIVSGPVESCKPGDACGWSASAPNV

SEQ ID NO: 1008089 - protein, 129 aa, Homo sapiens
  misc_feature (118)..(118): Xaa can be any naturally occurring amino acid
  misc_feature (127)..(127): Xaa can be any naturally occurring amino acid
ALRASEFLLQLSETMHEQSCPLEKKTSVLPNALHIFNAIRGTPTSTRAHGTTSSSLGEGLHLMARVWGLALSFANSGCFPKPITGETEHREEEIGGERGEERDGEELFTGMRKELLTXFGQLLWNYXIR

SEQ ID NO: 1008090 - protein, 53 aa, Homo sapiens
WRTGSPIRAPSLTPFSHEKAPPQSQFYFTQAVGVLQELDDLLVDLDHQRQSAC

SEQ ID NO: 1008091 - protein, 55 aa, Homo sapiens
METVCTILPGIILVLIARPSLSAVLDIHETTVSVLSLTVKSGGQQLVVKDEYIVY

SEQ ID NO: 1008092 - protein, 46 aa, Homo sapiens
PDAASASSQYSPYQYIYTSSKYSGFDLYFSFKLTPEWYPSVQVAEL

SEQ ID NO: 1008093 - protein, 39 aa, Homo sapiens
MTYVPDADLRHSLPLLLTTTRLLTYLTTTLHDTHLRISP

SEQ ID NO: 1008094 - protein, 43 aa, Homo sapiens
TRAGASPVTPLVLLPRFSDCVRYSDSCPSTDAYLGDSSTTSTL

SEQ ID NO: 1008095 - protein, 35 aa, Homo sapiens
LGTDYALDGQDDHLSPGVQGYSEGNNDWWVIVDIG

SEQ ID NO: 1008096 - protein, 39 aa, Homo sapiens
RNPTTEHIGRTDLLGCRPSTGDTSLDGLELPSLNAGAPY

SEQ ID NO: 1008097 - protein, 68 aa, Homo sapiens
  misc_feature (2)..(2): Xaa can be any naturally occurring amino acid
HXTKQHRMRQGTILRKEESCMQETSFLFYLRNCHSTLAFSNQHSDRAAPTHTKDPHEPKGYNSPKAQM

SEQ ID NO: 1008098 - protein, 83 aa, Homo sapiens
MGAHTDMEGWVKRCQNFLGLLLGEDELLILDYPVPLKGGSLLYSKAYSVGESWGRIAGITGRRGAEAEEREASFAASSAFLLP

SEQ ID NO: 1008099 - protein, 107 aa, Homo sapiens
GDDRGSGIVNQIEGEATPVNLTEPAKLDFKLSWFMPSVPYWILDTDYEKYALVYSCTCIIQLFDVDLAWIWARNPNLPPEPVDSLKNILISNNIECQTMTVTDKVKP

SEQ ID NO: 1008100 - protein, 42 aa, Homo sapiens
MGKLLLVGNLGRDNDDVTKVRLRNPTMDSQTSPHVIRPGKAE

SEQ ID NO: 1008101 - protein, 115 aa, Homo sapiens
CNGPLSETLGEADSEGRFDSVIVEAKYKLIQNRGHHSIILLFIYLITHGIINGIIHHLLLHIHDLCLQHKLHHDLQDLGHTFSCPFMLPMALVTSLHGLLAIEWLDLMCLDLEET

SEQ ID NO: 1008102 - protein, 36 aa, Homo sapiens
DNTHTLHDNVYDADGGLLDDVDPARDCNAVAPGPVV

SEQ ID NO: 1008103 - protein, 166 aa, Homo sapiens
VYWCDNDCLFLETTAERLRHYQATTTRTAKLGCKSRNHSWTHIKTEPLYSITLTGPIEQKYDFKSTNKKPRYTGDKKHDEWNGTSHLNSNMDSKWPKCSTYWIQNCRMDKNSPMNYRQLQETHVTHKDSDKVQVKAWHASFHANGYQKQAEVAILTSDQTIFNANS

SEQ ID NO: 1008104 - protein, 58 aa, Homo sapiens
  misc_feature (53)..(53): Xaa can be any naturally occurring amino acid
RVGTLYSAVWTVLGSDFCCSENNKPKDRSWMKPPQSLHLTPSQAAHAALAPPXYIWLP

SEQ ID NO: 1008105 - protein, 60 aa, Homo sapiens
AKYLRILRCRCQRLSIKTAAAVSNCARRRSKGHCWKHPGSYECLCKPEFTGLTCIKQARV

SEQ ID NO: 1008106 - protein, 59 aa, Homo sapiens
HCTLPCGCPGQRFCASENNKPKDKVWMKPPPDASTDPLPGCPVPLTSTYIGSFSQAPGS

SEQ ID NO: 1008107 - protein, 30 aa, Homo sapiens
MRIKRDIDGADLHDDHAMDPYIGPGKITSG

SEQ ID NO: 1008108 - protein, 129 aa, Homo sapiens
  misc_feature (49)..(49): Xaa can be any naturally occurring amino acid
GSLPEGGAGVGDGMRCHLKILPDVKALPMLEGPSQEKYSRTRGLGLLAXRIQFRACVCLVVHLPIWTQRKGKLLASEDPDSRNGAAMVGSKKDDTGEGILPQLVQSLEHSSDEIAAHEGLSEFFREAIL

SEQ ID NO: 1008109 - protein, 61 aa, Homo sapiens
MCQRAQSFCDSPGEKGGAKRLALLVLALPASGLGEERATISYILTLTDEQFRVQDQFPVTP

SEQ ID NO: 1008110 - protein, 52 aa, Homo sapiens
GATGIDISELNMGWCPLGRSGCGCDLSELQVSWVQEEWLRQSGTRRLTLSRL

SEQ ID NO: 1008111 - protein, 40 aa, Homo sapiens
MRALVEHGLHLLKPRWENTGCSGPWMPDLPGTMSPSGIMG

SEQ ID NO: 1008112 - protein, 56 aa, Homo sapiens
DSVIYVFLGLLGLLALAGTLNQIPPSSSLPGPISRQPLFCFRVSLVWSYQEVYGQG

SEQ ID NO: 1008113 - protein, 38 aa, Homo sapiens
RSEVLGGGSRGRSPTTELVGHSLGNTNPNLAKTAGDIH

SEQ ID NO: 1008114 - protein, 91 aa, Homo sapiens
MRPPPQQNIYPSRCPHRACVTSLRSNMPSPYKHSIHPVLSPPWDLWVILEDTIPTLFQVPKNTTRDNSFREGFHSSLRHKCTRIFVRAALG

SEQ ID NO: 1008115 - protein, 86 aa, Homo sapiens
KGRHEPGHPYNPVRQPNSQDIPPGITVTRTKRAPTSNLRTGHYTNFYIGIPAHASGQTESASHSIPEETSHEVNPSIFDRFYTYYS

SEQ ID NO: 1008116 - protein, 152 aa, Homo sapiens
MLGSLNLGGADKIRIVSRALIGFLITPHLLERLEIINEDMAKRTCEEHQLCVVAVLPHILDTGAAGRNSDLEVLLKWADKYKKENVGVAVDQKLEPSLNLRPRWGWQGSGTRPGPAINARKMKSALLQGSFSEQGINESLRELSTGRGSTAP

SEQ ID NO: 1008117 - protein, 81 aa, Homo sapiens
PPRRRICRTLSSDYILSENAPRHNSFTHPLASLLPVASLRTRALGKGIYSRETRTLHQMMTLPLSPISMEPDTKLGNCQTI

SEQ ID NO: 1008118 - protein, 87 aa, Homo sapiens
VSGTDTFVKINSIMKTLPRQNSLTHPLASLWPVARSGNSGIGQRGLIIRETRDSGIKWMDIHHLSHICYRNQDTKTNGNWHKPISVE

SEQ ID NO: 1008119 - protein, 115 aa, Homo sapiens
SSDYGTYLAEHSRGALVLQVPWSAGAQVNGAKLVAAGPAVLLVSGSPGERGEVGPAWRQMDLLVLLGSQLVNLVLNGDRRQPKGLRFETGLYVGPTGPYGAAGPDGPNWSPRYLL

SEQ ID NO: 1008120 - protein, 46 aa, Homo sapiens
MHSHAHPRAPCQAHTPHVPMHPRACARQFVAESVVMPSSSREEVEV

SEQ ID NO: 1008121 - protein, 37 aa, Homo sapiens
PQFASSISSSILSPHVIRHMCSLYTPAVSQQFTNHGA

SEQ ID NO: 1008122 - protein, 46 aa, Homo sapiens
HPWLCSSYARAGPPEVTFPLHQARRDSLAWSVASTAWGTLRLFSMP

SEQ ID NO: 1008123 - protein, 44 aa, Homo sapiens
SPLFCAVVCYAIMGVATKFGIIMVTPGTVGPTRLPKAGGGILPG

SEQ ID NO: 1008124 - protein, 30 aa, Homo sapiens
MEDTSDFRKQPRLLSIMNRLSRKQNQQKEP

SEQ ID NO: 1008125 - protein, 53 aa, Homo sapiens
MMRKAHPRAHVKQAADLETLLPPIRGNVRLLCSPQEDLTDDQGTCCMATQGAS

SEQ ID NO: 1008126 - protein, 53 aa, Homo sapiens
DRNSLRSPPGGRYMVMNWITVLMYAAWAWGALSPSSCCITIGQRLCTCTTFTL

SEQ ID NO: 1008127 - protein, 30 aa, Homo sapiens
  misc_feature (5)..(5): Xaa can be any naturally occurring amino acid
  misc_feature (9)..(9): Xaa can be any naturally occurring amino acid
MLEAXSSSXSSSNSPSSSAVASWYCWYSDT

SEQ ID NO: 1008128 - protein, 86 aa, Homo sapiens
GYGSLDVFMTEMAGAMLAPDLLYRSADPWTRLVIIFTIFIGQYPYSNLVGPSWPRGMAQDDQWQKPRASPLASVAREPIHQYVSAY

SEQ ID NO: 1008129 - protein, 89 aa, Homo sapiens
PESTDITFQWRENCSESRPSTPKSYISMPILTRALILDASPQLHTRDTQHTHEHSTHTSTAHTRAYSTHTNAQHTQHTDEHTAHTQGHS

SEQ ID NO: 1008130 - protein, 33 aa, Homo sapiens
THVHSHSCLCTLTHAHTCTYPHTCLCMLTITHS

SEQ ID NO: 1008131 - protein, 128 aa, Homo sapiens
PGLSDACSCDMSSHRSTFKIEKRSEELKGCDVEIRSRVQYESPISTNEEKVDTDDRTEGYLRAEPQEPSHFDSQQPAVLEEEEVMKLMLIHRKSTMNMYPDGARINAIHISTITLGQSDDLIQQHHDY

SEQ ID NO: 1008132 - protein, 124 aa, Homo sapiens
RYIAHPFCVDVCGTWTLLSQLQSSPGHLQAYVGLSQTWREPGAAGSTFHLSSSFTPGGGSALVVSPLQGAHLHVFFWGEYVAKLTNLQTLEIAAVESCLGLAKTFPLSVSTTVSCLPETLSPAI

SEQ ID NO: 1008133 - protein, 155 aa, Homo sapiens
  misc_feature (49)..(50): Xaa can be any naturally occurring amino acid
RILCTASDAGLGAHGWGLSSVIGKGSGCKSPIAYCPQRATALVRYNLSXXVTYKGSLCHHRQVARKENSEAPEEQQADLPAEGTQDSEDMERLDLELSMRLCGEAEPGWGCYAPGGLKCTTATTVMTRVTIITQNGCDGCSLLSAFLDTDAAGAG

SEQ ID NO: 1008134 - protein, 75 aa, Homo sapiens
LTTETPHVTAHTNDTLKMLNHRHYHTAPERISTRTLIAITQHTSTQHTPRHSTHMHTQHTHANTAHTNTAPSRGS

SEQ ID NO: 1008135 - protein, 75 aa, Homo sapiens
MSMSGVAVPEDSVLPGVISLGCPFGCLNTPGTASRAACLELRRFCVAHSPASYALDRMQFGVPLARNQLIHKKLA

SEQ ID NO: 1008136 - protein, 154 aa, Homo sapiens
LRESWLRLQDTGSGNSRVFDPRRPLDLSSTWVFGVRWSPSGKTLAYAGHNSMVYFIDEVESSPAAQNLALLICLSVMWVLFVSERTLIGVGFDCNPMIFAADDTGLWSFIRFLDERKAAPSASKASQLSEALGKLYGQSKQGTSSDTVEPSKPR

SEQ ID NO: 1008137 - protein, 113 aa, Homo sapiens
  misc_feature (43)..(43): Xaa can be any naturally occurring amino acid
  misc_feature (80)..(80): Xaa can be any naturally occurring amino acid
  misc_feature (94)..(94): Xaa can be any naturally occurring amino acid
GGDHGTRGLTGRCSFTLHLETPKPSISSSELKSRGRPWTAVSXNSVTLETPERKATKWWHDMVTSLPYELTGLRAVREPXSEPSFYLECTQSIXCEDPMNCEHSGTPVTCPAA

SEQ ID NO: 1008138 - protein, 110 aa, Homo sapiens
  misc_feature (99)..(99): Xaa can be any naturally occurring amino acid
  misc_feature (102)..(102): Xaa can be any naturally occurring amino acid
NRLVTVSYRSKAVDGDVVLKSRGMRCGKVRDKKKRITLKIDHRDWEDRGGEAFASARSRDSDIFLRVTVCALPVVRHRALSCTGPGAGILVERTHSPHXPQXHGLTFVTN

SEQ ID NO: 1008139 - protein, 46 aa, Homo sapiens
MEDVSSSDRVLTICQLTFRQRSTSAGQERMPSLIHGSICFDSSRMV

SEQ ID NO: 1008140 - protein, 109 aa, Homo sapiens
RRGGCFFTISLHPDSQNLFAFTWTDPDTLQSQQLTWTVLPQGFRDSPHFFGQALARNLTSLNLSPSHLQYVDDLLLCSPSLKDSQTHTATALLNFLAIKGYRVSPPPRP

SEQ ID NO: 1008141 - protein, 145 aa, Homo sapiens
TGAQHMEDASLHFPTPVIQNLFALTWTDPDTLQSQQLTWTVLPQGFRDSPHFFGQALARNLTSLNLSPSHLQYVDDLLLCSPSLKDSQTHTGTALLNFLAIKGYRVSPSKDQLSISMMTYLGIQLSPGAQAMNPARSALIENLAP

SEQ ID NO: 1008142 - protein, 100 aa, Homo sapiens
RGPGYDSSHGSIIENLPPPSSKSEILSFPGLPGFFRIWISNFALLAHPLYEVAKGPPNEPLNPSHNILPSFHKLQTALVTASAPSLPDISQPFTLYTAES

SEQ ID NO: 1008143 - protein, 145 aa, Homo sapiens
CLSYMEDASLPFPYTLIPKTYLLSPGLTLTPSSHKQLTWTVLPQGFRDSPHFFGQALARNLTSLNLSPSHLQYVDDLLLCSPSLKDSQTHTATALLNFLAIKGYRVSPSKAQLSISMMTYLGIQLSPGAQAMTPARAAFIENLPP

SEQ ID NO: 1008144 - protein, 74 aa, Homo sapiens
SSTVWRMLRLPFPYTLIPKSYLLITWTDPDTLQSQQLTWTVLPQGFRDSPHFFGQALARKLTSLNLSPSHLQYV

SEQ ID NO: 1008145 - protein, 88 aa, Homo sapiens
LEDLVMLRMGSGQWGRGQAGGSSYESGWHKAEQEPGVTVAEAGLDQAQVCGQNSAAVVDAEALGDRLGATAGKGAADGLASTCLAKGR

SEQ ID NO: 1008146 - protein, 52 aa, Homo sapiens
LILPFGLATALIRGDKSELRVFHSHFGGTKFNINVVVKKYNGSVDFFFSPNH

SEQ ID NO: 1008147 - protein, 44 aa, Homo sapiens
GGDGSHGGGSGSVQGDVLMEAADTGESDPRKGVSENIMAGASGL

SEQ ID NO: 1008148 - protein, 56 aa, Homo sapiens
SSHLTVLISLNDSSTLTVLISLTRLHNVKQTLSSVNNLTIPLHITRETSSYPELER

SEQ ID NO: 1008149 - protein, 51 aa, Homo sapiens
IFNWLIFTLVTSKSVMVSILGLPISTGAFPTSGHQLNTFREKRAGLGPQKF

SEQ ID NO: 1008150 - protein, 50 aa, Homo sapiens
IPDAEQMLDTMLPTQLQKHEPVKPLYKLPRLRYFFIAMQEWSNAYAHCNI

SEQ ID NO: 1008151 - protein, 57 aa, Homo sapiens
LSALLVHSTHMQGCWFWVCFAFTCEQWAVSSVLVPGPGYYFLPHRKYSLVHISFSLY

SEQ ID NO: 1008152 - protein, 49 aa, Homo sapiens
SSVRRFLWMLPSFLDETGRWKLDVSPDGFPAHITQELAGDWTWEREHCC

SEQ ID NO: 1008153 - protein, 40 aa, Homo sapiens
GNLIVTEIFCVLHPLMVLLLPGEREVKAGVSQWFPATHPG

SEQ ID NO: 1008154 - protein, 78 aa, Homo sapiens
RRLAFHRAVCKHCTVGRHGEVKSEHCNQGETQGSEEWDTDDGRVGESSRVRARQGNKRLIAVKRRRRNTRDAEDDGMR

SEQ ID NO: 1008155 - protein, 132 aa, Homo sapiens
TGLSIFWEDRKGMKHDNERVKNLSDKRYAGSEQHNPKETCHREKLVYWKNYSSGKIEPISYSPPTSYAQNTGSLHYGYQLKISGDGGCGGWYKGMEQAARREIRVGAPEKTFSSSGNTCPYPQPVSYILYGQ

SEQ ID NO: 1008156 - protein, 37 aa, Homo sapiens
CDLEDPSRYISWDGVRRGIKAKSNGSLIPEWALTQEP

SEQ ID NO: 1008157 - protein, 51 aa, Homo sapiens
  misc_feature (4)..(4): Xaa can be any naturally occurring amino acid
GSLXETGSQVIISQGKGTIARTGGRSKAALAQPYPSTALESAQSRKHSTLV

SEQ ID NO: 1008158 - protein, 34 aa, Homo sapiens
MVFTFNILTGKMEGVGDVCGFPGLTGKPSNLSTG

SEQ ID NO: 1008159 - protein, 67 aa, Homo sapiens
HDGMCDLITREPESCALSIPSPHENTARMAATYKAREESPHEEPRWASTQSLGNSHVSRSCEKIHFL

SEQ ID NO: 1008160 - protein, 50 aa, Homo sapiens
DNSSSSSSRQSMTAWIDGKHVVLAQSRGHGGGAEELGAVVNPEGLLSTPR

SEQ ID NO: 1008161 - protein, 39 aa, Homo sapiens
MRKFKALISIARRSVMMIMAIGSIYRARVILTSGRRPMA

SEQ ID NO: 1008162 - protein, 74 aa, Homo sapiens
LRMRSYEALFPEKEIEANPEVDSLAGKPNDDDIREPDWNLIARAARFGTNLHPKSIYKSCHILGAGHLVSLHYH

SEQ ID NO: 1008163 - protein, 107 aa, Homo sapiens
RVDIEDLTWGGDCHADSEWKPSPFSHSCSEAQTQMLPPPSPVSRRQRLQSPETILPASTPVPTPATLTVGCPRKCHGQEPRSFTLASSLPGWAPQCLQSSLCRALEI

SEQ ID NO: 1008164 - protein, 76 aa, Homo sapiens
LIRPQVGPGCEYTERSENLRCFSRLTRDCPCTKQHTLSSEAHKNPRTQPDLGRRQDDLLMENSCPLWVSLSCSVTQ

SEQ ID NO: 1008165 - protein, 135 aa, Homo sapiens
SWQCRREVVCHLPVHPGDVCGRGETCSGQPARHSQTGPAPPACSPGPRDAFASSWEPSFALRLGPSQACRPLRQQCPHQAHPVGLVWGLVIVARTGGRSPASCGASQPPTLAVAWDVHGWDDTTLLGHTKLRIGC

SEQ ID NO: 1008166 - protein, 52 aa, Homo sapiens
TGLIPYRHELIAIPHLIPRDTGQQEVLLERDPVKRSQKLDIKNKKVQTVFQV

SEQ ID NO: 1008167 - protein, 34 aa, Homo sapiens
MPLYSSLAQSETLSKKKNHDTSMEVMFWVSLPAC

SEQ ID NO: 1008168 - protein, 67 aa, Homo sapiens
MSSPWNEEDWDMTGTRTFELSEGKGLLAQKIGAKIHLNIPYHKWPNLKAFKQILPSQHFYVLSFALC

SEQ ID NO: 1008169 - protein, 41 aa, Homo sapiens
MIMGPSAFALILGPLVLLALILGPLGLLALVLGPLYLLALI

SEQ ID NO: 1008170 - protein, 69 aa, Homo sapiens
CLKRRLKGMLYTYLTSCRVLGPPAEASQITQQSTNQSRNPDTTNQTEFERSSEGRRLPLGLLCKYSSAM

SEQ ID NO: 1008171 - protein, 114 aa, Homo sapiens
DLFLEDTILLHHPPFRYPPDLYTTLVGRLLEDTISLNPIHCYLLPLRVTPGKYHPHPPSILSPPPLLPVCLIPGRYHLATPCNLPISLYPSGSFRDDITTSSLPCFPTVTIPHS

SEQ ID NO: 1008172 - protein, 38 aa, Homo sapiens
MGSTTSEEKDIGQGTRHSLRSGADAALVGGQLVASTVP

SEQ ID NO: 1008173 - protein, 73 aa, Homo sapiens
MDETTQKKKNWDKWKSVFSHHWVFSKKKITAEIRNLIQKVVFILCPLLGGRLKEHHYMGRTQDGIVHWAWEIL

SEQ ID NO: 1008174 - protein, 38 aa, Homo sapiens
RISFIPLRRGERGNTSKKRLVQSPNFLLHWTVNMPRDC

SEQ ID NO: 1008175 - protein, 54 aa, Homo sapiens
  misc_feature (50)..(50): Xaa can be any naturally occurring amino acid
GARDVGRSFRLGEAGEASGTQPAASHPAQMEGGRACAGTCQGGYTRQRTXSHRG

SEQ ID NO: 1008176 - protein, 84 aa, Homo sapiens
  misc_feature (84)..(84): Xaa can be any naturally occurring amino acid
DASHGDCQGRSHAKPSIVEDVHGNLEATPNLTQHVLQSGTAYSTQMNTLCSCSETPCMPILLLRVAHGLYAPVSRPLHHKSCDX

SEQ ID NO: 1008177 - protein, 50 aa, Homo sapiens
MPISSGFLRQFRFGQKGLYRTYFIFRLKPLAVNNGGAELVILLLADPHFV

SEQ ID NO: 1008178 - protein, 124 aa, Homo sapiens
MGGINHTLIVMLLAAVQISSHENHYAFYHIAQHLSSAYDSIALTYPLKVGCGLVTSVGQCNETSGSFKSQYMTHILFSPLELLCQSLSCNKDYKKQSTQPVLNGSVIIIKNKTLLYKLLIYGIA

SEQ ID NO: 1008179 - protein, 60 aa, Homo sapiens
MEETQQKINLELLRISLLLIESWLEPVRFLRSMFGNNLVYDTSDSADYHLLQDLEEGIQT

SEQ ID NO: 1008180 - protein, 59 aa, Homo sapiens
KHPNRKNATRSNGEIYHYIVSTKPVLLRLSEVSSGITKTTAMVKTAYFATTKHINSVGR

SEQ ID NO: 1008181 - protein, 34 aa, Homo sapiens
ASKGHVWLPSLATMALLLLRFSCMGLQFTDRLER

SEQ ID NO: 1008182 - protein, 33 aa, Homo sapiens
IPEPGLTLDVRQGDEVSVHYDPMTATLVVWAAD

SEQ ID NO: 1008183 - protein, 84 aa, Homo sapiens
IARLESGMQNMSIHTKTAGAMQVAELGYGGSQARGSATVWAPALALGRAPGPSGGPGAPGAGFVMKIETRDGKLVSESYDVLPK

SEQ ID NO: 1008184 - protein, 34 aa, Homo sapiens
RESSALDDVVAGGQPSAAGGGPKDRVARTGWVES

SEQ ID NO: 1008185 - protein, 79 aa, Homo sapiens
  misc_feature (76)..(76): Xaa can be any naturally occurring amino acid
NNQSEQSREALNLLEKREDRKLQKRRDRRAEKKKREVVGTGVSRLRSSSSWIILLLVVHRPPQGVAVKIESPVRGXYES

SEQ ID NO: 1008186 - protein, 31 aa, Homo sapiens
MSRPCSNVFLKQLEQPVVLEPVLSWLCAVCV

SEQ ID NO: 1008187 - protein, 122 aa, Homo sapiens
AKIYRMKSLTQVNHYHRLACGFLQQNVTEHIKPETADKAMATTSQMFHPVEGLGCTLKLRVACDMKPLTCVSYDCWFPPELRGSQTVAGLQIGNWQDLYCPGLVIHPLHTKGHLIPGWLGLL

SEQ ID NO: 1008188 - protein, 58 aa, Homo sapiens
SHLYLSCMVFSDLSRLPYSDLTLPGLLCDSTMVFIHTSRSSTCARWRISEDLFGLALS

SEQ ID NO: 1008189 - protein, 50 aa, Homo sapiens
LLWVYAAAYFVTARWRRAVTCTDFRYCSPLPDVPGWTRLTTRVPELDLRT

SEQ ID NO: 1008190 - protein, 163 aa, Homo sapiens
MGYHRVGQAGRELLTSGNSPASAPKVLGLQCMSHRVQPKTVLFKNSIWLIFQTFTSVLKVCHVGLHPGIPFSSVGFGHAFQNYTGESFHWKYNNPVLKIESGQVEGLPFLASLRLRPPVQWPWSTYMHICTICFMSKSVSTVSDDIMALVCHIVLSLVCGIDT

SEQ ID NO: 1008191 - protein, 55 aa, Homo sapiens
RAGPEISGRENAHEKAMEVNSVRILVPKAAITHDIPNKNTEGSVSGTSERENSVG

SEQ ID NO: 1008192 - protein, 38 aa, Homo sapiens
PVCSACGLYYKLHKYEADPWTMKKEGIQTRNRKMSSTS

SEQ ID NO: 1008193 - protein, 110 aa, Homo sapiens
SSTWGDAVPPGTHELDIAYWSRLDRAGGMPLETVRQQCLPAGRESSSRLQSGSQSQSIGRASFGSGHACRSGVLGGTVKSWNPAREKVPSTPASRIAGDSSSELGPAGSA

SEQ ID NO: 1008194 - protein, 95 aa, Homo sapiens
RVVSYQFPLTSLLYLGPIHHGDTSLADVLVLHWFNAVGCTQATGLEVALNPAQVGRGCGSTVCHMFVYIVLSCTEPHYVNAVHEPGDISMAALAQ

SEQ ID NO: 1008195 - protein, 55 aa, Homo sapiens
MVMHEESTALAWGLRQQRRRPRRCDLDVIGVYSDSREGFQLQHGVIPRITAALWR

SEQ ID NO: 1008196 - protein, 127 aa, Homo sapiens
TWRAVLVSSKSVLLPADIITYSAPEDHPGIVSGVDCAIFESPYPMTMALSVLLTIQMCNALNSYSENQSLLRMPPWENIWLVGSICLSMSLHFLDPLCRTLDQRTVQFVPYQFYSEELPVLAHGALA

SEQ ID NO: 1008197 - protein, 50 aa, Homo sapiens
LRNWYGGADGEEEEDPTEEERERKPPALPESMSANSVMESVPARYGALAQ

SEQ ID NO: 1008198 - protein, 64 aa, Homo sapiens
QLRSDELLGSPAAAGDGHCSLSVPSPEGSCCPHPGSSPCSPGETKQIIKGSVCNPSTLGGRGGR

SEQ ID NO: 1008199 - protein, 108 aa, Homo sapiens
INSGPLYLLYTSSLAPVSIQYHSPSSPHPIKITPPSSPHSILSYTHPVHTPGPVQTLLQYTPHPVHTPSRTQPNPVQHPIQSTALLVYTPSRTNPIQSKELKIGPNGD

SEQ ID NO: 1008200 - protein, 74 aa, Homo sapiens
TVARTCWATHRDMEGLVKRCQNFFGLLLGEDELLIFDYPVPLKGGSLLYSKAFSVGEFLGRIAGITGRRRCVGP

SEQ ID NO: 1008201 - protein, 34 aa, Homo sapiens
MSNGGSARNIISNMMDSQSPTMSTTDTRYSISPT

SEQ ID NO: 1008202 - protein, 103 aa, Homo sapiens
MTFSSLLVCSFAISLPSLLKYLYKSSIFVYLHFIDWRTSSLIRVAQAGRAVARFSAHVQTRALPGPSSVSCLSLPSIWDYRPVPAGHPPTAALAGLLALPLAV

SEQ ID NO: 1008203 - protein, 157 aa, Homo sapiens
REEYRQSPYRTCQCPHPHHHTIIHIYLHLLLLEKKICVLLSEASFSILYSDTLLPETPVCISFSFRPSSFSVHIVSPEADYSACWSPSLCFCNFPRVSSVCCCRSAQIAFHSLLSCLALRQQAATQGGAAVSTKHGDLVIPQAAEPLVLPSCLQQTV

SEQ ID NO: 1008204 - protein, 97 aa, Homo sapiens
RSSSPDLLLRSLTDRRTSRVFSSDPDTYIKEFKYLTQSYELTWHDLYFILSSTLLPEEKERVWLAAQAYADDLHQQDPTKPVGAAAVPWEEPSWEYQ

SEQ ID NO: 1008205 - protein, 37 aa, Homo sapiens
MVHGQRRKSKGLLPPLPAARFHLARACCFRESPDLSP

SEQ ID NO: 1008206 - protein, 78 aa, Homo sapiens
  misc_feature (22)..(22): Xaa can be any naturally occurring amino acid
MDSTQVVLQKGNQMASLASWGXRVAALWKQQICFTVLSNFSHQTLEGTFANQKFSGLLITSNFTERQQYQAWNDKVSS

SEQ ID NO: 1008207 - protein, 112 aa, Homo sapiens
PIDGQWVGGCSPGCPWGMPGCPGMGCGLELAYLAARCLMKCSQVAGGLAVRGYYSTWLLLQGESWVDLSSPQNGFEGLVETHVPGFEMGVIPYLGPSPVLWQPMFKGLTSAR

SEQ ID NO: 1008208 - protein, 79 aa, Homo sapiens
VMLPVDQHHDRACSVPHLQKVFDRYKSYSPYDMLEGIRKEVPGDLEDAFLNLVQSHSEQAPVYTAERLYDSMKGKGDAR

SEQ ID NO: 1008209 - protein, 51 aa, Homo sapiens
DSITDPGGVVTFGAERLLKFFWVVSLVKRQETRAGMMSGPHLWDVRYMEVS

SEQ ID NO: 1008210 - protein, 35 aa, Homo sapiens
AVVPATREAEAGQWTEPGRRAAVSRDSVSALQPGR

SEQ ID NO: 1008211 - protein, 67 aa, Homo sapiens
IASGDEQRAWMMARLQPYRVETTDGNPDGLLTAYYEPLMDAARQPGNGFNVPIYRTPAGFGARKPWY

SEQ ID NO: 1008212 - protein, 77 aa, Homo sapiens
FDRIMRTWSFPDLTGLITMSEVFIPFSVTLGVSGMTRTRTCCSGARPMQFGHVHVELQHTIAAKALMSCFYTFALPD

SEQ ID NO: 1008213 - protein, 125 aa, Homo sapiens
MSTCCHGSARFVSDIAVGLLEDLPSTAGAVYQPPHQREDAFRKVLYEVDSHRCPRGHTPGWLANILLRNRTGSSHDSMSSREMRSSSRLDFCCVSSMLEGVGIESEKQKEVWESCRNEYFWSLGI

SEQ ID NO: 1008214 - protein, 50 aa, Homo sapiens
MAVNPSCAEFASVTAEERRGLGTSPDPTNWEGPLLLPYSWDGSKDMGAAV

SEQ ID NO: 1008215 - protein, 37 aa, Homo sapiens
ADEEIGCDSYLHGTLQNSVNWIQAATGIKNMPPWLPL

SEQ ID NO: 1008216 - protein, 37 aa, Homo sapiens
RGTHCRLPVPYPAWPAAGGFQLLLLGPSILERQFPAL

SEQ ID NO: 1008217 - protein, 39 aa, Homo sapiens
HYRNSSTSASIALARDCVQHASCSLLQVTAPVLEPAPVH

SEQ ID NO: 1008218 - protein, 40 aa, Homo sapiens
MLGLPVCARCQLIGNWLIETRSYCVSPAWSQTPGLKRSLH

SEQ ID NO: 1008219 - protein, 35 aa, Homo sapiens
VTLRIFRELTFQHDILTSIYIPLRKSTNPGVYFIY

SEQ ID NO: 1008220 - protein, 71 aa, Homo sapiens
  misc_feature (7)..(7): Xaa can be any naturally occurring amino acid
  misc_feature (45)..(45): Xaa can be any naturally occurring amino acid
  misc_feature (49)..(49): Xaa can be any naturally occurring amino acid
TTRDGRXDGEEQREGDIEREEDEEEGNKKQKKQGLKDARLNGLPXTLKXQQRNPLCRVPHEQVQNTQRRTG

SEQ ID NO: 1008221 - protein, 79 aa, Homo sapiens
GRCNETRYDLTKSLPKILGPGDHLHHKDSIEAQDEKTHAPGQAQWLMPVIPALLEAEAGRSRGQEIETILANMVKPCLY

SEQ ID NO: 1008222 - protein, 118 aa, Homo sapiens
MSLWLSDGQLEDRPVLEVSFKGPEQPGWCQFFQEVGVELSVKKHRMLRKPQKGLPKWSLEPSLWRGLLLSASRRGLLPSPSAEELALGTVWRSYTPAAPPLTEMVYEKPPGGVGWVES

SEQ ID NO: 1008223 - protein, 33 aa, Homo sapiens
TLSPTPAGSMTPATRHPAEELGSGMLWWLVVNR

SEQ ID NO: 1008224 - protein, 41 aa, Homo sapiens
RVIQRIPSSGKGERQTVGLTVPICQSMRHCLSSSASWDHYS

SEQ ID NO: 1008225 - protein, 46 aa, Homo sapiens
KDIKEVRALSVNSEQCRHCRRRRSQSRAERGHEGQGWIKEPRHQEK

SEQ ID NO: 1008226 - protein, 36 aa, Homo sapiens
RVRMCGDAAVLALQRVLEEPGTAAQLREGSSILDPV

SEQ ID NO: 1008227 - protein, 34 aa, Homo sapiens
VDLAGIPHRGTTVRGPAALQFCQSSGPSALFPVC

SEQ ID NO: 1008228 - protein, 99 aa, Homo sapiens
MGTRMMLYRVLLQRSTIYVANFWAAGDRARMLRAAASVMDPPNPFTFWNFCSGCRVSSRGCARVNRLDWAHTQLHPLPTCVYSHERLKVYQGQEQRRGV

SEQ ID NO: 1008229 - protein, 132 aa, Homo sapiens
YEDLVNCFGLCRSSAAQPAGGAALCTGISWQRAGPCATPQGDNGSLEATFVKRCCHCCLLGRAAQAQGQSLRVQAHGWVPVWTGLPGHAVSKSQETGDLDCRGPPRKDKIIEVEAEQEDPYLEVIAGEEGGP

SEQ ID NO: 1008230 - protein, 60 aa, Homo sapiens
  misc_feature (32)..(32): Xaa can be any naturally occurring amino acid
MFTFRCQRCHIYPHKCGTAAANFGTDLLCNVXAKGSFYTGVTEMLRCTTFWNNGMSGRSR

SEQ ID NO: 1008231 - protein, 31 aa, Homo sapiens
MCFSVWASTQLCVPGKQVASYSAPTIRKHVA

SEQ ID NO: 1008232 - protein, 32 aa, Homo sapiens
MVIVLLGLEEQARLEGWRGVQCYRRRRVQRPR

SEQ ID NO: 1008233 - protein, 60 aa, Homo sapiens
LLRMLGLVDGFSGVTLLYPGTIGSVCTQSSCPAHVCRKSGALDRSRCQPVSTVPNPKQYA

SEQ ID NO: 1008234 - protein, 70 aa, Homo sapiens
MRSNQEYTPSSSQGAKPEANIQIQEIQRTPQIYSSRRATPRHIIVRFTKVEMKEKNVKGSQRERSGYPQR

SEQ ID NO: 1008235 - protein, 34 aa, Homo sapiens
TGALTSNSEGSRSALRSLEYLLLPGTALTFEGSR

SEQ ID NO: 1008236 - protein, 77 aa, Homo sapiens
YSEDRREPYLGYQGGGNPVNPRPELQNIEQRDNVTLVSQSQHNRGPLTTKCPALNNCPNTINRKSKANIRLQTRHTC

SEQ ID NO: 1008237 - protein, 53 aa, Homo sapiens
MNRHKENLKSKINDKRMTEICMWIKIGDVIKLHPPMEPLDQKTKAGNSYWLSN

SEQ ID NO: 1008238 - protein, 36 aa, Homo sapiens
VFCSVYLCLACDPGYLWTLGLLVLRFQISAFSVCVD

SEQ ID NO: 1008239 - protein, 54 aa, Homo sapiens
YVVEDHTHLLAVSTGMAITGLDLLLPPALHSGKSNSMHKRHIDLTHHTNRASIY

SEQ ID NO: 1008240 - protein, 37 aa, Homo sapiens
MARMVGLQKRVWLKKVLILLKYVFSWYNMIYQTSSLL

SEQ ID NO: 1008241 - protein, 67 aa, Homo sapiens
SVFLVQMGHPVARVGEGPVPLSQWEEVPRAVDVRVAGGKPHGSLHGGNMSMANRARPTERRYRHVCP

SEQ ID NO: 1008242 - protein, 53 aa, Homo sapiens
QCSSVMLQTALKEGEQIQESGFKPNGIPGGPKGLFLTQVLAIWHVQFLNKSGL

SEQ ID NO: 1008243 - protein, 38 aa, Homo sapiens
QAGLNGDSRVFRWWGAHSHGAACSSAMRFHVIQSCSWL

SEQ ID NO: 1008244 - protein, 47 aa, Homo sapiens
VREDPQCSSLIGQADSGAHGQSPITAEQPRAEGWLGDREMPQSRDWD

SEQ ID NO: 1008245 - protein, 82 aa, Homo sapiens
ATVCANNNHVMPTYKCLAISTKSEFLSSLHPFHIREELSPMCIILIYMAVTDEDTPRTEFDSLPRAMKLLLGSGVSTLVAKC

SEQ ID NO: 1008246 - protein, 68 aa, Homo sapiens
RVGLSSKAVEIQQISLQVLCALVTGRAICASGALRHKDFKLCSQVLSLTLQLPAYQVEDPTKVRLTHL

SEQ ID NO: 1008247 - protein, 150 aa, Homo sapiens
GDRGSSGALPTTSFPLHGFVSMAESWELWASAVGTGLFSNCDSICSLSSFSSGVDIILLLAGVIQAAQGLSQLAHRTVPLPPQVVTQCPDAVTLCYNLVSLLEGPVPPALGHIRPLEGFLQLLAQSLDLFRRIQPPCWSPSIHWSRSLIL

SEQ ID NO: 1008248 - protein, 72 aa, Homo sapiens
FGSLTLGYQCGGNPVNQDRLQNIEQRDKRDSGIPESTQQVTSHNQVSCLKQLPKYNNRKSKANIRLQTRHTC

SEQ ID NO: 1008249 - protein, 44 aa, Homo sapiens
SKDLGSLNLSLQEDNVGKELLEIQEFESSLGDTARAHLYKKIEK

SEQ ID NO: 1008250 - protein, 107 aa, Homo sapiens
  misc_feature (1)..(1): Xaa can be any naturally occurring amino acid
  misc_feature (45)..(45): Xaa can be any naturally occurring amino acid
  misc_feature (91)..(91): Xaa can be any naturally occurring amino acid
XDLIKVLEDMRQEYELIIKKKHRDLDTWYKEQSAAMFHGGSQSSXLCRARQGDISTELNAHISMCPGGFDPAWRRYNALKFLLVENIVIAXDPCLWYSLQGSMDHCK

SEQ ID NO: 1008251 - protein, 44 aa, Homo sapiens
  misc_feature (13)..(13): Xaa can be any naturally occurring amino acid
PAGCLYDGLPEPXPVTPTRTNTTPAVSGLRAGVPVRSTSSYTHV

SEQ ID NO: 1008252 - protein, 39 aa, Homo sapiens
SRDPCGDGSQEHIMDTISMYKALSFFLLDYGKVLTFVLP

SEQ ID NO: 1008253 - protein, 61 aa, Homo sapiens
  misc_feature (43)..(43): Xaa can be any naturally occurring amino acid
MDLVLRRSNEEVTSTDLTLVWPDFEVISAHKNPGAATEAQELXGTQGVLAETHLQEGTRPP

SEQ ID NO: 1008254 - protein, 35 aa, Homo sapiens
IPLWVYLSASPGIDRVGPDAWCDLSKFDLPEEPSA

SEQ ID NO: 1008255 - protein, 121 aa, Homo sapiens
FFFFLEKGVSSVTQAGVQGGDLTTTSASGVKAVLVSASLVARTTGADHHAGLILVFLVETGFHHMGQAGLDLRPSSDPPTWASRSVGVTGMSRRARGTIISGIFFLGHPGVGNRWAGTFKG

SEQ ID NO: 1008256 - protein, 88 aa, Homo sapiens
MTVLRNKWNGESHRHIYVHLWTRVSAENLMEKAVRLKMNVRRSPGFCENGRCLNNPKELHLLSVMNGLTASPNQDECLDKTGRVTVHR

SEQ ID NO: 1008257 - protein, 35 aa, Homo sapiens
EYRASRFFPDGAFLYPLCIGLGFLLEIVSFLLTAK

SEQ ID NO: 1008258 - protein, 64 aa, Homo sapiens
MYHRRDKDQKEPANDIKEDAIAPRNLPWPKSSDTISKNWDPFTSVHLRKSPRGHPIGPFQALGA

SEQ ID NO: 1008259 - protein, 35 aa, Homo sapiens
PVYVGTSGDDTRVEHACRHPMSAAAGPVARSVPTS

SEQ ID NO: 1008260 - protein, 48 aa, Homo sapiens
MPDLITGRGHSRRLYRRRHRTVSVGFRKIFNPGASPVLASGHGYRSCG

SEQ ID NO: 1008261 - protein, 74 aa, Homo sapiens
MCAMETALCHPGVPPAGTSSTVMSHGALFLHLGFILSSSSSYVSSSELLLPRECPMGLLLPPCVILRHSYTEDP

SEQ ID NO: 1008262 - protein, 46 aa, Homo sapiens
YRCIVQGTRSLQVLSLLRLVTASGTGLREGPEALKTSPGSQDLNGS

SEQ ID NO: 1008263 - protein, 37 aa, Homo sapiens
LSTGKEDNSQHQACWKSHPENPQGFILTTAGMPLKGL

SEQ ID NO: 1008264 - protein, 93 aa, Homo sapiens
MTQLLIHGDVAEQDALNGKADRTKMIKYFGFIFNILFFFFFFGNGVLALSPRLDLQGLDLGLTCKLVPPRVHVILRASAVPITWNYGRPPPVP

SEQ ID NO: 1008265 - protein, 67 aa, Homo sapiens
DVRRVRKKAAPATTTHRSISTPFRGLPPVSLTSVLEQVGIQTTAQTTVTAHYHITHTLDGAVDHERV

SEQ ID NO: 1008266 - protein, 100 aa, Homo sapiens
DESRRCKGDIVPGVNGGRWKGVIRVTERSQRYIITHGGLPPGVRRLREPVILRLKYLVACKLRNTEPKHHPKIYLLYGSQFQPKVTAVFPAGVRSQSHTD

SEQ ID NO: 1008267 - protein, 62 aa, Homo sapiens
LRGSAGEFYYYCEEGYVLAGEDGTQCQDVDECVGPGAPFATGCDSTHKGPSIVVACKDGCCP

SEQ ID NO: 1008268 - protein, 42 aa, Homo sapiens
MILLLLPQGEATIGRVPVTSLLGSVTAALWLYCRGAAGLCMV

SEQ ID NO: 1008269 - protein, 140 aa, Homo sapiens
CPRRMIVLRRHREPGSHGCPVGRLPVSCIRELSTPRRTAFPYLSPSVSGSMKLSPSVPAGPVPWGLVSCWSEKSCENGPGEERAYGCCVELISSLPISIPLSTVQPNKLPVSIPLASVVLPSRAEEGEEHPQSRAQPRAG

SEQ ID NO: 1008270 - protein, 45 aa, Homo sapiens
LSEIVTLFVIDFKAVCSVAPTLPFQPCLVCPFKPLLTCASTGRAS

SEQ ID NO: 1008271 - protein, 51 aa, Homo sapiens
  misc_feature (42)..(42): Xaa can be any naturally occurring amino acid
GRLGGWAGLGGPGWVTSRQWLSELEVDRVHPKLVRCAVSLTXGQRCWACLS

SEQ ID NO: 1008272 - protein, 41 aa, Homo sapiens
DILPLSRLSPVFVTPASIGLSPNLVVTIALCVCSSACGSES

SEQ ID NO: 1008273 - protein, 69 aa, Homo sapiens
GSPAPVCAPPQLHPQTHSTHTHTHCTHSTQTHGTHTHTHAHTAHTQTHSTHKRTAHTHTQHTHERYTGR

SEQ ID NO: 1008274 - protein, 127 aa, Homo sapiens
TRAHTILPSLWIVFYIPLFSYYTFLLLSYYLTISSPPLDYLFIFLPAPSPLLLTFFLFSPPSSLLLLFHFSSPVLLFLLSCPSLLALPPSPLLLRLVFLFSYSFFLHLLFFSSSSPLAPSHSSFSFP

SEQ ID NO: 1008275 - protein, 94 aa, Homo sapiens
PSLSQRLCWCNFPDTLPLITAFTSPPDPTPHLLINSGNASPSAHELLGLSHFHLPTLAPRPALRSPMVYGSTRFLPTVIPFHFSSFSRYIRASS

SEQ ID NO: 1008276 - protein, 64 aa, Homo sapiens
RGTDATRAPRSHSGPPAERHGTMRRNVSTLSMSFLRAVEQPGSSGSSASWFVRRLRQTVLEVLL

SEQ ID NO: 1008277 - protein, 57 aa, Homo sapiens
QCAAVISAGIPMHLAGTCKASLASVFLHGHFPPRARRSNLPQPGGSRSSQFVNPWSI

SEQ ID NO: 1008278 - protein, 82 aa, Homo sapiens
DVSIISVRSQVYAEMSLLCISTTPPLAQRRRRYMKDSQVLLSSWDAVVNPFCGHLLKDCAIAGTFPPRPFIAGRKQVNGARK

SEQ ID NO: 1008279 - protein, 35 aa, Homo sapiens
MIRLYIFPFNSLVGLVGLDWSVPDAERKTGGSATP

SEQ ID NO: 1008280 - protein, 46 aa, Homo sapiens
TPGVYKCSCEPGYELAPDKRRVRGVMIYRLGNPCCGTDTVSASPRM

SEQ ID NO: 1008281 - protein, 40 aa, Homo sapiens
GSPARFALQAPGRPAPGLKCSARLGFPKGGDYRFERDTGR

SEQ ID NO: 1008282 - protein, 109 aa, Homo sapiens
LCGLLCWSLCRVWLLCLPRTVLPARFSLDLSPLAYFSPCRRKLISLGSFEFPPRKLRFLAFFFPPCSSVIAPLMDTRREDHRHEASLSKYTLTKRHSSLPEVIQNSLIL

SEQ ID NO: 1008283 - protein, 80 aa, Homo sapiens
  misc_feature (69)..(69): Xaa can be any naturally occurring amino acid
  misc_feature (73)..(73): Xaa can be any naturally occurring amino acid
LEDPDGMAHCNSTSQVQAILVASAPEYRDYRCVPPHPANFYYFSRDGVFTTVTHSWSLINLRVEYKESXGTGXAVGYASV

SEQ ID NO: 1008284 - protein, 58 aa, Homo sapiens
SVLEDPECTLCSELVTMWFLLYENLTLRSSLMAKAFVTCTQQHKLPYGANFETQVKSS

SEQ ID NO: 1008285 - protein, 62 aa, Homo sapiens
MQALAQLNRIFLQTRAIRIFSKDYSNGYKAGPRGLGKISFSPKLQSYIGTSRGLILPGIWST

SEQ ID NO: 1008286 - protein, 44 aa, Homo sapiens
MLSFNNCTITDALGTKGPSLSMRLLGQLRRNTTAYSPPLSPMWT

SEQ ID NO: 1008287 - protein, 34 aa, Homo sapiens
RGRTLTTHDTHWTTTLYDRRTDTSPTGLDGRTLR

SEQ ID NO: 1008288 - protein, 85 aa, Homo sapiens
  misc_feature (34)..(34): Xaa can be any naturally occurring amino acid
  misc_feature (82)..(82): Xaa can be any naturally occurring amino acid
MSECRADVAYRWAVRRRICIYGYKYSKYTYAVMXTTVPLEYSQHAKLKALISIARRSVMMIIAIGSIYRAGVIITSGRRPMXIRI

SEQ ID NO: 1008289 - protein, 69 aa, Homo sapiens
  misc_feature (46)..(46): Xaa can be any naturally occurring amino acid
  misc_feature (59)..(59): Xaa can be any naturally occurring amino acid
MNPMVQRYKVRCSRLKSTYLSQNGESSRFIYFKFFLYERTEKEGYXQSAFPVKISSQLXIIPTPTQEQG

SEQ ID NO: 1008290 - protein, 98 aa, Homo sapiens
MAWTQEVELAGAAVRSRVAPGRYLVGGGRQRVPRGPHRLGGSAGLAQLRLNDWGAARNEAPRAAGRSPGRLFTLSSEQARPSARASAITSSGCTVRNV

SEQ ID NO: 1008291 - protein, 115 aa, Homo sapiens
TSCPFQPAICDSFPLSQHLGPAFDTTPKASYLACLESAPGALLLGHGPDRGPGAWPAGPCGHLCSILDYSASGTASGRCTKPPALWPPKPRITCSPTAVARPCPCRFPITYQGLP

SEQ ID NO: 1008292 - protein, 68 aa, Homo sapiens
RTRLRRQVPPALDHLGSMLFSLLLVLFGLCQDLLTRGARCHPRSRMQSFIMGLQLPQLFDGFVPVLVG

SEQ ID NO: 1008293 - protein, 70 aa, Homo sapiens
AHEAGPRCTTQKARSLVDSVLDVVRKEAESCHCLCDSQSYPLPAVWVTGVCGWVPFLIQRDPGRMYPDSV

SEQ ID NO: 1008294 - protein, 110 aa, Homo sapiens
SFPLTRKEAQEKLVAGRDRRPLIAEADLASLIRRFMLVQEELDRAPERLATALHNLEEADKAADESERRMTRSSKNRAMKDEEKMELPDMPLKEAKHIAEDSDRTCDEVA

SEQ ID NO: 1008295 - protein, 71 aa, Homo sapiens
MHYRGEMILLWGMPDGRAVPKTQSSFSWNSYVPSKKKDSDIGLVLHIFHHLSRETGKQLYDSETPSSQAGS

SEQ ID NO: 1008296 - protein, 154 aa, Homo sapiens
MAYVVFMQCDKEVKVRLLQSPGHVSIQTPSGVEGSQAERGGRGRPCPGSPSNWDRASDGIPRARLPFPPQPNSGGGGAAVTRADVGDRFGFKQRKEPSAVNPEGHPALGSRLEKGCVAGVTEPGFDGDGMVWMAPVSPWGSYPVITNAGEVTVD

SEQ ID NO: 1008297 - protein, 67 aa, Homo sapiens
GVSCRSNSWYSHEQQSLSVRCAGSMSGERLAGVGGLEAGRWLLGDVQSSLLGGCGSSWGELDSDAPV

SEQ ID NO: 1008298 - protein, 40 aa, Homo sapiens
VSSPKMSCSPQRELCMSPSNQAQPPGPQLLPSSPRLWILH

SEQ ID NO: 1008299 - protein, 64 aa, Homo sapiens
VLCHDYGALSQLPQDELMPQRELLNVTKKPVPMLHGPNSARLYPALDPALLTLDSAAHGKNRIA

SEQ ID NO: 1008300 - protein, 33 aa, Homo sapiens
  misc_feature (5)..(5): Xaa can be any naturally occurring amino acid
  misc_feature (18)..(18): Xaa can be any naturally occurring amino acid
MASLXEDNHNGRHTAPGXNEGHLTSIDSIQEML

SEQ ID NO: 1008301 - protein, 41 aa, Homo sapiens
TYRKDVDRVTCLKQEAGDGEHPRMHRHNKQWRSRDSTDYQG

SEQ ID NO: 1008302 - protein, 62 aa, Homo sapiens
MPIKIELNWGDSHPLTPLRSGSYQLLQLLAKSTLTRMVITAKIIRARTACWTLFSAPYGGET

SEQ ID NO: 1008303 - protein, 42 aa, Homo sapiens
CGTGVGTSGQERTGEGHRMYSGTRSTGASKRRGLTKRGTELE

SEQ ID NO: 1008304 - protein, 57 aa, Homo sapiens
HDYGVNQSPDELSPQRESDVTSTRPAPGPNPPALPSDLHLTSICCHGKNRIVLMNTP

SEQ ID NO: 1008305 - protein, 72 aa, Homo sapiens
VPEHVMVMPVLAGSMENNLGPLMVWFLFLCKRTIYMLPLACIFLQQIPFDFRKHNTWLVLYFMAGGGIQDNK

SEQ ID NO: 1008306 - protein, 34 aa, Homo sapiens
LADAYYTCTHSTQDGCTHTHTHASPQLHTHNTQH

SEQ ID NO: 1008307 - protein, 118 aa, Homo sapiens
MRDVDQASITLRECSLSSDGARGPALVSVTRQVYSRVLSGLLRARVILIVPEAASRPPPPPRRPRTYSSYKRSEPSSGAGALVFTQYSVSVLSTFTPSRSAFTLVPRTCFRIMSVYSL

SEQ ID NO: 1008308 - protein, 52 aa, Homo sapiens
QQQHTETHKDTAHTGTHSTHTRTQHTRTQHTQHTHKHSTQTRSTHVAHESTH

SEQ ID NO: 1008309 - protein, 43 aa, Homo sapiens
MLRRSRDPGVTKNVWSPCIEGEDYKLLTVEAEAAGKKIHENEK

SEQ ID NO: 1008310 - protein, 108 aa, Homo sapiens
  misc_feature (6)..(6): Xaa can be any naturally occurring amino acid
  misc_feature (9)..(9): Xaa can be any naturally occurring amino acid
  misc_feature (23)..(23): Xaa can be any naturally occurring amino acid
MGDVPXHFXNTHDLGHGAGGSRXCNPEQLLGTAEEVWISEVEELRDQLWPRMVKPLTPSKEYKIYSQCVVAWRSIIPCYSERQSVACELKITPRALHAWCDRCETPVS

SEQ ID NO: 1008311 - protein, 80 aa, Homo sapiens
NPRNGFSRILRIHTRRHHITEITDFSTVLTVVTELVKGGMHRNGEYTSTRLHCYRYWDVITVLTCLTELVQERLHRSGEY

SEQ ID NO: 1008312 - protein, 81 aa, Homo sapiens
YNLRKRDIAGILDYTGGAVNRDTDFSTGAHDVRRNLYKAGMHRIGEYTSTRLQCERSVEVSTVLTVSRNLSREGMHRTCEY

SEQ ID NO: 1008313 - protein, 73 aa, Homo sapiens
HASGTGGYHLKSTRLQLNDIWRSARCSRVDRNLYREAMHRRDEYTSTKAPAKRDRDVSTVLTYPHNLSTNACT

SEQ ID NO: 1008314 - protein, 61 aa, Homo sapiens
RIRSSAGCSLLSTELVQAGMHRSGEYTSTRLHLNDLRDVITVLTCRRNYVQGGMHRSGEVH

SEQ ID NO: 1008315 - protein, 74 aa, Homo sapiens
ATCILLVVSRVPGSGERMQQKSVSRSNRMSISTYGLVVPVSHIPVDFPCGQWDASLKLRRIGYMLDPWMSSASL

SEQ ID NO: 1008316 - protein, 31 aa, Homo sapiens
MCLLCQGLRCYYRRGYCMSSKSRKISDYEVL

SEQ ID NO: 1008317 - protein, 37 aa, Homo sapiens
IHRDTEVSTVLTLIDGTCTEQACTATGEYTSTMAPVL

SEQ ID NO: 1008318 - protein, 51 aa, Homo sapiens
MIDGTLYRGGMHRYGEYTSTRLHLNDIGRSARCSPCLTELVQGGMHRSGEY

SEQ ID NO: 1008319 - protein, 40 aa, Homo sapiens
MAVVSGRCCAGGGGYSETLRQPASSEVPTTCLSHLMPPGQ

SEQ ID NO: 1008320 - protein, 145 aa, Homo sapiens
GSTDWRGLQMAREMALSISIILRGLRPLGHRNEKRSEIPYIQAFFILRNHPSLCHSCSTFQILLTSSKPDSSPVTPPTDPADDSSSFEPVDFLPPRQHLILHQSIMILHRMSLLRLYPSPPLSPTNPLLTLSPLCLLPSPALGRK

SEQ ID NO: 1008321 - protein, 124 aa, Homo sapiens
MIVPYRAPCSHIQVTLMEEVGSHGLGQLHPCGFAGYSLPSSCFHGLVLSVCGYSRCMVQAVSGSTIQGLEDSGPPLTAPLGSAPIGTPCGGSNPTFPFHTALAEVLHESPTPAANFCLDIQVFP

SEQ ID NO: 1008322 - protein, 108 aa, Homo sapiens
MQQECINLTMYYPEAKKQPVILEQCVMVIASLESNLLVGLLKDLAQSGGCLYQPPHQRKDTYLLGTYKEVIVIAVRGVIHQVVGEHTPEEPHGLQPRLDEQQGDAEHL

SEQ ID NO: 1008323 - protein, 95 aa, Homo sapiens
IDQSDLHGTLTCDTNDPPQIADFTQYSPPRRPMTKWPLPVCGPQQQRMCDKQRTRPSGHASAAYAKLTLPFSKPNAMSQIALANMGTPSTTSDPA

SEQ ID NO: 1008324 - protein, 42 aa, Homo sapiens
DSRFLWTAHLVAIGSRAPETSLAPGLEPCYCHALSTRGRPLD

SEQ ID NO: 1008325 - protein, 85 aa, Homo sapiens
SYEYHSYTSSIFCSYVLCELISQSRSCCPAGQRKEPTVMMQRFSNASSCGCPMMHSLTIFTGKHHQNRQLDSPRKQRAEPPRSPC

SEQ ID NO: 1008326 - protein, 118 aa, Homo sapiens
RDRFLWCSTTYNFEKEATYGFCPHEALFTMGGNAQGQPCNFPFRFQGTSYYSCTTEDRTDCYRWCGTTEDYYRDKKYGFCPETAMSTVGGNPEGAPCDFPFTFLGHIYESCTSASRIV

SEQ ID NO: 1008327 - protein, 125 aa, Homo sapiens
LLPSLTYGSSYQRKLSYRSALAPLCMLSRREEGESEDLACRLQLFPARVWESWSGLSLLLSTQHQEGQHRFNKELTKERDALQAGAYTMNTLSTEDLKPEKSELEETLRVLVTEKAGHAAQLGRI

SEQ ID NO: 1008328 - protein, 40 aa, Homo sapiens
PRGVGERKPDHRNLINIQATQSTNCVFLYACFILSFWTFT

SEQ ID NO: 1008329 - protein, 40 aa, Homo sapiens
MALSFFADISDWRFQYKGMFCPKHQGITGQSQPFREGMSP

SEQ ID NO: 1008330 - protein, 46 aa, Homo sapiens
DGVQVWLHRQMRLHGCEVHEAGEVVGYGWRVACAQLNLVQGSAGVL

SEQ ID NO: 1008331 - protein, 37 aa, Homo sapiens
RVQAGPEKIPAVLDSEQWKLSCLPDLEGHGGARNLGQ

SEQ ID NO: 1008332 - protein, 52 aa, Homo sapiens
MGSHKGSKLCPEKIPAVLDSRAGKLSCLPDLEGHGGALQLGQGTAGSGVAIY

SEQ ID NO: 1008333 - protein, 37 aa, Homo sapiens
RRVLVSRPDPTGCCYAARRRLGSPDFQEEAPQCDTNQ

SEQ ID NO: 1008334 - protein, 43 aa, Homo sapiens
RRSRVSGTLVCQSSVTQGALLAVPSLEFSKAGHGQYHRLRSQA

SEQ ID NO: 1008335 - protein, 58 aa, Homo sapiens
SVTIVAQITITGQVCGEELCTAVFTLPVFPWDAFLLFQDPALHSDPVSLGSFLLRPGM

SEQ ID NO: 1008336 - protein, 89 aa, Homo sapiens
GSNGGRLKTQRTSLSWLVEVTLCNSCCCCRILGLSRGTFTLYCPRLSHRLAFGEEQAESFGASVSVLSCLHRLGFASCWMLGSCCDPGC

SEQ ID NO: 1008337 - protein, 40 aa, Homo sapiens
LHLCLSDNLRMKNDPLDWNGDHIHTNFRDMYQHLRSMGVL

SEQ ID NO: 1008338 - protein, 43 aa, Homo sapiens
MYRVMAYFWYTKTRALLATLVLTQQTGLVDHPCEGDVTRAVWG

SEQ ID NO: 1008339 - protein, 59 aa, Homo sapiens
TDSAEHGLSLQQNHLQEEPLLYEYLRASLVLLSPQPMCYLCLVTISYFRYMTKRPGLVW

SEQ ID NO: 1008340 - protein, 73 aa, Homo sapiens
MLYEDPRAHLCLPGLSDPPASVPLSSWDYQRVPHACVILYFYVARGFHICVGHVINTPGLNGLHPPVASQTCY

SEQ ID NO: 1008341 - protein, 68 aa, Homo sapiens
VLPPEISSFQPNLLYTRCKRHPDEITAVRSAAPNHQRLRPGCTAPESARRRGSSRLDLGRLASCRPWA

SEQ ID NO: 1008342 - protein, 68 aa, Homo sapiens
PAPAQVCSSGAVILMLSLGLEFAFLYRGSYCDCKCVRSLILLRSLVLRTAKSVGYLLEWLRRLAFMSG

SEQ ID NO: 1008343 - protein, 69 aa, Homo sapiens
  misc_feature (61)..(61): Xaa can be any naturally occurring amino acid
SIIECYRSRSDPELLPQLCAAVFRQYAKDIGSLSGLNALPSEDYPGHLLDEKPLINFFVFXHNTFEKTL

SEQ ID NO: 1008344 - protein, 43 aa, Homo sapiens
AAAKWNSAMPRFLLDTSLEPPLCGQTLCDKKRSLPATISSPGG

SEQ ID NO: 1008345 - protein, 60 aa, Homo sapiens
MALLIYKPRPTVISSQERLELAYLSFGQCRVECLVREEEEGLGFISGALYVKGSLAYCTE

SEQ ID NO: 1008346 - protein, 69 aa, Homo sapiens
AVLGWRTCAASPVLKITPLKATQVGPIKTLQIDEKDGQEGEGIEPVKIDDSENLCSKIRQPFPHSTLIP

SEQ ID NO: 1008347 - protein, 126 aa, Homo sapiens
YLSEEPEPYLAVYLHSEPPPNERHCSAAHGSWCAGQYSTGKTSFIQYLLEQEVPRSRVGPEPTTHCFVAVMHRDTEGTVPGNALVVDPDKPFRNYNPFGNTFLNRFMCAQLPNQVLESISIIENPG

SEQ ID NO: 1008348 - protein, 52 aa, Homo sapiens
  misc_feature (12)..(12): Xaa can be any naturally occurring amino acid
  misc_feature (46)..(46): Xaa can be any naturally occurring amino acid
LGHKEIGAQNQXKKTEGAQVKKAERSPRQGKKRRGSSQSQVKNGRXRLLHQG

SEQ ID NO: 1008349 - protein, 100 aa, Homo sapiens
QRLRPGGTCYHQGRDSPAVCSPSSLYPQRRPMCPRVSPARRAGLRAVSGRGNLHRDKAGGAPGTSPSPHSPGTGGHPASPSRVSRSSRTPPATFLHITVF

SEQ ID NO: 1008350 - protein, 44 aa, Homo sapiens
VTVNVPTAEMLLCTDCCQVWFPALTVVLENNKDNFMSEKRRVMG

SEQ ID NO: 1008351 - protein, 75 aa, Homo sapiens
TLKERYQQDRGHQYAPAHRGCSAENFPEELATSQRYVRRLDFFERPDYYYLRKLFTDLFDRGGSVYDYKYDWAGK

SEQ ID NO: 1008352 - protein, 37 aa, Homo sapiens
TSAAAESGGSDPAQARRPVTQSTNRMAFYLACCSPTG

SEQ ID NO: 1008353 - protein, 49 aa, Homo sapiens
QEFATVRSWEPLDKSTVVGPMAATMRASVLLHAPGPGQAWPTTVSSNLW

SEQ ID NO: 1008354 - protein, 36 aa, Homo sapiens
TSVDNYQLSCPVQSTQHSNQGLELEYVIMHLAHPFS

SEQ ID NO: 1008355 - protein, 113 aa, Homo sapiens
RYSRGSLLSTSSVTPGPAKRVWRHGGHVTALESLIEMGFPSGRAEMALALTVNQGIEAAMDWLMEHEDDPDVDEAFRDSPWTYPGTGAPFPQSKGGLKGIVGSAAGKGKTRLE

SEQ ID NO: 1008356 - protein, 164 aa, Homo sapiens
CLSLYDISPAVVLPLSSQLLLPPLPGSAPAGGTSSVSDLFRQLPLTALLLCCSFWCSFPAMAFLLGQPGAPPPVLSASLRLLLESSGQPHCPPGFRAPSCRASLLDHSLSDRLSACPSAGGAAEVHGGGPGGTENRPDERKEERGVPWHGKARCWPGCGLSVCD

SEQ ID NO: 1008357 - protein, 48 aa, Homo sapiens
VTLQELILYDICDPHRRWFFSDPQPACPSSDPHPACRFLWALYNWLFI

SEQ ID NO: 1008358 - protein, 40 aa, Homo sapiens
RTCRTRDDGPVGLRDDGLTGRRDDGLLGRRDDGLIGRRDD

SEQ ID NO: 1008359 - protein, 88 aa, Homo sapiens
  misc_feature (45)..(45): Xaa can be any naturally occurring amino acid
  misc_feature (80)..(80): Xaa can be any naturally occurring amino acid
MSRRTTRMMAHCRRRHMHLGYKYPDIRSRNVNNRYSRTIASMRRXGALISIARRSVMMIHCIGSIYRARVIITSGRLSMXIQNSESCH

SEQ ID NO: 1008360 - protein, 42 aa, Homo sapiens
RRSAQISSSEFAAHYAYRCAVRGAIIQAIYPSIVAVTYNGTL

SEQ ID NO: 1008361 - protein, 99 aa, Homo sapiens
TVLVMAVGTGCTEEVVAVTGEAVSVIATRYCLITAELLMSDQQQTLDPHRSMNPIVNCVCKGSRLYARHENLMPDYLSLSPITPRWDHLVEGKQAQGSR

SEQ ID NO: 1008362 - protein, 45 aa, Homo sapiens
MRILYMTQACILRGFDVYSPLRCCSLYKFRRHVSPVLTSKYRKLE

SEQ ID NO: 1008363 - protein, 38 aa, Homo sapiens
PFIHCPDLYALLLLFSSVGFWIGANDNLNDTSLSYSGG

SEQ ID NO: 1008364 - protein, 78 aa, Homo sapiens
MKYQVVEGEQQRKTCQGKCYGHDALIQLVSAKAAEAIRAAAQTMLPERYSRILHNSFTDGSNSLQDRQTANYTMYVIE

SEQ ID NO: 1008365 - protein, 35 aa, Homo sapiens
MLLLPGEVLSHEGWQVPRTPCHITQQLLVESAEPS

SEQ ID NO: 1008366 - protein, 33 aa, Homo sapiens
SGTDRRQICDTCVKMQLCSIIIIIIRPRFLVQS

SEQ ID NO: 1008367 - protein, 33 aa, Homo sapiens
RHEARSKQTNTETENQTLHVLTAENQEKNNSSM

SEQ ID NO: 1008368 - protein, 40 aa, Homo sapiens
ILLVQRLVRPNRSVIQAYGARYVPSPSRAPVAIDTYQEEE

SEQ ID NO: 1008369 - protein, 32 aa, Homo sapiens
MRANLALLVDAKEIKMHLGALALDEKVAQLEI

SEQ ID NO: 1008370 - protein, 63 aa, Homo sapiens
FSSSCDTVEQSEPAVVSCAPGACWHEDTPYAPQMTEVLTSVCKNLWAPLATPPCLGTHEGNSS

SEQ ID NO: 1008371 - protein, 38 aa, Homo sapiens
YESSSSFHDGYQVLRGGLRVSTDTASAGCCENRRHQQV

SEQ ID NO: 1008372 - protein, 45 aa, Homo sapiens
YGILLLLIEISSTAFLNPIIHKHHGIIDGRALEECRDFLKEAVIH

SEQ ID NO: 1008373 - protein, 55 aa, Homo sapiens
FANTVLSGVPTMYLGIADRMQMEITALAPSYHVSIKIIAPPERKYSVWIGGFPLP

SEQ ID NO: 1008374 - protein, 116 aa, Homo sapiens
PGDIQKSLQKQRQTLTFQNPTTDVGKQSTKETRKPKIHGSGHVEEPASPQPAYQNISQQETSKLHNSTADYNPCVPCPVMQHKMQSGTFLQASMAKPKGFKPPMHSPARGPSWGLA

SEQ ID NO: 1008375 - protein, 56 aa, Homo sapiens
  misc_feature (12)..(12): Xaa can be any naturally occurring amino acid
LEDRRELTLEIXTSWTVDFSKPSHVLNELLGFLESAPLWKVLLRSQEPLEDLTFLQ

SEQ ID NO: 1008376 - protein, 57 aa, Homo sapiens
GSREQFLVGHVEQRCSWCFQELLQVLGDLLEGGQALPQLQRRVPRPCTCERTTLLHW

SEQ ID NO: 1008377 - protein, 33 aa, Homo sapiens
TLKDPRFKARNFPYQTDLSAAMKESWEHGLSPA

SEQ ID NO: 1008378 - protein, 65 aa, Homo sapiens
QCTLDAAGTLDGPRQARESQSILYMFEDSAVLPQPDERVPRRVACFGERGARGLGHEKPQGDVEP

SEQ ID NO: 1008379 - protein, 66 aa, Homo sapiens
GESRQGRDMVLSIFQIASEDETVYPGGVDDKSGSHKDDFYDAIIFEIFTVEFCPPSLSTYTLAEVN

SEQ ID NO: 1008380 - protein, 67 aa, Homo sapiens
VTAVTNDATPSWGHVTAGRPDTTGLSPRQLSTNTLDTRRRFDSHTFTTPPHPTFNTYPTCSYLTRDA

SEQ ID NO: 1008381 - protein, 61 aa, Homo sapiens
VGGERLDVYYVEHLCNVLFSFFDRISLFLPRLECNGAILAHRNLRLPGSSDSPASASRVAG

SEQ ID NO: 1008382 - protein, 33 aa, Homo sapiens
FTYSKFEQTHTNMTHVSRTTGCSHCFRKDMDKV

SEQ ID NO: 1008383 - protein, 94 aa, Homo sapiens
LSGSLTLKVLSCEPSSVWASSVDCSCGTSVGACLSPSCHETEAKPYHAQKAISHVKQSNNQCSSNSISSPSIHAMHPHSQSLSRIIVRQAPSTH

SEQ ID NO: 1008384 - protein, 147 aa, Homo sapiens
  misc_feature (36)..(36): Xaa can be any naturally occurring amino acid
  misc_feature (53)..(53): Xaa can be any naturally occurring amino acid
  misc_feature (79)..(79): Xaa can be any naturally occurring amino acid
SIRDLDLPRTYSESYRSLPGAERERHSMWSRTRGHXPSVCAGPGACSGCVSGXFAPWLILERPWCLVLRPLGLESLQQXGGTTEQLCIVIVGFGAFGGSLVTGNCLCACVGCMLPGLSWPRTGKASPSHPKPLVELLWNHLPKAQGR

SEQ ID NO: 1008385 - protein, 91 aa, Homo sapiens
LDGSGRLPREPSPPGALTSGSLNLRAEGQRQAAESAVFFSVPMCKHCTSFTAQTGTSSPAPHFQAGGLLACVSMAGFTGSLGVTELAIRHI

SEQ ID NO: 1008386 - protein, 108 aa, Homo sapiens
  misc_feature (84)..(84): Xaa can be any naturally occurring amino acid
RDPGSLILEIDPCRGRDSTSHHSCRFEEMCQTLLRPGAVRKPADASWKGQIHDSSWGEGPLAYPKCRSCLQDFFNGKELNKRIXPDEAVAYGSAVHAGRVDGGQTVRK

SEQ ID NO: 1008387 - protein, 74 aa, Homo sapiens
MSRDLDNIEQRMFLKMNLKKVTLRLFYVGSERGSRADLTVVHRSEKEILPYFLSLHLKRGNLLRCVPSTVGSRS

SEQ ID NO: 1008388 - protein, 38 aa, Homo sapiens
MAVRSCVSFQVERVCCDEVISCNAPAPEPEKLSESSPE

SEQ ID NO: 1008389 - protein, 120 aa, Homo sapiens
IAARVPIIYRRDSMTGILVIPLRLRVPAGHVHDQYHSEPQMTRGQNCSVHRDLGYSIGVQVLGGLEPVTVRTVSVQRSTAPFLSISSKRFRGTLIPPYTPSTRGQDGLIFLTEYSSFHTQ

SEQ ID NO: 1008390 - protein, 129 aa, Homo sapiens
LGANRRTLPGYAPVWGLAGPCIIWATSKRDKDSAKWWQLGRGGKTAETERQQWVRDKRQQWARQQETVKQSVIEDVVKLVDSQVSIVQLPRVGPTALTSQPPTQKLSTPKLGNLERPAPGSHVEDGLVP

SEQ ID NO: 1008391 - protein, 46 aa, Homo sapiens
IEFGRKISLSNLMVEAGRGVSGCDGVLVAFCKQNALRMNRSRVRVP

SEQ ID NO: 1008392 - protein, 37 aa, Homo sapiens
TNSTSKSSEPQENAGEEQRENHNRKTNAPQYPNSMNT

SEQ ID NO: 1008393 - protein, 34 aa, Homo sapiens
VGALHLLRSLFYMKAVLVTRLGKGIGITLPKVYT

SEQ ID NO: 1008394 - protein, 38 aa, Homo sapiens
MSWDPDAECWKKPRYLGASSRVKRMLEVRLNFGKSKVL

SEQ ID NO: 1008395 - protein, 51 aa, Homo sapiens
MTPGVVHASPPQSQRVPRKAPCEWAIRNIGQKPKEPNCHNCCTQDGHLHLH

SEQ ID NO: 1008396 - protein, 70 aa, Homo sapiens
QEDPAPTGVRGQEEEPRAGEKERTGTEYCMGRSENQLMDKGQRYPQLGGAQRRLALYPHSNGSTALRSVG

SEQ ID NO: 1008397 - protein, 43 aa, Homo sapiens
MGASLGLGLLLQVFFRMFTVRLTFGPELLRGSCGIQRVLQRLF

SEQ ID NO: 1008398 - protein, 57 aa, Homo sapiens
GCTQNTNGAFFKVIYQNKNEEVTFRRSEEVKIEPIPVCAPFPFSRHRVLSSGRDYGN

SEQ ID NO: 1008399 - protein, 67 aa, Homo sapiens
LHPEGVGEVVSVAENALWERMTGTGHDQCYSTVGTEAASQFGTVNGKYVKPFTLPEAGDANGPAQHL

SEQ ID NO: 1008400 - protein, 67 aa, Homo sapiens
YNYRQHQVPQNWAQNTCHNYRRPLSTESTLQPNGNTRHSLHTTHYYILSYLHSLAGQVQPFSPSVPA

SEQ ID NO: 1008401 - protein, 31 aa, Homo sapiens
  misc_feature (25)..(25): Xaa can be any naturally occurring amino acid
MGVGYACPTCTRGPTHVSHWSPPWXQWRNRV

SEQ ID NO: 1008402 - protein, 129 aa, Homo sapiens
GPAHEPHPPHYGRLDRSDGGISRLTAGCRSNEIQIPRSLAGCRWNSPLGNSNFGFLIQRDVLDSNLWNFLLSKGTPGVLSVPWTRFGFFFFLSSFFSIGGTSPFSRLLRLRPVLQGLLMPVASRWQLPF

SEQ ID NO: 1008403 - protein, 77 aa, Homo sapiens
MGFSHVAQAGLKLLGSNDPPTWASQSAGITGVCRRTWPPVAFYTQVLVPLWLAQHTPFHRSSFGTPVAVRLPRTRDG

SEQ ID NO: 1008404 - protein, 94 aa, Homo sapiens
MRGATKTVGMKVLREVKVRAGLQHPNMVGYHTGWIEQCHVIQPRADRAAMEWPSREVLSDQEEDREQGGVKNDESSSSSIIWAEPTRSGGAGTG

SEQ ID NO: 1008405 - protein, 177 aa, Homo sapiens
  misc_feature (28)..(28): Xaa can be any naturally occurring amino acid
CAEVYLEDPAHPEGVGHGWGAEVAIAVXNLYSALTVASSNYRGIRKGGVVMLILSKARLFRENLIRYGIRVDPIQVVSLSLKDPYSWPAPCLVMAANVLAGGCIPGREAAWGVGALTEQAELLLHVANRATILCSPGAVVLTGEESITPGGSRWALMAHTILFLKLFSNRDVNSWVA

SEQ ID NO: 1008406 - protein, 179 aa, Homo sapiens
MGTASGASDWSGLRERPRPGVGAQAGAAVEEEEREVVRVRVKKCESFWRPEFRSWAVDPQITSLEVWQHILIRALDWSGKKTLGISYRGRDRLGQEVYLSLLSEGDLSTALATASKPYRQWRVDIRPSEDSPWLEDGDIISPKDVMGSDVWLAENRSSLTRAALPFTQSILTQVGRTLS

SEQ ID NO: 1008407 - protein, 55 aa, Homo sapiens
SGCLSNAGGGLFVHHLVLDPSQQWHRLVHMTSPWGGSSPAGHTRPWVLEEVLSSR

SEQ ID NO: 1008408 - protein, 33 aa, Homo sapiens
MLVNNFSQADPDFQEVKENGRIYLKIHYIEMEP

SEQ ID NO: 1008409 - protein, 42 aa, Homo sapiens
NAAVTFRLWPVKVLPTVFLQSCCLPECIRRHGAAHFPFAPLH

SEQ ID NO: 1008410 - protein, 70 aa, Homo sapiens
TLDAEYTHILISTASFDRAPSSDLERFTPTLGNLVVPRSLGGHHTLMPNLVRTPDTAQCTNMPRNSLGYK

SEQ ID NO: 1008411 - protein, 55 aa, Homo sapiens
LANVYLPAECSFPSRRGAGKDSDPQEFSAFNNCEEKERSQPQTPGELPALKGSND

SEQ ID NO: 1008412 - protein, 45 aa, Homo sapiens
MGGLRYTGYYTTLTFNETCFLTFDHYHHYWRHDNVHLCEHDLTFT

SEQ ID NO: 1008413 - protein, 170 aa, Homo sapiens
MMKLWYINGYVCSFCFKQIKRSTSWTNRRALNSNCPSTEKCFTAKVIFPVIGQALIEFSVLLISNIVGISGPDGLGFVELFWIDVLFLNLLLLLLVTILLFFFLIRTNIFNFRFVFRLFLFFFFFFFFVFLFFSLIIAYFFITFLLHKKSNGISNKLRMFLHNLLYSSFR

SEQ ID NO: 1008414 - protein, 67 aa, Homo sapiens
RDSGIPDNDVVNRTRFTSGSRGSRDQSCEHSISFMASNRSEPQNYAKCTFEYLLSLVTKIISQASKN

SEQ ID NO: 1008415 - protein, 44 aa, Homo sapiens
MNETKLLSLIIYKKSTQTCITDLNERPQTIETTSKKTYEETLQI

SEQ ID NO: 1008416 - protein, 84 aa, Homo sapiens
MDPKKTVNQTHQKPLEKENYTCAITTVKARDTKAGKWSRWECRCMYTDRLKTRPFPIHGLMILTRHDRHPNKRLPKRENRLMVR

SEQ ID NO: 1008417 - protein, 80 aa, Homo sapiens
VARYYEIAVVITVRRYAQKVGHAEIRQERLLFIYVQEFLKVGKIKKQEEFLTLGITLATFLSSMFPGGFLELLCHCFRQI

SEQ ID NO: 1008418 - protein, 79 aa, Homo sapiens
  misc_feature (41)..(41): Xaa can be any naturally occurring amino acid
RSTGWSGRYHLCSMNVTVGVRTAADFWISFMRKGDSHCVHXHRPEISFTVLPARNAASKHSVALDLSTHSPWVEHGGVC

SEQ ID NO: 1008419 - protein, 57 aa, Homo sapiens
  misc_feature (44)..(44): Xaa can be any naturally occurring amino acid
DERKGQLKKQREYTFLLGPPWVSRRKEPRSLQYHSQAFGYLRYXKLDPAGRYPSLEI

SEQ ID NO: 1008420 - protein, 51 aa, Homo sapiens
DVWDEEVVEMRKYWDEERTGMRNVLGGGTYWDEERHWDEERHLMHYCPVSN

SEQ ID NO: 1008421 - protein, 34 aa, Homo sapiens
MALGDWRSLAIAAAVGKKGCPASWFSLWTPCMIH

SEQ ID NO: 1008422 - protein, 49 aa, Homo sapiens
MSKYWDEERHWDEERHWDEERHWDEERHWDEERHWDEERHWDEELIMGI

SEQ ID NO: 1008423 - protein, 61 aa, Homo sapiens
LWLTRGPGMRNVLHAFITIGKVDGLLPEKRLAPPLYQFLMNGILTVHPMGWLERWWLTCTQ

SEQ ID NO: 1008424 - protein, 33 aa, Homo sapiens
DLEDLGMRNVTSERFLGSGDALLQARPQIRRRA

SEQ ID NO: 1008425 - protein, 49 aa, Homo sapiens
SCRTYWDEERHWDEERHWDEERHWDEEQSVWMRNVTGMRNVTGNKALEW

SEQ ID NO: 1008426 - protein, 133 aa, Homo sapiens
IPICRFHQKGLQTIVNKLCSCSLLRPTHSPYNTPILPVKQSDGSYRLVHNLRAISQAVLPIHPIVHNPYPLLSLVATNTTLHTAIDLKDAFLTISLHPDSQNLFAFTWTDPDTLQSQQLTWTVLSIPSIHPSS

SEQ ID NO: 1008427 - protein, 74 aa, Homo sapiens
EPYLPKSRCIALQVDTRQGHRIKARTPSMAAGSQMLCVNQPDLRTGPSVKMNDHRSRLSGRGLVLKLCSRYEPS

SEQ ID NO: 1008428 - protein, 103 aa, Homo sapiens
GRAGSASRRVCSPSRWTAAQLAGSAGSEVLSPRGLVDAVNMVDNGDGTHTVTYTPSQEGPYMVSVKYADEEIPRSTFKVKVLPTYDARNSDCQWPRTKFLWCA

SEQ ID NO: 1008429 - protein, 34 aa, Homo sapiens
KRQGATSTPGDTANSRSHMPTPGATPDTRSHCQI

SEQ ID NO: 1008430 - protein, 36 aa, Homo sapiens
VSDCLLDQPLSCPTCPKLDTSSSPNWLPPPDLPSFI

SEQ ID NO: 1008431 - protein, 42 aa, Homo sapiens
GSRPVSTISMAWHSMAAGPVAQMAWHIIGSRSSGPISMAWHS

SEQ ID NO: 1008432 - protein, 109 aa, Homo sapiens
MRNVTVNRVQDLRRRPALQQAAWIQEVIRLHTEPGLSQRAPYLAELCPGEPRRPGNSDTRGGAGVRVHFFPNGRLQKRSKLFFRFPLARDPAFYWEPKEEKGLPGLSLR

SEQ ID NO: 1008433 - protein, 35 aa, Homo sapiens
WVESILCGISARNVIPVQMYTVKKIMSCLTSSEVC

SEQ ID NO: 1008434 - protein, 37 aa, Homo sapiens
MRSARKYFGARQQRAHVGRGGQVRRQFRLVCTCVRPR

SEQ ID NO: 1008435 - protein, 115 aa, Homo sapiens
MLHENTVSQGSRCLSGWAQGTLQNCFSLPCQASYPTPCTVPLTLGSECYRCVDTWGCHCVLLWPSSAVASLVSEPLTMQLLAGLYQALGRTVAGGRDLTGVRSHSRAQVPNKMVT

SEQ ID NO: 1008436 - protein, 39 aa, Homo sapiens
SDLLTRDLPPRPPKGAGITGVSHCAWQPVAFNCSAETPG

SEQ ID NO: 1008437 - protein, 77 aa, Homo sapiens
YQDLHTGFEYKVEEQSVDISSEYFSRLEQWFLGTDEVEPESLGACGKDNPINMYWVELKRRGESMKINQYNQSFTYH

SEQ ID NO: 1008438 - protein, 92 aa, Homo sapiens
WYRSLLCFTVSQGCDAFMGDNYCDAINKRAFCNYYGGDCCTFTVKTKKVTHSLCSVIYKVTVLVGDPRPKNTGGKNSGDTGSGYRKDQKLAK

SEQ ID NO: 1008439 - protein, 141 aa, Homo sapiens
ITYPSEHTAGMGVELRAGLEENQARRPSCLEPLSAPEEPPMRGPFWPQIPSLRKEGAGFSVRSSLPHSDRTTEPVASAHSEGAGLPHVELTHTSANVSQKKNAISPPIVNQNYCRPWGSGHMPSCQAYLGGRQRRRGVGYQ

SEQ ID NO: 1008440 - protein, 145 aa, Homo sapiens
GPSLPLLALCGCRLIPLSHLQLGARPSLCSLLDGSFPIFFFFRARSSRLVAQAGVQSGVISAHGDLRFPDSGNSPASAFRVGGITGMHRHAQLILVFLVEMGFRHVGQAGLELLASSDPPTLALQPLRLAPGEHLFTTPRRALNH

SEQ ID NO: 1008441 - protein, 39 aa, Homo sapiens
ILRSTCIHTAVMRPCTVPSTREHRLTSKYRKAGAWSDSR

SEQ ID NO: 1008442 - protein, 30 aa, Homo sapiens
MYQNLWDAAKVVVRGMFIALNAHIKKLERS

SEQ ID NO: 1008443 - protein, 58 aa, Homo sapiens
GERSLGSICKLHLQGINLRCGINVKMFYSYRDLTSSQGSIAHKLDMTERLNFRQMQSS

SEQ ID NO: 1008444 - protein, 36 aa, Homo sapiens
AVPSQCTENFLLDAHRQVQEMEGEQSHDDSSSEDSD

SEQ ID NO: 1008445 - protein, 47 aa, Homo sapiens
GGASFGASSRSVCEMNAGEKISGHVGSSGGRKEGEERKRKKLITPSS

SEQ ID NO: 1008446 - protein, 59 aa, Homo sapiens
  misc_feature (43)..(43): Xaa can be any naturally occurring amino acid
HWVRVLELGGQKGMQLWAISKKDIINPDKKKSKKSSETLTFKXAEGMHLGKSIALFLIL

SEQ ID NO: 1008447 - protein, 57 aa, Homo sapiens
GDLEDRHTGFEFSVSCCENKLDVLSPALLLKWLVALSARALGSKTLAPPVRSLSSDR

SEQ ID NO: 1008448 - protein, 44 aa, Homo sapiens
LQDLTGIPPAITRFSLLKGASMEGVGILRNKEHGVPVYCCPGTW

SEQ ID NO: 1008449 - protein, 50 aa, Homo sapiens
MTSEERELDASMINWITLVEFGDNGPNGDLGIKFFSSLLTGLKFFSTLAK

SEQ ID NO: 1008450 - protein, 101 aa, Homo sapiens
SCNGNHKKVVPSASNSRMVCSPVTVRIALLTEYIIAYCDNRADEYSSTLSSPSSNAPDPCAKETVLSALKEKEKIYTVEEEDQIFLDGQENKRRRHDSSGK

SEQ ID NO: 1008451 - protein, 37 aa, Homo sapiens
  misc_feature (30)..(30): Xaa can be any naturally occurring amino acid
MWKIYTSSSRSREQQHAECVLKSHHGEHEXTEFIGYT

SEQ ID NO: 1008452 - protein, 54 aa, Homo sapiens
MAQCRRRNASRPIYSEIRSRYCNTGTLEYSSMRKLKLLISIARRSVMMIIAIGS

SEQ ID NO: 1008453 - protein, 127 aa, Homo sapiens
SEDPHTGSSRNTTTFPFVWWDSFRLMSPISRGTKVFPQTVGAHIIVVSFHQPGKAALIGNFLDLNGLYQFVSDTSGIPKGANYQKVPGLRNHGNSYSLMSTNSDSRQARSSLAESLESFLMVTNSSL

SEQ ID NO: 1008454 - protein, 55 aa, Homo sapiens
  misc_feature (38)..(38): Xaa can be any naturally occurring amino acid
  misc_feature (45)..(45): Xaa can be any naturally occurring amino acid
  misc_feature (51)..(51): Xaa can be any naturally occurring amino acid
STGFEFSFHFLDATGHCICFGKNLQKVIHQVSLSSFLXVPTLLPXDDVITXELVV

SEQ ID NO: 1008455 - protein, 39 aa, Homo sapiens
LLGSSNSRSSGFQVAGTTGAYHQAQLLCVFIVETGFDHV

SEQ ID NO: 1008456 - protein, 43 aa, Homo sapiens
CEGGHETEGSNRLLSWALWSLGKKTKHQHLFPDTGDSHEARGK

SEQ ID NO: 1008457 - protein, 148 aa, Homo sapiens
  misc_feature (32)..(32): Xaa can be any naturally occurring amino acid
  misc_feature (36)..(36): Xaa can be any naturally occurring amino acid
  misc_feature (81)..(81): Xaa can be any naturally occurring amino acid
HLNWVEFGSKIIVTSIGGLSSQPLMITLAANXEQQXSNLCHDYTEAQERTNTARNEQRATLNSITLRHRTGQKLRFVTFQXKLGKDSSPQIALTGVEGILAKVESGSLHVFKPSPFSKEDNTVNTFDCLENEATDESFKVPMSPNDND

SEQ ID NO: 1008458 - protein, 103 aa, Homo sapiens
TGFEFHWVRVQRRAMETVLTAKVPETLGIFEEENGIEGQGGSLTGSSPQTGHSTAAEPPGEVTAARLLDSEREGGELESQGDMSPKLRALNPINDLVIFQATF

SEQ ID NO: 1008459 - protein, 67 aa, Homo sapiens
EAKFYDTENSVSRSKAGSCIAMCSCSVSVILLSTCKLHQRGGLERLSGQIHEMWLGVKGRIANMLCK

SEQ ID NO: 1008460 - protein, 34 aa, Homo sapiens
MYAGTDVHSQKAIELLRVLGGVWISDLAVNFNSR

SEQ ID NO: 1008461 - protein, 32 aa, Homo sapiens
MSSAVKRFCSVSWLQNLHVLLIKTGGVEFGER

SEQ ID NO: 1008462 - protein, 67 aa, Homo sapiens
MIKERPRKGSKDLFLSFCRPLDDSRYLCGPSLDPSRGHVSCFFQSGSSQGICELASRLSRHVVRTAL

SEQ ID NO: 1008463 - protein, 37 aa, Homo sapiens
LEDPVEMGLSRLGVARVHGPEGVHCQWLGLSTAWIRV

SEQ ID NO: 1008464 - protein, 122 aa, Homo sapiens
ITDHIQREGMQSGGVCCGLVVATYGCWGWMSVRSRCTLIRQLAGPLFSEDTTLQFYHERVVIMNSILERMCADVLKQTGTQIKFPSTGVDKLPYWTTADPQAVHQQRCWRTLFAKVLDEGLA

SEQ ID NO: 1008465 - protein, 38 aa, Homo sapiens
MVLNPDHVIHLLRLPKWRDIGVSHLCQPIKVSLKSARQ

SEQ ID NO: 1008466 - protein, 68 aa, Homo sapiens
MDKGELEGMTPEIIQKLQDKATVLTTERKTRGKTVPEDAGEARRAQQNTGRWHPTVGLHTCHALPWDS

SEQ ID NO: 1008467 - protein, 30 aa, Homo sapiens
  misc_feature (15)..(15): Xaa can be any naturally occurring amino acid
MGDDIWTQSLVNSRXAAGRPYWRAPHALDA

SEQ ID NO: 1008468 - protein, 33 aa, Homo sapiens
STFCSGHLSLSKADTLLTHRDSPGLSAMVLAEH

SEQ ID NO: 1008469 - protein, 125 aa, Homo sapiens
SATETRAFSRQLSTCQRGGFLGDLYAPKNSGGTANGGPVSKFADYCRNLVSDIPNLANHKMPPAAAEETPPYGNYNTLPCRKSHCLSEGATNPQISHSNSMQGRRAKTTQDVNAGEVSEVADSGI

SEQ ID NO: 1008470 - protein, 160 aa, Homo sapiens
EDLMVSSPWHLHLALYGAGPALPWMDSEDTFGVHCTLEQAVTATWWSCVGDTDGGERDFFLGGCSRLEASGAQLFFSFFSLFFSSSLHPVLVGLDVDRTPMGPPPASPLRFAALTLGGVMADAADVRGMAGRGHICTGGWWLCCGDTTEWGLRLVAGRRD

SEQ ID NO: 1008471 - protein, 69 aa, Homo sapiens
HLARQSRRLPPKNLCPFPEESGELGLYSWHRSHPCWHGSPPRSVQDLLTESEQGHDEGPLAGTDVAPQV

SEQ ID NO: 1008472 - protein, 151 aa, Homo sapiens
  misc_feature (3)..(3): Xaa can be any naturally occurring amino acid
RGXLMVGYQCGLVFRACCVKRGEIGDLDVARLQETDKIIEVEEEQEDPYLNDRCRGGGPCKQQCRDTGDEEVCSCFVGYQLLSDGVSCEDVNECITGSHSCRLGESCINTVGSFRCQRDSSCGTGYELTEDNSCKDIDECESGFITASPIY

SEQ ID NO: 1008473 - protein, 88 aa, Homo sapiens
SFGEAVSLALPDPLYPLAPLVMLVACAKGLAHPGPLELLFPELLPSRPPALMKGCTLPYWPAAKKQQSPRGETASADVLEKCPPAPLP

SEQ ID NO: 1008474 - protein, 44 aa, Homo sapiens
  misc_feature (38)..(38): Xaa can be any naturally occurring amino acid
ELRRVRGTGPTTTSISGENLRGQARSGWASLANLRKLXLAQLLV

SEQ ID NO: 1008475 - protein, 105 aa, Homo sapiens
SACASNAVGDLGHITQLPGQPSSILSSKYLGTTGNNNTPGNFWIFSRDGVYHVGHAALEILNSGDASGLGSQSARITGMSQHVRATLDLRTVLPSISRQRVLIPD

SEQ ID NO: 1008476 - protein, 45 aa, Homo sapiens
KVCCEQDTFHLMCSVAREHVMDTLVRILSRCDIMVLQEVFELFLA

SEQ ID NO: 1008477 - protein, 68 aa, Homo sapiens
ADPYKTTEGEKTTDMGIAQQASITANEMHIVTGISAVEGVNVQRFQNRLHKDVAGKMGDRVARGCSHK

SEQ ID NO: 1008478 - protein, 145 aa, Homo sapiens
LARQSRGAAAALLSVTGPAAGQAGALFARSHEAHSLSVLYKGEAKVVLLKAAYDVSSFSFFQRSSVQEFMTFTSQLIVERSSKGTRASVKEQDYLCHVYVRNDSLAGVVIADNEYPSRVAFTLLEKVLDEFSKQVDRIDWPVGSP

SEQ ID NO: 1008479 - protein, 69 aa, Homo sapiens
  misc_feature (49)..(49): Xaa can be any naturally occurring amino acid
  misc_feature (58)..(58): Xaa can be any naturally occurring amino acid
DSETEEIWQNRVLKSIRENRLAEHARRIASCYRPKRRRGREQLTQIDAXLLPLSSREXACRTHTPTLMC

SEQ ID NO: 1008480 - protein, 71 aa, Homo sapiens
ILKLRSWVGSPTPLSLALVYHNEVNARLQVPQRGPPVPQGAVVTTVNFVLACHNERLDVPVVGTCEATPQL

SEQ ID NO: 1008481 - protein, 58 aa, Homo sapiens
EDLQHDQETLQCYVMAAQCTGLPPVWLFSFGDPCGDRFERDTRVSLFEGPCAHACTQW

SEQ ID NO: 1008482 - protein, 183 aa, Homo sapiens
GSQIESGAWGRHYTRAVRGSLSVGKLNPVNVSAPDSHRLNKFTVCLPSGKGRPVYQASTCPCERPTCPHAAANWRPVLGTFAFPTMPLYTPQPVTVVSAFLARNVHPLSCRSGSTAILAPMTTTDSSLPVGVFVWDVENEGDEALDVCIMFSMRNGLRGGDDAPGALCDEPFLSCSVARKLSG

SEQ ID NO: 1008483 - protein, 79 aa, Homo sapiens
LEDPMEREAKWRAEAIQDSRESGQPRGPLGPVRGYSVSDPLVESREFTQGGKHPLELLCRNPAPEAFDHCQPAVSRGPL

SEQ ID NO: 1008484 - protein, 106 aa, Homo sapiens
  misc_feature (30)..(30): Xaa can be any naturally occurring amino acid
  misc_feature (44)..(44): Xaa can be any naturally occurring amino acid
IECRVSGAVLRSMSQQLVYDTSDKDDYHSXRTRGRIQNADGEAXRRSRRTVQILKQTYSKFDTNSHNHDALLKNYGLLYCFRKDMDKVETFLRMVQCRSVEGSCGF

SEQ ID NO: 1008485 - protein, 62 aa, Homo sapiens
  misc_feature (52)..(52): Xaa can be any naturally occurring amino acid
VALEDPKLRSGWTQEDHIDDRCRGGGPASSSAETRVMRWSAPAFVGYHAAVXMVSPCDRCQL

SEQ ID NO: 1008486 - protein, 61 aa, Homo sapiens
STDRLLRSGWRTVEYYLEGTCVEWLRRYLENGKETLQQRDPPQDAYDSPRVSLTHEATLRV

SEQ ID NO: 1008487 - protein, 62 aa, Homo sapiens
DLCGAQLVLSVSDSNLPLPHNQQADAPPCPAPGPALSRAFYSECFRSESIRLLQSPIHPDLN

SEQ ID NO: 1008488 - protein, 133 aa, Homo sapiens
MRAHGQGQVRLGVSFILLSTMGRDLLGVERLVVPEGVYAHRVDLRPSLSTWKGQCFMSRLQRDVRELGPDQPLGIETRGLEGVQGRRGSLAGVPRTKRAPVSGERARKLGRWCGLPVGRWAMDSPPGSLKFWV

SEQ ID NO: 1008489 - protein, 158 aa, Homo sapiens
MRIYRQSIAILHAIWPFLHIGTITYCYVSYFAKKGTVSLWAIDGSQSIDENFTQTFPECQCILMHSPQMPGKRISYLKVNRACHPRLQIWSRYSSSLLESVSVPGTLNEAVVMTPFSSELQGISEQTLLELSKGKPSPHPRAWFVSLDGKPVAQVRHS

SEQ ID NO: 1008490 - protein, 46 aa, Homo sapiens
KHIRLSLLLLNWGNSLQILDQVELRARYPPSIPHNSPASRALNFGY

SEQ ID NO: 1008491 - protein, 42 aa, Homo sapiens
QDLKLRSGGERVTIENVKAKIQDKEGIPPDLKVRATPPPGLN

SEQ ID NO: 1008492 - protein, 58 aa, Homo sapiens
RAYTEVGWVRISMGTFTNRVSADTSISSSHSLQVQQAWRLGQTILLVAWGMPSSLGSH

SEQ ID NO: 1008493 - protein, 91 aa, Homo sapiens
DLSLPYTTDPAGLLLRYYYDRYTAELAQFLYGGCEGNGTHFYTWEACDDACWRIEKVPKVWRLQVSVDDQCEGSTEKYFFNLSSMTCEKFF

SEQ ID NO: 1008494 - protein, 123 aa, Homo sapiens
  misc_feature (46)..(46): Xaa can be any naturally occurring amino acid
LARQSHQALTRVTRTVGLGRSWVGGDEMEAPKRRSGVWVGRDFVRXRSEGGGEVAATETGKVCPAGAARTRFRFEPRQAEPNGANKTKPWAPFFAWDTRSGAGSLLSRDARASPSVGPRPSDW

SEQ ID NO: 1008495 - protein, 50 aa, Homo sapiens
EDPHMTSSENILFKTNTDRKLTELNVTAVKIQRLLSPDLGHSTGLGGRIV

SEQ ID NO: 1008496 - protein, 61 aa, Homo sapiens
WSIYLFLTLLVTVLPVSMRAASQGFLILVFLHLASPWRPELFGTGCSSIKTGNLQMNALGF

SEQ ID NO: 1008497 - protein, 47 aa, Homo sapiens
SRGSWQQKTHIPMSQVTMLRNKPSDQAHQSRKSNHRYNDVINPDHEL

SEQ ID NO: 1008498 - protein, 159 aa, Homo sapiens
PGVKIQGNLEQGPILYFLRSTFQESFYAAFPATKRLDCLLKPRILILQKLGRSSSATGELPEKPTQKEVVRPPSSQSGWKLDWSHEAEGAPAPAGWCGESPQLTLDTPASGARGPEPGLWTGLSFFLGWTPSPRSLNGHPPDSPTGSERPAGTEDANRA

SEQ ID NO: 1008499 - protein, 35 aa, Homo sapiens
GSGGQRSPAVITGLYDKCSYISRDRGWVVSVHTIS

SEQ ID NO: 1008500 - protein, 61 aa, Homo sapiens
LEDRIGEELCSGLANSCSASCVAGISVARTTPANYWYFGRDRVSPGLASLVLNSRYQVIHP

SEQ ID NO: 1008501 - protein, 39 aa, Homo sapiens
VVPEDIELIGQTVRISQWPYKRLHRCGERCHMSPLALCG

SEQ ID NO: 1008502 - protein, 134 aa, Homo sapiens
LEDPEKNRRGSGSGKAFGQNERGIFYTPEQDKLTVLEGDILDEPFLKKLQDVSGINQPLYVMDVFGVTHRESIMNVNVKGTQLLLEACVQASVPVFIYTSSIEVAGPNSYKEIIQNGHEEEPLENTWPAPYPHS

SEQ ID NO: 1008503 - protein, 57 aa, Homo sapiens
YEAEQQHALACAPGIYDHAQSNAAYARFHFSTAAASRYQQLLPDSEQALEQAHRASV

SEQ ID NO: 1008504 - protein, 54 aa, Homo sapiens
MDLWWSLTFFLCVMFTLTGARLTRSIFSVPLPPPLHYNNTRPGENKALFTASSC

SEQ ID NO: 1008505 - protein, 130 aa, Homo sapiens
PHTGFEFEEPRVIDLLSWRSRNLTGRVLEAFREPLKHFEAKIEKHNHYQKQLEIAHEKLRHAESVGDGERVSRSREKHALLEGRTKELGYTVKKHLQDLSGRISRARHNELRRHWGAQPGREEASVKDLG

SEQ ID NO: 1008506 - protein, 35 aa, Homo sapiens
SDTMKELCRVVRENVDPMLEKRSVGCRRCAVVGNR

SEQ ID NO: 1008507 - protein, 62 aa, Homo sapiens
ELGGSRAVLRSMYANNLVYDTIETSDDYHLLNGPRGRQSNALMVRLQDWEPAVTEHDPQARP

SEQ ID NO: 1008508 - protein, 47 aa, Homo sapiens
YPEAECKRRSPSIPRRMHISGFLCVNHSDSNAPSPLPVVLHRLGLGS

SEQ ID NO: 1008509 - protein, 141 aa, Homo sapiens
WWECMVGVCVPGVCVNVCVQAVEGKVGIKACGECAGEAPMTVSVQCVSECTLVLAVVGEEVLCAIQSTATPQTPSVSQPQDLPPLLGQHCAQAAATMIWGFLSGQDVRRKTFHSKSAPFDILVALPHPAFLPSGGSGTFGL

SEQ ID NO: 1008510 - protein, 69 aa, Homo sapiens
MNTTLTLVNIFAAIVLCELIASPAAAVPLAAERAHCVDAGFSKPAAVAARDAFIDIFTGDTIRQQLVAH

SEQ ID NO: 1008511 - protein, 156 aa, Homo sapiens
EDPHSARQSRGAAAALLPVNGSRSCAGSRGECRGAMKLTDLSVLYKGEAKVGLLKAAYDVSSFSFCQRSSVQEFMTFTSQLIVARSSKGTRASVKEQDYLRHVYVRNDSLAGVVIADNEYPSRVAFTLLEKVLDEFSKQVDRIDWPVGSRATIHYP

SEQ ID NO: 1008512 - protein, 76 aa, Homo sapiens
  misc_feature (30)..(30): Xaa can be any naturally occurring amino acid
LRIPIRRGSLEEALSHCQCLRLSGRFLGAXAFILYLSSGRSEAKKLLIPEWISSLVLVERQAVPEVFVLYFSHYGA

SEQ ID NO: 1008513 - protein, 35 aa, Homo sapiens
REAVSKKLWGKQKTYHGKQHWSEETAESDWVGILD

SEQ ID NO: 1008514 - protein, 65 aa, Homo sapiens
MAPTNSRSALVVKLEPGLGKNLIKEIKQVPASQVQTQDGMGEGLPLVNGHNVGDPVTGVHHGHWL

SEQ ID NO: 1008515 - protein, 151 aa, Homo sapiens
  misc_feature (132)..(132): Xaa can be any naturally occurring amino acid
VARQSRGMETRAFPRQLSTCQRANFLGDLYAQKNSGVTANGGPGSKFAGYCRNLVSDIPNLANHKMPPAAAEETPPYGNYNTLPCRKSHCLSEGATNPQISHSNSMQGRRAKTTQDVNAGEGSEFADSGIEXATTDTDLLSRRSNATNSSY

SEQ ID NO: 1008516 - protein, 56 aa, Homo sapiens
FDLRAYLTSFLMCRLIGSDSVTAALLASAGYGIAQLGIDELICQVSLCQLGWAVVS

SEQ ID NO: 1008517 - protein, 61 aa, Homo sapiens
GSQIEVGCGGHRMYSGTRSTVPSQSGLTCAGMSRLVPVSFCEAVEQPVVLEQWSWLCEFGV

SEQ ID NO: 1008518 - protein, 165 aa, Homo sapiens
PSRISFAVPLLFILSLLLPLGEAPAEPAQRGCLFFCTSIGRGSQPPRWYLLLLSFRVICLLVTFRRVSSKSPALLLNAPFSYFSLAGSSMTSFPSSSLAALCIPLLITVNLCSFGPLVQALPHSSFSGRTDSREALTVGLFSISHRPSLNPFLLLGYPNFSLDSS

SEQ ID NO: 1008519 - protein, 77 aa, Homo sapiens
TFYLLALQQLSPRVPFQEATLPEMLHYSHHYSKSDTHDPHMSLARVLVCDVVRGNASFVRPPATEGCEHAFYDSCVN

SEQ ID NO: 1008520 - protein, 54 aa, Homo sapiens
RIRETTEGNQELQADQDSMSNDVMFQPDSRCLVTYVSILKCGCKNLQEAEEWYQ

SEQ ID NO: 1008521 - protein, 45 aa, Homo sapiens
MVVRVGVKLAVGLVEESAQSGGKSHSSLPISVEDALRLGPLGGDS

SEQ ID NO: 1008522 - protein, 42 aa, Homo sapiens
MVPAPGSHHIDAELSAIPIGIAHYSQKYLDSSDPPALASQVA

SEQ ID NO: 1008523 - protein, 43 aa, Homo sapiens
MVSSLSSAPYTHQLVYARPCPCTARLTDSKRPWGTVQCAAQRV

SEQ ID NO: 1008524 - protein, 39 aa, Homo sapiens
DLEDPLTGFEFWNEKYEAAGESARKLISSKILCDNLGDV

SEQ ID NO: 1008525 - protein, 37 aa, Homo sapiens
ANISAENIKNNFVLIYELLDENLDCGYPQNSETASPN

SEQ ID NO: 1008526 - protein, 41 aa, Homo sapiens
NIMQVHSTSLSSFCTWFTAPFSFSIIITCELRHTVFISPAH

SEQ ID NO: 1008527 - protein, 40 aa, Homo sapiens
GSVTLGSSSRIGGQTGMQLWDISKKDIITPDKKGIQASPL

SEQ ID NO: 1008528 - protein, 45 aa, Homo sapiens
SIGRHDGSSRTEGAIGRLSRVTKRGPPRLARGLTGCFDLINARIS

SEQ ID NO: 1008529 - protein, 68 aa, Homo sapiens
SELYFCIRQLRVESKGQSHTCGQEVARMKRDSVRAGENACGVPTPELGEIPEFLLMVHEALLGFYPVC

SEQ ID NO: 1008530 - protein, 94 aa, Homo sapiens
KGEVLPTPGQENPFPIHDLSASGVLFKLDSQTPLSKKAAAQKLKKGENGVPGEDAGLHLSSPWMQQRAVLGPVPLTRTSRTRTLRDQEDEIFKL

SEQ ID NO: 1008531 - protein, 110 aa, Homo sapiens
  misc_feature (83)..(83): Xaa can be any naturally occurring amino acid
MELLTGLASLLSSPQEELEEEGKKTNMRGNRVHCTNLTTVTKIHKKQVVLCLFLLKQWMTQNYESDKMVTGSWDLRYLTMKDXLLIVYFVYVGELFCTIEDCNYYLGCTD

SEQ ID NO: 1008532 - protein, 73 aa, Homo sapiens
NSVKKDETTVNMESEGGAHDSAEDGDLLDDDDNEDPGDDQMELIYDDKKRLTKDEDDTDGADGHDDSQAHIGV

SEQ ID NO: 1008533 - protein, 83 aa, Homo sapiens
GIGAKTFAFKISFLYGSKIGRLIVGIPKIIGTSTTFKIAFIITKSIIAIPTGTIFTTPPAAPKATTTPEVSFTTEVGIPTETT

SEQ ID NO: 1008534 - protein, 54 aa, Homo sapiens
ANLVLVFCLPPGLVHEVAAQLTNVLLIVQLYLIQQSHNRGGENIFLITTAMPCS

SEQ ID NO: 1008535 - protein, 68 aa, Homo sapiens
RLQSMMSSRVTQFVQLTSQPNTDLPWRLRLLLLRSPLPVPGPGEQMLSCYVQEDLLKKSSFYFLLVPL

SEQ ID NO: 1008536 - protein, 96 aa, Homo sapiens
MKWMAGLKTNSNEGNVAFHKAEIPSSRMVDEKHLSKKSGTVDKHDHNPPTREDDMNSVEMYPEHKPYGFYKDFLLAAGCKGSRLESQHFGSAKRVD

SEQ ID NO: 1008537 - protein, 56 aa, Homo sapiens
PSGQQGVIKCPQLGGMDHTEKRGRIYLKAEVLMKSSMQQYEMQKIYIPSGSKTGLC

SEQ ID NO: 1008538 - protein, 56 aa, Homo sapiens
VRRVEHAGDVRIADVGFGPSARRARSILRTSSSVGAWLPEVVNDDGKAVGGQTLGD

SEQ ID NO: 1008539 - protein, 45 aa, Homo sapiens
CGACANLAITVPRKRHAHSRGLVHLSDFSLGVSIPKSELLWLVPL

SEQ ID NO: 1008540 - protein, 113 aa, Homo sapiens
RNSKYAEQQICAWFFLWKLRLRGAPGIWGVSLPLLGGASQLGYLAVRDPLEEAVCLFSDLKLHAGRTTTLFKAVRQGHLSLQLALSFFLSFFLSFFLSFFLSFFLFLSWLVPL

SEQ ID NO: 1008541 - protein, 37 aa, Homo sapiens
AGITGIRHPCPARRTGFHTDSKVQTIDDFFEAIACSA

SEQ ID NO: 1008542 - protein, 64 aa, Homo sapiens
YESSWYPMITIFAKWASKGEFVSRYRAVAIFSPGLGNITRLPEEDQAQAQQGVEVPLIAFVIVE

SEQ ID NO: 1008543 - protein, 73 aa, Homo sapiens
KTLLNWLRTRPGRLATLRKGSWTRGLWSVLAVLDEGFQQLLLLQPTLQPVSLEGVFQHGRRELAERTLADVGI

SEQ ID NO: 1008544 - protein, 72 aa, Homo sapiens
KQHTVNPICPVLLSEHSLKSALLGALLSRRRLVERLQAGLDAGYRDSDKHDMREHCLQFLRSTHGNPTVPPS

SEQ ID NO: 1008545 - protein, 80 aa, Homo sapiens
HERMTHSLHEASVEIHHFKERKPGHVSRAGILYVNPQRSGRESVCGQLDETEGGINPHGVNIAIQDYPLGSIRLKIGLFR

SEQ ID NO: 1008546 - protein, 42 aa, Homo sapiens
MVKPEHSTSALEKGYHTTFSQLKMDVVEVCLYINCSHFGWFR

SEQ ID NO: 1008547 - protein, 36 aa, Homo sapiens
MAVSNRLNYVQLSYPHRQDVGYVPARVRHFYETPLN

SEQ ID NO: 1008548 - protein, 89 aa, Homo sapiens
RMLEHVMMTVDTNLDRLVTLEELLAFTQRKEFGDTVDAWETVAMPLAVTVEKLNHSQEDRAAHYDYLNANACLLIYIDDAHEWMNETPA

SEQ ID NO: 1008549 - protein, 69 aa, Homo sapiens
NSATATATSGIHHRDIHGSHPISWLSVFVGLLQLETLRAHAGKRGNNPQDTLNDMPQTNHVLHRLLAGS

SEQ ID NO: 1008550 - protein, 42 aa, Homo sapiens
VLSPGLPKCWDYSMSTMPGSVMEINLLLHYANIMVPFLCWFR

SEQ ID NO: 1008551 - protein, 60 aa, Homo sapiens
IRLPRPPKVAGIADVSHRSWPPQKKDFKKNFSCAGRSGSRLPRPPKVAGIADVSHRSWTP

SEQ ID NO: 1008552 - protein, 114 aa, Homo sapiens
RAEQRGAQVFIILPENLFLPSLLFLAWLGWEHGWWFSSFMSLLGKAFEWRIGLPECPPHWLVTLLLKTRLSTLKNGRSCSIPRTVQMVSSKCPGSQPNVLPEWSSSGCFFACSA

SEQ ID NO: 1008553 - protein, 71 aa, Homo sapiens
TIAAYGLRWRPSPRNWSFSIDSATILLLEGLEGVLRDQLALRALKEALEHGQSLGPVEPLYGPSGAVLYCL

SEQ ID NO: 1008554 - protein, 86 aa, Homo sapiens
TSYAPVGTASSLPPKTCDFVQDSSYFEDFSNISIFSSSADSLWDIWDTPDFLPGDSLNQGCTIWDNNPAPSTHNKLFQLNRPFAGS

SEQ ID NO: 1008555 - protein, 62 aa, Homo sapiens
FLIMMAIPMKDTDSVAEIREAFRVFANAGNGYICATKLLRVMTTLGWKLTVEEAHDMIRNLE

SEQ ID NO: 1008556 - protein, 62 aa, Homo sapiens
EDISLSRSIYATELQRIVERTPRLCKQLHRHSRLWCFGDGGAVLACRSGARSEPGLDPAENV

SEQ ID NO: 1008557 - protein, 80 aa, Homo sapiens
MRNLKLVCHSGILLAFGKWQSDLEESLILNTSADWRWPGIIDLGRDCLSGPPLTLALCRINLTDLHLPGDPLMTRERLDH

SEQ ID NO: 1008558 - protein, 51 aa, Homo sapiens
PEFTSQDLLPYSPQAVRQRFKDTEHLKQSSEPSPAACLHTLFKIIDEPLNR

SEQ ID NO: 1008559 - protein, 40 aa, Homo sapiens
MDITRPIIALDLPSAEAALDFVGRFDGENLFVKVGMELFY

SEQ ID NO: 1008560 - protein, 68 aa, Homo sapiens
EFKQCHIIKDAPCAVTFHPTRPTFFCGFSNGAVRFFSLEAAEVLEEHTCHRGAVTGLTATPDSRLLFS

SEQ ID NO: 1008561 - protein, 37 aa, Homo sapiens
ARYPTSASQARLGPAGCYWNLERLLGHPAQTWALFGL

SEQ ID NO: 1008562 - protein, 81 aa, Homo sapiens
FGYRLALHVYQHGLTVFLGQVTRFVGDFLLHHCIARWIAQKGGWVAALNLGNGPILNVLVVLDVVLQRQFEVLKILEPETA

SEQ ID NO: 1008563 - protein, 34 aa, Homo sapiens
MPALWGGVRLMLFLGWKISLESSAFWISARDSRS

SEQ ID NO: 1008564 - protein, 135 aa, Homo sapiens
LTGNLLLVLLAVRDPRLDTPMYYFLWRLALVDAGFTTSVVPPLLANLRGPALWLARSHCTGQLCASLALGSAESVLLAGMALDRAGAVCPPLRYAGLVSPRLCRTLASASWLSGLTNSVAQTALLAERPLGAPRL

SEQ ID NO: 1008565 - protein, 44 aa, Homo sapiens
  misc_feature (10)..(10): Xaa can be any naturally occurring amino acid
LGTRVEEDRXHFAFFQVGQCDATLTRWLNHIQHLEEKTIYTRMQ

SEQ ID NO: 1008566 - protein, 44 aa, Homo sapiens
PFATWKPSMKTADTVLDVDRLARAAVNLGRHLTLVRVRGGLHDV

SEQ ID NO: 1008567 - protein, 69 aa, Homo sapiens
LYYTEFTPTEEDEYACRVNHVTVAQPKIVNRDRDMYAASWRLEDAALRKHELQTQLASFIILICLYAYT

SEQ ID NO: 1008568 - protein, 40 aa, Homo sapiens
FINLKIGHELFHSSKGRTEKNSNSRDPAIDRGHNVVTRQT

SEQ ID NO: 1008569 - protein, 63 aa, Homo sapiens
MSGAKPEAIAAADRRAPSCEEDGFAVVVEELLASRYSRSVLIATDLDGTLLTPDGTISPRTRD

SEQ ID NO: 1008570 - protein, 71 aa, Homo sapiens
AKSQSPYMRRDMVLALNSLQVYLAIQFFSRTRPDLAAGDGYSLYDLQDLSDRPTTLHCLYDLPYWCPDNDV

SEQ ID NO: 1008571 - protein, 30 aa, Homo sapiens
MTVCLRQRFIYHTKANCIACTKLRSGYKHK

SEQ ID NO: 1008572 - protein, 49 aa, Homo sapiens
IAFPYFCLPVYHFKLLSSPNCIIRTTPILIFPFSSCVYVNAINYGFNMT

SEQ ID NO: 1008573 - protein, 40 aa, Homo sapiens
TYTTLHTVTTLHTPTNTHPYDIETPYGGLLYDVDPRTACN

SEQ ID NO: 1008574 - protein, 48 aa, Homo sapiens
RYESSWYPNPLPRGIRRGQLSRLNLVVNHRIQLRRENLVLDFGQRQRR

SEQ ID NO: 1008575 - protein, 104 aa, Homo sapiens
CEFGTGGRITRSCVGERQSLTLCPGGSTGAMIYDSVQPWTSEFKLFLHLGLASSWCYGCVPPRLDNFCLWGPSRGFSMWAKLVSGSCTQVIWHPQPPKVLGLQV

SEQ ID NO: 1008576 - protein, 37 aa, Homo sapiens
SSYSPVSFHANLQDSLWYILQDKSGGNKLPQLCLPEN

SEQ ID NO: 1008577 - protein, 114 aa, Homo sapiens
YLGRCVVVLWVLLSVDNVYLRLTDTTTGRYDAPTTTVWDYDDIPVTNPLRLNVTLNLLPVTVKTDDKRTKDKALRNAHRNAHIKGLSRQHQIKSKCSSEIDNWISLWNLKLVNH

SEQ ID NO: 1008578 - protein, 46 aa, Homo sapiens
NVHYRNSKTSSKNSVIHKSQAVYSLDIFYLESCVSGTSYQWEIRLE

SEQ ID NO: 1008579 - protein, 145 aa, Homo sapiens
VISRDAMLFCDCLLLITSDGCSMCRQTPPNVLCIPTLSALCHPLESGLVISTLFGSQAPRAYGACGLAYNRCTVYLCCLQLGAIVFRNSSDSGQCSARASRCLVSGHQTELTAAACRPPRNSRIPDICPPCSHEDAPAQPLALPR

SEQ ID NO: 1008580 - protein, 35 aa, Homo sapiens
RILWSVISKVAGVLWDKVIDVTLNLWVGMVAGSIF

SEQ ID NO: 1008581 - protein, 79 aa, Homo sapiens
  misc_feature (28)..(28): Xaa can be any naturally occurring amino acid
RSVSHVRAVERGPHAGDGQWASSELWRXTLMQVVCPVVTFRAWKEDLMQCGGPVSSCQSCGKRTSCRVMVQWGIRQSCG

SEQ ID NO: 1008582 - protein, 53 aa, Homo sapiens
EKFDITEEIMSGARTASIPPLARRRRLEPQANGETPQVAAIVRPDYRSHSSII

SEQ ID NO: 1008583 - protein, 104 aa, Homo sapiens
  misc_feature (60)..(60): Xaa can be any naturally occurring amino acid
  misc_feature (66)..(66): Xaa can be any naturally occurring amino acid
RSWYVSRFCRSPGSLNRYIIRKLRINNDVQKIRCLSLSEITSYTLSNIFSYDIILSDSQXFSFNRXLMEKRPGGKKKQIHRMARVVISYGIKVNILLMGGVCLL

SEQ ID NO: 1008584 - protein, 30 aa, Homo sapiens
MLPLAQLQLEQLQVSLVSENRLCHWYRGLA

SEQ ID NO: 1008585 - protein, 100 aa, Homo sapiens
GTRRWVRRHCSPCVRWDAMDAEYTQYAERSSLAGVGWGVFGSLDAHLGLLVVRRDFIAYDAPHHVFVCVRVYAGWSVETLDVPKLSVCGRFDFPQDTFTV

SEQ ID NO: 1008586 - protein, 81 aa, Homo sapiens
FELGTPDEVFSIGRVQTPTLFMIYQRHKDILNFKEETFYELTGNFEAESGSYKGKAKIKTTSKDEIDSLYNDNQLSSATNG

SEQ ID NO: 1008587 - protein, 72 aa, Homo sapiens
FWLGTLIKGARSLERARGIDVMAMDKTGTLTTGRMAVVAVWDESGRVVNISDNPPALAVTAALEVGSEHLIS

SEQ ID NO: 1008588 - protein, 65 aa, Homo sapiens
APKVLGIQAVLHHTLAPYALHYENVLFGLITRYIAATQLHWLSWKGAHGKPACQALTRRSICHSL

SEQ ID NO: 1008589 - protein, 89 aa, Homo sapiens
MVDHLGIPVGLGSDSCRLHSSQQTKIVMAEQKAVINTVNSPVEDTHPSGLNGKALSAPEMPHSGNMDFVYTSDQFMTLDEKRNLQNVDM

SEQ ID NO: 1008590 - protein, 102 aa, Homo sapiens
KNIQDLMDHEAVHEGLDLHLRLLYRLMDMSPDASLILQFQNELDGIIQDGVHNITKLIKMSETHKLLNLEGFLSGSQSRLSGTLKSQARRTRGTKSLGSKAT

SEQ ID NO: 1008591 - protein, 53 aa, Homo sapiens
GTPPFAPLSGVEVVLAAEGKMGRDFKYWVNRWCGRGTGTIDPGMGSISAIWEY

SEQ ID NO: 1008592 - protein, 34 aa, Homo sapiens
NYRQTLFYLNKETATSDGAHGPDQYTLHWHSLMA

SEQ ID NO: 1008593 - protein, 76 aa, Homo sapiens
ASVVSGPEPGPPQSLLQQDPTAVVAGHGFAGTCAAHIRPDAGSEPGELTGSSGPPHVAGAGTASRDLCLTVWRIFP

SEQ ID NO: 1008594 - protein, 47 aa, Homo sapiens
  misc_feature (13)..(13): Xaa can be any naturally occurring amino acid
AYPIEKDTQPRWXNHEADFVAETLGGVVAELERQYNVDLKLKANRNK

SEQ ID NO: 1008595 - protein, 105 aa, Homo sapiens
MGSGHSGVAQEKYAYGRSCGNIWHSELREEAVQGEVIPLTLPHAILRLDLAGRDLTDYLMKIQGPLTPIMTTTAERDHLGGGVITHGVHVALAGEADRQHHSAHE

SEQ ID NO: 1008596 - protein, 119 aa, Homo sapiens
EEAQHRKPMDQKRSSSLGSNRSNRSHTSGRLRSPSNDSAHRTGDDQSGRKRVLHSGSRDREKTKSLQITRERKCMIDQHPRGEPSRSTSSDRQDSTSRSSRTSAPESNRQGHSRTGSFD

SEQ ID NO: 1008597 - protein, 92 aa, Homo sapiens
VHLRPEVPEIQECPIGQESLESQEQRARAGLRERYLRSLLAMVGHQVNFTLHEGVRVASHFGATDLDVANFYVSQMQTPICVHAEALLRCRD

SEQ ID NO: 1008598 - protein, 38 aa, Homo sapiens
PEAFNPERFREKVGTLGGNNLQVLNGVDKDDPIAIVYG

SEQ ID NO: 1008599 - protein, 87 aa, Homo sapiens
SSVPPAGGVERAGAARGFRAPCVSVCVVSLPCRRLGMLFDLVAPSGDTEYDAALPSPALEALGVAFGDTPARLVAFEAALTLARRPP

SEQ ID NO: 1008600 - protein, 54 aa, Homo sapiens
PSAVPLIVRAFERAIPSASDRYESSYMTSTATAAVKFRPDRRFWVVYFCLMMVM

SEQ ID NO: 1008601 - protein, 55 aa, Homo sapiens
SVTLQFCYLQNVHFLFGDHGNQKTMAVQSVWDGGAPSSLGTWGRDFSDHEKRREP

SEQ ID NO: 1008602 - protein, 72 aa, Homo sapiens
  misc_feature (13)..(13): Xaa can be any naturally occurring amino acid
ELAELNDSCQLAXLRTKLRYRFRLLASSVKVAARLGVRPPSERAEKMPGVTCQPGSRVPSQVKLKSRLIPEE

SEQ ID NO: 1008603 - protein, 56 aa, Homo sapiens
RRIVRSAGGDGADDSQGHLIVNADSFEDSRQRVKAVGRKGANPERQIDLGADPHRH

SEQ ID NO: 1008604 - protein, 178 aa, Homo sapiens
MPRRTADDLYKSLRILLQDWPDLLKDFAAFLLPEQALACGLFQEHQAFAKSRKFLRPLEICFADNPSHHQTIIKVLQGCADCLPHEITELKTQMWQLLKGHDHLQDELSIFFDHLRPAASRMGDYEEINWTEEKEYEFDGFEEVALPDVEEEEEPPRIPTASQNKRIQEIGVANHDEE

SEQ ID NO: 1008605 - protein, 74 aa, Homo sapiens
  misc_feature (22)..(22): Xaa can be any naturally occurring amino acid
QPADPPGQGNVEEAIPTSYFTXFKFHKQYFGTMGFQAPRNDGLDEGEQEADNEVDEERGKKVGGRTEGRRKNDG

SEQ ID NO: 1008606 - protein, 105 aa, Homo sapiens
MHLCMRHEAYLEALYHLQSPLDPRTLLSEVCVEHRTFMDSKMKPLWIMYSIEEAGIGGSLGIIFKNGDDLRQDMLTLQMIQLMDVLWKQEGLDLRMTPYGCLPTG

SEQ ID NO: 1008607 - protein, 168 aa, Homo sapiens
RILGSSDLHQDVDMYGIKYVRDKKEEEEQTIWVGVDALGLNIYEKDDSNPKDWLSWSEIRNISFNDKKFVIKAIDKKGPDFGFYAPSLRINKRILQLCLGNHELYMRRRKPETIEVQQMKAQAREEKHQKQLERQQVETEKKGRETVAREKEPMMREKEELMLRLTGY

SEQ ID NO: 1008608 - protein, 71 aa, Homo sapiens
NWTEEKNMDGTTHAWTEEMKPHHNGSQSFREASHRAHEGVPVALLPEGEGRRMLRWPRWDRMDLQGQIPKP

SEQ ID NO: 1008609 - protein, 77 aa, Homo sapiens
  misc_feature (69)..(69): Xaa can be any naturally occurring amino acid
  misc_feature (72)..(72): Xaa can be any naturally occurring amino acid
RSWSVISGVISHSGHRRIECEFLKNVGESVAAGLMPLCIEVDIDVEQEGKEAELNPVSPESSSTEEKSXSQXMQLLL

SEQ ID NO: 1008610 - protein, 89 aa, Homo sapiens
MLMLSDLGRNVFPDFVMLAVSGVFNSGWAAVQVKVSPWFQWVGEQQAGHWTRCSSHRGHAQVVLEHAASSHFEWRPWLKVGTMKGILLM

SEQ ID NO: 1008611 - protein, 69 aa, Homo sapiens
KTTQSALTACGLPLREMTVNTLGDERECLLSRPFIVETHLEDRQITFLIRLHLSAMPCSVNWLDLEDCS

SEQ ID NO: 1008612 - protein, 143 aa, Homo sapiens
QHCVGVHAFADDHVTLYDGDEGRALDATGLLAHNGWLEQCLKAAQPLIVNGDDLASGNSLLFYREELESAGAISCSKSKSTYDSFSLMSRTISRSDVEVKCSLLSSEDFPHVYTLVPARQVPTHDLMEQGIPLVDGPSVGDPF

SEQ ID NO: 1008613 - protein, 38 aa, Homo sapiens
ACGVKDDGLERADIYCSHEALVMDYERAFVHLAEKEGE

SEQ ID NO: 1008614 - protein, 84 aa, Homo sapiens
QPFNVRFFRQVIARFFHQVAMGGRRFPHPPRGTRVFKNTAHLRPGQIHAHQGVHQTDPLRVTFEMTQILTHLAAQIVQAIFALT

SEQ ID NO: 1008615 - protein, 50 aa, Homo sapiens
  misc_feature (40)..(40): Xaa can be any naturally occurring amino acid
MRISGSVISGSVISGVASDCGRLSSMNLLCMLSAQMSSDXEELSTVDWKN

SEQ ID NO: 1008616 - protein, 84 aa, Homo sapiens
DAPHRRDADRQHLYAIESSEARHTFAGAKAISSDMFFGRPVDAEYEARSRLQHLSEHSAISSSDLFGDMDRAHRARSVSLGNVL

SEQ ID NO: 1008617 - protein, 194 aa, Homo sapiens
HSARYPAVVRPPGGAHRDDLGCPGVGNEMTVVGKHQLMQRCIFDGPLQSYVLTECLIESEIERSSTESIREYKLAGATSSRRATARIVKARRPPSSNSFTEVVATCSIPLPERDELVSDAPNNSYFHINRTVLVLRACVNAELLPLRDDRAVLRPMRAEDADAYAAGTTDPAVHLYAHLPEPEYTPASVTELIR

SEQ ID NO: 1008618 - protein, 50 aa, Homo sapiens
SSIFFFMSATCAWRVAICFSRLCLGFFFFFSWFRKEFFSSSTCLSLVLKL

SEQ ID NO: 1008619 - protein, 41 aa, Homo sapiens
TIFFLNLLMQFLLIQLKLDLTYPGLFNQGIPVGIAQVLVCV

SEQ ID NO: 1008620 - protein, 68 aa, Homo sapiens
MITRPADETTDTAGPSVPTARASDVLNGATVVLIDSDAQPGVPNVCAWRPRAGTPLSGTQTCNQRYEG

SEQ ID NO: 1008621 - protein, 37 aa, Homo sapiens
VLYEVTFGWWLWTVILSKELRPQTGAGCPLWEHFQSL

SEQ ID NO: 1008622 - protein, 91 aa, Homo sapiens
EVESRISCLESSEALLLSAGHQEHGWMKQGSCEAGTPDYAYSYVCDTSQCSSAISSSYLFEDMDGAHGAGSVSLGNVLSTADIARHSRVSS

SEQ ID NO: 1008623 - protein, 91 aa, Homo sapiens
MPQTGRKWRAGAQASSLVRRVTNSQEPDPSYLTCSLSSTWIRHIETRSQLNQLSGIYAFSCSHLFGDMDGAQRSTKCISGERAAYECNTPN

SEQ ID NO: 1008624 - protein, 122 aa, Homo sapiens
RRTHERCRKPLHGYAYASNGLYFHLRILKTSWILKLSTRLGSLLEAHLPIYGYVTQYASLILDLQNELDGIIQYGVHNITKLIKIVETHKLLNLDRLFYHGASYDCQEPYRAKLEGHAAPKL

SEQ ID NO: 1008625 - protein, 122 aa, Homo sapiens
MAPYFRDLCGAKQTMSALLTKYSRSSMRNGVKIIIREDPFLERTTAESFRLIMVHKGAVYTKKYLDLDKSLVETSLLRHFSPHLKHFETTDYFLNVIGCSFKIIFVLCTQCKQGQKNSFLYY

SEQ ID NO: 1008626 - protein, 72 aa, Homo sapiens
AQVISTKLYREPMNSENQDRHFNTSTGGGFCLAIPRGLQIYRESSDYTWRKRKQTELKRFDDPGLIAPRVSS

SEQ ID NO: 1008627 - protein, 31 aa, Homo sapiens
MCPMWTGYSLVVYILGRPKPSLSTCKRYIDL

SEQ ID NO: 1008628 - protein, 60 aa, Homo sapiens
  misc_feature (1)..(1): Xaa can be any naturally occurring amino acid
XWLYLDKVRALEAGKVNIEVEIRDWYQKAGAGPSRDYSHYYTTIQDLRDNDSGCQPLRTP

SEQ ID NO: 1008629 - protein, 67 aa, Homo sapiens
  misc_feature (51)..(51): Xaa can be any naturally occurring amino acid
SSSDPSSNSISLASSSSSSSPSISFIILLIIFRSFLRPPPLHPRLSSVILXYLPLRVPLPEMCSLLI

SEQ ID NO: 1008630 - protein, 105 aa, Homo sapiens
DGDPTIGFITEPQVDVITMRQSRDSVTHRHWRSHKRTPAQSRDPDLGRGNATFMDKVVTLSVLSRVRAAFCQTENGAMEVYVHSPPRIPSHIIVGARGLFGYGYA

SEQ ID NO: 1008631 - protein, 68 aa, Homo sapiens
PRLTGNLKAGSRAGLALPKPEGLAPFSKAEKEKNPKVQKRRTSPSGRKNDWAFPPTFRSSTLSGTLCI

SEQ ID NO: 1008632 - protein, 30 aa, Homo sapiens
  misc_feature (14)..(14): Xaa can be any naturally occurring amino acid
MVGFDLLVPRAPPXPDVSLTAYFEVTRPEE

SEQ ID NO: 1008633 - protein, 50 aa, Homo sapiens
MALGPTLTQRKQALRAETGVRGWVQQELLLGRPWGALKGVGVTDQKRGRE

SEQ ID NO: 1008634 - protein, 39 aa, Homo sapiens
DLTAFRNLVLEHRPLRRWEQPSAIITIFALVTRLGRAAF

SEQ ID NO: 1008635 - protein, 124 aa, Homo sapiens
MPCMSSSTGPTRGLLGLRQFEGLTCRFLEACLPGEAGPWDWVKVERCGKMDMRAGYSRPISNPSLVASQRDGRPLQQDFERRCLSGGGDLSGRKDVTCLCHTLAYKLIDRGNFPAEPIGAVLLN

SEQ ID NO: 1008636 - protein, 120 aa, Homo sapiens
FERPLDAYFEVIGPSLTCPLPLMIQRLGILYLKSCRGLVVLILTETDLQKMEGVLTKPEESGSDILEEQITGVSREQEVTCIDGGKTLPKQPSSQKSEPLIPSAYMDEEQGDTCTICLEQ

SEQ ID NO: 1008637 - protein, 77 aa, Homo sapiens
PRALITGQTGTQSLGKDAKGKSGELGPSVYVSLSLWHLQIGVEHVVVYVNKADAVQDSEMVELVELEIRELLSVPLR

SEQ ID NO: 1008638 - protein, 79 aa, Homo sapiens
VTVSDSAGIGDLLTFGHSLFKTCSPACPIPEGVNVGVAYMGISCCHSFLCNFSAANGGLLASVTLLGAELMLSLVPVLL

SEQ ID NO: 1008639 - protein, 122 aa, Homo sapiens
NLFMVRLAQGLTHLRKGTLTLCPYHSDRQLMNQVDEAGLLTVLGSFLDGRNIILSKSHYLLHGLGAAMQPPMLVTLDEELRPLAMSVPVGHAKDVVGQAGKPKTITRIQTHTTPMVVAHGER

SEQ ID NO: 1008640 - protein, 355 aa, Homo sapiens
AAAAPGLTAPWRLVQCCELEAGELGMAVADSSRMGALVRGGQERTRVDGPEWCISRSKQAPVGASLLGTAWSLCPGRTDKTSLIFLGVNSCQGATQSEPGRWRLGRSAIRRSGAILSNNERPKPVITMPEEQRDPGLGSTEETVLVGGPVEDTVWSPRLGTGPLPRDESPEPLYSWLYARRILGNALETTPISCQFVEGIAEGTFQHSGELAQRDEKTCKSGMKGIELVLVWDRCPRSGVQRTQCGLVPYNMTVIALVGLGTRQTYVVAPIISSPAFAKEPYKNGIVPGRFPHAFVETILVPWKTGWLYVPNAWVGMTNMGNQEFERTSPKYLRVIDSRQVERRVVARSDSYGVP

SEQ ID NO: 1008641 - protein, 104 aa, Homo sapiens
MGYPETWTFHPDVRSVLRFPNPDSFPVWQSDPNYKIPKRAPKDPVFLNYRFPPRFGPGTTNRGAESCRGRTIHNSNLVPHGPLNQLRLPAYCPHWRRIECDPDT

SEQ ID NO: 1008642 - protein, 310 aa, Homo sapiens
ENEGTAGDQCVVCDLEWSQWTAILDLPPAQLRDAHSVLSPAQRKCRRLKFDFQAQSPKELTLQKGDICLHPQGGGQELAGAESTTDAWASSLLIYVEVLPADEIPKPIKPTTTKCLEYGEACVPSNTFNGGPGGWSCPYRKGEHIWLIRNGDRANWYRGTHTGDTGGCLRAYTPWQLTVQVIFGCNARVDSVAFMMTREGEQRDSRSHNGNRARIIHPALRGHRLIYSGARQTPPAQVNKRGSSDNRRRTCQVGRLVGELHQPKSERLRGGLENARRSVANTSRRGWMGTPEENDPGSLMAMVRRSGMRG

SEQ ID NO: 1008643 - protein, 413 aa, Homo sapiens
GSQWQQFSPVGRLVCQQKTIGESHLLIHEVPSCAEHGSKRRSEDDWPRTSVKRSASGRRGERSIYRRYEAKAWLSARTYYRIVDGSGQEGLRLELVTALKYLTAVQNAGRCDGASRREHSGEPERDAGCKLNSAYAERMGDLAALQSGRRVRKHPGWLGVGIRSVPAHLNPRSKGGIEHPENDRAEIDAQGVLFRTPMNAIFETEALRRETISLAVYATRSPNGLVECLRASVITAPNSAGPSTSGLFDIPVRLWEPSMKKKKGEDRKPITNVNDTQTRYAQVRNNNPHTANRRSKSLGRIHWRPIGPQYSPNPLEADRYTFKWTGIPSACSRTWVTRIQVNEREGNGLINSFAADQFQRKETPVAITQSTPWDILRAQVRIGPTDRDLLCSTYWIKPANKDCLVTEAWAHEP

SEQ ID NO: 1008644 - protein, 389 aa, Homo sapiens
RREGGPRLSVWQSETCLVLPTARAAHGSTMPCTPGAPQAFQLPWPVALHLCTIIDCERGSCNAGSERNDRRWITIDGTPDSLTRERNRSRSDSHHAQHRQSRHCHLRMCTTNGNPTLSCTRLAADAHAYLLRLVALKRTKVHHAYIPLPRLNRQPRRYHVHAHQTTHPSTVLKHAAATSLDLLQPTRRLVHFPRSLAVYPAMLGHCTLEGHDSPTDHGKYSQIRFPFKANSAKLGERPPPCGMRTDTHYICTPQGDIRRFQIDDNRHWNHYRSQQKHSTSIVSGNRYTRQGLVHLYLGKLSGDPTLTRVCGALIPLTNGALAAHVTAYSGGNTSAYTDLYTLVYTSCVIHCRVAMIRLEHACGHRLVCVTTRTFVVAASKTFQPSLVLR

SEQ ID NO: 1008645 - protein, 412 aa, Homo sapiens
GLHQLLLRWAWECPGVPVANRGLLCGLTPQGRASLAPLPLRWDPDSLLVACWLEWSECCAAVPWLTVRGFCQPALSQWTLSELFTKLYCIGQGSFGGRSTSGLDNHHHMDRGGHHRSSDHGCDGLRMTTRRDRSMQGDHVSSGSGCDKAHYNQPAYLTGSYLQEQQAIGSSWSTLGWRLKQLDLAETQVPWHGDIAFATDPCVRFCNGPWISLAPPETARNPTRDHQMLAHVLTTREPVVDRDSWRTVLAGSHGPSFTCTAASIYMREATISLWPAPLSSGMATVTGPFLRQVQAHIRLTPGVTILVSPWGIHAGTTLGSLCADLVCVVTRTTTSCDPSLIPNMSWCYRGSRVTFPRGNAVARPPVPGVVVPSGTRTKAPFTVQALRSVECPLPFTAQKGHHPSILRCTAGS

SEQ ID NO: 1008646 - protein, 139 aa, Homo sapiens
MLAIAMHLTSSGSPDTQSLQRKELEAGTPGDRGTTATGGRNNARRTRSRSNAPSREGRHEKGRDLKREHLKGAPPNTSPAYNTVKHGDPPATGRHPDGNTIPMDTDRTQTSRKASTQRGTHSIKDPLPSLYKKQKRPGN

SEQ ID NO: 1008647 - protein, 114 aa, Homo sapiens
MVLTVTGTTYFGGYVTLVAREVGSVTKPWGSHSSTEVLIGQQTIDVVQRSTSRPGLLARRDKDKANLNPQEKAVLDCFPWYAFRLLDIPQYFQGIVVSTAINKVVASSRKNRYH

SEQ ID NO: 1008648 - protein, 128 aa, Homo sapiens
MLRPWSDVGHPLVAMCGGGSAPDYAPWIVARPACLDGKCPIGSRGPCAWTERETVRSPKVLAKSWRMIDRKNGHGRAKRRIALTDRRFVKRCAAPLGRRTRRGSTRVPQLLLEFIFCYIRGLFVRRSR

SEQ ID NO: 1008649 - protein, 134 aa, Homo sapiens
MPLPGRQKQHRPLAELCHWRVQQEVQTQRFNSASMLEPMLTCGLTSVRETRKDEENCSESKMLQMLGNTEVHAQTGLKRRLRGCMVWHLPWHLFWSLSPPEWCDTFPPQGVLAGWPRRVLGSHLLMTVSGELRL

SEQ ID NO: 1008650 - protein, 118 aa, Homo sapiens
MGRPNRYGVRQEGQALYTRAKPLVEPQQKGRNSFGDPPILGVATQPERRSRLSMEQVFRGETYQHWLETPLKSKKLKPMWAWFTQTMAPHREGGHPMPWTRGVNKSITLRAVLAWPPH

SEQ ID NO: 1008651 - protein, 241 aa, Homo sapiens
GGFEKHPEHYCEQVWLQMPGLLPSPCRSTRSTWTPGPGPDHLSWAWAGPAGLLLPAPPGQKEASYDPGVREAREAAGSGGGGARTFGGRLDVSLLPPSGGTPYVSSYWHELHSGAAPWQPWQRQSWSQCPGMQRQLQRGPSSPWTVTRAWRALCCAALWTLDLQSCTSGPSTPQEAGCPQGDYGSENRAGGGGPRIPDHRREKELALVHALRIIVVKSHRGLSSNPGPTEDGPHAGPVRVM

SEQ ID NO: 1008652 - protein, 333 aa, Homo sapiens
TVPSKVDRVLRIIDHEEAEDEMRSTFSKRITSRVNVTAQYVTKYYGSYLTGVNIMDNNGIPGSEVQTAGLFFELGPIRWSVQSRLTNAMRHRVPKGRVPIVLIQQNRHQCHLRHKQLPMSSVSAPKEMLQLAAYGAELVSLYRNTPGLRTDNYALPREPPTDAMGVLAQCVHTGHAYDSKNLTNWASMEEISCLIVKREDKGEEADRYSCRIMDDRKPEQVPGLALKFPNNRHRKFPSQSVRLGSRKAAFNPYRVPVFLKKDGNVFNLGELAVGAYGRSQNTQYPTSTSHTNAVKQATNRKQLSWEQQRKNFQYGEHKHSITTAKEPLRIEVW

SEQ ID NO: 1008653 - protein, 259 aa, Homo sapiens
KWRMTPVQRGGPGGPVWPWDGEPRWLPRRFRQWHLGPGALRAVDVGLVCRCAAELAEAMAEDKDVDAQSPQLGQLGQRTMTDQRPWRRLYRLLPGLLRTSEIIDFFLGDLSQGVRFRRIMPVAEADPVHGQRTTVQRHYRLTIGDYTLRHVRLARVNVLQGKGEDNTAIHVEATQLLGPKLFQISTPDAARGVLRGKQESRQGPDDLYACTRLTTGTRSAGLLTDCEQDINSTRSPRGHQGIRASDTCCARTACLMDGM

SEQ ID NO: 1008654 - protein, 204 aa, Homo sapiens
  misc_feature (65)..(65): Xaa can be any naturally occurring amino acid
MARRALTVACEHRSPTCLRALLDSAAPGTLDLEARNYDGLTALHVAVNTECQETVQLLLERGADXRRPVDIKTRAAPASFHARWKNKRPLAIVAVVVASHGAKRERAKCTPAVSALHSASGRGLLPLVRTLVRSGADSSLKNCHNDTPLMVARSRRVIDILRGKATRPASTSQPDPSPDRSANTSPESRQLLKSNGLLSDHHPP

SEQ ID NO: 1008655 - protein, 285 aa, Homo sapiens
  misc_feature (14)..(14): Xaa can be any naturally occurring amino acid
  misc_feature (87)..(87): Xaa can be any naturally occurring amino acid
  misc_feature (108)..(108): Xaa can be any naturally occurring amino acid
MGAKSSHEIITENXDSAVRTSDPPIDYSGLSDATRARLPGHVSGSVLRSARGMNPVGLIRCIATRCTSANNSHEEIESTQESLGHDXPLRRTEGIILVGPTVWSNNRXVCRTRYRRWIVGTAPCEKFGCTLTQDNEAVETVGLPTGKPFDDLGHHCLPAGVCESAPRALGGGLGLAENNHCLPLQRNPNTARPVMWATLGGTHQGLSWSIVIPNPVGCYCWEKNSASSSNLRRPRGATLSEDRDGMMWIPRETWYGNFIKGPVCVGRTFVHDSGQCRADSDTLAL

SEQ ID NO: 1008656 - protein, 348 aa, Homo sapiens
AFCVLLSSVLSSTSQPVVPGSLAPPGTSHHVSISQVCPSGSGGSRSFSDASAIDPVCFPAPSFSSVSRSGGWRSVVCFRRGSALRVHCGVGGFMLKPRGHLQALGGSTDHAISIRHLGRVRKRSRNPGSVWLGVEDGWLVVHSGGWCRYVPVSAYCAGRHLCVGLGQGTCRRLAAGALGPMRSPDGAWAHTWVLERLHQNGSCNPRTDAIASVNWCLTLDTPIAAMVTTPMNPEGIPRQRQTAGHSTLAASTTAGIHSVRASRSRGNTNMAPLAECKTQQTVRGLPLHKPGSTMDTEAIQPTARMRPQGDPTQNHNGTPTEDWTENKNSRLKSARFRNPKHTYSAIRY

SEQ ID NO: 1008657 - protein, 190 aa, Homo sapiens
VENPSMSVCSPLSTYGIESHEVMRGQSLRSISPCDSCSTHSRVQLEHPWLIVRLRRDLPHLQASRVPIGVTRDEDQQEETQGQEEGDERGAKGPPVPSERTPLDGLSSPTLPTSFGSLAPAPIDSYYLGLQQIPQHVPSALTPCVSWSNNPAHKTPLVTHTLTQTVVFTSSLLRDRGHSIQSFSLPTPIL

SEQ ID NO: 1008658 - protein, 101 aa, Homo sapiens
MCTVSSLQIGYPQPDLHQYPIISSTGYITSPGLVLWRRIYTFPLAEKVKAFLGCSICVIVDCMPPVAAATTAVSCWLRAAPAKVEAKEESEDVGEDTGFGL

SEQ ID NO: 1008659 - protein, 226 aa, Homo sapiens
PALGLLDAFVQMLDQYEKLAEKNRKDSEDGSHLDRGFDTASVATDSELVQSGKSEISELRRTLQKPGRLELASHKLQHMKRIPLDETAMEETKGRYCMQLAQIQETDLAALEEQLAQLRCEMEQQNQEYKNLARTEKTRLEQEIATYRRLLEGEDDPPLLLPVLLWIRSHAHACGRLQPPSAPGHGGTRAGGVHPRAGPRTRRGAQPAQAGGPPVAQAHGVPSRPL

SEQ ID NO: 1008660 - protein, 88 aa, Homo sapiens
GCYRFTLMGFVPGPIPRPPPRVATVAFILDIAHCVCLGSLSTVGTPADLRRFPHPLDFRHLSASLPTPFGFLGRGEGSGGQASRLGGH

SEQ ID NO: 1008661 - protein, 153 aa, Homo sapiens
MVSHLCTNPVGPIEPTGAQGFSGSTYSRMNTQPVFSNAYTQWDLASNQCRAEQLTEFSLEEIYSQARIERNQPTNQEDLLRPSLRNPGSRNGTTDFHQLKEAPDGSVESRDSSLPRSQKTVHVGSGLQGARLFTPNVAPSPDVGHLLQQRLEE

SEQ ID NO: 1008662 - protein, 138 aa, Homo sapiens
HVFLHTRHKFSWDIRALWALSALCGSLLLVVYAHNTNPCGGISPNRWKLDSCVSPLYYISIQVGWSPSGVVYLLNQINGFHFLGRELSILAPICFLRLAPELNTGEGHSIRVQAIQRRAPISPMPDPGFLSRSRPFLC

SEQ ID NO: 1008663 - protein, 229 aa, Homo sapiens
MLSLHRSKPYRLLINISPRDLAPRSIARVVGDPIPSGMGILLRIIGLWAAPAQSTASNRRVYVRGMQSYSLYRSCGLPKAPDAYLFNIGAPTSFTYAPDCRIKGPQPSRPPPSWTLRFSVVFTSRSELETVNAGWRCSPPAPLAGPEAVIMRPHGSHVDCWLHSSLPVQEAILYQISMERPDPAGHLTLQGQPACSYTFSPFQVLSLLLRGSAYRHTEYLRLGFRLSKA

SEQ ID NO: 1008664 - protein, 107 aa, Homo sapiens
MTAVWEDHESEWSSSPLAGGPAQACICRGSQMELLESNEIASGKAGVGKRQCMEWMASLTVFMQPVHTERMAMALERRMDKIEEGRPGLVAYACNPSTLGGRGGRIT

SEQ ID NO: 1008665 - protein, 218 aa, Homo sapiens
  misc_feature (158)..(158): Xaa can be any naturally occurring amino acid
VLVPGIACFNVSDHLVFSRKDPYESRVNDFVVHSQGSIRFKPGLSIPPAHGLDRASLERPVVSRLPLWELLGSPIRLLLPFAVPVIFFYGASPLRCWLVGDAVNGIPCSFMGYYAPSMLPVLQGAGSHTSGPLQPCQRKRRIMGPSPCRVSRSRFELXIGLNHGGPWSPDLSSGAASCAHCGFSAQGLKQLLSPSSAPIPWLSPGHSATPLEGTGTTP

SEQ ID NO: 1008666 - protein, 214 aa, Homo sapiens
MCERSNNTLLLVAHIVIYVTQYNVGTWRLSSLLVNACSFILSGLFNVLINDRPAYSFVVITYFRYTRPYGRCDNTIVCDVLPESCFNPWVCLYSSSCVFSMSVYESVCVFGIRDIGCLRFFVFVNFLSLWYYLHLLYCILRLLCACSWTLSLPCLFLFIRVLHIVFSTVCSYVRLYTWPASLLIPLRFATACSCFAPVLPVYSVKSVASTLSYV

SEQ ID NO: 1008667 - protein, 118 aa, Homo sapiens
MVVSSGYRGVVPRPEVCQAAPLSPSNRVHLHTLNVNATHHCRVRPPSSARCTLAAVLSPSTLQVRLLRRLRTQELEQVGCRPWARRVRPLPATWGRHRHLKDLCTEGVLFPCSYVRPA

SEQ ID NO: 1008668 - protein, 148 aa, Homo sapiens
RVKSGPEHVEGQVYRARKRVHGCGRTPGCPNGEGYDACGVTLPCQASREPIPPARWLRANVAIAQDTVVPGPHTQAVVKHPEEAGKGKAKTLELPRMPIAGGNPEIVPPSPGSQVRSHIQPAPVSTYVRRSKTHEARATLSPPTQSPT

SEQ ID NO: 1008669 - protein, 193 aa, Homo sapiens
SHMASRPRPGIRLGLKEGNRRSLSSGLRRSRSAQEGWTGNESFSGSRDPCHSAARRSSGAAGAPVPSVLPEVATSAKPGEVWAEAVKVLSVGALPTPSLPGPPGLDPWLTLPGGHLCLHMCCRQDGQAASGVRWGGTVSTVQRCSGKGGYLCGMKLEEPCRLECRAKSVPLSSPDYEFLEIFVHALITRGTDI

SEQ ID NO: 1008670 - protein, 150 aa, Homo sapiens
MQNLEIERAVPATALKASLENSLEETKGRYLHSSWPRLQDDDLAALEDADWPRLRVRAWSQHEPTEYEDSVLDVEERALELGDSPAQPTRLSGGARTAHLLLTPQFYLWIAVITETVTSLQPPNPHARYMDVHDGKVVSTPASRSFAHKN

SEQ ID NO: 1008671 - protein, 70 aa, Homo sapiens
MEKSDLLLRFIAENCTGAYFRTSFHVLSTGSQSTLTYKCCEPPPRQVSRKAASDVVLVMYQNLYLAVNDF

SEQ ID NO: 1008672 - protein, 136 aa, Homo sapiens
CAWRMAVHPGRSVLSCASQASWRPGPCKEMVELCRISVSAPLAYPQPTRVLEKGCTEVLLLRSGRVQSAVSGWEFVCGQAPCSGQPLPVREVTGRLCPAAPSWEVRSPSARPPPRLGGVPNSSLRTGHDDSGSFVE

SEQ ID NO: 1008673 - protein, 149 aa, Homo sapiens
EISELRRTMQNLEIERQSQHQHESILENSLEETKGRYGMQLAQIQEMIGSVEEQLAQLRCESGAAEPGVQDPAGARRPRLEQEIATYRRLWRGGRPLPLPVLSGSQSSRDVTSSSRQIRTRYGVARWKVVSTHEQVFAPRTEAGPARSG

SEQ ID NO: 1008674 - protein, 203 aa, Homo sapiens
GRTYGGNVVSTGLMKNSSPLSFGPTVFAFGAHTRRFGGETARVNRVESFVDNYVYLPTSPNVVSGTGYTAGDIVGTTEAIVLSGPLTPRFAPFYSTSTEDSFIEHLLLPRQYALRPNQRIVVLMGESPTHSSVSAPPVPSPSPVPYGGICTEGGTFMWRFWGSPGSPTKLSAVPLCQPIVLRATAAMITMLAGGSSQDILPSN

SEQ ID NO: 1008675 - protein, 81 aa, Homo sapiens
VLDELNLVHEPTCEMQIENLKEEFGHTEEEPRGGDERQVRPGGGEIKCGDGLCPQDVDLSGHPQRELRDQYEKMAEKNRKD

SEQ ID NO: 1008676 - protein, 89 aa, Homo sapiens
MRSYKFPLTTESALKNDRRLYNTLVFIVDVYSRTSTRLKQAVKKLYDIDVAKVNNLSRPDGEKKGICSTWLLITMLSDVAQIPSGGSKL

SEQ ID NO: 1008677 - protein, 100 aa, Homo sapiens
GLWHPSVWVPLTLLPPFSRFRVPAPCPSLVTVVCSRCPLLAVSPCRLECSLLERSLLPLILFVTPSFLPAVFVDVHFFCIVFFSRDTDREEVVGIQSMSQ

SEQ ID NO: 1008678 - protein, 123 aa, Homo sapiens
GSGSVGPYVAVWCCMPCALSGCPYYGGLLHCGQGLSWERWLAPIRCLLAVCCDGSVAVSKTGRKVCPGGSDLGALPLVGFYLKFSCSVIIEVFGDGRVIQTISGAARPLPSFCTEVAQLIPNT

SEQ ID NO: 1008679 - protein, 325 aa, Homo sapiens
GIPFMSFLYGSFLFSSSALPARGQRLLLCSFHLLGCHLLRYLGRGTLLALVPPRGFCCLRIFYAVVLFEPFLFSPEGGYSSLVFFPRVHYLFHVVFSIVALFTPNSFQRFPFGRLICWFQIVALMCSSDPFTLNARVSAMPFWVWHLEMASICNYAAKVLACWSGHLATELVYKAVQCMHGCLWSIPVIADGRNPEMWVILRKPWPLGHSTVMMGSSTVACHHCRPLVQYVLFTMGSRLEENIAVWVLSDAMDNAPQQPGQIFQVKLTKSKWPRECLVLCRTKGQSTNLSHYLIAGIQHSCQEQLGSTKRLDPSPSHDVLWGALV

SEQ ID NO: 1008680 - protein, 85 aa, Homo sapiens
MSFILFLESSLDQADCRTTFSWFPGEPHSQPLVLSVPQFYILLQISLTGVTTAWPTARHQSTPKWFPNLNHAMTEAITPMANICY

SEQ ID NO: 1008681 - protein, 76 aa, Homo sapiens
LDAPLCYSHRCDSPLHIRCASLSPLSRSSISGNSRWLSEAKLRSLYYHFYFYSSMQSLYIGTNETLAFELTFAGAF

SEQ ID NO: 1008682 - protein, 176 aa, Homo sapiens
TRPRWFCRALTWIAALVVSRFPLSGFSPALYSIVGRPFSVPTLPAVVGARPSLERNHIRAGAACCLHVFSGVLSPFPASFLVFPVLARRSSPVWDPPCVLFPFGREPSRVNLLLASNPLPGISSITYDSAPCLACNNVGAVAALQQVLSPSFLVNCRWVTYINWGVLAPVTGNPPP

SEQ ID NO: 1008683 - protein, 152 aa, Homo sapiens
MSSSNPGFVGYTKTLLHSVEQVVANQVFKAPIRPARLPPAYLFPPPGGDSWHDGGPGGMRVMADEVASWIRGGPRWTCFMRWSVVEIRRVAFRWWSGAWIRGGFGGRNDELDPGGSPWTFDGYRWEEEEEDVEDLDKLDKGEHRQERRDRPY

SEQ ID NO: 1008684 - protein, 113 aa, Homo sapiens
GLRVTTMRRISDVYLTRHRSFRTVESTIESTYMELEGHVELGQRHVSLLAPGPHMPRSRMPWDSKQEASPEVAPSGGRATDTTDNGPERKQTLGTRGSHPVNFRRTEDSVGFT

SEQ ID NO: 1008685 - protein, 67 aa, Homo sapiens
  misc_feature (3)..(3): Xaa can be any naturally occurring amino acid
  misc_feature (31)..(31): Xaa can be any naturally occurring amino acid
MAXAPPTFGTRAQHLLGKILPSTGRRKSRKXIATALGPTARYRPGYLTPGRRRNLGTLQGQGMLNET

SEQ ID NO: 1008686 - protein, 195 aa, Homo sapiens
RVPLCAAPTSPFGQSANWSPSLPCKVTIITLLLRANSSLLFLARSAYRSFNHYGVDIFSGTKSPTRQIFRGRLPTLPCVSSTFLLSTSGPKCAPLCQAAFDLAKELLFPGLVLQPNAFPHFGDQNLSQLIPSRESTHWRQERAPMGTDARIVQAAVSCHEGRHLVSRVDLDHYRVISGTGMQDDDTALTLEAFGV

SEQ ID NO: 1008687 - protein, 227 aa, Homo sapiens
FLCMSPFAQLTKRAPFILILLLLYHYYFDYCSRQMVRLCAVIPLPTACLISIRCQPYNAAPCILSSLWLYSIDIDGFVHQVFLRNNATGYGFFQVDGVFLFGTLNVGVFPFATVFVRRGVLSWYRDGCYVSALLVCRRVLPPPRVMRRKKLGQLWPLEREWLRTMAMGTVLCATIMCGLPLHRIRDKRGLLARLQDATLGCGIPRDMCMLSVRERVYKVTENGVRAM

SEQ ID NO: 1008688 - protein, 106 aa, Homo sapiens
VSYFHSPYFLFCNRNPFSLRTTWVRSTTAVCSISRCTCVIGPCPHLTCLRLLMFPNPHFLLWRLNGIPHSVGQSCIALCLVPLRNDKRVLRQCTWMTLPRVLDDHA

SEQ ID NO: 1008689 - protein, 138 aa, Homo sapiens
MSPRSLLSLLVNTVLESAYDTTTALLQCIQFATYKDLCNGCYFCTTPRFCLLDTLVEAVPDQLEFRQSSDEYSSINACMNPDMICKARQYVSMTLHFLIQRLLSSLYTWSLRCLLGSLRVSSYRHRSIAVIFSFLIWI

SEQ ID NO: 1008690 - protein, 104 aa, Homo sapiens
  misc_feature (91)..(91): Xaa can be any naturally occurring amino acid
MPDSGRGAFRVVDTEFYILGRSEDPSSAGGGEVMPHPSQGEPLKYIFPALRLCHTCLSHVHLPTLSPAACPDTPPVVPVKTSHLVLVCMVXRKQQHLSQRLFNT

SEQ ID NO: 1008691 - protein, 69 aa, Homo sapiens
HASLTMPVWIAVKSWAGPVLRFSLHPLSFTYPHLAFLIANVDMYAMLSGRYLIDHLSGPISYNYNEQSG

SEQ ID NO: 1008692 - protein, 214 aa, Homo sapiens
GRIRLQSRKVGTKFVTSNSRNWAKDNVAVVLSVAKKFNGSWVRRRKPYLHTKHCQRKLQELKNGTSRLFNNFLTDAKRPALPEIKPAQPPGPAQILPPRFDPKDSPTHNQTPPGPDALWSAPAPDLRAMELVLSALQSPQEALHTPMPQYGSWFEGTMMPSRGQGGYPGNPRNRMVRGDPRASCGISGPGMPQIDVDFSLSRPPLLSPDHPYWT

SEQ ID NO: 1008693 - protein, 151 aa, Homo sapiens
EAVLPSRPLASSYSSYSRNNSRLVIKHATQPGGYYYKILSNGEFLGYSTIPCQLGSCTKILCLTYFRPKVVANIIIDILLSFGFPARIFVLVHYQRCKIGDGAVSYYVVCETYCCSLSCRQEIQEACADAVYTIMDPSVLVYLLRYNMPCK

SEQ ID NO: 1008694 - protein, 198 aa, Homo sapiens
VNGWAPPSALGPAVKVYKLLSVIVCPPVCQPGMAPMPGTAVQLQKLNNQYFNHHPYPHKHYMPDLHPAAGHQMNGTNRALPRLQPQAQRRQQHPLAARGGSSIPGGSGSSSGGGAGSSNMRRRQRQRNMPASVAQVPVAMLAPIVIDTDFIDEERLMSLVIEHGLGPHQRSCPNIWLGAKRVGNLMDRTSCCKQQAQQ

SEQ ID NO: 1008695 - protein, 173 aa, Homo sapiens
MLTLGVPVRGILDLHGSGLLRLDLEDKRSEDDYRSDQLGRYRLLNGRVSRSLEIEPRLRRNERNLEIVFPSTCRSLSNELVGIRLRSDDLSVGGVPIEPGDFGARINAIELRIAEDCTYTQRFAVRTRCVNRLLRGVQDAHWDPERIMGSTQLLRNRMVPIVHSFGFGTNGFA

SEQ ID NO: 1008696 - protein, 197 aa, Homo sapiens
RAQHDPLVTVSLKVHPTWSLSGLFGAFSISEDNEWKCGNERHLSEKGFGKASRFLPVEERYRHKDSCELGTLMIAISRRKAGSASSYDSVEDCRATQAPEHFTSESSAIIGPAVRHRYSWTSLASRLPCGTPKEEPRAASAARPCASAERNAIVCPSCLSTECRAVAIGLGRTKLSMFSAMLPASLRHWVSVIMWLV

SEQ ID NO: 1008697 - protein, 78 aa, Homo sapiens
TFVFMVKGGSPCGPEFVLSISAISKALVAYYQKYMDEASKKDIKDTLIQNDQYIAGRLASFDRVSPKSLEATGACARY

SEQ ID NO: 1008698 - protein, 466 aa, Homo sapiens
HRSDRASVPYGPSAARRSEMLSGEEGGSRRRSAGCRRQLTGTASAVPLAYTMAAPENGVMRWPQQPARPVRRPAEGSAPVEPAGGSCTPRKDRASVGHFASSWGALVRTPARGSAMGPSPPAPYVLSALAASAAPRHWTTLRNYARTILPAHAEPAPRNPMARACQSPRPTGLKKDTTDARLRLKHALVSRPFSTKARGRYCDSPGTRQHGRQGQTWPKVGPMKDKEVTHRKTGYLPHDTMRNAPHLSVKASPHTPFHGPPRLPTRVVNHDWHSPALAHSRIPLISERSGFGTRRGSQPQADFYMPHQTGARWDPLLPLCPVCVNPGVAFSTLYCVPHKCIKPCTSRTSFGLVLCPLDEALFKPFVNLQTLLGTTASSRQIDIANPPITRYPRIITHHISLEKLSTANCNPPVHSHTLLRRPTSGFRDIVAAFIHFSPIERRLFPTTLTANFAGQRLINVEYPKPT

SEQ ID NO: 1008699 - protein, 99 aa, Homo sapiens
ILYRGHPLLLAASYRFHGLQKVGYGSFADGPCNLPSHSCCNKDLGSVYHKVGIVSPIREFCLLDLEYTGSPSWLCDGRLSASPHSLPTLIVGEIAKFWL

SEQ ID NO: 1008700 - protein, 123 aa, Homo sapiens
LSPPCLRVPLFLSFVALILSLSSLSASDSLRSPLSTFPSGCPHAGGLTGGSPVPVSLVMFLRACCSALFVCCGPILVSLLVRVAAMSSCLASSQRVHIGVYFHHLLSCPSQSLSCAVHHSYPS

SEQ ID NO: 1008701 - protein, 301 aa, Homo sapiens
TRTVPSAVTQFQDEVYKHLLERSSRLHVTLMGADELGVSSDDPVTRRTLRLPVYGAEALLDRWLAKWEPDPREFAPRTGTNSDRLCVHYDSEVAWLAFSVVRELEVVGTKQLELESWCWYNSPFPWGPVLTQVQRNQRGHVRLHQKDFLVAPGLASWRRSPLVSQGWSESPSSENSNEELLSISCNSARCFTRTFTTEAAECQVHARSASLKSLSIVLHRTIRETWEEDSRVISLGTPVVHENFSLGKPVQWCPLFKECETTIWSHYNPRTGFACMGVSSVAATWGTLARNLEVCETNVYA

SEQ ID NO: 1008702 - protein, 282 aa, Homo sapiens
VFLSTLRVFAFLIPSLVVTRPSLADPFLISATRIWLRLLRNCDIRCLLTRAILTLYCGVLPFGISCAPFIPSCTSLLRFFLRVVGYPQFSLVFSLCCSWLPSGIDSSTGIALCSRLSLRYGLASCDGPLLSLVYLPSILCSVTESHMVSVSMDIQVTTPDCGIIRPCSCVDNDTPWSTPSGNRAAERSPAVWGCSSRLSEVLCQVGIVDQVRPWKEAASQSSAAVSDSSTWMAIPDHAATADQGHDAKGHGQPPWSRSCDAERAEASSAYSAKDSIAEVPAE

SEQ ID NO: 1008703 - protein, 154 aa, Homo sapiens
MHDTHKTNKEQTDQNRDPTAQRTSYKAKEVKTKGVTGRSSQSPDGQNRGDAQMREGEHRHQPGSPPATTTDPAQRHTHHTIDLRDDDPAGEKSGATDHEAEPANITTTMGAQRHETQRERPAEQHRRPTSSRPAGHTSLRRESGATDRERDQPR

SEQ ID NO: 1008704 - protein, 70 aa, Homo sapiens
AARASPTSTTPCSTAPSPIDHPRAEEYERTAPDWQAAPPAAPVRDPLGEASWAPESGGDIESLYVSAQGL

SEQ ID NO: 1008705 - protein, 214 aa, Homo sapiens
MPAGEGTKGPQLFQARFTRTGSNNSWPGLTGTAWQRRWHAPVNGLPPSKCTQSSCYWRSPMCCIISYDEYRELRKDTVTRTDAIGHETKGLKKGRLPREVLRVALRDPPHPVESHCRTVVRLIVTRKPPRVGWPPNRYPCEVSYPPFSPRQTGPGGHSWGTLTNDPTWATRGKPPRGNQAKNRRQGTPRERREQDLKNPGDIRSNRRNTEEAAE

SEQ ID NO: 1008706 - protein, 217 aa, Homo sapiens
VSPLLSPLPLFSFSHLSFSFLFYACVSFLLLSSLFSCLLSLSFLILLTLSLLYPSLSSSLFCARLLVSPSWFFSLSWVTFGVLPSSLFVRVLPLFVLVVFSFLSFASFIFFAPLLFLFFPFVFLFFWVLSSHLVTLLILCISFWFLFLSFCLFLSFSCNLCLFFFLLFCPLLFARLYLFFHRSSILCFRTSSLVTYRSSVTLDVQAALRGSPIRAVD

SEQ ID NO: 1008707 - protein, 167 aa, Homo sapiens
PRVGRSSMDGGSGYRRGGCSIDSSELSLRPSPTPSSAFGPRFAASGSPMSYSSHLTFIVQDERVSVLVNALSPKLGYCYVYEDNEVSSSLEGESIIIRHLHYKRIHHQSFSTLLYPWCGQTSHQTGLDANTTPLYLPTIATDALNPSYACSQRSHPLVSTRLILALP

SEQ ID NO: 1008708 - protein, 141 aa, Homo sapiens
RQETLKKAFSFMIPWLKSGKLFPGLRNPRPEEFILFKNKIVIKKLDARKYEENLKAELTNWIKNGQVKKVKRVLKNLSPDSLSSSKDMVKMFPLLVEKLRQMDKLPAIFFLFKNDDVGKRAGSVCTFLEKTETKSHPHTEC

SEQ ID NO: 1008709 - protein, 72 aa, Homo sapiens
FFYYIHNNTGSSTQMLVLGRNTLVGVLPIYPCYTSLVVARPVYYSPVGSYTYIHLGPTYVVEYTWWQRKTLF

SEQ ID NO: 1008710 - protein, 150 aa, Homo sapiens
MVFLSHGANVRHAWIVPTLDPELLRLSKVGRHVPTTEQVLQDRELVCGSHAEDGTTSKYFVSTSVLMRSERRLFGAVVGRRRPVTLDMLDLGAAQGKLGEGPGRSWWGQLTRPRESEIQIEYEANEDMDEGPGVGEPASQRLPQRRASYL

SEQ ID NO: 1008711 - protein, 113 aa, Homo sapiens
LIPRSPDSRPYYLRRRSLYSSSFSLRLRSPDYSPFFLRPRSPDPLPLLPQTPSTESKPPAPLSLRLWMLGPTIPSFLRPKSHDPPCHHLPTARAWQILHIISRKENVGGTIRP

SEQ ID NO: 1008712 - protein, 105 aa, Homo sapiens
MIESVKRQDEGRAEYTPGNKYNTPNTNKHQNKDDTNGQEDGRNKRTAKRRQPENAKTKTKKQRCIRAAATETGHTEHHGKHTTKKGKQKEQKRTKERTRTTNDEK

SEQ ID NO: 1008713 - protein, 115 aa, Homo sapiens
TRGSPTRRDQWVTAACEGTVSSVLQDLGRREPHPFSLCHHIRTACRNSCGIALSFKEGREPFSDPSRASPVLPRDPSLMTLRCLSPPEWRGRDADPVGDRGVCGGAIPRKAALSG

SEQ ID NO: 1008714 - protein, 179 aa, Homo sapiens
MYGVIFYMSLLQRMVVPCSRYHAPNKSTTQVRWRSKVRLVLIAAVTCGQGSLNGVGQRGRSEQAVSTPLYRCTMTKDPCASRVPVCLVGTWLRPPRDATAVSRQPRIKEPVSIETLRQTVRFMSVPLHVCITWLAGIPWHDYVYEPRTNVIGRRLTWMGMPFLHVPVTPRDDADVQTWQ

SEQ ID NO: 1008715 - protein, 52 aa, Homo sapiens
EPTTFMVRREGHPETLQSWHIKVKRVVIYPQSHEEPVKHTPLPKAMVVANGY

SEQ ID NO: 1008716 - protein, 145 aa, Homo sapiens
MAHLQGPIFLAAAGSAAHAVFPVLQDPASPPMALELVNAGGVLRFLEQELETITISGPAGAKKCHFYYNISEVKVTELQRDIFRARYYQPQQELMLTNHQVPPWGNAASGDSLLYWFFYDGGYINSLSMRCDPSSTGLELSLGSR

SEQ ID NO: 1008717 - protein, 96 aa, Homo sapiens
NSSSFPWSRAWNLSPSHLCHRSQDPCRRHYRACSSSLESPSEPRCHVRLRLQCDSTSEMAAKEPSSRRWTEFTSRIQKLCYGLTLWIYVDPALDHR

SEQ ID NO: 1008718 - protein, 97 aa, Homo sapiens
MGYRGEQQGPSEDLSFFWAHCGNLETTKLLARSGALEIEGSLGTPYMGESGEHGMRNLAKAKLEGLCQGSSRGYTGLGLRPSLSRLKGDKSVKSQNR

SEQ ID NO: 1008719 - protein, 244 aa, Homo sapiens
RLVPEPTTGDDSDAATFKPTLPDLSPDEPSEALGFPMLEKEEEAHETPKPHMRPLHEASALSQDPRTQPQVAARRLPASAVWRRGPDSENAGSRWVIQGQDPTVQERDRRSSDNPYLIRRRDKKKSRLPESPGAKHVSCPERHLGICQVYPGNDRGLLVLGCQMDMAKEEAKTTHALERYHNFNREKPRPPEVKTHGSSEHTRGGCYRGKGHKTQNHRATMDLQQTASRKQGGEENEHTPETES

SEQ ID NO: 1008720 - protein, 271 aa, Homo sapiens
MSLIHYSQNTVAKHCDFLHFKEQWGIAEVKVSTVRLLHTHGLSSTALPIISSKHRARGACASENMLASMRVSPWNSHGKPLKWKPTRVDPLYKIYTCTRPKRGTLSPYAFLARYHLARTNFHGKCPTSLTFLTIPKLGAVFAYNPNKISPRGAFSHVYTPFKARIASMWRPPCCVGAPVWSLPPIANPPQRCTPPDYNMVCQTFPFYTYTRPFCHTPPVVGGRHISVITNSSSTQFVGARHNTNPCSEHADSLGTVAFYVALSSYGGNMSR

SEQ ID NO: 1008721 - protein, 190 aa, Homo sapiens
LKRLAEQNGLLGSARCHLSLLAPTISAPTHHASVGLLDMPSEPCALTYPLCGGNRGPKCHWPLVRDEVTFSDDACVACHQGPAFLRRGMVCESAFVRRSRRGQWALIEPRELDGRPPSDPSVQQSTAVCERGMYCPKWKATRSPINRCSIAAKEMKKLPGLLEGRSIHSTRGHRGRRGIADLVWTCRSRS

SEQ ID NO: 1008722 - protein, 157 aa, Homo sapiens
HSERYLHKTPLLRRDTQDQTSACLLSCEKQPRNHRRGPLSPTNDVHPKAVTTLPLHNAPHTKPATQHTNHMPMMARCNTRKRIPRPPHTICPRRPKMRDNPIYYITSSFLRRIFLSLLPLQPNPYPPIMRALPPNRHHPAKSPRSPTPKHIPITRIR

SEQ ID NO: 1008723 - protein, 246 aa, Homo sapiens
YASDAIRLGSVMSSAPASGSVRARYLVSSSTGPDFNGIAIVWVHSARVGVQNYLEEAAERLNSVSRSLFYPSPCRYVRRCPAPVSERGRTLTSSAGQAGCPSLPDVLAEVLWHSDLRGPRGNQGVCGPPRVPGEISRFVDADWSGNLRVPCLATWLSAAVDDGCRGALERIAYVLVDSRGHTALDMVANAGKDRRNTLRSVNINDIHVPSSPCGEARCRALCIALHPGSPDSHRPVPRPFVYTPRR

SEQ ID NO: 1008724 - protein, 355 aa, Homo sapiens
MLDPPKAAIRDSRNQPVVRPEGATGPPSPPVEIPQTTINPIPHPWGKRSEGAPIPLTRDLRTALYPNGRRRPAPNRSKPKVPVPLAKPISGRQTLKPPKDFPLWAEPPYGRPLADTLGRDHPARFPKGDPKKSPRTQPRERPRPPPNGTRKKSAPHFNNRKITPANARAPARPRAVKPAERHPKKPPKRNRNRRPHPKIPQWGHKNALKTLFFPTPTPISFVDAPRVFPSPRFGGAHPPPKDERRDPILHVCRPLISGPPVRESAVPKKGARGREGGATPGRFQQTTPDLFKKALYTPMYIPPKKTPKKNTPNNYYGPHTQAPQRSGGTPNHPAEKKDRPTPPPRGVKHQRGPHL

SEQ ID NO: 1008725 - protein, 113 aa, Homo sapiens
CQETSKCATSKVLVMLDQPQIQKFKKAFTMMDQTKNGFFDKENWQDLLASLGKNPPDEYLNALMNEAPGPINLTMFLTMLGEKLNGPNPENVIRNAFACFVEKAPGPIQENYL

SEQ ID NO: 1008726 - protein, 126 aa, Homo sapiens
VQPLWKSVWRFLRDLELEIPFDPAIPLLGIYPKDYKSCCYKDTCTRMFIAALLTIAKTWNQPKCPTMIDWIKKMWHIYTMEYYAAIKNDEFVSFVGTWMKLEIIILSKLSQEQKTKHHIFSLIGGN

SEQ ID NO: 1008727 - protein, 90 aa, Homo sapiens
MYTVNGPPDTCARGTRPFRKAVRWARERPGAYSGTEGGPTEATSAARERQQRPHINGNNCVQTPSRQVRSRDYTGATTTAQQRGDAQHTN

SEQ ID NO: 1008728 - protein, 133 aa, Homo sapiens
MYLVEKNMMEQSDKRTSLMTDQNSMLWILFLRMIKKQKMIWQLKRAALLDEKIKKGKGNSAPETTGGKQTLEHTARQDTQALQLSEERQEDKTACTEHAENSIQARIYEGGNILTTNGQIMAYTYVKPRSSST

SEQ ID NO: 1008729 - protein, 257 aa, Homo sapiens
  misc_feature (84)..(84): Xaa can be any naturally occurring amino acid
MHGLKPLPQDCSGAWHVVNQLARKSADVRPGKQARDRPRSGGPSGHRALPTVRYHTKVRAGRGFSLEELSVAGIHKKVARTIGXSVDPRRRNKSTESLQANVQLVKEYRSKLILFPSKPSCPKRGRPVLADRTCNVRTQLNRTGFMARSGSVYKKGESSSHHLRQDEEYSKPFRNLPLCAVPRPGLCGNTGKKEPSDAARTRIVRHDNIEASLGTWEVHKGYRRLHSVSSGQGPPQVQLGAPLVPDRFGPAIVSPSQ

SEQ ID NO: 1008730 - protein, 378 aa, Homo sapiens
EAASDCHLAWAPPMRFGAGLRLRARAQILCTSSTWAPTLTGVASVEGGTQRAALWSRTTVERGRRADEFPVEPVRFTNLQPHGRRVPTPLSNAAKPWTSTRPLRPVPALPAPRYLARRAPSKQQAPCRTTRAHQGILARPSDVPQRLSNASVNASTRFTGNHLTLCNRGLWTNWVLSTVRCIEGLPECYGTGKPELSWDSHPPGQEPWALPLYGYAPIAMLKRAGTQRRNAIPDFRSHNKHAEVSMGCSFYPNGYHGIWRPKAPPELALVRYPPVVDRETGPWLAPVVGTLPGIFTPQSGAKGGPSVPPFFEYKGPLDNGNEAKWEKAIWEYITLSNNVGGTFMGKKDNKITFSPSGLHYETTGYTRVGKIKPGRTML

SEQ ID NO: 1008731 - protein, 193 aa, Homo sapiens
LVGVAACDITTVMWRMLATVSVVAPGDIAQPRMCCKGALACVAAWSHDGTACPVVLCCWRRVPTCVTCVTAVCHYTAQPLGVLGLVHDRYMHPWVMSMVQLGADDQDLCGDGCVLCVLLMLTVERYLKVDGDVIALQVHAGVDEKLPLHVAVLDAVVMCNNVPFQWNAPVVPKCARGPFCLGCRWLELWNRPW

SEQ ID NO: 1008732 - protein, 91 aa, Homo sapiens
LLSDSAHLHPGEISSLVAHTKPVWWSLHSNANEIWCHHSDQVTSLWEINPLSSCSLLHEKDPPTISAPQTNQPKEHLTNFKSDLLSLAAED

SEQ ID NO: 1008733 - protein, 388 aa, Homo sapiens
HLEEICILFPLPKGRTLKLSGPRWEQGKRARGTRMASEVKAEAIAWEFGATYGPVGLRRDLWCCHVLYTIDRSGFTRAPCLRGLYKDVPAKHVRLSTNPATIATQLVCCQCPHVISSSHPRVRGRTNAERTWKPRDMKLAAVTRTHSCQLVETPMGQCATAEAELPEHSIVVDSSAKTPNAYESTTETLEDSLIGGGPRPKGRIDPNLRDAPRGLGEGESQATQARPAYKNAQAHYAAYGTFRLLTKNLREELINSSLGNLPAPGKGVRWSHSIGKAKFHSFGVSIRSYVPYAQTHAERFVNLAIGLGLELECPVLARSWGTRLCQKEDVPGGGFRPFFNLDTSDRDVVLALAPLGAALVMCLYPRKVGTKTRGVFVVSPPYNMAAHN

SEQ ID NO: 1008734 - protein, 382 aa, Homo sapiens
LLSECPAAAWMPSWATWRHLWSPAMGFHLPHGGGITRRGYLNKDTHEQLSEPSECAQTTWTTSTDERLRLHSSVLRRCRRDDGHRRSCLLPLSGQPAKLTFRWTLRKQITMEELDALERVMDEATENADLLERAMNITSRRFTQRTYEASCLGQGNQAKTYSLEIVLYDRELAQQMAAEDYYDVEAKGPMERKGANTITRAHEKQDTIAAYHWARDGHVTGTNPGYTTFQYPKAHPNQQREAWEQRMHTGWARTGPRKTRNGGATKDRETPAKLTTAEHNAVDMNEDTRTTAPATRTQHGELAHGEHPLYPTVPATDPNAINPPTNTEATTRQRHGGPWQYPRKSDKPMERTPAQPAAKRHRDKRTTGEGANQTTNTRTSRR

SEQ ID NO: 1008735 - protein, 50 aa, Homo sapiens
MFHYEEGMGMAGPKLFFFFDGTKLSSQEPATELGIETWELNEGLGLPPTS

SEQ ID NO: 1008736 - protein, 106 aa, Homo sapiens
TKQEVNASWGTFLRGLAECVRYNRLCYVLHDFCDFIENLHNSVFRLWITSVDLCEGYICVEWVPPCVAYKLYFFHSVLQVKLTKRKEVVFTLNGLVGLLLVRLSEH

SEQ ID NO: 1008737 - protein, 214 aa, Homo sapiens
PRDRKMMTIWTYSPISRKTNMQVPDKTGSVVVFNGVDELETRYRRLKLLRGQQRNVLWKRCSISCVSYELFHVPRREGPCHALVNGVMNDWDCIERVNDILADYMGYCLWILMLSIAEVHDERDASALVDPMECTDRDRRSREVHSPPASLVPRIHVIYSPDSCKHIKTIMACADLRQKRRAKTSNRSIMYATSLQSETELLGYPLTQCALQGR

SEQ ID NO: 1008738 - protein, 105 aa, Homo sapiens
MKLCVTVLSLLMLVAAFWSPALSAPMGYNPPTACCFFYTGRKLPRNFVVDYYETSNLWSHPAGVFQTRRSTQVWADPKGSSIHKHLINRELNDIRINPKSSRKVP

SEQ ID NO: 1008739 - protein, 449 aa, Homo sapiens
KRQSPFSTWGLVCATGREEWGRVCSSLISMATADGTLGPQNPDTLILWPEGPDHVTPYSGFHTQPRPSPMTRMDMHLFPGTHLTPLLDLPFRTWPPCTLQHPSSDPHPSLHQMRILHSWVDGPGAEWERHAHWQDGYDTGTWKSRTIRRYWSTSNRRNHEIHTMMQQGNREERMNNNRSKTNGTKQTKITHLYTTKTTGKNNTEHYQKDSAICKINAKEKTHGVEEHHSTYQGNATSNRMRERDYRERATKPGQRHSRNTRRHSKTRRPPMKHTENQGPDSDTQHKQQHKQSGRRGTPVNGAQSTHEITPTITHTDKHGESNSPPKLGANAQTVSETQIQYTKQLKHNRGNDSTDYRRDEKAHALEKKGQKNHAETAYRYRRNQPKDTKVTTPYDTHIDKATGYTNIEEYETIAATINDKKGGDTDNEQSTKRKTQQQNIQTTHQSTDK

SEQ ID NO: 1008740 - protein, 441 aa, Homo sapiens
  misc_feature (129)..(129): Xaa can be any naturally occurring amino acid
EQQYGCRWVYGVAGWRLENGDSPEPPAPDMARVVGYVQTGWTGRPDVPVSRRSCLAGQAGRQEGMTNALEKEVRPISNAESDLRPKTRPPHSSSILFLFFLLSDLPTYLPSSYGYHEPPDGCDWLLQFXPRKIALAVLRASRSGPVEPSCQCSVLLLPEVLPPLRDFLSARASSVIPLLCAGQLKVRCRIAVVAALPWRWCKERKGHTTYWGVPPGHRWHRLQTRRGEWHRERAMYLVLESPAGYINLLCKRSVTMGARRLAKMFGPRFELILWCQTPTRGTSSGSGEQALRRCYGLAKGFTALGSCTVGGPLGRIVFPLSPNKRHLGLGRYGVGPRNHADLGKNLGMNYTTTRTPDPLAQPQHNPHPDETHPRERRPKTLRAQCHHKPARLRSAPHLRPSRRSRNPTAPLPTRAGPTPRRRPPQVGQHPTTTHHAHANPC

SEQ ID NO: 1008741 - protein, 306 aa, Homo sapiens
MAELHLQHEPISSLEPDSLTALGLRSSLQQPPPVCRVTEPEFDGSCLAGESGALTMSSSPVNVKKLNVCLELTEELKKDALSDKGLKAELMEQTPGCSWTTRMAWGPTRPWSPGNWQTRPGRGFRWCARGAGLEQEARGTAAMKEEEEAGRGGGMESPHLDGDQMELGEENRGRRGADDSGPMEEEEADSEDENGDRIRDYHGQGGTMTLRGTNSDRDAERTKKRGTGEPARHQTDGRRTQANSPKKKETVDDRRRDRRVNEARRDHTHDMNKREEDGGHQGRDGKGTKAQKERGKKEGDRDKGEK

SEQ ID NO: 1008742 - protein, 240 aa, Homo sapiens
MKAFALVPTCGIYTLCHPRKRFGTLCLWPVGPLWSMRTPRKSGQCHDNHSKGGHWNGPHPGGVKRSPVVTKETPRACAIVLTRGRPPQERRRPPTVGWGILYGAKRRQQAGSAQMALRNAQDPRWCAINQEKWVRTKGRHINEAPLVRVPHFASKERGAPSRVVTVRAQPLEGPTETWNCGVATCVVERQEHKSPIRPFGRLLQGGERTNRRPEHFRYTCPLNTGWRRSLGCSPPRFSTQ

SEQ ID NO: 1008743 - protein, 143 aa, Homo sapiens
SRIRRAEMAPRKRGRTRTNNTRHQPSDLRWLDSRKCTLVVCHILLHSFNVHSICPMITDSLSGRGTTHRVLLLYMVGIDRNSALPYDSNSVTYMHAYVGVPEECASQSVLRDAGVSTLTVLLVKSILRPTKECDNKDRYELHV

SEQ ID NO: 1008744 - protein, 352 aa, Homo sapiens
LDGALSEEPRGPELGSLELVEDDTVDSDATNGLIRLCLNQRGTGQTVRREAARYSNERTMTRQAAGPDSENERVSCFHGHHQVGKLRITTIPPPMSQADATSELTDTTARTGNADGLICSQYRAQQRLHNGFLANSEDHATVHDSFQCNKYHDLNGSTPRWNLSEPTDDRSCVLCYALTTTLRQKQPRGLKKLLRPAQGRPERPDNGSQTQRTAASGRPNVNNPPPHTLSCHPATLTLFTKLLPTLPPTARPRTRPPHPTRDSHHAAHTLRPPPNRTRPRHEPAHAPTLTLGIHVSSLYPYLHVTPPITLATSFPTRTPCPASPMYTWQALTLALPSFTPSLTDYYAFTTQT

SEQ ID NO: 1008745 - protein, 169 aa, Homo sapiens
NFPVSASQVARTTGTCHHACGPNTLGGGGGWITWGQGIGTSLASMAKAPSLLKIQKLAGRGGAHLWSRLLGRLRQENRLGPGDGGCSQPRSCHCTPSSLGVRSRLSQKKINYHFLQKIHLHSSRRSLTSVNQAGVHWCDLGITATSASQIQVSFLPEPPEEVGLQARTI

SEQ ID NO: 1008746 - protein, 290 aa, Homo sapiens
ARGPQKHLKRVAAPNALDAGYNSTGCVSSSIPSTVYPIKYERVSPPHHFPEETDLSVPCTGRMRVKKICMQQFIKILDWLRSDSDITYPCWHSWMSSRVDNDEERHFRLIYDPKGRVCCTSVLSPEESQGIKLVQSDDKIFVGYKTESLIWCLMHDPYHPSTPDLPHQGEMIAFRIDLVDWQELLMSSSTITWLKLCMVDVEVANLENYIGVITKVRQAPWISMKQWSTLKRLPMDNGYCHSTFQACVVIWARAAKPWIFSFREERGIRLTIAARREDTQYWRPKQPQVR

SEQ ID NO: 1008747 - protein, 87 aa, Homo sapiens
MALTRLLLTNDSLLHAKLIRELLSPAQPLCAGTHTAASSRPRRIQDHARALHFALLRASGRTLNQQQAGERTALLLAPRIPDPTSRT

SEQ ID NO: 1008748 - protein, 231 aa, Homo sapiens
LSKSPCALLLCAVGVWGSWLMVRYITSVPMPRQYPQALPVLELASRTYFYSLTRESSIIASAQSCHGHEIYLNGGHLGPRTSWTFVLHYSSIRLFFSYYSSSGLSSDHDSQLRTIKRLEVRRSAPPQSMGRLGIGAEEVTSLRSPFALTLSPHRKEAVYPLRQAVSHQPVLGSFSAILHSSQDQQNVGEASWIHVYPYKRRSSNRQPKVGQPNVYTLDLRENPQQFPNFQN

SEQ ID NO: 1008749 - protein, 111 aa, Homo sapiens
MYQRDASPTAIRPNSKYTLINYNGIGEYAIGYERTIILDILSLSCISLPTSNSLKSTNSARKYLAAFLIFTPYYIASSKRVQNIIRLIHTYTHAILYTIVTLKHSLGFINT

SEQ ID NO: 1008750 - protein, 77 aa, Homo sapiens
KQNNQYRDAETNRTRNHHRTAQGTIYQPQPILTLVASLPRAIPRNNPTEPIPITYTYSATTPNNRIATTLVLTTPTY

SEQ ID NO: 1008751 - protein, 281 aa, Homo sapiens
KWLDDAVCSVGGALGCPVWPWDGEPAVCASCWSVSCSGILVAWGLLAVDWGRGLRPAELAGGKAEDKEWMPVTKLGRLVHGHEVIKSLEEIYLFSLPINGTQRSIDFFLGWPLSRMTVLNDYAMCRRQTRAWPCAPGSRPFVAIGDYNGHVGLAVKCSKEVAPAITVVAIILANASPFVPLCRMKATWGVNNDSANAPHCTFGTGDSAAAGFLLLGTASSLEPTVPLGHIVSVTLLPLKQPCLTDWAGYSIELPPRFESWVSATADPGPTSANGPPLDAPF

SEQ ID NO: 1008752 - protein, 188 aa, Homo sapiens
EGQCSRSVRRGVMVRPKVRPEDVTGCSNRHVLTSRWPRIPTSPSTILPYGVFSTRGDPRPRIGVAIGCSDPGPQTSSRHLFTGTCTVLQTPGCLQSDYIQQLHGPWVRLPGRRQRVFLQNLLVCEPSQGSEMTPTLRKCAYIIHRIHAKMHHSSTTRTNTTRLTITFSDRHDNQTSRIMYKRTTENAV

SEQ ID NO: 1008753 - protein, 104 aa, Homo sapiens
MANELLYVGTTLNAERENAMSEPESEARYRIHPMTKEIDPRRDRVNGDLAHKASPDKNGMVIEHDHETIISKNVTIGKYPKLVIFEKRLEEREECFKLPQIKAL

SEQ ID NO: 1008754 - protein, 65 aa, Homo sapiens
MNRQLHEQQKQSAKGRNGAPMRSQKRNSQGAQKYPGTHKRRKPREITLKKEPENTVHKRPDNPAN

SEQ ID NO: 1008755 - protein, 305 aa, Homo sapiens
QPRVIPRAQCRLLPLLALAGGPDVRCCCCCWAMAAVGRWGARALVRRASCACGCDCVPPREQTAEDWTSEPSLASHLYTDDMFTHEDPQRLLTLRHVLRALVWTLPAGCIATWNDLWRQIQHAWKMPKSMLAKVDLHVPLRRVLLHQWVCEDTPPYSFYKPGQEAVKYQGPRDFQDTGLNCDAVQTLNEEPVTPEPEGGTCTYAPDASCNGWYELSASKYEPCTLTPSANTTLVQLLRSRDYCTPANMSPLVFQSLVDAQSLTPEDLVRIYRQHLSTAIGTGNSAHGCTPANSLTHPSTEKHTRV

SEQ ID NO: 1008756 - protein, 152 aa, Homo sapiens
  misc_feature (132)..(132): Xaa can be any naturally occurring amino acid
MGAWEIPMKEHLFTSDQSSSTKLTMELSHDTQLRQEALTEGHNCVTKSHDILGSKCTISCYSVATIVGEQYACTDCPWISPLARKALPQSVQSVVRLLGGFRQLNSKLGNFSTPIDIASAGIVLTRHRLEDXSYHTGVHNGKIAQLVLHRHR

SEQ ID NO: 1008757 - protein, 175 aa, Homo sapiens
MHNNRKTKRKRKEETKETKGNREGDRKRTEGEGKKRKEKKNKTRKQEKDTKRKNEGRNEKRQQRRKEKKQNKNTEKGTAEDEEKREQEKQDESKKRQTKANKRQQRRGGEEGGKRSKKDHKQKETKRRRREEREGTERTDHTQKKRTGENRSEEKEEGQETRARQKAQDERERRA

SEQ ID NO: 1008758 - protein, 94 aa, Homo sapiens
GSSSRDSAPDSGEQAAASLAAAAEAQGENLSAVFSRQLKRRTRKHTTCAEIVHGVRVLGRALLRGPWSAPATPEWLVAAQLTTGAEQRRGEAGR

SEQ ID NO: 1008759 - protein, 224 aa, Homo sapiens
MGRSGGYETKTTGVKRKEGGPPPRAGGHTIIDNHFHDANISEKHPGNTTLLKKPPPQRSHTQEKSIAGDNPQRGYTTVESDRRKRIEAHNSAHRRVRGNTPEKLTQRNKHPTTEGQTKRRLVRDKDPHEIIVATPKGVSGKQRRERYNTRTAEKGTDKPFSVARRVDPSSKDRHTHPSGRSKTPPQKRCSGTTKEARRVEDPCEGGSTPGGEPIIHNNHNDVAD

SEQ ID NO: 1008760 - protein, 184 aa, Homo sapiens
MEGHAWYQSNGLGEACAGHVHDKSAIDSEQGGYTELSAGGHGLPHVTVALRSDGQRVPGGLKGIARLAPRDHTKASLTIAQDDNQKAQEAVQDQILEAIDEAHLPTKGRKRSSRLIRSHCMEKRRRRALTQAQGPVAPLNKWLRICVDVNAPCALTRPMRLVPRHLVDLETIIGDSIVAELFGI

SEQ ID NO: 1008761 - protein, 149 aa, Homo sapiens
MVVQRLVNMLRFCLVDMMSEYLDRASRVQFNASSHLFYHEHATEHRRKDADVHPDVARLATRALVSSQGSARTSAVSRAFVSGAPRQCCHKQNYQEQKIVTDILLGKRKVALCAVPKGTPKAELRLIEALEVQPARLVRGSIFVAEILY

SEQ ID NO: 1008762 - protein, 144 aa, Homo sapiens
MGLAIPCTESSCHMTRGRTGLSASPQQRIDIHRAEPLWLMTGNLATTLRDHTNSECYRWAELGTGRLLRPQRRNYTLTDAYPTGKTGRIGSKTACQDQDASVSVKEEPRSRGAHGEWEGHNKVREAGTTTTSDETGRQKRRGPK

SEQ ID NO: 1008763 - protein, 227 aa, Homo sapiens
ALLCVPGGSHYPGPCLLNRLQVQYAIGRVVKAQAGLPLVAEQRLPLHLDGSSYKRVIVRKATLPPKIHPAHAHMVMQWQDVPLLRHMAGLDSSHGRHVDPVLLSQAEVICKPDMHVSQSLTARAVVSRRQWKNRVKDVAEHVTSITTASCMDDKSLVNAAVPEGILRDLRQNRWPVDASRWVTVHGAILAERKYRVSRELALDSSPDHVVREDESIAQDVCVRDVRM

SEQ ID NO: 1008764 - protein, 224 aa, Homo sapiens
MGEIASYDKAKLNENGGRRTNEHPVLTIRDHCRQDEGGVTHFRNESWYGFPNPPSLFETPGRGCGGQTPTARWTRATECCSCRTLVRSCPCRLPTVPVAVILNGIPPTNSGPARNSPGYVAARLLYRTSELLYLNYIGSNNHQDFDGLGPGQREKPRRLIEMSVGGCWERPEGSVNWGRTSTLACLAWYADTSMGATTGGLNVSWILRTLARCRMDIPGFKAPG

SEQ ID NO: 1008765 - protein, 115 aa, Homo sapiens
MRLLISIADQYNWLLLARPTTFAIIDNLKYSSFTHTASITSPFYSRPHYHHLETLTYAGYWQGGTRPYVYNHCTQTSQPFLNNPRTVSRTANGMHLDTYLPNTQLPAALTYAGSI

SEQ ID NO: 1008766 - protein, 113 aa, Homo sapiens
GKNPWFIPSVGPFSRKRPLPPLGWGTCGGRWDFPGKLSGEAVRWPSSVILALLPHFFPGRLPLPGVQRHIIIAALKRRQPGVGELPYRGLRREGFVYPPKNPPSPRDTKINSL

SEQ ID NO: 1008767 - protein, 393 aa, Homo sapiens
PVYACCGANRADCSVEDRRRSVVCRACYLPWAQVLLLLPRSLAVPLLRTAQPLPGVSCLILSHQEAHPVVRRPGDSSVTACLGPSELQCGLRDRSSQPNLPRWDVVGFDCLCTPYSDDFDDMNRSVCQRYTYLRTHTVPLRQCEHNESGPGMCDQLVYAHGTAEQQSPVMCAHNLYLLLTGLATELNVSHHRQYTLNHSKRACLVLYMRMSARTPDDGCRRRSLRVCNDVGWSTQNLVQVSLGPTSTFRAHATFRMTPPHTPACDCLAISTLGLRRNRKLPIVQRNIVATCHFPSAALRTHTCLGGISLFNSVSTPLVTLHHTTSATFIPHRSVPTSAPFLNGLRQKSARASGTRGRSPPNVSVSQHVGLSRVGTTCPLVHHSAPCRTVIALL

SEQ ID NO: 1008768 - protein, 69 aa, Homo sapiens
MRENFCVNLALETVAYSYAYAAPWAPSSYYGCDLQPVTLNFTEDQTLHFHVATSYGLEATCIGGCYTTQ

SEQ ID NO: 1008769 - protein, 365 aa, Homo sapiens
MPVNERCDQERFPCPCPANAPLQRIRIHVHSQRSIMVSTTDPMDSNLIQLTGQSFSTDAAGSRGGSDWNPPSGSPAQTACTRGGSPHIRSHQTETAPRRTSSPPPPRRNATNHEVPGTSGYPCATRYHHSERARFADTSAPRPARLAHDTRRYPNEHAGIETDDGTGKRWTYPPAAPPHPTTPETAAHAPTTPRNRSHANGSHTRERTADPPPPPHIGTANTGSSHMHPAPRAIGHNQLQHQRDHPSNTPTPTPHPDTTANPLPNCSSAPRTHQTGRITHHNANTQRHHNTRQKPTPTRPATLAPPLGQPPAANHNTLHNAQQENTTHITTHRKKSTTGDHTTKRHPCTHHSDTPTPHTGDATTH

SEQ ID NO: 1008770 - protein, 221 aa, Homo sapiens
MVRYRRSGVGPLKRAGASPPVWRRLGRGPPTAREGATQHQVCAAPRNRVHLRALFFGKDAFEVLWCLKNPTTQGARGRGTSRGGTSRGILLRIPEGGFLLGIAPKTLVFAHVKKAQRPPTPGPPGGPPEATPHVRRTYGHTLSWGCKPARDPLGVALKKGDAQNFPRIYVGYPLAPRMRGEPPRRLHTGSPPSPDQGVCAAQKKGVIYTPECGRPRRPARI

SEQ ID NO: 1008771 - protein, 247 aa, Homo sapiens
AAGRWRVRGLSGRYRRGISAIAAPVGRTALLRTLSLAVSTVSFVQALLVRAGDCEVSRSMARIVPCRCGLSEQSVFHAHIATGWSSREIDRGRAQIGEHLQKQVMRARRTFSVAICGVSKAKQSRVGHCAMLDPVEDTDGEMTHEGASLFILAYSEPWVCIERDLTTIEGRMSKGSGLKAVGSSLGDIVAEAVGLEGPHTIDERTRDCESLRDACQENDCISCADCGSLTYPGMPPGVRRDTSLLGP

SEQ ID NO: 1008772 - protein, 145 aa, Homo sapiens
  misc_feature (107)..(107): Xaa can be any naturally occurring amino acid
EESGDKYGNNHDDSEHRGLISVITWPEGWSGAVGTEEPGIRTVSVCMWYCVNKHSKRRNESMLELMSELLRVDIISQYVRKDLNGIMKVNIVEIMLIALFVAASRRXKYVKYRTAVDDIWQELQSLRELDLYDNQIKKIENLAGR

SEQ ID NO: 1008773 - protein, 375 aa, Homo sapiens
  misc_feature (233)..(233): Xaa can be any naturally occurring amino acid
VRIERSHQQARPDTFPDYGDVLRAVEEAQLPDTDSGLLHGTSSIPASWHQDAIHDDCRAIEAYMEPQVTIQMLDLQTFGWARLNEDALIGRRGIDTCSYIKIAVAGARAASRIREENMPEAVLGQWTCWAGDWRVHSYHIVIARVALGKDQNKLKRGRRNERDRYRTRRTSYGRHKPDKRMHIRQPCMNKEGNASGKRSLAHVSIYPLGWKEGLTSKPRDNWVHSLRGGMTPXFSDPLPKKRPLKRTKEIDSRKMYTGKLHADEEKIAHVDKEAKGHRGQEARGNGKGGDNGNNARASGRENAELDKDKMYVEIRKGVSGNCALRWGHHQQNLPTRGKPWLQGRNEVNKNLVRDGPGSRCKTDHTGKGGKQAQRA

SEQ ID NO: 1008774 - protein, 79 aa, Homo sapiens
LIAVRRLRRNSESGGPLWLTIDRDLVERLERGEGRLEAEYLIALTCIAGMQMSPSNSRRRSPMMCQGDYDVRMACMAHM

SEQ ID NO: 1008775 - protein, 68 aa, Homo sapiens
LRNDVEHNVARMVIGGPYNLALITSDLTSMCHRSPKRCLLLQRSSCGAPYAWATVLTTPDELDLLNSA

SEQ ID NO: 1008776 - protein, 135 aa, Homo sapiens
MCPCEAQGMCRTLAGPPPKNREKGQEGILSLRNLSKAAKALCQHRGFQNSWPSRNVVQKDDIRGYSATPKLRKVGAAQRGIREAASQPPGNSQGSLQGATVGPGALKRSEAQARRKGPKTISHPGQRKEGSIPET

SEQ ID NO: 1008777 - protein, 102 aa, Homo sapiens
MNDRRGCGRRVRRMEEMRRCTEKYACDRIVYVETGAEVEEVDQHEECKLAGAEEDKSGCCIVELLEEAIEMEIMGGQFMSENKYCFLQFVDNDFMREVISDR

SEQ ID NO: 1008778 - protein, 300 aa, Homo sapiens
  misc_feature (235)..(235): Xaa can be any naturally occurring amino acid
RDSTWPCGHETASTPLVFAGNTGELIFLVPGPPVWPQRLVQGRLVMPVSKLGNVRDSNGADRPFIGHGIRQSMQWAFFPYGYAFTTGSDDANVQPLSTCGPIRSSSCTRHDNIICGNHLWCLLAQQDGCCSLATTDVQLATSWDAMKGDRAGGPRWPRTTRRELPRGSRTIGNGMMATGLSGTSLSVNDHGSYLARSPQLGQGQEGPLPMHHDYRPGLRGWRNRQPPSHRAHRGXWVHVPSDTRSWFLTGGRTSCGDKKGMEWGKEEEQEALILLHALVVEASPLLEGRRQEVEPQGWLF

SEQ ID NO: 1008779 - protein, 69 aa, Homo sapiens
GRVGEEDEEELGEEERGQKRKREPEDEGEDDELSGITYFEKFLLGFDCFYPYPLSPHPSNPAPLKLILD

SEQ ID NO: 1008780 - protein, 423 aa, Homo sapiens
SSRRLMRRLSMNGQVSDGNDAEPFAMSDIDHLDRGLDIRSTYVVASFGLCTVHITGSPLDGSCAQRCPLQRLVMGSRFMIPIKNAQGSLVAKGISELELLELSGQVCDEDARILSPWKALQRHIAKISACGCTVFRRSADCKVENRSQIYSKCPNVVVTLNAGSPAVCETRDMNSSDLCTTQLDPIWGREILQVCLYENYSGHEHLSQMICSCKDYAKWNSLEETELGEGKPTLSIERYLRDTSRQDDLAQVTEDTFSRVTKDGTMRMRTPRISPAGNGNPLFSEGIPLDILLPNRSRGLLRGDLRRFRLASQFLQQPKESKVNSSVDARKTGSTWMDNLRRAAEERFKVREVVVVLVAPKVIFLVNGKLRRSVMSIPGNGVFPTNKTARVSTIVKHFFVMVPQRMGTNIVGERNNYIVAISC

SEQ ID NO: 1008781 - protein, 108 aa, Homo sapiens
  misc_feature (17)..(17): Xaa can be any naturally occurring amino acid
MVRSCRQRRVGRIHLAXRKRCVVTNTARSQVESANTFPCVTKTYLPSQFTPGGCQGRRIPWGVKHNEVPGRRKWRQVIFGTLRLEHRWLRNHVGANGSQRLSLGCVWG

SEQ ID NO: 1008782 - protein, 271 aa, Homo sapiens
ADLNQVDEELQMCQNKSPSGPVESVTSGEQPVGVEGGAAELRPTSTVEEVGYEQTSILDIMRSKQRSVPCMGALCVCSIETVGIVEPEMKGPPGLSYLGPCRAQLVGSLLLVKQIEEQIQEERGSAKMAEMMRFGRLTAGCMIRTFLQNCEDEDRGRGTMNAGTEDARTRSSVVNASHYPEGSGARTVVMRGGREDESEDGYQVSYDYLGYGEKMVCPLLHAHRVGCCDLARDPGTLKLDKPHRRTPHQKRAYRILQPCGDKGTSCGDMCT

SEQ ID NO: 1008783 - protein, 192 aa, Homo sapiens
MSWHTRAHLLNGNKEDSIVNLYHSYKRPSLDTTVDIKNNDTVRTNNQQDRMSKMRRDKYFTEPEDKAHTMEQAKERENTTQKRTGEEPAGQHMENASAPTDARIHALNMGSGNKSTTEHSTRCGQHRLQPTGWRQRRNRYQRKKTPAEHTPRTAPYHQNDRRGNNERRTTEQETRKKGLPKRSKKGTEHAEE

SEQ ID NO: 1008784 - protein, 226 aa, Homo sapiens
LKVFSIFIPGPCGGPGREVYKGVTGPPGALSHPGASRPGGGPVNRAEGIQNRASKSPGHLISRGPGVATMGGTGPSQSTEEKGSTCGCAPRHRGALNEAWGGDRHKTKEAFKRPSLPQKGGQWGQWGTTIHPEETQGESPGRTPVGCGPHAPNRGSGEGSNKGRRVDTTPRGVRERGPHTVSTPFGGNKTESKGSTKQRYSSGGAPGANKTHPQQKTHRKETHIGN

SEQ ID NO: 1008785 - protein, 460 aa, Homo sapiens
MRRTSSRSRAAALIFFFLEIEFSLCCPNWIAVVQSRVTATSASQFQAILSPSASQAVGITGLCHKVMRPFALMNGLSIIVGVWYSNLKSECLGNFIWYFQVRTGVFTPIPGHVLVLELPDLNVDPPVYSLPKYWDHMAVSHHCDLAYIRSQSNMQRLNPQGIVGPKILPRSDKEQLNISIVTSCVSIEDKDIICTYEFSSYTVLNFDAINNIASICCFAQNFSKSIQNYGWYHSVDLVDYIEDCALGPLLHFVQGYLHVISLKQWCTANNHAKIKGDQLPDRGHWPQVVSPDDYERDPQLHVHTRDTALDATPKGKNQLRDDYIDSEHRTRKKNTQALTEQKHEPAPTNARSELVLGRYTCGEREKNDTPERPALATPHGAQDPDGRDTDVTNTRGLHEENDGGPHSASTEQEKAPSKPPRRNGRDDREDREGYDTTKTHDEHADKHERVNRESDDESDE

SEQ ID NO: 1008786 - protein, 104 aa, Homo sapiens
MTVSVLRSISLALSPEYAVLLEKLVPDSRAEKRLTYAGASIVCHSRGGTLVPLSVDLDTLLRSKMKKGEITKTDRTHRELEDALGNGKILKIGQKGTSKEREVP

SEQ ID NO: 1008787 - protein, 157 aa, Homo sapiens
MSPRLWTGNSPPGENNDALARLDSVEIELPGCCAFALEGAKETNPFRSLCPHFPVQSKTVWDTNNRLGGNKFLRPTETSPNSYRKEGRTKGDSEFNWPGELAEAHTDRCSVGYPNQTVPLPQVNLTQRKAPREFGFRFHTEEKRYAREPEPELAVGM

SEQ ID NO: 1008788 - protein, 114 aa, Homo sapiens
VPESPEQLLAHRAAALDFSLGLGCLPTGQGSGPCSPPCLSLLPNPWAPVRPEPPRASTTSCSTAPSPIDHARAEECERPAQDWQAAPPAAPVQDPLGEASWAPESGGDVESLYI

SEQ ID NO: 1008789 - protein, 121 aa, Homo sapiens
SVIFYFLKRKSSWARWLAPVVPALGRPRWVDHLMSGVRDQPGQHGEASSLLKAQKISRAWWRMPVVPAAWEAEAGESLEPGGQRLQWAGIAPLHPSLGNKSETPIVGKKKQKERVTCETPF

SEQ ID NO: 1008790 - protein, 235 aa, Homo sapiens
MPSWTHGSSTRCVQIAVGADCLGGQRGGKWAHQSSWSITSSTMTRAASMTMLYEEYTRTSQELQMKRTGIEAFNETITIFEEQGQTHEKCTATEYLERFRALQGTRRTTMQTDPAELRAAQVPHLAEIHEKPHEAGASSCGAQDLGTTERSTSRMNTALKPDTHAASARIRRTSTIVWLTPDNGARPRNEQSNDAGLGTPTTWQTERRKERTLMEETTDRISTPPTKANATRGTA

SEQ ID NO: 1008791 - protein, 242 aa, Homo sapiens
  misc_feature (50)..(50): Xaa can be any naturally occurring amino acid
ATEAAWSSRVGLRLSGECPQDRWRSSRHESSTVRLRNSSTDSCHTNIIYXESALATRYSHQLWLDFDFPSGVPTWTSPIPRPSIPRHDDDGNQINAWSNDQKITLKDSGTSLPCGIYDGTSTVYPLTVDHLCFETLTESSLVPSFKRRNKWHLLASISSIGHFTNQALNSAPYEIRNRIRDNLHSPSSVLTPNSYEYANALLRDGRCWKSGASQKNRKNAGHKASIQCTYRQLSNGNFAQES

SEQ ID NO: 1008792 - protein, 66 aa, Homo sapiens
  misc_feature (66)..(66): Xaa can be any naturally occurring amino acid
IRGAMWALCTTREEGPHWRSGYMFAWHTIRCRCLHARDVSAMAPDDESSSDALGSHEATRSSVSSX

SEQ ID NO: 1008793 - protein, 198 aa, Homo sapiens
ELEPKWPTPEKLWDWDMWMRILNNAGAESDHPTFRSYTWHRRLNMNGIHELLRTQSTRSSVSSECGQSEKKLMSGSHRLLSEAESGQQKTLVKIFLPDTEGHTYVAFIRMEKDDDFTTWTQLAKCLHIWDLDVRGNHRGLWRLFRKKNHFLVVGVPASPYSVKEATLITHNFPGANPKGGGEPQEPQNRHETSSRNLR

SEQ ID NO: 1008794 - protein, 184 aa, Homo sapiens
  misc_feature (141)..(141): Xaa can be any naturally occurring amino acid
GFQKIRRRNGGAWCPGQDPDVVKPGADTVAFFNIRVDTQWPRRDANGMVLAVLHGLTSDGLDPSNDSQEASGGQTLGNCGDMYNQGSMGCRGRTVADNDAGRPGEGMGMAESSGVCPRTGGEENEWVLMTIDNMVKCIHGXENGRPHKRIYAQTGLRGVTGEFEARTQVPFLGPPEGDWPREHD

SEQ ID NO: 1008795 - protein, 118 aa, Homo sapiens
QNLPYSEKMTVLLVYNGPHMLEPNTWNLKAFQRRRRRITFTQPFINQHSHTAAGHTCGNFYCPTIHRFITVIGSNCTSPQAAFTQNTHTQQLFLAQPAFTITNQRCITWQPYNDHYPK

SEQ ID NO: 1008796 - protein, 70 aa, Homo sapiens
MYADFHGRYWMALSSDSFARSNRLKVLRRLTVTAVVPSFNIPLTARVCQGGSHPGAPAGPRFPKLRTVAL

SEQ ID NO: 1008797 - protein, 36 aa, Homo sapiens
MGVHRAALTLLVFPTLALLEHRLHSVSPTDLIEDLG

SEQ ID NO: 1008798 - protein, 519 aa, Homo sapiens
QEVFLLWNVAQCRGDAFRHMNLQKSCENSIDAHQGILVCCDPPGDMVDFVAAESTEGPYVPWAAEEEEDMGRLPPVSLRAFLHHPVLGPVPAVNLLDADFMSSKVLISDVKHACVHMAVTCNVPEWLIADALLRIGHACEADVDLFDSRPLGRGQEPTESVTLGTREFWPGRHNKKHPRHGIGTMTYLHTKDNDWRHTSKIDRSVVVPKTQTVKQHDPVKTVDPEIGGTWGQGPSPKHEARRMGNGSHEGLGKGHLEHRGIPYRHRTDENKGHTGEQFSRTDEYDSDKAAGKEKSRGHCVLGAMNDNAKRHTIHQERPVTFSVGTQRTRLANDRSTTRPRVNDWPRGHDNTCTGSAQEEQGPGRGQTKGRAHNHENNELDTQQQGRYTAGAVRRIKRKRPGQVATEQRGEPKSTGHITTHTGGSRNENRKDRKRRREQPQHKERGTEIETEEKGKTERREHHTGGHTEQNRGREDHQWKSRRNTRPKGKDEEEEAGKKSKTQEEGEHRHNDENKGIDEE

SEQ ID NO: 1008799 - protein, 216 aa, Homo sapiens
HTPMHTHSLFLSLSLSHTHTHTHTHTHTHTLVSALYDAGLCVYRTLVDLCYSFRRFLYLCPLPLLVARACRRMSWQRGGSCSEGSLGAVCLVVSRSTWLVPYPGLSGQPDVPVDGDASAVLPTLYHAEPRLLLYYSTYMTLCTKTRPPQGTNDFMSVVTPSYSLVPARAKRRAGRNNLPPRVAPLDQMTYLLHPSSRRYHDGGCRVLLHLLLGETR

SEQ ID NO: 1008800 - protein, 313 aa, Homo sapiens
MSMKDFGGDEDRLGILVSSCTGNALEYKELLQGWKLPEKFGALDSVVTCELMHTCNIVGPKESSTMSRSWSESEEQIVSIQVPFETKPAYTKRNTNRTETTYKPKTLTKQLETRDEGHESKIEKKKTRNREPTKEPGETRANRSTQEETRRAQNERRPVARATTPSATRRYDEPDTTKRAHTESTLSKWKAQGGVTGVAREVTGGRPSEAGGKPVKHRRENATQRTDANTAPPTDRPHAEKHGRQDERPPNTSRQTRHKTRDTRHRDRERPKPTTSTRNRDRRRKNAYRDSPEVDGRGTHHDVDPTERGTRQS

SEQ ID NO: 1008801 - protein, 386 aa, Homo sapiens
MPRWPTTRQLQPRGELCSDDPRCSSPNAPDGDFVLQRSLVELREMLKRQERLLQQRVKLGSRVSHPPRLLQASSYPGRLPFPFHGTSDSLFPVERVTLGPQIETISHSDPYRATLDRQGLADGRSLCHLSWTQENIHFLAKHFGALHPERYTATHRFGPRIMANTCTEACPNVARNCGKHSFRKEKQVQPVIDPVVKGYLRKLGSAVKWRTKRHICQTSLESWGLHGTTRGPRKSLEPRTNVRSTDFIQLKVSTAQLIRSRERNKRTSQRLQSSRESPSNTKHPTGNTWERTEPKTHDETTGQTPPDKNNRRRDWKEYTASMSNTQADHSHTPRSKTKPGQGRNTAHPKPEQPKEARPPQPATPRSQKYTTDTKTSPDSNRTTNDE

SEQ ID NO: 1008802 - protein, 71 aa, Homo sapiens
SLSVSRIARSASAPDPRSSCPPARAPAQMNARCVVRAGSSCVTALHAISDEEARTALSYTMPMHDSSHSHR

SEQ ID NO: 1008803 - protein, 304 aa, Homo sapiens
  misc_feature (127)..(127): Xaa can be any naturally occurring amino acid
PVNGAEQAGSLDPGPPVPTSMAPSAHVDLAVPPVLAHPIWGSGWLLEWPCKSGAEKCRTMTSVASELSPWAQRDGLASSYVGDEILKGHTQDTKTFYSVPDTAHPIEGSQVRHESHVDTMSEVAQPXARMRVTCLLRPKRVHPVCSQEGGNRHPLYDDVTLEAVAQGLKGDRAERPNAQSWNADTKSAHKDGEQAGRNAVINRVHIQSDQSLTTNEQQEVQIENLGDRKAMYTRSSPLQEIVPGSRKNGVESLLIHTRQIAEEGVDMTRRGQRGKRENETGDHNSRNKQNDGKKRRSIKRGQQQ

SEQ ID NO: 1008804 - protein, 155 aa, Homo sapiens
MCGTESIKPLDLGVRMLTASKASRIHWISIDTGHRNEVKRGSGLCEHWEMFSTRRRWSKASHSLAASRDSPLVTVVDTEREQTGNLGPPSTSCERPHLGYPRTFGSIAKQRPTLKQSYNWHGVRITSQPLVITNSATSLLCVTTPTVVPRCTSPM

SEQ ID NO: 1008805 - protein, 384 aa, Homo sapiens
  misc_feature (130)..(130): Xaa can be any naturally occurring amino acid
NFFQGFIKGFDPRVISTHIEMNPRKYFRDLEGMCFYNMLLANRDRSDAEKRPVVQATALQPQAPTLCGNNTIVLRPIVPQVREVTGAPRRKALWRVFPYPSFVCCAPKHSIYVPPKLCVCATRGTEICDXPYKPTIKSVQEKLYLQRSSERERHSHSCAPVCARTVCVRDRPQERAIMQRAHNPRGGPDYLVRATTCVTKLALEQRRRRVHNARVLCATRRGGGEFYPTQPRVVVVLRRRTKEGCRDSPPNKSIALTSSAVMACPPRRMSPTHRARAHHQGRQNMTERRTTQRGDYTHPCGALNTSEGPRAWADHQMEHHHTPPSTRYFTHNTTYYTTNKHLPTDSMKNPPRGGRKSPTHREEEKGGGQHHTTLLYNKTDSRNQ

SEQ ID NO: 1008806 - protein, 189 aa, Homo sapiens
MHHLFTTAPLDMHTTGRLSLSLDVIIYCLLPLETVTTGHGASTPRALDGRGLILSFSPGLALWAWWHRIRTGRMPSFSKVLGIKFLKISQKRDAMGHSAVIRVPMVCSLLGAGGRLPASPCDVIPALPVGPCPVALTGMGGPLESPGPGTRLPWRSDQTSEVTPLLHVCPCSLSFGTPEVPGPIVDRWG

SEQ ID NO: 1008807 - protein, 148 aa, Homo sapiens
MPTRAPARESPAGALYRKTSQLLGDIEINWSTHTHVVDITRTSPAAKSPSAQLDESKSAQLKFLSDTVEKLKDEVLKEKYTQRPLESTVPTDFATFPSSAFLGTKEEQQDDTVYMGKETFSARLVCGQRHRLVLTQEQLHKLHSRLIS

SEQ ID NO: 1008808 - protein, 227 aa, Homo sapiens
MAKGVSLGLVIPGLDLSPMQETLWPRQVLTAHLALEGCPAAGLGTGRPVGQPQYPSLEASRWHPSMSFLPPWARPSSGQHRSSHPAPLHTHGQPPPPARHRHADALTRTHTQMHAHLHMLHAHRFTHCTAHAHTGSCTAYTHAQTPCTLFHMHSVKHSDASISHAPLPHPKHALSPHAPLPNNTHSRLHRPPPAPTKAPASGHAVLVPEPLREVRAAEWPAGLPWRR

SEQ ID NO: 1008809 - protein, 194 aa, Homo sapiens
TSENGSRNTYLVHCEGCARRRSAGLQGVVVLEQYRTEELAQAYDAFTLAPASTSRGGRTPRPPACPRKAPRGHQHMPGLDLGPACGREGGRAQPFHPIGSSSSLKFHYEETFMRRFVRQTMRENREQNWEPGEGAGSPLAHKEPPAHRLGPFKQQTQGPGSGGRKGVTYGFPSAVPDRPTARAAECRARTRYAP

SEQ ID NO: 1008810 - protein, 113 aa, Homo sapiens
MSSPDGVLTSAESVVVSHIFLFESKTTVVFSYWSHQGVECRWRKSTTRTQIVDSMGSSNPPTLASRVAGTMGMHHHTQLTYMIFSRDGASLCCPGWYQSPGIRRSSQPGLPKC

SEQ ID NO: 1008811 - protein, 133 aa, Homo sapiens
MTTLPPPFTSGEGPATAHMAYLGPYWAQSNNDRHCRSQSKLGPLAFPHQLQVLGAMGRAPSLHRLTTAQWGMILSGICPEAVVVLRVWTWSVALHQWSCLPRGEGAVRQGRARAIDFSEPARGMKTPRGSTLR

SEQ ID NO: 1008812 - protein, 212 aa, Homo sapiens
VLCGGCPRAGGVCVAYLWAACRSRSFHVSLMRFFSLFAFYPGDGYLLPSRQVALSSLPLAFFLATAPGPALPRPWRALPFGSPFLVLGLPLYFLGSAFGWTLPQELDRVQGLFWPLSSAVHPLCPLGHRRRARCHVPCGVCARRPGHAARSLVDYAAPGCARPVVHETAAPPSTSIAPRFSYAPRPPGGDSIAPSAYYMSCSFVSSGPGSVN

SEQ ID NO: 1008813 - protein, 69 aa, Homo sapiens
TRYGETIHSTSASRHGPLDVMESPPPAAWTTTASVHWVYPYIEIVFAKQSVALLARCKAVCDTSARSNR

SEQ ID NO: 1008814 - protein, 118 aa, Homo sapiens
MDRPLGVRSSYIVMGTTERLPEEVLSLVVLSVPCALSCRGHYTLMHYPAFRYGAKRQGTNFDGKYVSPSRTDAIIVLACVWLHGAESIATQRVSMIFCLLLPISQFAYHAKQLSFGAG

SEQ ID NO: 1008815 - protein, 106 aa, Homo sapiens
MGVWFMGHSGHIGAPLMGTWCQIAFQVGNTCACSSGPNDSALCLLFSCGDIGFFGEWYLLATLRAIDSLNPRLDVLEQRSSWKVKVGSRLTVPSYGTNPRSGPMFG

SEQ ID NO: 1008816 - protein, 110 aa, Homo sapiens
MQACCVPRLRLSRLVSWSKLDHGGNDTLAPFACVEARMLDVKATGMPSANSTSASGCETASTRDSRSCHASSWGPRHTVSRLGRHYKVQMSCEDMHEKNSVPNCGSPSML

SEQ ID NO: 1008817 - protein, 201 aa, Homo sapiens
MNGSTRVQLSRYGVNPSEIDRAREEGGHNTVKTEIDALVELCNLYYSATQYITDPTGPGTTQIQACRKLSDWGDLGAVTPTLSSKYMLETSPVGSELLILKLIRINLTQRNKCTPRDNSSKSRILESISTTMGLRPRLLGSGHPDGAAAIKGSYCSTIKVLRDLSSDRSNPGRFLSTSNSSLYERTRETKAILHKTPSAVN

SEQ ID NO: 1008818 - protein, 122 aa, Homo sapiens
DRACVLHFGPFWSSRLAWAFVGPRIQTSPVQALLAPCNAGLSTWAQWLREAVTESLYAVLANRRCARFSLGLAALPRGRARDCSPQWPEPPYPIHGLLCGLSLPDEHHPLLHGAQSHRPRKG

SEQ ID NO: 1008819 - protein, 42 aa, Homo sapiens
MTPGAPGGPRGPLGPWDGTAVASRGGFGSAIQGRVAARGRGR

SEQ ID NO: 1008820 - protein, 192 aa, Homo sapiens
YHPVPCGTLETGHQTVGFCLDTRGGYDVPCPWPTMAGQLLIVKEHCDAIYQSAWDRCGDSIVPTGPSIGHESDYQMQWAFFPNGYALTTGSDDATCTPLRSCGPIRSSSCTPMTTSSVASPLLPSRAAERLTARWLTTTFNCNIWDAMKGDRARSPRWPRQPLCSCLRGHRTMAMDCWPTGFLGLLRYKIWN

SEQ ID NO: 1008821 - protein, 180 aa, Homo sapiens
VSKGRFFSTRARRARSKRLLVAAPPYAEFSMPERSVGKDRQQCRRTPRAPLRRNRRSARTWQAMQPLPEAPQKADGEGEGDAIPSPRPLPTRAWRCRESLGAVGSARAGQPPIPYRPPSLPASRPNMARLPCSLAVVSCPHAWDALPALCCCRGEQSCYLSFRGPQLKCQPSFPSSPRQK

SEQ ID NO: 1008822 - protein, 102 aa, Homo sapiens
PFYGVFFSASYMEIRAIRCCPFYSVLSAHVADCLAGVAHTDSEVLCDDESSVSVLVDKRNIESPGTLSRFGRWPLPLGATLSDNAEGQRALTSGKYTRTLYM

SEQ ID NO: 1008823 - protein, 111 aa, Homo sapiens
MDIVQDTPHTTQEERKNELHRYAILQTRARPTLTLRRNYARLSLSAADMHCLIDGPGKAARKWGALAIQQSAADSVSLITGWEGTVASSVGPMGDTLQYLRHRVTDEGTSP

SEQ ID NO: 1008824 - protein, 277 aa, Homo sapiens
  misc_feature (272)..(272): Xaa can be any naturally occurring amino acid
WRFLDTRHCFKEGLPISLKNGRNRVCGKNTSKNRCCDRHPVPPVIAWRLGKKRFPAKCGPRNRATRERSAPPQHFAPGGKIQGNQWAKNRARAPQRQKILRSALDPRNPNCGGCLTESKLEGTFHTGGKKLKEIPRSYWEEINKGPGIFPRRVDGPELKGQKVANGGTRDAATTNNSPHHPHGRDPQSPVKQEEIRALAAHRGRRSLEEAIQFINQREKPPGPHMFSSNDKENSGMGSYHGKKSFETFSHRRSAGEALMKRRLKVRYPPSPXQDDQH

SEQ ID NO: 1008825 - protein, 66 aa, Homo sapiens
GEIKRGPSGYRQLIDSGQLLRGTRSYRLRSGCKAHILGAVDIWSMGLSLVELPSGRYPIPPPDAKE

SEQ ID NO: 1008826 - protein, 276 aa, Homo sapiens
RDGTAGGRRGQAGTANVAREILRRQPPQPQHPEQEIRANKAEYLTKKTQADKRWRSEYRCMDEILLTAERLSALMKDDARRGLIAIQINNDPPAARQHPACSTLANYLLHASSWYTNPYQATIDGVRSLGTSGQNVSDIIFRYSSMEDHLEIHGVDPAGSVTSAPSAPDTLGCYPFVQNVTPFIFPECPHVVLCEWQHPQLIGSKIIRGPEDQTVLLVTVPDFTCHADRLPCELCARLACQPISFSGFGAEDDDLGGLGLGPDSKKVVLTREAQNG

SEQ ID NO: 1008827 - protein, 231 aa, Homo sapiens
EDQSDQRVIIKLNIHVGNISLVDPDLEWDMSEKENSPEKFALKLCSELGLALVDVCHHHTHTASRGHAVARHSEDLTAITERETPLVPLVAVCHPCNTGDADQWLPTCWRLMTAAEMEKKIQQSQGLGTRRRDEASKPNTGPQAMANQPYRAKRRPTEHLKKIGPHFLHLLARTEARGQPSASPDGSGEVWSGGFQVALTRHTFTFVSHQSCPPPHPPYPSPVSGVRKKPF

SEQ ID NO: 1008828 - protein, 77 aa, Homo sapiens
PLREEFWMQMFGPYGVGGPILCNNPDTKVAYGGFQQQQVAYGSGREILNRNQSLYRTEESPESLDREAYTGYPPEIV

SEQ ID NO: 1008829 - protein, 135 aa, Homo sapiens
MVDQGHAVLASSCFGYTSVSPLAVSMRCHLGTLCFTAALVALEGTPRFSDGLCMRMIWPDDTASTWVLLLATPGASFVQGTTCWWPFAKTLHATLTPTTLLEGDCIPPKSPYQEFTDHLVKTHTRVSVHKELRLQ

SEQ ID NO: 1008830 - protein, 208 aa, Homo sapiens
MLNSTNTKGSFHTRAVNVHRLNSSSFLSVLHLYAPIHLSLLRTSMPPTWWPIFVFQFPNWNHSFFGQLPLREWVIPPTLDHMQVSQVGPQFPSSPQPPHDSKPRLVKLGHPSLRRETNPCLGRSYWSPRGGVYFRRKRMFKWPHCSFHTLGRPGHIRVHSCAAHRSYTPLLKVLDTRGIVYILVSFGHLSTVYAHTLHKCVASRCAGP

SEQ ID NO: 1008831 - protein, 271 aa, Homo sapiens
MRVVCVMVLSCALVDPRVVALVMAALPCVVRLLACPSDAALARSLLRRGVRLRASCRASAARGRVRRLCGIPCPGAAVSLDYGPVLFGTLSVCRCRSQRWPAGGLRFLPAPSRRPTADCPRFAVTRVRCLLFLRYAGSSCYRPILFVPSPFFLLAVWVARGVAPVRLSLCDCSDVSVHALSRGNSGVPSPSARRRFRRVRVETLAACSRPAAVDFPSVGLAECLLCAIVDPLASPQCTWGYCTRLWIYEFTCLLERDRVHTYGLCAATTSL

SEQ ID NO: 1008832 - protein, 166 aa, Homo sapiens
  misc_feature (6)..(6): Xaa can be any naturally occurring amino acid
  misc_feature (9)..(9): Xaa can be any naturally occurring amino acid
  misc_feature (16)..(16): Xaa can be any naturally occurring amino acid
NEDLKXGSXNTQGVYXTTHIYVLGQLVRSTRGMALSHLPCGSSLAAPRPLAEQVPSVTTPSLMPRGLGRRGSRRGVHVHIYHPSHSPRLCTCLQGALPKSLLVIKPQTGAVFLASGLSVGKGDCRGRAGKGQSGFSLGRWGQQEMTNRGQDLGTWAGGKGRSFLLG

SEQ ID NO: 1008833 - protein, 261 aa, Homo sapiens
DAAFLAPLGVPLPVAAAACILLALSGNGACPGACGLAWLVPREALTAPVVTAMVPANPTRMNGLAECGTLGEQAPTEPWGLRRPAGSGKITREFVPHAGYTETINRGATVTHIASPGQHHDCTASINTSGTGHTVNTFTKTENRFAFDTFSGLSAQLRWSPSDRNGCMPCAKVDATEDNPTQRASEAESLTRGHCNPTQEAMEGALMPNRSNRTLRMGLLPGAATRGGAPTAGNEYVDRHEKSNRPLQSTSTHPGSRAPPE

SEQ ID NO: 1008834 - protein, 118 aa, Homo sapiens
MLPFGHRGLPPTTVPANTIGRRRDFAGNTPQTGPMGRWHIGRLAFSAQPPFGAAHLGNQSGTAGPRPSRNPHQTSRIWLTHNPPQNYPLLGLNETLLTASDFGVVGDIHRINTLCSLN

SEQ ID NO: 1008835 - protein, 81 aa, Homo sapiens
VCPVFAIGCLARLACPQAPGDAAFPAGSRLAPSPSVTDVPMSEVSEHSADGAAKDRALEEIVSRLSSLNLSATMLVSRIRP

SEQ ID NO: 1008836 - protein, 260 aa, Homo sapiens
LHTDQRANHEGSWPSHGTRQAPIWSLDSRVAAEDKCSTCEHRLRQISATMILHKYPFTKSYTKTHASTLHTRRLQTGEGTQTNRTTIKTSEHHKDPEHDTREHMKRKTSKKQEKTHEAQERTASTTQENNPDTQGATQTTNQMTTRKREHNPHKNHNTTRDTEAPDTTKQHSKTHHTQELENRKNHPTTQRTEPTRTQQDTTAKRKTKQHTKNPPSQHTEQNPLEDKRRDKQTKRTRQHTNKSHAAAKTKTQHKPMTNTQ

SEQ ID NO: 1008837 - protein, 82 aa, Homo sapiens
MSNGVCATMCSPINDYFPRPFKNMPGHVPTPPEPTGPEPTSTFIPRVAIILTNESTHQTTYHLTSTDKPRLYRRAPTSTIGA

SEQ ID NO: 1008838 - protein, 128 aa, Homo sapiens
EEEGGEEEAREEPLKSSKNAEPVGKEEKELELSDFVMTSDPLEARACLAVCELNACPFQLPVTGWSRSCSPSPAASTAAVKGGHQAAAPAMSLARGVAAAALERGRWRRAQDAVSAAAAAGPEPLPGA

SEQ ID NO: 1008839 - protein, 330 aa, Homo sapiens
MHLLGRMSHLPMKLLRKKIEKRNSNCGSGTSSFSGCSNLTLRKLKMDDAHLTETTGNVDTVQQINNTSPCTVGLSETHTWRHVSRKQWDNTNRVTKVSPGQSTCIKAKWRTAAHARTSHIPDTPQHRHTDRQTGRNKHGDTDLLKPCIQQQDKAKTHLGKAPQGSNHLPGTAQQHCGPAGPTVTTHNTDKPHSGGRQAPRTQLCTAHRIDNASPLSPLRATPAEPAQTRHLILASNYHNRLLGTTPVKSKHPWRKRARKHLLAKGKEYKEHCAVSTHTTLEPGKNHTQQQHLSITRHLQGNQHGHLQNPDLTQKPRTKGYSNAQRLSSTS

SEQ ID NO: 1008840 - protein, 379 aa, Homo sapiens
LVLDRERRPLCIFFPRFENKPFYSKSLSVALMTWSMRVSDNGRQVSFKPTEIVHKTREDHVTVHGCNAVIIGQSVAPFVFHLISQRERNTRGKGRILHEAVSRCLVGSEPCGHIVGSLENSENIVPLPIFRGQHEAPRGVSTRYAKPWTRQYCVAESPHSLHTPIRAHKQVVSFTRGSSRATLLGAGSGHYKVSAIYHQMCGERRMWGSHINDTILSFKHRIETSPELRVVRKPTLCLNIPVALLRGHDPKDTWGAPYTTYLHVGISTTKKERHTKGYSCYGAVRRRTSGTGGDISSVDLTYHKKKAVDVAWHQQRQHRNHTSHKDYPHISPPYRGTRGLITSYTTILRQNSGILSQPFERHGKKDYMYHSEGDRKIHV

SEQ ID NO: 1008841 - protein, 232 aa, Homo sapiens
MAGDGLDLVGAGDGHAHACVHEGAYQVRLCNGGDVDHGARWTDMLARVIECRADLALSRQAARVKHAVGEPSSMKCAGQCCTGSYFALQAEPSHLKGLVTAHLVPPVRALVLRAQLHQSPARSPLTTDLIWAKMLSSKEAGVTSWVPPVGGGNMKGGDSAYESLGLGPGIAYSILDVRDVQGTRLLRLRDPWGPKLLERQAGPDEEAHWTGAPALGSSCRTASSEGVYWMEV

SEQ ID NO: 1008842 - protein, 127 aa, Homo sapiens
MGRRRRQEGERGGSKEEGKAEEDESGRREQEKKDRATPRRKGGEVRREREGDTGAAVGGRGTSERGRRHSGPRKKKEKRERGGRGRTKPKERERRREGKKEKGGEQGERGDERDREEETEKGEKREG

SEQ ID NO: 1008843 - protein, 116 aa, Homo sapiens
MLYGELLEDRGTTVCPGCRGCSSQIGKVGNHTYTACAGKALGPQGSTPKGSLSPRKSGFQWNTGAFDRSRHTVSIIPPRISKPFATKTPQPIVLNSNGSGWRTRTSGFRTRDNRWV

SEQ ID NO: 1008844 - protein, 269 aa, Homo sapiens
MATQTLSIDSYQDGQQMQVVTELKTEQDPNCSEPDAEGVSPPPVESQTPMDVDKQAIYEASTISIISFVCLKHCEQSTQGSEGTTSASFDVDIETFRNEQQREGPGKPFFVKIQKPINLTGQQQSRFSRIHLLELAPGERTLQRFLQSIHCLSEHTIMNSEHSVEWTKPGKPVLTSAVPAGFTVPSPGTIKPSGTCGAGVPLLTAGKRTHGDGGQGGTVYHAVTVVTPPRPNCVTQTLVRLGQLGIQNSHLQVLLIPDLKHLASRRCSL

SEQ ID NO: 1008845 - protein, 57 aa, Homo sapiens
MGQEEDTLKATTEKKTPRYTTAATPYTTQEATNHHQINEEKTGTPGKKRPGKHIENT

SEQ ID NO: 1008846 - protein, 108 aa, Homo sapiens
MIDASREGKPRTRPLAAPTTGSQEKDARTANHTKQSTDEDINNTSHATTSPPGTALKLTLNARALRHAERQPNTGTHTLPKPHAGKATTPTQNLTRQDQNTNKHAQPH

SEQ ID NO: 1008847 - protein, 207 aa, Homo sapiens
MDGVEEKKKDVPCCARIPLRKHSEGISQSLKIKAPENRSLPTRCFERQGGSLSMKEANALSRRNIRQMYMKLNIRMAMDGQDTRLATSMYLQNPNWRLVIMRSEVINGMDAQNGSERCCCFFAFVNIFNGTFVNARTKASINMLRIVEPYIAWGYPESELSVNELIYKRGYGNTINHRKRIAERDNALIARSLGTIRDHLPWRILIP

SEQ ID NO: 1008848 - protein, 129 aa, Homo sapiens
MKPPLCLRLSVCGSSWERVILRVRSCHWRGVRQGLYAMQNQKPARSRVWTGNALLLKIREASNVRARCVSDIRSRLGRGSFGPVGVAPRVSASGALATSSVNPESIESWGVDETVDSVKGHDDLNTIAR

SEQ ID NO: 1008849 - protein, 200 aa, Homo sapiens
IKYTEESVKRGLEFTLMVVGEVWMGKVEHYSTHYSSQIVLLREYPGPSHRIKNDCTGWNNPKSESRKVVTVRLRIVDTPGLGDAVDNSNCWQPVIDYIDSKFEDYLNAESRVNRRQMPDNRVQCCLDTSLAPSGHGTLKPLGYGVLMKRLHEKSEYHPTSVAKADTLTPRGMPKEFKEDMMNGKKSKNIRIEEYTNFQKT

SEQ ID NO: 1008850 - protein, 37 aa, Homo sapiens
MIHHSLLRKTLGVDKNDVQTQRFTEDEEGYQGVWGNV

SEQ ID NO: 1008851 - protein, 198 aa, Homo sapiens
MLHTSPRALRMHPGGLAVRVGLAGVHPAQHPTDPEADPHGAWTIHSIRDIQRSYSRPPSVFLASVRCLPGSRPVSYSTNLAVVPALLHEWGDATMLPAEFLFSEMGVPWLGPVAGDDAQVPLRRAEGTHDSTHKLQLASEPGRVHPDGKLVVAPSRVQVHQQHPRKQGRVPITLEVLGKWSRWTRELKRGWTEPRREM

SEQ ID NO: 1008852 - protein, 82 aa, Homo sapiens
VQLPSTCTSSSSYARAVVPSKRQRVSGNTSRRGKSGFNSKKWTAGIFQVWTVDKEMTFRPLTKELTQIKQTSGFSPGKPGKN

SEQ ID NO: 1008853 - protein, 220 aa, Homo sapiens
MVAILLNSWNSVDNKQAWFLGGLYVDPDVVVHGPYSITSLEHRRQRLPAPMTRVGGRYSRKCSKICEPCATGTELQEQVARHYGIQVSYQASPIGEKDIMAVDLLINGPVEVSFHRVYFGLPDLQSQECTKQVTGEMIVVAMPSAILGWGVENGDTLLAWIAELLEALTGCDNGFVLKSTSAGQESLWTSQSEVVAGLPRTDQNWGTRIYSAEGPVVAST

SEQ ID NO: 1008854 - protein, 370 aa, Homo sapiens
MLKAKIQDKEGIPPDQQRLIVCTATQLRMMAVLLSDYNIQKAVDPCTRSCGLEKVVMQESFSGMTSCSRRGPSLDRVGTLDAHSCHPFRQHVRGANRIHLVAYERHGQLHANPGRRQPKKVAPHSLCLPHVAKAYGVGEHGTVRPRHSSVFGTYTMNPICDSTVRNDGTVCEAPPLRNALAFPHETAIRLDKKDQIGVKLGPYEVHYTKMRTVEHHSWSATGRTNPVHPQSQIAFPFDARGMEREPTQKDGNLYPHSSQHTQTCFQKLVWRQHENFAAERHTLHHNGQKAVYQFEPPPQPSVAAPVRQAGEDSTASPLCRDLAATTHRRDRDRVKRKMAQHKADARYAQSSMFEPDHTQVTCRHRNRLTS

SEQ ID NO: 1008855 - protein, 194 aa, Homo sapiens
MRGGMSCNTHQEAHCSFIPEKPWETSEPAREERNNIQMCAALRASNTHRREGLAASLLEPARPRTHAEGKKLANNIQTVRRNQTPGRTTLRRCNTSSRKESHVVHVLKISETKNPINFLDTIFGEPDGEHIRLFTKLVKNHHLQLSGEDHRPITKQIEGHQATDGLTNGTQNEFNNNFYQGPLDRPNWHFPWPR

SEQ ID NO: 1008856 - protein, 130 aa, Homo sapiens
  misc_feature (30)..(30): Xaa can be any naturally occurring amino acid
MPRHAQNILLDEGPRVYDALSPDLNVGHVXRKVVLEYKLRRRSRSKAGYPSPAAQLLEDARMCKAFGVVACRRYRYLRVNTPLATFLACQYPIGSTSVVGLQVSLSSLSKRTASRVQRLVLYINDTQNRC

SEQ ID NO: 1008857 - protein, 95 aa, Homo sapiens
TRPARMNTILSNQTVDFPDDVDHYSERDAQFIVNGPQRIPAMDFISLVNSRTHPFLEEKKKQMAPRLTNGGVHRKGPGYRADYCVRTCTESMIKE

SEQ ID NO: 1008858 - protein, 242 aa, Homo sapiens
KTVPGSVESGLCCEPVSLEMAETLSVPSVILERLVRVRALTLRLVMRPVELRRLSDLRVDLILLGWMLMETVNVGLDACNQERFDWSCADTNGRLTRCKVVSPERHIEITSEGNKNNHQRRSSNMVRKPERRRVWKITGCEETLWGWTGRTVTTSSGELARTSTSWISVMWMTAEIDYWNALQTSLSKTSDADSPPGGPCSGLTVEGAKVEGRNLTRSYPAATLQGTHVRIERRRDTRVKQL

SEQ ID NO: 1008859 - protein, 129 aa, Homo sapiens
RKRRAEEYDVRFGELHQAELWPLLHQMWRMIVGTLRYGFEPDPLIGFWMKAMNEYFSSSEGVEQVVLGLYIVRGDKCESLDEIDEETDSCDLIRGIFEREPCKFCSDTEEKATIAWSICKVFVRESDDC

SEQ ID NO: 1008860 - protein, 83 aa, Homo sapiens
MHGARTSTLNVQTHSSNRLPNGPMRVNFQHHTHVHYTSGYRKYTLATISRTFMVQAHSVEDVRHRENMVATVKATQRMYSGGN

SEQ ID NO: 1008861 - protein, 126 aa, Homo sapiens
MIYPNSVFLVCDADEIVATSIGTDASQESCTVTLSTGDRHVSACMCAYETPKCIARGPYRRAALGKKLAPDYWERELRSHHYPGGTVVGPLLSATQMTGTLLHARTPGGNKLVRLGTRHSMGAPSR

SEQ ID NO: 1008862 - protein, 60 aa, Homo sapiens
MTENRPPHLRDQKMSMRSCMVQPAPQDKQTYCGYGRADVQVIPTEHIANKPQLTVAYRIK

SEQ ID NO: 1008863 - protein, 249 aa, Homo sapiens
MDEKVFTKELDQWIRSSLNECKQLSESQVKSLCEKATRNPDNTGHSIRARGSMSSYLSVDDVHGQLSHDSSVAQPVLAHSAAHNHARIQTLLRSLMGQTLTRLSTTATHYSPVRHTQLTRALLALYAFRFTVEPAVSRFLLDVDIQLMTHEQTHTTASTWAASILTRFAHLLLTRNTLLGTHSPTHCYTAHTNLLPLRTQSFPLMHRYSLTPTSPLPPRGCGLGRPGLLQWSLPPRVWFLLAGQTLTKS

SEQ ID NO: 1008864 - protein, 230 aa, Homo sapiens
MLGCCVACRGSGAGAGGAILCPGGLVRECLVDVVPRGGAGDYGNGLESEELEPEELLLEPEPEPEPEGGACPAPGPPGSSGPWAWFGAPGSQEEEERAGTRSRVTRGTAPQDGPGARKLSTRSSHAHCTERTLTTAHQRAHPTHATTHQTGLLTSTLPGKMLAPVIMSIAARTLPRLDTPRNQSYCSADCWELWGATCRKELGRVTIQWLVVQFDIGGTILVLSSIYVAI

SEQ ID NO: 1008865 - protein, 69 aa, Homo sapiens
MVEDGLRNRPGFLTYRNEDTDSFQGTLEHSLSNNCGIRPGARKPKFVTPTIPRDEANNLHVGCTSPADC

SEQ ID NO: 1008866 - protein, 220 aa, Homo sapiens
  misc_feature (133)..(133): Xaa can be any naturally occurring amino acid
MALVHVWLDLDSVPSSGRLISDDHGIDPTGHLPAGTATCIWTVSPVYYNEGHSVGKYVSSMPSWCASRNLVTDGISGSPSGSFWTRIFHTSSKFDIRVQFVACHGYTTTSWPKGAHVSDRERAAWSRCVRTSXFAREMMDTANERDQYEHSRTCSARGLSLRLGNPNLHLVMRVGATKDFCMVNLRGNLHYHFYTRPQEMLRYAKANYSTLGNTGPIPIR

SEQ ID NO: 1008867 - protein, 70 aa, Homo sapiens
AETEAGAGSASYGPRLGFPPRVICIPTRSYSNGTQSMQICKSLTEYSKEKHLILILRIRRARLRNFLEFC

SEQ ID NO: 1008868 - protein, 192 aa, Homo sapiens
MALFGDPLPSAAWRGASCRCSQCCKIRVTSNGSMELVKQGAGCAILEQELETISIPDLRGQRRPLLLQQSLSVKVTGAATDIFQSIDFQHSSRTLNASEITQCTPLRAMRFPDDQLVSNWFFYEWGLHQRPQLTGVVPSRTGLETLPGSRLDRMTSVQCLLPGLLSQECKADFEGNLAQKGSMMSLTSFIDL

SEQ ID NO: 1008869 - protein, 186 aa, Homo sapiens
MLQIRDGVRQLVSQEGLKNSLTCKVYACNFLPDGVRGIGEDYGVGLNQRGPKLCLCKLGLEPFCRHGWSPQWRFRAFTLIDFSYFCKINSLNGLLIKFQGCKEGGKLSWELSATCQWQSLPSPFEPLIIFASAIPQDLLVVEKFMTLSMDQSGGQTEREEGRTRRSRFCIHVVGYTQISFPTLEMF

SEQ ID NO: 1008870 - protein, 91 aa, Homo sapiens
HWVQQQGQLTGSEVSSGMPEQVTQSRALQLTRDTTQWSARIRHSRLFRVGMASVNVCLVSVSISVHSQLYRMSLAGIASLITPRLHNHCRP

SEQ ID NO: 1008871 - protein, 104 aa, Homo sapiens
MHKQAFYTRNKSTRFSSLTCHLVFSSCNSNRAIQPRNSECCHRGSSDSAFPIRFTVLFSPDTQAYQNTIISTHTYHQNFSQTNFIIRTDQHGLIHGQQNNIYLD

SEQ ID NO: 1008872 - protein, 110 aa, Homo sapiens
MFTLDAELVRLHYACIGCGLLVYTLVARLKLDIGVQLDRSPLVRTPTLRMARTKYESYSSRTGPELPKDRSVHPIAKFRKRKEEMRGFPLVCLFVTSDRKVMLPVSEQWQ

SEQ ID NO: 1008873 - protein, 105 aa, Homo sapiens
HPPLKGPVPIGGGQPALSPESFGYWRSDCIVSPSSRVIQWTHAPRHKTTSALLDRHPQSWRPLLVRPQVTRHSLHGVSIIEPTMRRRGLERTQLRSEFDVTQGDP

SEQ ID NO: 1008874 - protein, 106 aa, Homo sapiens
MWRTTRYSNSIRHRAWLNDSMQRICITAQEVRPFTRAQDNNYRHCILTCVLYLIDPLAHLSYICTHSDSTHTIPMTIKYAFNNPELIFSIGRNYHQRPSSLPVTDT

SEQ ID NO: 1008875 - protein, 104 aa, Homo sapiens
  misc_feature (97)..(97): Xaa can be any naturally occurring amino acid
AGWAARDCWRWLAGTLRWFPFALLSLARGHYESPLTPLLTEPAEPTIAGRYSTRELRENAPQILPPHDISLMVRRISYVCVVDCSIMTDIVKRYKNXSTSMRRQ

SEQ ID NO: 1008876 - protein, 130 aa, Homo sapiens
MGLAINDSLLSAVPSKDPVLNKKPLTSVISREWCAKSFPQLMLIENLCLALRRSQGNVTYLTLQRPMTSDDMLSRIVVEVLRHVQKCNPCEYLRVCKSCSGSNSGSWADSRPCALEVEPGRLTCVNLSDQ

SEQ ID NO: 1008877 - protein, 73 aa, Homo sapiens
MEIPPVELPPEEPPRLSVTLIAMSYELLPYKKMTGEQRRLHDSMMKRTRIERCTQGANQVLRNEMKMDTYMDI

SEQ ID NO: 1008878 - protein, 165 aa, Homo sapiens
MRTVVTSDFPFAVSCNSGERHPKRSKPILVEPPTHVEITDRTVKHRLISFTRTIANEPWAGPFPSYTDPPQETRLYIQILSLEKPTVPSFLAEHGVNTQCEAARSANWIHRKQHSPFLLRPPWNVNYPRVPQLDCWRVHEGNYRKFRDTDCVTRKREVLNSPFRV

SEQ ID NO: 1008879 - protein, 98 aa, Homo sapiens
LLDDDQILSCTKAHNVSSAYGYLHDNPGPTVQYREYHLRLYYDSVQLTCRSSRYASIVQAIAVLLRTLQTCRLCKYGALHIGKHRLVQGLPVVLAGFS

SEQ ID NO: 1008880 - protein, 420 aa, Homo sapiens
  misc_feature (149)..(149): Xaa can be any naturally occurring amino acid
AGTVITGHCWDPIWILRITCISTSSYLCWILRSTTSDPDSRNLSRRTYRNLLVRFICRTNVASFLSDRLTLGCVLVLSACDRRSTCDTLATNQCPVDDLLPICSLVQSTLWRYLVQRVTDSKVMDLLREFADITKKYGVLEIGVVSPRXTPRGVSVESANRWVEQAQSPCQRRAEEENFPQTGTPYVRKGKSVSKDDTVTLSVKDREGHFTFSVKNDRDPWTRDSAIIVLRNMVFWHIRSAFRPPTGDNEFAGLAVPTTLAIAEQDRPRFPIRVPLLNKDRVPLRKKGNIYTPRNRGRSPKGVTTLGKNLGSGHVHPDSLKQLQLPSRRGAPPCGQKNNIVETLVSRRNTHLPVFARNVSHSQGAPLHMTQLRYHWGQRIDTRVAPPLPTHDKPRTQPIGRWYRRAKWAHISYAMNTQRS

SEQ ID NO: 1008881 - protein, 84 aa, Homo sapiens
RITRTNEPHCFDPGQDAGRLLILLCGAANYNTIGEKNPFHVRNNRVPDSCCINVTVRLLRHSISNEKAIHKERVVVRATFGVAG

SEQ ID NO: 1008882 - protein, 252 aa, Homo sapiens
VNSPEWSAQACSPRRRRYPGPAGPELPAAQIGSQWLIDQPHWTLVLWYKWSTGLSRHGLSERSLISKMEKKRSNEHEQPLFRLNHKKAMAIQLLFMLGKTVTMADFSNVAASQLNTQNFNFLINDDNTQLLHLNICNFSLIIFACDHEACPTFWLLLLVVSALWGRNHLGRPTGTQHILCTNGRNVAWAVPQLDFGTGGHSSFTQLVGHFWNLLHYGRAVSHRALTCYHRARNRLRKIVPVYVATVCPRDKR

SEQ ID NO: 1008883 - protein, 220 aa, Homo sapiens
MRPVDADEAREPRRSRAAREPRPRPAGNLASLERERARAHWRALRKLLEIQSLLDAIKSEVEAEERGARAPSTPPAAEAEERCGSVCAEAERKAAEAARMGRRDRWKLHQRIAGLRVVGEAGEAGGSGAERGRECPAVKALGRQEWGAQKPCHAPPAELVHSFFIGGQLDELCSPDKESWLLGQAQTKKSFRLSPCFSAAFSPFSHSISVPSWRMTSALR

SEQ ID NO: 1008884 - protein, 170 aa, Homo sapiens
MFDYKLNPNGPPNVVAKAYSGGQSGDVLSYQWPLNLASAKGPSYWRPVENERSEGETGRNRLSVAVHDVWKQFEGDYNTCSLVQTPKEACGSGKKPGDQTRGEVAEGAPPEWNHIFVGRRKAEYWQSGIRDTRGRACRGDRVSGGDRPAGLHPNTEKRAHLETWGPRGDT

SEQ ID NO: 1008885 - protein, 342 aa, Homo sapiens
GVSLLDLWLTLYLLQQQVIPQTSLPLLHLVSLSNLPLPIPTVDSFNTDEAENGFGIQDAEMSLYACPELSELRVSQVTDMNEQEDGITRHSCLTLTQLTTKVSYRHKDDLVEKYVEELSRKQISLWSPAWKPKETKLVRDNVMNYLTQDARLTYYDKRKTARGSNDTYGESCSASALQDKIEQRLQMKGEDRTLTSILQEDVHWTGKHGQLRCINSSQLPMAKEEETKYAPLHDTTPQGKEDTRTRPRATQRTATQHKINDSTVTSELTLSNKPCNTGPTTRKEPSGKAQSNANRTPEPPKSKRENGTQTNVTSSHSQMGALDIHTGLQPTTTGHRTKHRKT

SEQ ID NO: 1008886 - protein, 409 aa, Homo sapiens
MSQHVQVNTGAISESISQSKYMHHPSFINIPSSCKVCFPRYEIILVLIFQNTTIRKIGTNPEHNKNKDNKKLRGEALPQSTSTATAPGGSWPRQRYSSARVLGTTGNSQVETHQCATPQTDRQTGTSTAEYTKGHTKERQPREALRTATPSETRHTTQGGTYTHKPPENVETIDTTLRSLRKIQKTQTPTIRQRYHTLVPPKLGTTEPQERTSHTKTNNTKDKRNAKQARTQTKSTKEDKDKDIQIPGSTNTASRGETRTEETREQTRIKNIETTEKQPKTQSNHPGHHDSTHPSAAAYRQRTRDNRHRNSADTHTNREQKQQAATNNKRGGTKNKASDYQHTRNPTPTRNRQRAHTTTQARKAASPLPTRTPTQSKNTDRERQAKRNPGQPREQTRRDTNNEAPPDRT

SEQ ID NO: 1008887 - protein, 335 aa, Homo sapiens
  misc_feature (274)..(274): Xaa can be any naturally occurring amino acid
PEKGFFFLSKYLAIRNPKRDAPGVGQILGYPFPKLKQGGREVAPYTLLLAQIRCPLCSLLVAAFHRAQGPDLLPWNWGLAPAHHIACAMCPHRPPFFPTTQERFTPVRGEGRDLCVGVQDHSETAKYRRDLETILLAGCGYTPRQVQCATRRILSREQTTCVHTPFVDTPYNTTYSHTQSPWSPQRSVLRSVVLETQSREQTHNGGGNSSENITPLVRAGRPNGRHAKPIEECCARRIVEKTLGAHHAEWFTSISLFARTKLWVLPPPNYSCFXSRRRCCRRTQTAGVYLTVCLARAEYQLTTITAILEWFTIRGEVSSICFPHLNDRPPTSFNR

SEQ ID NO: 1008888 - protein, 598 aa, Homo sapiens
WLSKGVPRPDMHPGRCPPHQQVWLLSPTKRCLLQPLTWQHWRAFHWLGPCTPALPDDLQAPRPPLSKPRTLSDTLICALSTHTAPTSLNQRLPHTPPDRAPPPCACGLCANPLSRACAPPLAPRWLLPAPPHRLRATPLRPPAAPSSPPARRASLALPSAASPRPTLTHPSPGPFPSLPPYPPKRRAGPLTPCPPPPAHSRHTPLAPPMRSRPPSPSAGPPTTPRLTLAPLASQLPTPFSYLHAPLQPPHFQPHSRPPPHAALPHALPLPSPALPPPPPPKRSPLPTAPVTTTPTCAPRPNAPPLHLLSQALPPLPRLRFHIPQTQLPPFPPSLHPLTYANPTTLYPNPPLNPQTAIQPHPPHQTHPLPHITTQTQRRSPLGATGRTHLTTTPMCPHSRPPLKDPPTYMWAPPVRAPPHCAPHTRASALSPPSEAKAPLCRQTTPKPTTNHHKPTHTAPTLYPTTTHFGLSTTHTPPPQKHTNPPNLPSHIQLCANFPSSHTTPAHTPSRAPSHPHEDTLSRSPYRDNQTQQAETTSPTQRPHNQEDTINRPRTTTKTPTPAQATTATIRSISQQLKQTTSQNMSTAKRYSRDHTEAV

SEQ ID NO: 1008889 - protein, 62 aa, Homo sapiens
MPARSCFTHVVPASYRARNRLDACERVYRCGALNQARAQVQELNKRLDDTTTVAQNVVDEPP

SEQ ID NO: 1008890 - protein, 172 aa, Homo sapiens
GEGGRERVKKSCEASPLFLRPPDPDPPLREGERYIYGEEEEEESECTGHERERTDRLKNRRGTPQQVPRQDEGKSPRRGETPVDNLQDIPTSTATLAPASERPQTANHAPRVKAQTGAAAHPKAHTNCNGPAPGCVHNPSAATPEPASLPSPPHPINPQRCARRHDGRHPRH

SEQ ID NO: 1008891 - protein, 272 aa, Homo sapiens
MGISRATLAHSAAKPGCKRKPYHKKRKYELVVCPRLFIAPRLCPGRIHHMSVCGEVIEETIAVSHAWFGAVGGTFLTGCSRDVTSLCKYQRDHSMIGTTDDSSNYTRLCSVPSTLDDRNCDLCFQSTMQQPVTLDEVVYRGPTNALPLAPLMNGEPRLISVRRSKEELLKQQYNRILTKGNFPGQHQLLHSTKGTQSGKLAQKVRGKSLPLAVEFKIIPKSSGTTSFLAGCILPFQMGPGYQGDWTRSPVIGRYLVGLKDGGKEDRFAERLP

SEQ ID NO: 1008892 - protein, 191 aa, Homo sapiens
MADQLTEEQIADVEGRAFSLFDKDGDGTITIQRTLGTVMRSLGIMNPTEAELQDDDRVTVDADGNGTIDVSREFLTNDWPDEMKDTGQWEEIREAFRVFDKAGNGYVRRRRAASGEVTNLGEKLTDEEVDEIIREADIGWRWSGQLSKSMYAIDDLDEVKGSPGQVADALFVVDLSSSRSAQSLFKTPLSS

SEQ ID NO: 1008893 - protein, 360 aa, Homo sapiens
DVDMVCASFIREDSLMSMKLGRSWERRERTSMIDTAKSRIMRGFGGMMKSWRPVMGSWWLDGDLGIEIPDRERSSLLMKMMIGRCNRAGKPDHLCYSRCMESMIKKPRPRHRGLTACDVAKCMSWMEPDWNHAVMEKQPKGTFLWEAVLHVTQLIAREAEADIYHVAHSREEHPPTWRPITNATSSRSHTTDEDGQREGPPVTRLAYQDEGTISRTLEQTFLRQRHSVKNQRETRITLHQQMHPAKHIRIRVHRREQINAPSTQDVPAHRRTTKTWTHSNGEFKAPVARLDATWTPTEHKREVDIRSTRTTTRMGENTHTGETTEKPDRGPKTANNCEQREKEQGAQQRKAHSPFRNKES

SEQ ID NO: 1008894 - protein, 228 aa, Homo sapiens
MLDQRTVRRSDIEAYAMMRIALAFWVARQLKSSSERCFMRALSSRRRSPRLPSVPWARRHLSIARLEWKTGRGRGRADVGFHPSPGTPRSLPVPPVLPISGINRRRLSQVHVKRRDTLSTRIPFPVYPDGLRMDETHPMGDGPDPSMAPQGWVRSFGRRVGLEVLGKNQIQAVGVINHPQWMRSQTRRGLLDGSTVTFGMTGDGLRQGLRRGLLASEEELGPTGYPWS

SEQ ID NO: 1008895 - protein, 301 aa, Homo sapiens
VGTGPRCLPSVPAAGSRSAPVPGLLILGPDFFQVLRVCCSQRSAKPEKEEQPVQNPRRTGKGGEISTWKNSTVKMKEWLQTKDRWNHEEQPQDERKPEVTCTLEDKKFDNEGTTENKGKTGDEDMLTGYAGQATTSEGRGTKTESQQREGESEMAGRIREQRENQSKQGTARECTGRARDVKPQGCQERAQADGCMLPRDKAKQKHTHIQGLASITSTQALQEGHTLDTDTLPPTDGDRDTDNLRPTMHSGSPACPRHKTHSTTTSRPLPGGKPQKHTQDTPITPKGTHAKQRQTHRPPEK

SEQ ID NO: 1008896 - protein, 95 aa, Homo sapiens
FLTQKWCMGKHESHYLGVYPEEKKSLYEKRYLHTHVYSSTIHNCKNVEPAQLPIQVNKWIKKLWCIYTYHGILLSQERNNGIHSNLDGFGDHYSK

SEQ ID NO: 1008897 - protein, 252 aa, Homo sapiens
MQVMQPCGIFGKLRNRPAGFIATDLPSLAWPSVDVDFARVYHGDSAQGLVGPGINFEVIVEETTMISSAHGELTRPRERVLGSRSPNPSEPYNLAKRIPKPSPRGVYQGCNIVPVGHPKPIICHVHASEENVTDERHYEGTKKDPDCRKSLLGSICFSLLKGKGTKTRYIPFARGLWELDGGVVVPGGTILPLIRNAYEKVKIPKNLNPYGEAYAQKGWAWGAIQSKGGSQSLNHTKRLGNPQETGMVCCYN

SEQ ID NO: 1008898 - protein, 46 aa, Homo sapiens
TRRKPYGQRFFKYDGQFLFVFALNKTELWVLKKQKKIEIRTRQEAG

SEQ ID NO: 1008899 - protein, 193 aa, Homo sapiens
ASESARRQVGSLVERTHRPLFPGVFPKCRFSNELTLDKLDVRGKRVGDEESTSSVPMNEQSDNKQPEDEGLSVPQDTQDFCLDKWSPKIGYLRYCDQLRHWTWLRVHQCRRAKIASLRGQIAVYDHSKFSTGVRHVHVLERDVCRAPEGGTEKRMMTITRKYGIERVIGPIHDVEMEPSRIAMMRGTEKWYTG

SEQ ID NO: 1008900 - protein, 162 aa, Homo sapiens
DSREIWWKVSIAVLRGLVYVRDEAPDHATDDVKPSNILVNSIGEINAGDCSVVQRAERHSTSMVPTPSWRTRSYCGSGAVQGHHYSRASRNIWELGPCPLVDAGRRTGIAIPTVTDAKELEAKSYGASPGFDEGRRRAIIRQSRPLDRGAPTEWPPISVCHG

SEQ ID NO: 1008901 - protein, 190 aa, Homo sapiens
  misc_feature (101)..(101): Xaa can be any naturally occurring amino acid
MDPGCTNLEGIGRQPNLIEGNYRLSDKVYTVQHARRTRMDTRPMTEATDQTYETRTRAQDNHPGGPLPATRRITDKGNQTHAGGTQQHPYQGTQKIISHTXQHHWKTQKQRNSMVTSNTHSTATNGDPHHESRTDGNTSTTHQTCDEHSTSATSTKKQHHTMRTNKDNNQRRQEQATRARQPNADIEHST

SEQ ID NO: 1008902 - protein, 491 aa, Homo sapiens
MRSTVSLLETQNVDLRFTRCLRTHTVRQTCTEPLQPIRLAQDPRLTLDYNYDNYPVQQQEQARYYETGNQKITKEHRPHRTNATRNKENAKGQSRQGNIKNTHGHTRQPDRELNIKNTNTQKETTEHEPQKVGQTYTNIDEQNKTKKEQRERDGKPEEERGKTQHKGTNATRNEDKNDAARTGTERPSRPRDKTKRKASRDSDTRKKGTRTTVTTTRKDKKCKEARHTPGAAHTRNSKDIRRTTLQKDRGRPANRQHKQHNEYAKRQRQETEERSSQELEEKERENVQRNTETEDKHLHSPQPIRRTRTYTDEHRGTRRKKNKRQGHDTTRLAKDATRDQTSTAERGRKHRDKTDDERQANTKRDRTHESARTAQQQASKTPTTEATDSRRPRQERAHDRRRRTSAPQATRRAEPHTADAARSAARPASHRRRPQSQHRRSEPHDRSAGRAHVTRDAERASARRPRAATDDRPRTRAPDTQPHSNPEATET

SEQ ID NO: 1008903 - protein, 257 aa, Homo sapiens
WARTSAALCQPMEFKNGYISPVKARSRSTRELSAVPGPHRVCYEDATMVPPEPPDAVPQLSVSLCWGRGRWLGACAAVRLPALCACLCGRGDPADLSRWTAGILERTDACGDVVCKAFQRTVVPTLKPTQCCLRLGRSKPYTVDHGGWHKTRRAIKRRQGDTAFEGKPTVAASPFDSGGLLPAKCTHIENFGSTNMDWATDGRFLPLGRRRIQRSRTRYTWFQAAELGDFQQRGRRGPPHPRIAGGNIGGRGDPIPA

SEQ ID NO: 1008904 - protein, 721 aa, Homo sapiens
  misc_feature (571)..(571): Xaa can be any naturally occurring amino acid
  misc_feature (681)..(681): Xaa can be any naturally occurring amino acid
MTMDDIAHKKPMMTAYTTTTHNPNDHDTGPAHGGPDNGENVIALATVTYNDVGQHPNTTSTLATTQRSQYSVEYPTYNVPHRLTDIGYKYWSLSAVTSSPKYPQYLTTPYHLERTYLGAKHEATYHLTTGAAHLTGFNNLTQPKPTKPLTSGCHANVATTGGRLINRYNPSNGTQNTVFYYLIFPSDVNTLALCSHCYYASLPFLAATIIFLPLPIPILDLFKRQDALPTTSLTFYYPYLYSIQLFLSSLPPPFPSPPPLPYCIPSPLNLPPPPLIYSTPFSISPLSPSHPLLTYQSTTSSHYTSTLIPLSYHISHTLHLTRGNCHSNRPTRMTHSTFAIHYPLHPPHYHPHTSSHLHHAPHARRHYSPPPPLTHTRSTTLHTLTPTTPLAPPPLSPPSTNSHPRHYLPIPYHTHSLLCFPFSILPRTSHPPPLLTHYSSTLLLTSLTHYPTTNISTHSTSLTTISLTPHLPLFHPHSAHLSHTFHSQHHSPLSHPHFNFYTLSTPSIITDLTQPLPYSLTTTLTTHALCTTTPPTIGLNTPLIYLHCTTSTPHSVLYYITTTTPPLHYYXTDIYHHYTYASPLSHTITTAHTYTHNTTTTYYTSPYTSTHTLLPTLTPLTRRTLLYSPTTHTLRPHTTTHHSTHTHSHYTYLTHDYISHSLLTTPTLSLSHISLSHSDTXLTLPLPQSHSHSYYTLTNTHYNSHSLTTPPHSLTTQLTIS

SEQ ID NO: 1008905 - protein, 170 aa, Homo sapiens
MAANPLPTLSHLQPLTHSPNRHNPSLIPVNAPAPPRPLYPPAPYHPCSTSSSTPDALRYLLPVSHPHFLPISPGISTPSHFTPASPEHYPPLPDPTSTNLSSPPPIYYHTHFSPQTPPITQHDHMTRTPPHHHHHCTTYSHPTTPSPTYTPHSATTHPLPTTPLHPSHIP

SEQ ID NO: 1008906 - protein, 246 aa, Homo sapiens
SNVMIAKRIVKTLGDTVTGLDCASETEIQVVQSLGVPPERIIYVNIVVKQYLNIKYAANNGVQMMTYDSEVELMNGCQSTWPKQRWFGGVATDDSKAVCRLRCEISGATAQNQQAPFGTGERAKVIDVVGVSCHVRKRLYRVLRTFVQAISDARCVVDMGAEVGFSMYLLDIGGGFPGSEDVKVKLEEISGVIKPALDKLLSVETLEENHSVSPGRYYVASGFTLAVNIMCQENFVFNGPDGLDDE

SEQ ID NO: 1008907 - protein, 234 aa, Homo sapiens
RAQRGSGMAAGGSTTAEATRDGGSFSRRRSQELVAVWAKQDWSYSSSTSSSRKGVLCCCGPFVDANMREASDPPCVRGLDSCSLEIANGVNQQETLNYQFDAFYGEMEYISRTSMQVQVQPILRHLLEGPECHVCLPYGATGAGMTHTNAGQPRAILVVIPQGSHGAPADSLREEGAMVPDHGALSVTMSYLEIYQEKVSDLAGPCLRETCVNPEHDLPGEYPDSGSLRRSPIR

SEQ ID NO: 1008908 - protein, 62 aa, Homo sapiens
MNKEEAKNDSEEKLGNKNGRRGTRKKQKHKKQDKEDDDTAKQTTKKQKNKTAKQSENKNTKE

SEQ ID NO: 1008909 - protein, 199 aa, Homo sapiens
  misc_feature (4)..(4): Xaa can be any naturally occurring amino acid
  misc_feature (34)..(34): Xaa can be any naturally occurring amino acid
MEPXREANSDFLLMFNDTCLSCAEASSNARGPIXVTLKLWTGNGAIASNGCQYDSFVGDLPLCTTEESIRCCATRNRHNCHPSYDWALGQRFIRHATWSVLSREVQLILDYYYKRANPCKIRPITIAFRRNNWPPVTLSSGRTGSNNDRHRFRGAVSANDQCAAPPSCVGPQRDRALAPERINSNPSVATAAVKQTYPF

SEQ ID NO: 1008910 - protein, 33 aa, Homo sapiens
MVTQCKQQVLDGSHAQISFIHAEGATLNKVFRV

SEQ ID NO: 1008911 - protein, 153 aa, Homo sapiens
MAPTLPPQARKNTKALNSPKEGGAEEHKNPIEHRKDPHTEDNKASCKRAPRAAALGHRGHPRHGEVQTFAPQKPKRGDPTRMASPRYPRTEQKPFSVERGYSTGGNIRRKCTWTRPLDVLSLWAYQNHPPNSHVKPIMSFTRPHFHDIVEIRS

SEQ ID NO: 1008912 - protein, 139 aa, Homo sapiens
MYVTLSGNSSSVHDWYTGVLENNLVMPWLIKTGRCIAEGMWSVDSERFFTGVNPYALSNVSSTGIQVVMFEQSDKSRHPGKYNNGMVIGSQRCCVAAIRVVARDVYSEFVYGSESYDFPEVVYPVRPTMVILDAEWRFD

SEQ ID NO: 1008913 - protein, 86 aa, Homo sapiens
GSGGPLVGHGCFTSLAHSDANVIAVRKKAVTVAICLYQKGYLAKQILVEFQDCFVIARYLKDRGNEKKFRNETDIGAQPKEDIDSG

SEQ ID NO: 1008914 - protein, 114 aa, Homo sapiens
MREPQQHKHEDKENKRRDEADERDESPDIKRHRYKTARASARPLTTTRQWDEAKRCKGESERQQDGTERRSRADKRGEDDRRKTESQREGRPHGGEEGDAQRKRENERKRQTER

SEQ ID NO: 1008915 - protein, 110 aa, Homo sapiens
MVHWNKTIKNAPVYVSSAKLGQSQGCVYRLGRFEDSSVLFAYWECTRKQNECATSQGAFLEIESWTNMVPGSSYQLFVPPKRWCYDNLKIGEFDRNIREPRAMPHWLPGP

SEQ ID NO: 1008916 - protein, 363 aa, Homo sapiens
MYHHRVVVVKSGVTSIYRATRLYYKTNGREGARVNTKHGVEWENKKRKEGDTFCVKRERDPHYSSGGGGGDKIYVVKKQDSTLNERNIYIKELYCKGNKFETLFKEVVYKRWVTNTNGNNIVDRMSDKKKIVGNKEGREIIDREKQFILPQTETSPYYYILRENKKTKRKKRNERAADKTTKTTTSRRKGEEGKETKKKKERNGGEEREKKEKRRGRERGKREGKEEKRRKKEEKRREREKEKAAEKREKTGGKKEKEATRRKHREKRRREEQGKAEKRNRKREREKRKDRGKKEEVKEEMRGENREIKRRTERTKKKREDGEGTTKKPKSNKQQHEKKAREEETRAEKKTTNEDKHETEQKR

SEQ ID NO: 1008917 - protein, 179 aa, Homo sapiens
  misc_feature (93)..(93): Xaa can be any naturally occurring amino acid
  misc_feature (135)..(135): Xaa can be any naturally occurring amino acid
STKRTIVQEFGEVRLLTMGKGSFKYAWVLDKLKAERERGITTVIISVMENLINHARYLWCTYHLSAPGAQRLLSKTLYYRDILTAVLCVSWSXSRGVAAWVTCCIDWLSSTETGACTRRSMSLSASYTLALCKQXNCRCSTITGIATCELIALLGHEEAYRGITSLKGYVNVTYTNYRT

SEQ ID NO: 1008918 - protein, 115 aa, Homo sapiens
MDRQRNLPDITKKPVLPYHTSLETKKSRARELPKTPAQDAWVYPKAGNDATMEHLHQWSSLWSKSKYGYHNDTAAEPRASVESDMPHTEGVPHMVVGYHEYRTTYCLGYPKGGYY

SEQ ID NO: 1008919 - protein, 376 aa, Homo sapiens
PLAHKFLLGSVRKKPGGNGSLPSHPSTQKTPSKGQLEAPKPVASEGPWRQTNGCSDLPVPRAGCGSVAISCSSRDLMSMTPLVLRNSAAHYQSRHIRPVGLQYRLISAVEYAPAGLQSAPRVICQVCLSRAAFMPSCRLRSLQSSRTLEGVAPERLLVTLDLTHLEKHASVVARGDPPGSQISLRLPVCVDTRGSGITIPGILHSAIERSIMGLSDMCRLQRLLWRKIPVCPEKLNIPTSQHETLRGLPHLAPIRGTVIYASIRSPIYQGCRAQADTTKRAHQKAWTSAQGGAVPVGTKGSRTQPERPLWRKARRKHGHHPAQNSQKSKVPGPQTMGPAKVHWRANREVGVQLRRNNPETHHMAGRPESWRARHRE

SEQ ID NO: 1008920 - protein, 268 aa, Homo sapiens
MKSFHKHSCNPKLTRTVASSGTHSSGLSADLLPELQGAVAPVPLIDNYYHARAGHTNTTLCLPVLKRAHWAPGTAHHRSSQNLPVTCAGTRNGWYQVLEDCDDASTGRPFGGTWAPNETRGERNTRDSADQNMAMDTNRHWTHTGWYQGHETQRLGKPLPKGTPAAYPIRGPAQRQISLRLADPKRLERTPCVQHRGTPLYEATGFPDNIGAPNGKSGNKGLGGSRQLLGELEGENRVETDIRGGETEIGGEPNEGGVSRSLVNATQL

SEQ ID NO: 1008921 - protein, 94 aa, Homo sapiens
  misc_feature (24)..(24): Xaa can be any naturally occurring amino acid
ANEEKQTYTPMLKKASNFKKMIPXYRQPIIIFHVLQLSQQLSGINAVFYYSTGIFKDAGVQEPIYATIGAGVVNTIFTVVLYSGGKGRKKDSAL

SEQ ID NO: 1008922 - protein, 174 aa, Homo sapiens
MLEDRRLTQLLAENPRLLPNALGTSAHALRKPGGLHSPKPTGRQRSTPQHRTVPGNPRTRPSTGTHHRRSCRLPAHLDTSKPLEPTTTGARLLHKHQRPHSRSTLRALLLCKPRCPVHPAKLDPFRLLAITVAFLRVSPRPSPPSACPTVLAQCLLLCRYSDSWATTDSCYPRR

SEQ ID NO: 1008923 - protein, 269 aa, Homo sapiens
MGPFPGRPEQEGRERSTGVGQRRGPAQDGGGTPRDHGSEPGPRARGTQRHDEVTQEWPPYNHTTKSIEASQGNQRRKATGPHGRFRSAPVNAPEDPSERGLGRSLGQEQRHECSGEARKAGEMPPRQGRKPGHTVTREDPRQEIVAGPRERALNKRELGEHRRSSRRKHQRRRAELAGGTKRDHRGERDRNGRPNEGREHRDRNEKWIMTRETNGGQDRPGGGLAQYGGRPEKGRHDERGGHNGDEWWGRRTQRIGAKDRGAGHGARER

SEQ ID NO: 1008924 - protein, 45 aa, Homo sapiens
SWKIHLCDLSVRHHLLIQLPVICSVKPPDTVVTVSACGTLWHQYI

SEQ ID NO: 1008925 - protein, 53 aa, Homo sapiens
MARTPRSDATWNANGQDPSSPKTTPPKRPRKPELREICGAHQQGGGRATKREK

SEQ ID NO: 1008926 - protein, 128 aa, Homo sapiens
MIDRDSISKEKKTAECACDSRPVDPSTLGGEGGWNMRSGVRDQPDAIMVRDPGLYLKTTKTTWVRDGHLLLPAYSGTGLTVQVTTWQMTNHGNVASGLHLDTWKHSMDKWTNPNDRWYRYSNDRHTYA

SEQ ID NO: 1008927 - protein, 157 aa, Homo sapiens
  misc_feature (122)..(122): Xaa can be any naturally occurring amino acid
MYRDDSRRNSLEWRLPVIDDKHKSGRLEFSIAGRANDCFACSKFSVSSSEEQITCNIQVTKVTQVDGNMPVRFATETTFPSGSSMKFCNTKKRELKRKIFEINKEDANDWVKSFCPDVQATXRALVFWYNARFYWAQGSLDVTPCFSVTETFFDKEM

SEQ ID NO: 1008928 - protein, 310 aa, Homo sapiens
MGFHCVGQDDLDLLTWGSTRLGLPKCWDLQVSAIHVLALISGFFIRTHEFHHVGQVWRIAVTRFPTGPLSFLSLASPSHTSSCHLAARGDPDTLRPYTFRLSLQEQYACSQTPDDLTTNTFRSYQRHPNITRSIRANFLQHSRPPSTHWTITRTHDPTSHFTHYHSSKLPRIMTLGAQQQHASRSSTNTPAAPRACHNRTPTPQPLTHHYQHTNFKHSHLRLEQPPRHPPHRVTSQHLHHPIPPTNPCSSPRPPPHPPTHPPPPKPPTSIYTPSHYNPHPHQPPQPHQPPHTTSKHTPTSPPRTTTSTST

SEQ ID NO: 1008929 - protein, 117 aa, Homo sapiens
  misc_feature (55)..(55): Xaa can be any naturally occurring amino acid
HASGFNTKVCLLLFFFLKKAGFIGPSERISRIFYRAPKLKHISNFTLQPRHHLQXKFRAKAGGISQRLDLGFCANWVLVSLKPSLGLLGGIRLILSWLQVHLRGNFFNIWGLFRGTN

SEQ ID NO: 1008930 - protein, 108 aa, Homo sapiens
GPPAPRRPPLPGPGLRMLAQRLVRPGLLPSGTPANFARYVPSAAGHNDQISTDDPSEVREILLKRRQAAMPDDDATPHARPNGTETSTQNMRHTRKHKRPETPETSEA

SEQ ID NO: 1008931 - protein, 369 aa, Homo sapiens
MREIVHIQCGASAGNQIGCQVFGQVISDEHGIDPHMAVTTEQTVTYARVEENPTRLHTTCKPLGINAHYDSGGADPSLGVLARHVSADVDFEHKRSLDPTIWTQESYQTRRTTLIDMLRGRHKGWDCRGTLTIGGQREPSISNTRRGEGPREALGLRHRPLTTLVNCRDAGAKRRASRTYAVLSPLTITRTHQYHRATEALNTYYVREGQHNLAEGTQSAQTGPGTPEERQDKQPERQAGTDPEEEEPHAPLARDTIDLDQSMTRVGRTTRPSPKTSPETETDKRGKRVTQRTRQQDRERGDQRDHNAEHARQTHTKHARGDTGHTEMSTRRHTPRGEGPEPTEPLAADDGQGNLKQRGPTKQTHTHTE

SEQ ID NO: 1008932 - protein, 296 aa, Homo sapiens
MKNRRDATQDKQANTVERWAHNEQDYAESSTRHQQRRDNTQQQQPKAKQHTTDEKKEKGRKNTTGKRSNTRTKARDERKTPIPDTKQLRTKENNNTAHDKNEKLENNIRQKERTKQQEQSKKHDRRSRNQPQTKKKEEKTNSEGANQRKNRTTEEKRNRNNTEAEPTAASKEHITHTQASSTEDRDSNRRNGEDEEDERQKTSEHKSKEKKTQTKQEKRESRKTRSTHKRGHTRNRKRNNTNTKGRGNRRQRNKRKAEDVMESRANKQKRNRETIMNRKEKRHEHDHRHTHKQPNQ

SEQ ID NO: 1008933 - protein, 316 aa, Homo sapiens
  misc_feature (181)..(182): Xaa can be any naturally occurring amino acid
LKAERGTVVSPLISPCGNERPAKYYVTIIDAPGHRDFIKKHDYREHLRLTVLVLIVAAGVGELRSWYLAENGQTRRAVPFVAYTLGVKQLMVGVNKMDSTEPPSSQKRYDGQSFKEVQQLTLRRIGYKPDTVQHVMPSLLGFGNCVINQCLGMPIGCQSNCRLRVQKGLRQMSSARNRSAXXARLRYPTLALMALDVRSLTNQAAVPTEQVPVRLPLQDVYKVGGIGTVTVLGEWRLGVLKAGYGGSPFAPVNVTTGCNKSVRNATMKLEWKLFLGDQCGPSKVQECVWSRDWYDVGQRLLGDQAKMEPSKWDSQV

SEQ ID NO: 1008934 - protein, 214 aa, Homo sapiens
MHTSQNDALHLDTEEFDRFTFILLSLCTLATSSSPLLRMYLRHPALRPASPALLLSPVLDPARLHPPTGLSPPSPSLSSTPLHSPFYPSSSLTTSLPTPLTDPPHNYDSTPPPTSHSTPNSHTPLTPLPHTLSHPPSFGYYPPLGLLPLAPLPSRNLLALLFLFFCWSSFFAVSPPRSCPLLFLLISLLPAPFLSPALFNGVPRCLSHTVALPL

SEQ ID NO: 1008935 - protein, 231 aa, Homo sapiens
MPPHYSAATPAAAACMHAATHAGDSSEQGVPRHLAGRPERADPCAPSPGHPRSCNVWWPGTQHVSTLTADCRLDFISMEGWPTSYLRGRNLHLADLRYRGEQACWAHTDGHLTPTDYATANQRASEGNTHTPTSQEVGGDRQQHRKGKDKKSCEVELRSIERQKQGTEHNTISVLAKKYRRAERNQRKKPPIGQDTRTKQTRSNTAEPQPNVKQRNKGKTERTIERATSNT

SEQ ID NO: 1008936 - protein, 212 aa, Homo sapiens
RLAADSGTQIVASRSSDPSSKSDTPTRVCTETTTSVTCELGGIRVPLSVERRRTFWYLARLKIASRTDISSTYLNKSPEPTKRTELSPSTYIDKDTPEPQEENGGTLGARTLIAHCGCHSSFAEPTIYEQSKRNPMASARDTQYDEQESTSTRQSELLRVPPNSSRIKVPQTPNVHTRRRPAFTPTVTAPRYPVSTEAQIARTPVAISAGNN

SEQ ID NO: 1008937 - protein, 265 aa, Homo sapiens
  misc_feature (187)..(187): Xaa can be any naturally occurring amino acid
MVSGPVRLGGTLETGEGRAPVGGTPQLQQLRRGAPCGPCPRRAYNHSAGAVVAHGKKPGLGPRGVASLWQGRGFPQVLAVWTPMDACAGGRTCGIPCATAPVCRGPLETTVGTDTALSPGAFHQRASVRPSISGSGDLLPGVGLCQFVPTKSPPWGLSPNVGLCVGPPCVQLLSTRQAPLWRHTIVXRKSRSTLAMEPVAHTSIVQVVPASECPRTMPRAENLKVVGTWAARMPKAPGQCGHFHCRIWPVERPLGGTRHVEGHLV

SEQ ID NO: 1008938 - protein, 163 aa, Homo sapiens
MLTRLVSRLLTSSDPPPPASASQSAGITDVSHRAQRFGISIVGHGEKRLEAKQGSEIHGKCQGGTLQAYGPSPVQKGLGWDADSGYARMARRHTCRRGSQGPGPARLPGHGLSLNTWAGTEQTKLPYSQPLRTPRAAAVAGRGAGRNAGLTTQDAGANPRDPD

SEQ ID NO: 1008939 - protein, 272 aa, Homo sapiens
MCGSLLRTPGCLALVLACPRASPECSAPEGQCLRSDPRPCAPSGWAAGCACLMHVCRTATPAGCLSLSASLLPGHLLACHFCSALEAACWVRVGTPECWEDAAADYACLPAQCLSVPSCAVAACVLLRCKPGTRSMDVLHKNPQGNTGDSRCPDPFGNMATHGERFQDADSRARPKVSTDFKKPHIEPDVQVIVLRERQRNLYSQAGCPLKTPRVVLPWKVLRCGSGTGGVSPLLQVHTRWLLCTYARSLVTYSLVPRSDRPRVSSQCHPWQ

SEQ ID NO: 1008940 - protein, 118 aa, Homo sapiens
MEPKIDIVRCKPGKYPRWPARVCGEPWRVPRARCSLQTPYVAKHTSALCNSCRLASARTTNPTAKRQFCTVSQGGGQQHRLILSRPSKALDGDFTEENRAQCRDSKQTLCMEAVDKSE

SEQ ID NO: 1008941 - protein, 305 aa, Homo sapiens
MGPVDRQWHIRSCTWVEDNMAYVNGEMKSVGEVKDTDEAWSRRSYLVRSSGELCSQAVRIIDGATRRRPCKIISYSSSFVARGPWLGGAEPLEDDVPCIGTLIAFKIDPVGIELFVGGINNYRCYAATKSHVFRKGLTEDHHFWMKQTAGPDGRPKQAFEENHGKSTLRTTRIRPLLVMLRIRSSSPFSPDVQPPVHKADRRPNPHQALITVIEQGEGTLHLMTRKKAIIFTDQGRLAAGAEQLRSTFSRIGLHLTVKNVVQGLVKRARARVMEREMIQDCVNANIGGELQDSWSLVEYWGITGR

SEQ ID NO: 1008942 - protein, 225 aa, Homo sapiens
RSSPAALLRAGSSTKFTANALALGSRMATTVPDGCRNGLKSKYYRLCDKAEAWGIVLETVATAGVVTSVAFMLTLPILVCKVARNSQTGEKNACPTQVFLLSLPGLVLGHLAHFASSSTEEQGPTLLLLDLFHLFSAVVMLELTKLVRGRSPFPVGLGLAGSASQSTYDIVDRETRQAFDFRPVEEIVPPLVLWGLTPSLFTLVLRRKLGHYQSLPCSVRHLLSD

SEQ ID NO: 1008943 - protein, 237 aa, Homo sapiens
GRVTYVHRHAWLTLEEAGGPEGLTLCTLGSPCLDPHGDLLAMACSTVPIHRKHILNELKYQCVPTRRYGLMFIRLPSETGMHGYHSPCPGAVPSDHSGSVMARNWDSSFQILKLALCKTAVGGLPDNRHSAPPHPELSLAIFPRCSPTPWQKAGHALFPADRAGFPTWLQWTYQKPCCISVVSTCPVPCPHSLCPEEAKLVSLRRAHKGTLDPPESRLVCSGRKADSEVGQWALQGT

SEQ ID NO: 1008944 - protein, 187 aa, Homo sapiens
YLRQLQVLDYISRFLSEDNETLVDVCYLEACASCAQTWAKKEHILQPGGDPMSIINLALVLALNAETVLVMPIYRERLMHAEPWRCRSVSSQSLTRVPVDAGAMLTHYSRLGLRRPGLRENLATDLPARYFLDTRATSQVGRGPDRAGKASTLTLGIPYAEERGPPGIADSMEDCETVAPYCWGPQS

SEQ ID NO: 1008945 - protein, 69 aa, Homo sapiens
REWALKVMEPEGVIESNWNEIVDSFDDMNDSRSPFSDGIYAYGCDEGPLAIPRQADAHIYLAIKRRYRL

SEQ ID NO: 1008946 - protein, 147 aa, Homo sapiens
MADNPSLENHRFKSFNNKVPLMCDNQCDRHRNEVTVELRKNTRDEHLLKTREMFPKKNSLEDSDVDADFKAQDVTLKAILQNATSDNPVGPIELLSSASNEQLVIQLTRKSSRVDDFNKIWDLTNSSQMSRKGTDPPTLQLASCLRH

SEQ ID NO: 1008947 - protein, 114 aa, Homo sapiens
MFCFTFCSLCGWGESSRVETPSLGGDTGPARAPPVEKNATNSGRLAKQGPTETRRARERNIHGETTPRGHEGTPKKSLTQGSERREGVKNREYNKERYQTNAAHEQHTQERGGH

SEQ ID NO: 1008948 - protein, 178 aa, Homo sapiens
TSCDFRVAMLYFSLFGAARPRARDVGKLVTDGQFRAQHRKADPRHQNWGSKQGAGQARRACRHSDPDDVGSGCSRAEGRGRVGGPGGSMGSENFMQAESALEGPGVLLLKQQVLGGIIHGYTRYYAGSRRVGGIDNFENRFAAEAVTEDTYVEAPLVALGISRGNGSREGKNKDHKGP

SEQ ID NO: 1008949 - protein, 304 aa, Homo sapiens
PGDPLRRAASPSLVLAQPCLPRSLAALLPAAPQSGGCPAAPHCGPAVQLPLTCLCLRTCHWSCPAACAPDTCVLCCRCGAPPSRWSACASPSLLCHLRLVAAAQFLTSRGIAGDMHKTAHWMDHLEAIRRGGLPSVAPRGSGTPPFSQLRKGLHTGGPITGGTTYRRIRKIAGPPAMTSPDLIWRSDYRRPSVNSGERFPEAAPPIDKHLNRTNPQVVVVAVGHRAQKPVGHLAALYGRTHGDGYTTENFGDNRELHNACQRTASNQVVCEIVSQALVKKSGVGKVAGGNQLLDTRCDRESDPR

SEQ ID NO: 1008950 - protein, 165 aa, Homo sapiens
MQHTPQPLDKNQHKAEHTEKNPNSNQSGTNTQTVHPSGHERHQSAPSMNKRKQTPERVTTPLQILPTRRPKTRQLTASERENRITTTKPQRGAITSTRRPYTSHSEWQHKWAPKDTGGYTQTGGAWRKRANNNTRQQQKTHQLGENRRPPSHWKHTQEPKKTNHS

SEQ ID NO: 1008951 - protein, 308 aa, Homo sapiens
MRPTLFHIAIVAEIVDRVSRLGACVDGVGPSHIVPGHSLDQQLVVLVIGAELGYRQRLIVLRAPERGEPCIYERMGYEPKWGKVCARREGGLLQRITIQREQKNNGIEVNTGGGVKQSNKSCIHGAFPVNNLWVPKKFRMAKGPLPLGIHMAQGQSDGTGTDGCMHFQGKAPDWLYPLPVGAQMKSRHSPFGLTVHNDTDTVSGTPTNVWDHKHRLGKAKLGTRTGFKHVGFPGPTGEQRWWFEHQEGTVVFEHGWTDRSVKSICYYFHKGVRRTTANVKGVRTSCAATHPKEAHPNVVTPCTEDLCR

SEQ ID NO: 1008952 - protein, 393 aa, Homo sapiens
GASGRGVPHVSLVSYINRPPLSPFLCSIYCVLIVSLTIPSNDTDGTCVRGVCTGAKGERGRVLERRKEQTKASPQSSQDAQQLLQAPEASSQKRSEGRGARGSRKGGRLLRDPGSNLDYNPAQEQHIIPDGRCLLEKREPANGSHYTWTMWARKDNAQSIAGSVTRQRDSRTRAGKHRPDRTPKPRRPHGTTGHTCTDNSKKTIQENTRSRAKTTESTIKQHRTIMEDQDHPKDQWGHTRTTSRQSERGNGRSTTPKGGQEGTAHRGTKEEHRGKAQGRDYTRTRETKRQSANTHGRNTTGTATRQDAGDIGTGATEEKQQREQKQNKDTTQKDIKRHSTKKTSMNGKHHMKHTRENKKQAKESKRTKTAHQANQKTKEAKSHKSHNTNRQNN

SEQ ID NO: 1008953 - protein, 107 aa, Homo sapiens
MSPLCSAVPPTFQWHTTCTTREAYPAFFRSNTSCHQSAPIQSCTVHLTGSTCNTTALHDTAADADYLYVTPTLPGLRTCLCQGSQYPSCMSAHRGHLAFHSTTLGNS

SEQ ID NO: 1008954 - protein, 44 aa, Homo sapiens
MGTHEMVNHTSGIYVRVNVGHWTTDQAASRHTGLNARRVKEADI

SEQ ID NO: 1008955 - protein, 50 aa, Homo sapiens
MNARPLIPPRATLSRLNPPRTAPSHTDALSGPTGGPKCTLNYKLAVPKPG

SEQ ID NO: 1008956 - protein, 497 aa, Homo sapiens
DNKEGEDRSVIHYDDKAIELFKDEATDGGGDNKEGEDSSVIHYDDPGHCNGCSAPVTRHAALQAHQTLPGPCTCNHLQLYSKVAPVMCVRGKQAPWAAGTARASPHAAQNPLNTRKTTSAANSLTLPWRMKTRPAGHPTFMNARTRHSTALFAHRHNSWGPHRGRPRRTLPAHHSGSPHYPTAHRPSPTCQWHPRTYPWGQRRNGQPTGPGTKPHGPRTVTHLPPRAPYHATGTRGRHATGTLGATEPRARQEKRQPPDATSDPPDRQSQGGTLAQHPSPHTTTRTQQDPLPHWHSDPATDRQAATAYTGTRTTPHEPRHTRPTHHSLTPDSTTDPHTSCTHLTSRPHTWEPKATDPHTSHTPTTQPSTTQLSTYLNTQNQHASHPRRRHHPLHEPTYRHIQEENTHRLTLTQIPKSDSSNYQRHPPRPRHTLSKDIDNPYTGHDSSVDTHTAQKQALEQSARPNRSCKRANRRSQYTHYATPRRPPAQQADMTEQL

SEQ ID NO: 1008957 - protein, 225 aa, Homo sapiens
LSLSLQKGPGVQLPIFCPDLGLLISPVSANYKGPSGLMQQAMCLCVAHGLMPREPRPAPALTCCRLARPGSPCGIPAYGAPRQIGESRETRALCEKRPVRGPDQGPSVRSREPCTGVAKHPAQETPVVHAPVLCSQNKPASFSPVKTSPPRVLHGHTLAQKPCACGPSVPDRAHKLLGTLWNISLKNSAFISELAVLVDQAPRVVPPVAERAHSRNHSCETGGQK

SEQ ID NO: 1008958 - protein, 438 aa, Homo sapiens
VDVTAMAEGERCAALPTSKRRRLGKTILTNALEPGGCDSGNVEKYYIQRNDRCLLTLRATRSRHDCSELSPDPGDYFGTHWDWYFQDLCHHHAITYFTPRLRLQLLLEPAYHVTKKRERPRHGTHLVPDYSTLCTLPLLIATTHVTHSPTLRTTPLYAWDHTLTWTTPPRARHSFPPSPTAPAPFYYQPCTTHCPTPLHLNAYIPPHGHIGYPYEHTRPHPIAHSPSQHGWTFKAATIPPLKAARNALPGLPSTFLRTSRNTDNHLNILTRNVPVLPTITPLPSRDTASQHAGPPAMTLGNPPLAHQARHLHVATIFLAQPTPPTSLIQTHQCTPNFPTLSPNPYHTLPSILHTPSLTHIPPPHSSPSHPCPHTHPHRLSYTHTHHPPFEAFPTTNHKAPQQKTHIIHTHTYHTSRTHIPTPQLTTTPPQHILQPTSH

SEQ ID NO: 1008959 - protein, 356 aa, Homo sapiens
  misc_feature (218)..(218): Xaa can be any naturally occurring amino acid
MASSNTEYQCIPDSTIPQDDYSLLSIPTTRWRAVVAFQCSHSGLYGMCDVCEKPMPELLGPVCWFNTNPSSYRGIYGSSRRGLSIQCTGMDADSGSPGYPYYMNYLYDERHSGRDRLVVHVWLLCLDLLPECYLHLSHELRALPLRCARGMCISDKLGSRSSIGEWVNIVVAHAADEYQRGFRQSPSDMTSIVDPRQHIRCQFNVPTCLDTLVELLPXALSSLATCLWSPLARQRTPSGGYCTCASSKRRVGARYSTRLKALVLPTRGGSIAHFTMRHEFPSGKPAYTCWFTSVRAEMVTVKMPPLPCLACFAPSAQQRTCVVGGARQLGDQCPHPLASCFYSTAYGSRDEEALWR

SEQ ID NO: 1008960 - protein, 258 aa, Homo sapiens
ERVGPRKNTSSEKWQKQFSMPHKEEKKSVGDLRVSIANPFWSGPWSSDNDTSRLLPLLKHDLTNQLRLVTELRTDHLSTLYWAHTVILDTRYFFHEAVPRFTTFHDSYNWFANMERLLTDNTLAYSIHHFNTRYSRTTSFDVGQDTTADCEDHGRQRLKTLPRGGRNFPSTNGLLSHADKPRLCNTHSFPSDDTTRHLHPKRGHTNASLQQPPLHALRSLTTCVCSYHKPGCDHGGTSSVTLQSERTATHPYLTSAVW

SEQ ID NO: 1008961 - protein, 301 aa, Homo sapiens
MVVARAGEAHAQRLAIESAVTAGNSLEPGLAKDLVNALCGLYLLDYLNKHAAWYMSEGLMDSTRYRAMEEHLNQHSDFLATHVALLIDAFGQGDASRAAIASADAYPDALAAKLQWAQRLNLTTHLNLRAMAYEELVNISQTFIFTWALSNFRILVGHLGNGQHISIQEPPHVPHARHPVAPQPVSRGIALSAPLASLLLIDDEQAYSVRAYNLASAPLGQQPLNQIASKAGLALTFSRRWPRARPRTRVRAHVDCARALRAALRRTGLTCTTAARTHRRCHPTGYGPACYISAPHRPEVL

SEQ ID NO: 1008962 - protein, 266 aa, Homo sapiens
ASKSFLPIGSKACKASLKKLPMGWQEQQVWQKPLFTLAGGPSTLSLALTKALTVTALTVSLSQAVYSPSPASGPPSLWEAGHRVAHPSFCDYSSHIPHLGKLSLQASSPEKWGLRCGRRNPGHDSIQKGARGHQPIHTLPEGPRGTSPHPSGPTRGEINTPHKLNSNRRADSPRKRYPWNRQKAPHADHTTEEHRHSSPAAQQRPPNTPLSARPNTSMRAPSSRAATTPVGSRKAPPPETPKPSTRRRHNTNNIAPKPSRLGVDTT

SEQ ID NO: 1008963 - protein, 362 aa, Homo sapiens
GQNTGVVNTTPKSHTWELAKTHINIVVIGHVDSGKSTTTGHLISSTCGGIAPKHTHCNNICSTGRLLQHGQHRAPSSYAWVLRITLTTLQRCTRAYPPWIISLLATWKHSTVSYCDQYYTESAPRDHIETFTHKTMTYQGPSHGLTCAVPDMSAAGRCVHIRTAGHLQEHGPHPTQHARSALTHWDVNPSTLSVSHTQLDSTEPPHNTRSTEIIDGQLAYQDTSMHTSTYTDTLVASNIHGTTRYALICTPYHGSETLELTPTIDSDAKSWCYTALATEFQRGTATNDARRTRRTRPTAPDGKHQPLACEKHHKKWQSVPNQHQRNLPKTRLRRRICHELIYRPLAGNSLMYRCCDRQATHL

SEQ ID NO: 1008964 - protein, 226 aa, Homo sapiens
MCLMRLLARRSAPPRAPPRADSGSFIARVAELSLLLNPLDRITGVPHHVRRSRNTSSEITTKDLQEKKEVVEEAEYGRDALWIMANASERIDGAQDADNEGESKQEDEECESDEVGREEEVCCVRPGMLYEIDDASRLDYSVKRRSRCKHSMAEFLHTLQVAQANASDNAQKRTFTYVSDKHTGPQEKQHYGMIIQRARQMSPMSRVAILASRVNRTSPVVRLSGY

SEQ ID NO: 1008965 - protein, 102 aa, Homo sapiens
EPSDCTTRHVPEEESGPSEADWYYCVMRNERTNQELKDDPGPSVVGQRVEPPEIVYNLRQLTRTRLPKYSGWPRGAASVGVYGQIPGGGYTMHMRALLGALA

SEQ ID NO: 1008966 - protein, 164 aa, Homo sapiens
TVSPWPWGPKEALKAVISSAEGIGCLDNKVTVVYLAPALRIRTGPQPRLRECYLPRESLITIREYDCKVLSLHVGGLTVIGTIQYCKRIAVRKFRKAKGFRRWYDPLVPPARHSSGMIIRAISRTPGELISSAWFYVRPKERSNFRMVHLNDRLRKKATQYDRL

SEQ ID NO: 1008967 - protein, 166 aa, Homo sapiens
MSEWDACGCLVGKEGHYLAPDRHVAMWSVVDKTGVEGHAELRRQHDMSSFRHATYYDIKAEETHRYTISTHDDKGTNCPQEPRRRGEEVTSHNRYARVRPQPRGVRLGQMWRDETKGRDDARKDIQKADQEQPSKSTKEREERRNKQTNKKTYKRTIINKNKRVTE

SEQ ID NO: 1008968 - protein, 284 aa, Homo sapiens
AGSSRSPDFPAAPCWPGMPMCWCAAVPCALEAAPVRELALRWASCGMWPVSLQAAELWILHDERFGDIFSLLCVVDSLVGEEMADSVKTFLQALARGNSKIQSGVYVPSQTLDARIQANRERSHASTEGQSSVLGTRPRAPEYYNGSKESEANIIGEVTKYIRRWKDAMEIGLEDDAGLMRVVEVAKGGKIRRCRRRLHSKEKVREISGKEGREKRKLTERPAKESPDRQDVRNSDDTRNGQTKSHRDANRGKEQPKEEGEQQAQRRGEDGQHRTTRGTARQNA

SEQ ID NO: 1008969 - protein, 145 aa, Homo sapiens
MDGEWILSDPVSREEAEFLVPKESGCRVFTQRALVELGYGHWMTGTCKYFGGKRRDVYTWENLVGKPGIAFNWKIGCVYSCVTELKGHMVTGTFTNMDTGNLHFSATIEPRRSGKIVRLGRKIDSDGTGYWFVAVHSKIARGWFG

SEQ ID NO: 1008970 - protein, 260 aa, Homo sapiens
APRQEARLCVFSAESARQKLDQGRRALSDLDLMLPMPAVDLQRVIRTSSSFPRELFMQLRDAHLQEAPTVSRAPWGTMKPISGIAMAKNESPEKGPRRSFAGPALLGPHDSGRALGLIPTSLRSRGTPSQTFAQLDSSGDLDYCLVAQVAGEGNPFAQVDYVPDPNVHQGTHQDPRDKGDACDWARDATSEDEGDAVEHCNHNQALAHLAPHRHPEMTAHKTTRHITKDPHRQPRPAQPPTTPHTSTNTKIPHTPHAAHA

SEQ ID NO: 1008971 - protein, 219 aa, Homo sapiens
  misc_feature (55)..(55): Xaa can be any naturally occurring amino acid
  misc_feature (83)..(83): Xaa can be any naturally occurring amino acid
MGTYEGQTERKHTFVASGNHLWLWDIRKTLYTKKSHINETFPILYKHNTGNNQKXGDSTKRDKTRGGRQKPIQHGAAEKEKAXPERGTQQFRTLEAIEDTPSFPKKQRWAPKQVTQGKAPFQKVEKAPKRNERCPGTVKPPFLPRENIKGKGHDWEPHFFPKEENIVTDKEFTTPHGVAHIIIPTETHARIVWCTHHTGESGTRSYSCDDHVSRRQRTT

SEQ ID NO: 1008972 - protein, 206 aa, Homo sapiens
MTEHQPSSQHKPPSKAPTHRQSHNRTTPERPCIGATTHAREHAGIPREYHVGTRDDVHEAPRDHTRHWHGHTPMAEDGGTNPRESRSAQGPNNGRAHDTLGTHHGTQHQGPHGPSDKSADKPTDGPGERSTRARAIHKQGKPVQRHRCEDERTPNNPAKGNEATVERDRPGTRIGPAAHRHGTREGTGEVGGGTEERRPRQARRQA

SEQ ID NO: 1008973 - protein, 121 aa, Homo sapiens
MKQGFLRNVVQAGRLRPVAQAVLLPSVSQRCWKLQGMRLWKPSQGQCTFHRDSELSLSERSNGLESPPHGEKLVWLSCLDSDSCKVRPFRLGRGGEPCHVHPSIAMDILLDSKNLPAWCWA

SEQ ID NO: 1008974 - protein, 268 aa, Homo sapiens
EDSERRRNHNILERQRRNDLRSSFLTLRDHVPELVKNEKAAKVVILKKATEYVHSLQAEEHQLFAGKQEKLQARQQQLLTDKLNRSDLLDASQNWTVTATMHISILPPPQTNIVSTLNECRLYFQIGPLSSFGSGLRQQDHQCAGSAWDLGAACIPGCWVALQASSTSPSMTRAKPLGDGMGASGAVERSPCVSQVSKQPGKSFPSLTNGAYSSTQMPHKGLCHLIPLGNIPGKYHWTQSAFPYTSWRTENVGFSRPVSDCKFIPNYC

SEQ ID NO: 1008975 - protein, 147 aa, Homo sapiens
ERERECSCVGTIHRGVFSQPYGLDTETCAARCSSDAGLTSATWGTAISDSPAQGDISAAPSHSGLSGASRLTLPYRHWQPQHLARSAARTAAALHDDQAIPAAPRALRRLAAHSHGHPYLNLSNLQHAHPSSHAHTQPSVSLLRISL

SEQ ID NO: 1008976 - protein, 412 aa, Homo sapiens
MSRQGHGIIQTLKKKALYLHRSRDEFMVHHREPRTTARSRIGISSKIPTRGHSNIVRVVATHWLGPRSGTHDGTYGLDATNPTAAITIFCANPLLSLREDRPTHLGGYFHIPIFHSNFALQGFLYLSQSFSSTTISPLITSSGDHDQPSLPVPPRLSSAPPTAPPRAERDVDGCRNHTIIQHTAAPRHIDCATSYPSTNRSPPGDGGSLIKRDYNHSPASTQPATAASTARVCGDNTTTHDGASSPRAAPPPPHPRGCLLENTTVLNLSYHSSALSWIQTRSGRISFANSPIMLSERATYAVCGGLLIMLTSLFRSLVPVHSPKRWTGCPPTISPVGAHSTRPSSNSLARRSGDHTAQRTTQLCMWRYNRILQCGPALVVAHFFRCFALPHHTRAEGVVSHFATLYSATLVE

SEQ ID NO: 1008977 - protein, 161 aa, Homo sapiens
MHDLGVAPICRTRRVECAQPRTKRRPETVRKYMHSCVLMRANRILGHTQSALGSTMGAPRERERTPEGGDAWSAERAFTEDPSRYKDPQHIGSTEIEARPFERLSVVVWKRVHQCYIKRLSRVPLLYNISMMPEVFRSLLYERTRVCAFTYTYLADLRCAS

SEQ ID NO: 1008978 - protein, 107 aa, Homo sapiens
MSPYYTFPPSSLPLYNSLPPSPDPPIHHLPNNSPPTTSYSLDILTINSHITLPSLHLILLSPQQPHQPPTPHNHTPPSPTCTLSIYTSSPPSPLQPSTPITKHTYSL

SEQ ID NO: 1008979 - protein, 371 aa, Homo sapiens
GTSPSLAVLRHRNDHRDPDLSKSADILIFYPRIVCQSHPARPLDARAPGDVHITGAMVGSYSSPSGETDDPGQGGRAGPALSLRARVSVLFAATLSPPGLRAVRGNRHWLGLVGLCCILGRFRTEPVAHLVSVQTPLDLHPREGLPHVRGAENGPEEHVTLMTQQHTKGRLDNTRYPLRGRTNQATLEQRPPTIFDTETLVDHPRSPHLEPHHRIPDLTPTDRTDTPSTHPAQENPDSSACTSIPYEEPLRIPQLHNRAKRRHRTYNGPTNQHHQINYTTIKLPRPIHDTDATNDLTDRTTLNLMDSAQAPSTPQEDNETTEHPANNRPKHGWARTMRTRRLLLTLLQLLTPENTNNKRSSHLNPRHVRQR

SEQ ID NO: 1008980 - protein, 338 aa, Homo sapiens
LSFVPGNDFEMSKQPRLLLILGKLILLHHKHPERKQAPLTYEKEEDTGPRGELQQPVEWWCATAWSMLRENTLDYTRQHLAGTLDLSPYPARICLPVLDGLHTLGQFCPSADAPDPFSHPGPPLPLLSPHEALAPCEHPQPQPQPSRTTTVDLTSGPTPLQPPGERSSLALWCASSVTESNPGCAREIGLVATACPTLCLSADIPGTLFATCTRTNGARISGTSLPLPTRTALDPHTSCQPEGHAHASSHRRTDPLEPTQCGTLMQAGCPRDAALGTNGEDEATTSERSHLERKSPVHRPLYRLNPGMKPMTYPRSHSDYPAFGNRPPTTSRSKPPPH

SEQ ID NO: 1008981 - protein, 401 aa, Homo sapiens
RPLSPSSAAARPSAAMALNGLRAREGKGYEVLTRVLPGLLNSGTKQFKLLGTSMIRLAHRATGGSAMSDPATDRTPQACTPESGGPHTSLHAHCPGRLRPNASFALTARYQPTTCMPSTIQRHDAHRSDPTHPTAPPPPIPNTSKTKYKHTTDSTPNPRTSPPPTLPTLPPTHYTTTTNHSLTSPPITTTTPYTYQTHNYQQNLTHYQTNHTTTTQNNHPHTQTNNHPPYHTIMTHSPGYQNTHSIRKPPCHTNPKDHYTPTHTTPPDHNNNTTRTSPRTYDRQHLHTNQHPITPTHPMTYPTPKRHHDHQQAHQTPTKTPSRAQRRQQTHHITHLNTTPLHTTHPNHILYCRTSPTPQTPHPYSITHNSTQRTTPHPHSIQHPPAPTLTYNPTMTQQPYI

SEQ ID NO: 1008982 - protein, 359 aa, Homo sapiens
NLWPQPLPTLPLPPLTGVSVYGALQEDPLVPVGGKVLESQLPSLELGRHRLLEDKLAEWFMELRWWEISEPLQRCGQLVRMATSGSAQQRTPRLRLAEANRGWTGQESLSDSDPEMRAACCRGAKAHAHALVEHKEATVMLQNETHCRTTPRRQGRAPERIPRTSTPPKKNPKETQSLGTRSIPTRRQAAEGTETRTARRATPAAMAPRATPRHPRRLRSSTHPADLPRHPLSALDEATDNEPPRSREVRGAPRRKTTEMESAPTTGHDMQRQRAMTTNEDPESNGTTTEHAATDEGPRQLNHRQRRAEREAGVTKEGDREERTEGDEEAEREKRKGARRNEDAREKKYRSKENAELKR

SEQ ID NO: 1008983 - protein, 616 aa, Homo sapiens
  misc_feature (587)..(587): Xaa can be any naturally occurring amino acid
SGRSVGTVWVSESKPTVAHVLRIDPLFSFKHAVREVHAWQQERRWTTSCRVQSHEDLTQASVVPLTQSKSPSRTCQSHGKTCFPSPRQALSSSLTWLFLDVRAMPHHTHSPAYLHHMHIAPQHTRSSAQISRTQARVTHARPPHHIRRTTSNPPPHRTLPGVTLRITTTLPPLTPAEYGNRPHTRPNFMRTTLHPPQQATPATSLNKLTNKLTTYCPAPDKHPKQSEEHPTTCILLALIHLFTNNAPNVLTTIRRPTAHPQFPVYIPKGLGNHTLPVPLVTTTSANRPQAYPASFDNPTTDMAQHTFHDVRATHNPNKRTLRLNQGQPHQAPIPPATTTSHLTNPCIALNQHSISPALRSHRYTVYHSPPFLSATRSVRVRRSHNSETERQGPTTAGSHSASAPPTYSAHSAHTPPTAAAPRHGTSPPPQPPHLTATPGQHTLVRPHHVGGAHQHDLQDATRAPQPIADAPHTTAEAATATHNTAYIHPQELATMSGTTNTKKRRTPTVPAPDYIHTLTIMTRRTNPAHIRRHTRYHPRRHAIATPPHSRHAPTPHRQQTTWIKDDTRIANSHAPPDRDPHSIPAQXCTVPNSKRPSPATRQPTTPPAPNTTHKLT

SEQ ID NO: 1008984 - protein, 318 aa, Homo sapiens
MNLFVGMWTVETGSRWVSHEGSKIHAVDNTNIRNDPRTSRETRPVIIIAKTTRQVRKDKKRPSLKRGRHPEEANNTIDEDTHKGNRADQQVHTDSTYVTQTTTPQRQSDSPRCILRTQLHENAHYHRREKGQPGGNKERNNCGDSGTRQIVMSARSTRMDSRTPHICIYKKERGMYENEQGKNRPEASYQRIVDQSGQAIHTSMSDTETEHRSGQHNDRAVRHPAETDMHRPTPTREHPEQGEHRPLINNKTIKQTPPSKVNTTADTEEKNNHKQGHRGQTDHDDALTNSNTTETLKSKDSTDEHMTDDSKTIHEKHV

SEQ ID NO: 1008985 - protein, 130 aa, Homo sapiens
MQTDAWDRERNSRRRSSEDRNKATQERSELPKWKLPEKDKDKKGTGNCTGDINTEAARNIQTNLLNPGGKETETDQTTAEAKTEKKGSDGKQNDKSRANIKERGRHHRHTHKRTTRDTKKGRAKPEGTPA

SEQ ID NO: 1008986 - protein, 243 aa, Homo sapiens
  misc_feature (227)..(227): Xaa can be any naturally occurring amino acid
MVQTTETKDSGGEDYTPQEICDKYQIIHADIYRWLLTFSFDYSRSHHQSPQQTKIAQDIYQQQLKRGCVLQDTVEQLRCEHCARFLADRFDGGRCVPSVAMRSARGDQCDKCVQRSVNAVELKKPHMYTVWRSCTCWCSSSQELYSGPDITLEKDCEAVVACTDMDMANDSETSHGTVYKLVLGIRAVVSIANARGTPETTIIWRNLVHRVKSDEERGVRMYSVQNXHDGLTGISRQIHKTRI

SEQ ID NO: 1008987 - protein, 118 aa, Homo sapiens
TLRPAACPSAPPCAASLAPRRHHEPGLLVQRSWRVLLARTFGWGPGLPGSAPRVSSPVFRAGRRFRLSWCSCQASVTVPIVYPGVVARRGRGRGPGVAVGHHGRGPPRTDPPPYERSR

SEQ ID NO: 1008988 - protein, 240 aa, Homo sapiens
  misc_feature (113)..(113): Xaa can be any naturally occurring amino acid
AVAVEVGVLDAEVDLLTETGVGHVEVICDCLARHRTRTILDSCGTSCACTDLSVAWPRTEKANAALRKRPGAKQCAQSGWWAARSVSFLGFTAYARRQMHVFCEYPQYAVSPXVCRGNQGDTDHQSTRGLEARPWTTPSIEQDYDRDSCVTLAVEPFTACTELLTLVSQAVEPGDLSKLSDIEDGRPNMRAPFWLNANETGLVSCPLTLRVIDDKNEMGSHCVNEDIGISQRGIQRCKET

SEQ ID NO: 1008989 - protein, 248 aa, Homo sapiens
MPVIPARLQTGFVFQEVSNDISRDDVLDEERFAQLLDSVHMEPNTRCACSVWHMQVPDFIARVCAYLSFNKKTAHKRFPRYLAGQHRIHSLLVDVKANPTTRRYTATENSPQTPDKNMDLRTYQSVHGLRTNVGAQGRTELSLFEQADTPRFQTKHNVDLLPRTTDSVCHHPPTLVANRYRSFKDLRMPEMLYSLSVRSMDLVPSIGIKAGHNAIPRVVFVSKIVPQRNLNPLVATGHCPERMAESSR

SEQ ID NO: 1008990 - protein, 200 aa, Homo sapiens
RGSGSCWGAVVPVSGGLYEGCSHFIREDSSRMLPHTRAVPVVAPAADVTKPPAAKDAPWGGFLGFLEASISTIVSYVPVRGLRLCPGPVGPLMLSRVCILATPRFWEDPRTMGSQQRTEAEQGPLSLGSLNPKSLCEVQGGREHLGLSRAVRSLVHLQGAEVSAPDQALSLLPSHTWGPFTTRNQLMQVKATVETALAVP

SEQ ID NO: 1008991 - protein, 192 aa, Homo sapiens
MEQRLLVTDFFARRDPVSPGTTTSSLRSPSDFISACNLRDHLLGHLLLLGPASTAICGLAPILSNQSMSSQIRQNYIHRPWRHDCPHACVQFSTCTDSYTYLVSGLLFIDRDDVALEGAEPTFFLADLAEDDSAAGYEPLSPSRMPKPLQSADSTPSSIPGTISNKPQPSNRLTLEDNILPTNDHIKTPFVQ

SEQ ID NO: 1008992 - protein, 218 aa, Homo sapiens
MRRTRSHTQVGTIARSVVHVTGYTRRRKTLDVQLYLLHDSDGLSINPPVIKTKWVLTWSGTITTDPTRQETSLDTGSLVTHSHAPTATPDLIASLSCETVNYGLYSPMPAISHGFYPTRTSCAHEHGADGPPSTTNAPESKPFCSYSYNTSSLSPQKQHDALPIAPNSHLISPNLCDDNTRTIGAHSATLDDHSTSGPSTTSSRLWNSERRIAMCHST

SEQ ID NO: 1008993 - protein, 190 aa, Homo sapiens
MARESRVVFLLLAREGACEKGAGTVSRQADLHAFLSSLSSLLLDKAELVQTRAAYSIARLDTLCLEPPLQLAFTPGTPLILTSAFFFFPDLAALRKGPREHAVECRGKFRHKPAKKGLYSKDVGTMVIHGASLSDGSVTKEAWAQPSYYTQLHREIAAFSRGGKTGCTAPVFSGTPEYCFPTLRNPVAEL

SEQ ID NO: 1008994 - protein, 138 aa, Homo sapiens
WKWSLALSPRLKHRGVISLTTSASVGFKRFLPPSASQVSCGTTRHCATTPWLIFGILNTDGVFTSVAPGIVSNSPVNLQVDSGQPSVPSQKVRGNLQSVVDPTFAKRLIGRPLCISITIPFGSFTTPSVHHWLITHSP

SEQ ID NO: 1008995 - protein, 131 aa, Homo sapiens
MVPAFPGTYHPGQLPLFAPLKCTHGAWPYHLDLGTFGGNFLDTLKPLARNNTPFPGDTHGVGPLPTFAPKPPFGGLQYTYPLQTVCGRPPIFEVALMMFPLMESPYRGVLTTWKTPPQEPPSLVYDSGEGT

SEQ ID NO: 1008996 - protein, 304 aa, Homo sapiens
SRPWGELATDNIILTVPTANLRTLENPEPLLLPSGTARLTAGCGATWELSPIPFCALASDATCSARRCRLSRGLDALHGIPPLHCCPILAAPAARSLIERKQASISTDTYTPPKHNHADKPTSHCDCRSEPTRSSPHCTALERHSKNPTQAEPTLTLRDDYPHTTNNAAQTGQHLALNPPSAAALGFGIGSLRVDPICKGNRRPPLKPRSTLRHQSQSTAAPHAYAPKQITNSRRSPLRASASHPPPPTPRTTYPARRQRQRRKQARPSHGNIASREAPFGKPPHHTRGDKRHLYTPPRTESRS

SEQ ID NO: 1008997 - protein, 279 aa, Homo sapiens
ADSNVTKAPRSLSEVRIIEWADAKKIIPDRGPLGERSLDFECRSEVSMSNRAEWSQQARTTRLMADSPPRYQVGDGIVVPKMTLGSRGIAVLERSSQWPRTSHVTRESPREVGGWAYISRSPKLGLGAPLASPRREHWANFFGPTPLPWVFERAPNGTGNISSPQMGRPTIPIPALSGYYTDLGESTVGICARLTKLGRQTARGPKEAPQPSTQVGLLPPKPRSGASLKSPVGSPSKFGQTTEEAANLSGLNISPRRSTIGLRVSIWGGPGAPLRSTGE

SEQ ID NO: 1008998 - protein, 258 aa, Homo sapiens
MAPDPVAAETAAQGPTPRYFTWDEVAQLLSGADVSWCASDLTVTVYNISDVHPRGIQWVLPGSSATTPGRMPLDPFVAFHVMQGPCEDVYVSSLRDWRTVSRCSPALSPPRIDELDTLQFRELPGHMLAAACGLIARGQSMSCYLAAPCCRRLACLALVHACRQPLRALRDVLLVARFLPSLCGCVLRVVNVFPSSPAALCSAPAQPSDRLGGTVIRHTSQPMPFYEMGIPLIATHPESGAIRVPPFTGVAPPSTLGM

SEQ ID NO: 1008999 - protein, 147 aa, Homo sapiens
MGRDELTTPTMVAAIPIAISVKHYRALGLDMERGLEGAADREGPVAAWELLAHKTAAGVTDRNLSPGLLGFLLRRSPPKSTQGLEQPSTQPEEGRAPPPALGGGVWPFLPFPRPPEAPSQFSVTSSGRKASRCPPELLWAQAGSVTS

SEQ ID NO: 1009000 - protein, 483 aa, Homo sapiens
VCFIGRDITFHRAGLRSVRFLVPPFCFQPHRPGAWTPQLYRTHDSVTLPREERKPSKELTYSDLGNSKRIMYLECQKLIQGLWRIASFSLADKWPSAAQPVTEGTLVPDTMTCLYETYIVNLRLHVGVLRSLAYKALQSYEFCTLSVTDTRADRLAPATGLGPRQLGTHYKTPSLSLSIIPSNYNYSNHPTANYNKTTDHHITAIHTSNINHLHPQTSLSNAPIQQPIISPHTLATNMHPLKLTPSAADTLQTYHQLIPRYDTIALAITNRTAAPFSPLTVVRTPLPQHLHNSKTPPHTFTSATPTHMTPTHSHPFLITTTPIPIPPHQPPNTPLPTAQPHHTPTWSTTHNPQFVLPSPNPPSPHTPTRPHAHWPTNPIGIEPSSHPTTTATQHESSHTPPDPANQFSTSHDQTCHHTATASTRMVNPIHTDSLRAPTLSPAVTSPFYDVTSTTTYITVTPPTTQTNQSSTTKPGRNIYAVDH

SEQ ID NO: 1009001 - protein, 197 aa, Homo sapiens
PVIGLRPNHLSEQCKTLSPVRFLVCGQGLNRVLSRAPVEKTLPVMDCTHSTISTRIDRTSPLPGLSQRALYSNVLLLAKRGNCTRTDDLLRIECKQTYYEFGGGLELLADEWLKVNHLGTEAPSLAVVHSRHILRSAVARPLELGSDGSSNCKAPVNSMHSRTCTCKYVQPDPPILLILCKRSHAVAHDMSPSMAIR

SEQ ID NO: 1009002 - protein, 491 aa, Homo sapiens
MPKGKTNRPTAKEGGSGPSCREDSTEAEATVVNPLFEKRPNNFWHSDRTSSPKETSPAFCEMAPYIRLHAAESHPLLQPAEHVPPADLNQLTQALRPAHKHAYLSLHLPPGPTQSYHAPRRTNLLTTDTNGPSNCLAPPAAPHDTNGPASAYTTRATAPQQNTQYATPGPLRQPSSSSTPPRSNPTLMRWRNGNHRTHGLSALAVRAALSADHRNRLRQSHPLPNPRRPLLLRSDPLAPPCSPPASPNSRGGSPPCSPSSHFPLPPAGPPAANPHTWAPTHFPSRLPPTRAPPATPLPTPSPWSPRPPSSAPTQEASTHTLHRRQKRHAHNTAASPLYTTPLHNRLRRLGETRRYFTRGSPQHSHPQRGHHSELTRQHPQRQLPPAPGPTNLPASLGAQNLTYPLCEHSHQQPLPGTDASHGIYITPAKTPSPGTTNTRFPQREALTPHAQTPLAPPHHNNLCAAPINQLRYTTLALPTSSHPVAPPTFTT

SEQ ID NO: 1009003 - protein, 464 aa, Homo sapiens
  misc_feature (419)..(419): Xaa can be any naturally occurring amino acid
ERPHCIASLWAPRNPPSVACCCCCSCFRACAGCPPGADVGCPTRMDDPLLTEESLTQGLYYHLCTSRRSSDVSGDWMVHFRRDSLLLLAICCARTISVAVDTALIALMMLCDFLSGSSTLVLLSISVLGLDRFNLCPLCSLFILSCWDFLASSGPLDLDRLIPKGLPTRIVNHLVVIRFLAMFSPLVVPAVLESHPWAHRPSEVSRAFTLFPQGAPDGPPWAELSSSTFPKEHGGSKPPVGTAYWRPHVYPAPAFAPAFSSWNRTTFQLPGLYPLCSWPYTLVATSPSATTPAVVSDFAGVSFSHPWCAMLAWTPITANRLSGPLTRAPYAHRALMLSYRRLLRSPPVPAPDTRSVSPTGPARLARLTTPFLYPARLRPTPPCPCRTFWTPGPTVVYPPSLTCLLTRQPVHTPFYLHTXMTHTRSDSLPLLSRPSTATLVTHQLLSLTYSTLPRTTPPCLLSLF

SEQ ID NO: 1009004 - protein, 592 aa, Homo sapiens
MLKQLASLSPNFPRTPLQRFSAQLLASADTLSHNHPTATQTTPTLASDSPPQPPQPRPTLPYCALRAQLPPSTLLCTTLVYPTLTRYTLAHRTLLHRHPTRGTHDTLTTHARPPHRPPTSDTTPRPVPRHAASRPLRLLAPPNFRTRVPQLCATHRRPVASARTPPALSLTLPRHPATRTPVSTAATCTPHPWTRRTAAHARPTPDEPTSTPPVPTALPRKPHHSAYVTRSHTGTAAATLPPQRGSSTAPHRATHLAARCNPPARLAARPCELLALTPPVPFTPFAAGSLPRAPAPRPPLPLLPPFLPDPPVPINGSSPPPDSPDHVAALCTFLGPPASFPIFSRRYSPRLSASLDTRTILCALLPLGPHPVRRPNPLPTRPLVHTHGAPPFLRPSVGSLAPTHSDLITSAASRDNRATLREAASPPSMRSERSPFAAPNISARPQLFLSQTHHSPFSPVLPRSSFASCRRPPARRTCQRRAARTIAPLRVATRTHTQHPHHASSTAHHTHRPRHTAEAAGARHDPQPTPSLAGHTDPLSDAPPTTTQAPAHYSELYPPGLRARTNIPPATSGHPPTPPLTHPAPPQRRRDH

SEQ ID NO: 1009005 - protein, 321 aa, Homo sapiens
ARCEVNKCSPLSRRGLCGQQGRMWGCHLQAASDGRVGPSCLTCVVPAAAMAGSCTMNSENDAWVPVLALHMTGPRCEEHVFQAVSSQDTIASILIRLLLLPAAALLVARATLVLLVYNACCTPQEAKGAFHALTALTHTRATDTCHDWKTPHPTQIARRRDQPRIDRAARPNCARLALLPLARLNQASPKLSTNPRVVMPPPPTPAGPTCPRSATPPLGLANGTEAHAENPPAPRAAPEAHRSTTAEPPLPPLARPLPPGPHIVPPPTTPLTTAPPFLSAPQHYPFPALAHTPFHHHVQRPLSPLSPPGLRDCTVTLSPQI

SEQ ID NO: 1009006 - protein, 374 aa, Homo sapiens
YNLWPQPLPTLPLPPLTGVSVYGALQEDPLVPVGGKVLESQLALSGAWGDTRLLEDKLCRAGSCELRWLGDFRGAVRRNWSKLRTTPWTLTLNARLQNWLSKPLQQHVGTLVSDGHPGLSTATQPQTQTGRTQTGAATGQDKPAGHVIPEHVRQLARRAAKAHGSPSRALAASLALRGTYCTPSLARSALGVLPCTTKGYLGAAHYMANETTYRAETKRCRHHPHRPRSATRTRPRQPQTTLTHRHKTAQVNSHSPYYRHYPNPNLAPETKKTHPEHQMRSTTHYGTDRALSHTKIRRRAKSIQKRTIGSTPYEPREGTQSEIITPDRPNNEIKTRSKYRPNHQQRTDHTTMGPPTKGNKPQKQATTRIGKDEH

SEQ ID NO: 1009007 - protein, 249 aa, Homo sapiens
EEEEDEDYIAFIWKMLYEFLNKYLWNQEWWFILVVSAVVDVNQKNGTSMSPKGFPLRVADVDCIQNVARSVVYPPALETLPIRRGSIPSSENGAGCTYNATLTAIGAGPIPGCWTVWRHDTCTLTSSRLSSLNGRRASLQHPVLPDLCSSLQMTFTGTSNTEDISSSFRSPTATSRRSHTLPLPGLYYQDGRTHMALSLHTENTVSRATPRESRLSATLDLFHSTTSALKPTNSLHSRGKPRLPTIRDK

SEQ ID NO: 1009008 - protein, 40 aa, Homo sapiens
  misc_feature (37)..(37): Xaa can be any naturally occurring amino acid
MKAVLTWQESHQGTLECQFESYKIGSRTYGRDTIPNXFTL

SEQ ID NO: 1009009 - protein, 324 aa, Homo sapiens
ALPPLTGVSVYGALQEDPLVPPLQRCGQLVRMAIRAQHSNAAQTQTGEANRGWTGQESLSDSDPEMWELLQREKDRQCRGLELIASEILWGSRGGGLHIRAAVPTPRPLPTHLALPPAPSAPSMLPALPPGPPPNLRPLHRPFCHPPRSGLMRRSDLPRLGDHLTPAAYTASSPRHTRDIKHRVHSPSTALMPHYPQPPRTWPVLELTTQPGTCTCVRHSTRHTRPQSHRWATNAPYATTLTRHQHPHWSRPLLSSTKGSHRHPLGIDHRTPRPKPTTSRLSGADTACIPTRRLHTPLGTIRHHPLRPTTAPNTAANATAHKHS

SEQ ID NO: 1009010 - protein, 241 aa, Homo sapiens
SSPTSRDKSIIMWKLTREETNYGIPERALRGQVPLRNVDVVIYLRMASLPSQAPGMDTLRSLGSHKGHHIEAIVGHTKDVAECGLLRLDNRHDCLLDLEIKPVRCYGIPWVCAQYTGQDESHSEWVSCVRFSRPKSEVNPTHRLRVAGDTAGQGMEPGLTARLNDQSHWHTGYLNTVTVSPDGSLCASGGKDGQAMLWDLNEGKHLYTLDGGDIIQGLCFSPKPYCCVLQQVPDQDLGFRG

SEQ ID NO: 1009011 - protein, 240 aa, Homo sapiens
MAFTSLSSLGQSIREHNKKDLIPEIVIERFNSIAEFGGEIEVSGFAGLGAMDRSRHVLPKVGVFALPLGCLSCGPFRFRQRQVHDQKRNSIPFRDLSQVIDVEEVGETPWGYQFGDLGRTLGYLDPKPNACAWNPREPGQFGGQIVNPGSHVGPQLDGDIGTITSDRNSGAVPTLVACPHGYETVETKIRGTTSPASSTRGRPSNANIRDRCGIPRRGVHNNLVLAVHIATHTLSTVLDF

SEQ ID NO: 1009012 - protein, 202 aa, Homo sapiens
MWSTPVIHHFAKVEEAHTHIIEDKSGLNPYALSKALFDTSAAFGNILSCKVVCDENGSKGYGFVHFETQEAADRAIENNDMDMLLTLIAKYLLDRFKSLKNDEAELGRYEAKEFTNVYINAISGEDMDLMSALRISSGKFGPALRVHSTLLDDNVGQSHTEPALVKPRNKAWQHAHSKPVDTDDTDNDPNAHNTTAAQPKNS

SEQ ID NO: 1009013 - protein, 131 aa, Homo sapiens
ATLAISNLLKTGSESSIDSPHEADLLLHVRKSRMNSDGGRLSMAIRCPVSSKLSVVKTTCRPYELCLFTHACGKRGVAFEDNARLSCGTCSHQSIIGREAQSSKGETGHVTSVATFSTRTGEVRQMLGHHV

SEQ ID NO: 1009014 - protein, 382 aa, Homo sapiens
RRFQSPEGLDLDAWINEPLYVTASQSDERPSARLPRGVSSGVQAPGLSEADDGRAGSCCLEARKQEQANNPFYINELAIATASGTMDTPGVEHIPLWLQIDLSVPLKVPGPAYCQDHVCEAGREDAPAPGRTLAEGQEEETEAKDKRSRRGERQPTRPHSHRQPTQRPRHTTRHSGQLAPKEEQHNRAQTATALHQWPAARRERRRTEQTGADNRETRQQEDRPAVPRAGRARATAPPDEDERRAKVSDRRKNNKGENKKNTLTQLKDTTNAATQRTTETDRQARTNRSAPPHRHQRTHGKEEHSRKCKEGGGGERGGERRASGKAAGKEEHTRPGPRTPRGREHDRQTNKQQSTHQAPESEWRNAERPSAAAGSGERGRGG

SEQ ID NO: 1009015 - protein, 246 aa, Homo sapiens
TEPQQFEPLEERLSTGDIYLLENGLNPLPLGGSKRPTGCLSRAFSASPPYSQITSGLSVLPVLDNPPVQEGSEASEIAYGHRDPRYMNDLRVVTTTDTTTRLETDCHKHIPGWKDQRRLTMGDAILLWTYSLIILHTEDSRQGHYVTTTKQRWVTPSGHTGHPRGIRLSRTRHSPRTDQKTNIGGTRYTHTPTIDLKAVTTLHRYIIIEESDDTERSTHKRGTKNTNQKKEETKRDTREKDKTRTQ

SEQ ID NO: 1009016 - protein, 116 aa, Homo sapiens
MSPCHAKKEASVGAVECPVSSLCRGHGFHPVDTLWPTEESVASQRRRKRSPFSNNGCKIFRSEVVSPCGFKPKRISLQGAYKHFQGPGQVGKPPIPLQHRPPIKPECGAFVNIREY

SEQ ID NO: 1009017 - protein, 181 aa, Homo sapiens
MEGIKIEHQLELGNLQCQAGPGDRHAREVRRSALLREAAVRPSEELAGLAAALAGPCWSVQASQHLAGACSEAQDQLPVMPSCVCTELEQTVTVEYLVASAQCYRRSSSEQISLCRDTTMLDYELCCSGQKPSGKQEVESLREKLLVAENRLQAVEALCSSQQTHMIESNDISEETIRTTG

SEQ ID NO: 1009018 - protein, 147 aa, Homo sapiens
MLVMQERSELELSLTLPVLYFLGRGQVAAGESAPAGEAARMAEGGYAKVPSCLSRHSHQAIRTEEREHVFRLYIQKKEHTQHRVSAGALTGRPQRPSTGKHISGKTGSAQSPKDPKNPVCETQHDCPDGIATLGCACRQHTEGGSQH

SEQ ID NO: 1009019 - protein, 234 aa, Homo sapiens
LRPRGSPLLPVCTRLYAVRAPAPARNSSGDGGRGRRTVVDCPVCKQSASPKTSWRIISCVIVAEGDTTPRMRTNADYCEDNAPAPATVWSARRPLCETCVEAHQRVKYTKDHTVRSTGPASLGMVNVLSIEVHKHEPLVLFVRAVIHLTCRDCQLNAPQGPHSNSSQRMPVRNPAHSPGTHLVKRLGDQHLNIEKKHPKEVRSLNPHGVDVPNACAQWMSQNGHYLQIHERELQ

SEQ ID NO: 1009020 - protein, 366 aa, Homo sapiens
FQEVLEGLYFLEVEALQEVSEVEEEEVEEPVDLPPRAEDDMDDLVEYSMILLSMMFFQGTSSQYNREDLAPRSGGPPPNEICAFMDHVRSTKLGYLGDRNRALRGFTQLRKTIIVYIEMSPFSEMCETLRRRVFGRPLFNYWYPQELLHGRIWVLCQRIHSVTCLRGDRRFYSRNGRFGLTSYRPLTRHASQPPALGTSLTVYSCCTYHYGSTTQGLTIEFRTSTLIHNSNAKAVELSYDNRSDLRPLLRSPLASRRTPTCQGLLPPQPRCPPVDLQPVNASRENLVREEFNRPTNITCVTVDLPTALTFPHQSGTLSQGKPRHRLWRQRQVYSDMALNLPNRGARLTMHTLASHLGTAGKVSRQV

SEQ ID NO: 1009021 - protein, 285 aa, Homo sapiens
GSTPGSPQYPGPVSPAARGRPRITLTQEDLGMNPVGNSDGNGISTVPAKITPGDVCAARARSYTYLQLQPAEPRTEQGSERPEVGWGAPSCKRTQTGGGPVDPGPCCTSLMSTSHERVSDGLLTGSSSDILTGSTALFQAFHGVPYMNSHFVSSVASVSDAVCKLLTMVSVVTDPRGAGHFLNEVRSWTHEFLNERRRRTSRNERTARGQRRVTNARQLLLTRSHQGNIPLHPAPSGHLTLCPAEDNLHKQTIPPKDLVEPTSTGSYYHRLSADPNKPTGRSSQP

SEQ ID NO: 1009022 - protein, 231 aa, Homo sapiens
MREVYSRRYVAAYSSSRSYLYPGETTFAITLDTVGSIDPLHMRTNEFICPLTTFGVYSGPWRDRALARILDFDGLQEFNFVSRCAHTVANHSIPPNCMQWRARYMSAYSLNTGEQVEHSVSGKFRMHGIFRGLPLRTTRKAPMFAHQCSTEFSCAHSSMRTAANSTTTPDALPYHLGAGGPEVHFQNFTLWVPIQVAPQSGRTDVARGDFFAAYRVARRAIHLHFIRAITH

SEQ ID NO: 1009023 - protein, 148 aa, Homo sapiens
GALRILYDNDQSSCDKLDHVDDEPTNGSTHETMTLARRQLTNSCACRCVLVVRLTGQVLPISSSMVHENPWRRSLGSQRSGSTIIKTRACMLWAIYHLGVCVECRPCLLDDIADSIVLCESQRIQRPVESIVRYYTVDDDAETIYMCQ

SEQ ID NO: 1009024 - protein, 284 aa, Homo sapiens
PAGHQAAPGVIRHYAGHDATDPFVAFHINKGPCEEVYELSPDVETCLKEQGQSLSPPRNNESDYDEFRGVCGPQGERIEELIEVPRHVYFLLYLVCTSCCWMVLAWLILGGLWRRSFMAFLLVCRCCSGAVQAQAWLVAACFGAPVGLQHLQQWDTMLATVINVIGTYCQGGPPVKIGRNRTSALVQAAVPRPNLASRKTQTCNDAYPSSLRFGGRIHTRVRALGRQEVIKTILPNNLHAPEYFLPEFGPRVLGDFSNFPSCVYFHMVISADTEVRLYLEPAMT

SEQ ID NO: 1009025 - protein, 269 aa, Homo sapiens
MCGGGGCSGLGVQRLGSRRADVGRVKCVRASWNRMPLKMADDLDFETWRCMWASCHLPNARCSAFTVRSGFCECSNVAGHVRSSRCLLRRLASTAIAKVHSEFGIQIIVYVGTKVVKISARANLIDMDVPKDRTYGMSFHAEFEIQDLVYRITCSRNSGGGTKRTFVLPEGDLGTGMIEQKVLTVGEDEPDHMCWSVNDIGRQLVAINVYWRSLTWFPRIGAMVSSRVGTFGTLQRVRFYPKPGPWFVLVLGLWTSTNRDMTRENLGIA

SEQ ID NO: 1009026 - protein, 84 aa, Homo sapiens
RRVEYVDQNVVTITAHGFPCAFLCSCPAATSLEQVEELLQQSFPNGINQRHSAGIKTSMRSFHCVFAIDVESVEVYHLVSRKST

SEQ ID NO: 1009027 - protein, 210 aa, Homo sapiens
MAEGRRVEKKHDEDTHTEGGPEGPHKRGPPVRHPRKAERGPREGGAVETQKVHPSENLAKPGGTTSDDKKTRAYHPEKDIKKKHREKTARSITHLQPEGKGKHKRERTDKQPGAKQGEHKKTRTTHENTEEKYRVDTTHSEEKKICAAENHTNIKREREKDKSKSTRETNHESQTQGERNKKKNIGGEQPAKTTEEAQEPEKGKNAKRGE

SEQ ID NO: 1009028 - protein, 191 aa, Homo sapiens
  misc_feature (68)..(68): Xaa can be any naturally occurring amino acid
MCATRSGGDNPRERKGVTTSCAEGDPQNNPTREEQLRRSGTRGVATLEQVVANTNSGKSLAKDHKCDXRSNHTVVSKPQPVAGQVAEYDSSGGGAHTEEATPQQKSSRANMRRTNPRINKNRGARPAIKKTVASSKVMQQQGEENPTFRGGLHTTTALQCAKPPPRRAPQSRANQGGPKEAHNNTAGHGGT

SEQ ID NO: 1009029 - protein, 396 aa, Homo sapiens
WLKLVEGLRGPGTGPSGLGRGAAGKSDQRQEWSRRRMLVQDWHWGPSRVRGTRCLRSGCRVGGPESMWRTRPHSNWIRSRQTQRSPCDGLWQGMNAGLDTEFLAGARGAPTTGGSQTVALGVAHVSVNIVDLIHERACSMRALEGGLECDLASCSTGRNEASGPGVEEVTGTVRCTRRQVKLTRSDGLDTGELSGVRQQESCQLGVQEQQGYLLTGEYGRPELTMLFGGARGWKAQVTAVWCMPFLVLPLVDLCAPKDGFYGNVVKSTLRFAHLGAIKSPIGRGPKVDFPKKALPLEGTGGWDGGGPTNLFPQRERLLSWDEVFIWGARSPIVSTEETGKVRSPDWRVPDRCDSNGSKLESEADPDMGAQDTGKNSHFIQTQNWWILTNTEMYTHE

SEQ ID NO: 1009030 - protein, 266 aa, Homo sapiens
GKRRGWQLLGQSPGALRQPPGVCARVAQLSRLVAPTRPRSARGDPGGGQREGPGPVQENGAGPPVRRHADAAAQEAEAADNVQRQQTVARHESSSPVASVQRPLTHWDLHLDTAPEEHEVQMRQHTHHRHWQHSINNGKTLGEQPNTGIIQAPEPPPRIRTKEEPWCLARHTACTSLSHPAGLGTTPNTCRHGHQPGQPRTQDPYWTTFPSPTNLQATTLPHIRQHTAHSHQVDVQLSLTNANSLLPPKTRTRTHLPTTTEAQQQH

SEQ ID NO: 1009031 - protein, 144 aa, Homo sapiens
MGAPIGFSTRMDHPGVPVNPFMRIRPNTTLALVSGVSIKDCCTRTRVHTRKEYQSHNTADTPQRRKFQMRGTHCKIHQAMCPLTRYIQLDRNGVSTISRKPIHVNPTGGHHWIKHPIWRAKGTLFGGTHTTATEWRIHRTNSNY

SEQ ID NO: 1009032 - protein, 204 aa, Homo sapiens
GASDPKRLSFHQSGEVASVWRESQQWTAHEVENLVGMAPGREKWLWWTGAGCPERRLRLGVRGPLPSSNLKYSRGVLRVDDAAEGRSDESSGTRIEGVASGGTRSALTLSHHRTKVAWSAGALTPVGDFATEDKQRTQNAHRERTSAEGQYSQKSTEGERKRPRETSPDQQRTGEEEAPNGKRSTPNRTTKGDHANDTTEEADE

SEQ ID NO: 1009033 - protein, 231 aa, Homo sapiens
VPACSSLGVSSFLLVTGHALLRSQLAHCPFPSDHHHQQLLAANPIYPPCDHHTDQTYNKHNTRQMKSGIHNVEHRGSDEARKNHTMDHQDIAENNTHTRATHTANKAPIGSDERKRQNTQQKITRQDCKRQRALHTHTKKRDRRNKTEQREEKQRKSRSTAKQEKKTRQGHTRHEKKPRKDKKEQRRKTQNTEAQRQQERETTGTNNIHTKGKRDNKKTDEDTRRPGKAQT

SEQ ID NO: 1009034 - protein, 324 aa, Homo sapiens
MWAAGSGWPFVAQHSNAAQTQTGGSNTVVLDSASEMPVWTRDPEMWELLQSGEGQACVVAWSSLPQRYYGCEPELWWMTIRAADAMTARDLEQPFDRGIRETRGAVNCSSPYIRGSQRPNLSQSYDESRILEIIQADRDRWELGTHDRIDWCQSCDAKRELTTCTRTVATAGTITPTVPNPFRFAEQSYMAALSKGIRKQRTECMAYVRKVDTVNGYAKAHKKHIGAVADYLGSVQRDVATHVVDRRFEPVGAIAVTVFACRQASPQQGGASIVTELHADGRQPRRSGTNELRPSGRTSMYWTVTQQHRYELESTEWDVGLNFE

SEQ ID NO: 1009035 - protein, 385 aa, Homo sapiens
GESSDVRGEWWRQASTRGASVDLGSGAPGAGRCMLWPRGGGSWLEESCSTVLALSPVWPECTSVMLAMLHPLACDAPYGDAPLEAMPLCGPCPDHYSVRILGLDAYVTWIHVTLFAGKGRDNHRREVASHCYNVQAAKLPIDPNGQLGTFGNYTPSGTLRTGELWTPPSVHAEKKRLLDNCPRAVHEGNSPVWEPWQAANLSFATQVSSLCQSHFEGRPWRQEQLPMEQGGPCVCTIWGLAPFGYLGIPPRRTTQHEVKRFGQRTSERRQYRSFRAQSRNGVATQYTAQERLQHVSAMRGDLPAVKRFSPTVISLRVSRGGASTRGTCNAWVCMGLANHWDDYHMYCLSAPGQHLGSECSAVGTGPWCDRTIGILLCDSVGHKPF

SEQ ID NO: 1009036 - protein, 205 aa, Homo sapiens
ELKRDGPVMMHVEEMPCAGSSDCILEFPSRNFTLPCSAQVWCEGMNEKRKLYNAYRFFFTYLLPTVPRLHCVLCCDSIVTRQQEMLAWVGVTIPWPSLENGACTCTRSGAVSSRTPTESRRLPMYQKYPIAVPSPSEDYRLLAILPPREHVSFQCSTLAEELWMSVRAMPSVAAIQMVTKQTTLDTVEQAEVIFCTDLDWTPSGR

SEQ ID NO: 1009037 - protein, 154 aa, Homo sapiens
IYSRGSRAAEHVPTISLAAWVEAESQDRGLAIRQDMDATVVTAPRTIEPDRILRRALCVLIFAHKGLSFYDRTLMVIELHRTCRFFRTSLVLRRPDCIVWAQLSERATETYALLATYTPAGYALSELQRTPGGSHQIEVNQHAISSRAVGPTRP

SEQ ID NO: 1009038 - protein, 434 aa, Homo sapiens
GCEEPAARPQDRAAEPAAAPRVTCDPRPLTPFGSARAPQCPARAGATGRMSVRAAEGGAASAAAGQLGPSKYSDLEYRCCESDAGLRRITDELSLAVILLDSDKHHLLLDPGLSIWRRFLPITQAFFRGTSQRLLPCIQLHGSPDNTLTSKTNIPNTTPTRPTAPIALHTHRTKPYTERGTRLHLTPPTHTLTSTARASPLRGMPYTNTHQPWNKPHSTSNTATGKATNDHHPQQRATRAYAQRRQTEDTATLQHLKSNDPRRDPSGDRNREATKQHKLTRTYTRHAPPRTDKHQRRRNHSHTAEKHRRTTNPKQTTGQTEAHTTQHKINNRSSTAGKRPVEQQVNTKPLTNNTKTKPTAQQQIRGGKKRQEYTTHKPPEHPHNHNTKQHNNQYPPAQLTTEADTNDHTETTNTANKKLPKGESPSTQNHHDKR

SEQ ID NO: 1009039 - protein, 223 aa, Homo sapiens
LTTCVAAYRLRSPGHGSVASTPLCPRPVPPTLTTPALSASHTILYTIQHEAAADLSLLQPWSLSTYTPMVACLRPTEHPTEPYVTSMRECTALLSCADIMLHQHAVPTRLDMYTAMDRCVRGMGAWHRVSLHPRVVGPGTGPRKHSWRNYPPGPLSPTWNSLIGASSGAKTPREGTGAYTSRRADRDPLGNGGQAYHTALADRPATRQSDITKLLPNPTWKAL

SEQ ID NO: 1009040 - protein, 461 aa, Homo sapiens
ASRRGFLLTNSAWTEPARSFPTCRPGVHSQPSVTSSSHPRTAPRYPAVESRRPGQRNPVGDVRASAYVGLPMTDTGLHHRQVRQNLPPGLRGPPSRRQINLEALTPPTLLACPMSVRTCVPAQACGLCNGTVGHESNLAIYRMLDEGSRGTMLSTSAWEGWQTVELMCVPTSFASRDNQGNRERVTRLGKNAWLELQMGRVDMNIVGNKHSVTSPDAISMVTYWHKTIEPGMYRPKMETRSQRSGETLTLGSDSAIESLVLLPSTALEQTHNHDTLTFGIIETAGRHPKRVRTHPHNRANDGHGQILGLRWPARPENTYHRFDPDLAAATPLVRVSTTRRVHLEHSLHNTTQAQRSENNYPTRYNTPPLVRPTDTVHAPRHGRRTTQCTAATADSGTDVMWPQRNTHTVSSSNTCARLTQTRADTTNTQQLRRASNERDTRTRMTDTRPAQHDTHTAEHME

SEQ ID NO: 1009041 - protein, 319 aa, Homo sapiens
AVFLRRSRRACSAAMAPSLEWHGLEAPLPQWTGSGCVATWFNQPARNDPADVSALCNANGCACICPAAPASGPILLPIVRCPTGSGTTLKCALPGLRLQACEDAHVVCLAFTQKVARTTRHFMWIRGRREQSPRTSLQCQLCSELKEYRSKLILFPRKPSAPKKGDSSAEELKLATQLTGPVMPVRNVYKKEKARVITEEAEELSEPSLSLRMARAKRPALRPYGHTQSHRNAAETRMLTLKTIKALLGTWNQSGDNAGSTRGCVTRGTTGSGDGGFTACDFLLARGIGGLLERQVKGLDNALLSVMKDMMAGWISDLM

SEQ ID NO: 1009042 - protein, 285 aa, Homo sapiens
MAGTRHDTGPMNLDTGCIGMTVKKCDGRPVDEGPGDEEESDWVHCGQTSFTVRIFKVCVPCGMDCPQVRDRNADTGERQRLPRRGHGLRSLAAEAERNTVGEGPGESTLDFLTYRREDGSPTRIAMTWKFFKDGVKDNKVNNHRTLYATLTGKRFLHLANNGGQQDRRHESHWVRTTDTTKEINLVSHLMIQPMGPGKAPQERGDYMNRNVFRSPPKRDMAGTVQLMYDYTVGGTYTFGIGAKQPDPKSTVICLEPTRYGAPLFTKNTLAVNACEGRPGKVLHTS

SEQ ID NO: 1009043 - protein, 72 aa, Homo sapiens
AAPGKMAAAVVLAAGLRAVRRAVADTVVRGGTVRGAAGVTDGNEVAKALARQTSLVVSSPPKLSFSPVILGQ

SEQ ID NO: 1009044 - protein, 277 aa, Homo sapiens
GAKTIVFGDMILSADSASKATSALPHQHQPRCPVNSRLRGRTPEGTAGGSDVDTLTVTRTDRDETHTRRAALTGRGVATDDGRPADPAYAGHGHVSRETPGRRDLERDRHSRGLGASASTHRPDRHAGRPPRHYPPRHDGRADSRYGDPAHAHHDSRTRHVGHTRYAAHPRRRHPRPQQNDDGPDSADLDTNNHATNRQAHAPLHTHKRTLTHPRPTNGPRNSTNRYAWKAHRRTNNRQQRTRPTQTGAQATESSTATRRQRRAPRAGAPSTRKPDH

SEQ ID NO: 1009045 - protein, 392 aa, Homo sapiens
CSNSTVLSVAMGLVLLQKCHVGDSCASAQALTLLKVSQQKSHVDDLDPAESELLLSEMVPECLEELDCKPLPNTGLAVFSQAQRPWHQLAPKMAMTTWTPVPNKQFDHEMLQAMLLAVLPVKHADGELQPCVSGCCRHHWDLSCPLPVNPRLHLLQRHVPEYLQELSISPQCSNWPELEAQRQALAQTGDWHKGPQAGVCNWGDKERTLGHTKRRQNVPIGGASARTKPYKCAGHLVSPVDKDTSHIVALPFDPRVAVRKYPGVAKARPENKVGRVWAQRGPIASPAIGDTLEEKRRIGTSDRRRDSSQYSRPAGGGYCTALVEHAQGNQGWGKTPSGSESQELGGVAKVGRNAGEEERVRQSGEKASEEQEGTAEAMDEEEAARAEEDGEI

SEQ ID NO: 1009046 - protein, 295 aa, Homo sapiens
CASHPNGYKCSEALCCCSCRRHMTTSIRQYHLLQLHQGAPPACSVRLVPHLTAGCLACLVCRLLQCWDLLACLGSTLGGSSYSRCYSLWLWMVCYGSSYGGVRPGMQQTDTVRRHKQREKPQKHKPIAQPQKADTQTEDNPMRRTDQTERRRDAGQTRSAREHRKQKERENRTRRPNPEQDNKGTKRGTHRTQETRKEDNNNRERKATQQRAKQKKNKGGKKDETEENQKGGAGRAEENHRQRREGEEQRGRAQEGNRRQRRRRSGTASTGGHRPQRQKRETRKRERTGGRHGQK

SEQ ID NO: 1009047 - protein, 179 aa, Homo sapiens
  misc_feature (143)..(143): Xaa can be any naturally occurring amino acid
PSTNYIVHMHTSRCRAPMGLSGEQFSPGPSVPRLPSAHRHAYISSAASHGQGLNISQRICSATTVNPGVRVPLLPIGVLLGTLGVSGLFGSSRAAPLVMLLHLYPIWLSPIGGDLGARDCRTEHYERQAGPDRPTDTTISLGXGTFNRTYVSLGRIKSKGGWNRNRVVWAVDLDARGKG

SEQ ID NO: 1009048 - protein, 257 aa, Homo sapiens
MKGQTPEHPHRANDHAHTDPRGNNKPDATKHVPWQRHATHDGAHRPPPQTDLGTEPEPLHPTAALPPAPPPSPPPRQHRPPHPHCHLQDTQQRPNHRRDAQTHPHHRDTLARRPPCTPRRNPHHTHPTHPPPPHNPPPHHTPRPHTDTPRAPQHTSHTQNTPPPHHTTHAQNKRKPRTTPQPPSNTRQPPDRHHGPPHPTQHRTAPPTTHRDPAPTTEPTQPNHPEHNTPNEPPEHNPTRNRTNPKPNTNPPKPPHP

SEQ ID NO: 1009049 - protein, 95 aa, Homo sapiens
PHAGSGSCAGRTLLAFLRCDGLAPGVSAPAARVSLGSLSTVQAVAGSRLPSLLAWAPVRRILATVTVPCGISRHLAPPSRGTSHGSERGVTGERD

SEQ ID NO: 1009050 - protein, 346 aa, Homo sapiens
  misc_feature (125)..(125): Xaa can be any naturally occurring amino acid
MRECISIAAVGQAGVHDWDNWPCVLELLTCSGTRVDPSPDGQMPRVDDRPSGEEMTTFNDHCTVETGRWQSTVPLGTCVSVRAYGKPNRSIDWKVRHSGHPYRAGVVPLPQAASLQQCEGNGMHXSIVTKCPDGGNITANWCIRHGINWRRYDGAGRENVQSKARVMKRKGAQTEVASAGGTFRKGVHTRTRAYTKLEDENRRSSPRVFQTHSLLDNSNWCDDQVLRPSFRVSKFGRKGKVTIEALGTLGVAKIFKAPSKLPREWYPSHGLGDRFEEGLRFTQKCSSIKANETAKPPKKARILLGEGPTYLGNLRSAPFRHCGLTNLQLGHGAPNASSGIDFLGSA

SEQ ID NO: 1009051 - protein, 165 aa, Homo sapiens
  misc_feature (30)..(30): Xaa can be any naturally occurring amino acid
  misc_feature (140)..(140): Xaa can be any naturally occurring amino acid
MWMNDSTSFQAESRDSANCTELAGETYVHXSLLVDWDRTVVLPKPYLSSTSPSEHATGSHDMHGIVEYPTSGHAKVARTQKTRICMPKHDAKLERDPRRRGEKRQQDEVSGGIVREGKRRMIGMVRQRRLYCTINATLVXEEKQKDIDVNRGCVEFGKMHDGSDK

SEQ ID NO: 1009052 - protein, 249 aa, Homo sapiens
ATVPGVVVQACNPSYSEELRQENRLNLGGRSCSEPMIAPTAFQPWATKRDSVSNRKNRDRHKQSPGESVMLTRIDANSDAQLPHPGTGAGQCLWRPRQGFARHWWVSWSAPAGRSGRWVLEMTPGTGTIAGSGSSCMAWRSRARREDGRSAMGYGAGPWSHLYTPVHSHQPSREIVDPWRSEQDQRRLTAGPSRQGHPRERHHAERDWRITRKDRVGGDSKTRLRACTTGMGDHKRLEQLGARSRTKRR

SEQ ID NO: 1009053 - protein, 226 aa, Homo sapiens
QAQRTGVTHGPCAVMLRAEKKSSSGPEPLCLALSWSPNPQSLESGPQIQACLGAEPQSVELPALWTLVLWNGKVFPYHMADPGLSGVDLPILPLPASNAARVHGWGQELLSGLERTPWSMHRVHARTVPWCEVTAGSRQGLRTPSANLRCPWEAPLVLVGAGFCGAPTGNPSTGTARWQPSVYPCIVDEARGIHVLVRCVLVLLASTCSMYFHRSLGQLGALPRCS

SEQ ID NO: 1009054 - protein, 180 aa, Homo sapiens
MDHLVSCDNWMNINLREVICTCPRDEWTSSGLDARCATSADSTDQVPASIPDEIIDHGQGGGGGQRHVAVESLLSSHDCHEKCRGMGAAGQKLCSVARGQQVGSPGIMLAGQGQKRSLGRVQVRVKTVKTPMPRLGMRASPIHARGGAFRVLLVLARGFWSSTGRRDRCSERWHATIRCP

SEQ ID NO: 1009055 - protein, 131 aa, Homo sapiens
MEWTPKDIRKRWEPIVKEVFYPKTFRSVPLGKNLEKALGIASGGKGRGGDLGWDPYFGGARADRKRPGKEQRGLGRQAKGVVDRSNTFGLRNSPEPTKVSVNVSSFTTKFVGGVLAPGEIGLGSALGVQCR

SEQ ID NO: 1009056 - protein, 201 aa, Homo sapiens
AEPCGSGRPRECTWPWTIGQQCVPVECIRSGDILHPCANWSSLGNIYPLWPWTQRGQVLWLVGTSRCVRCSVWRCASQARNGRIREVMHLGPRACPEVCAPLTLRHSVVSVSSWFTILATSITMTVRSSRTPCGHTDVATVRKCVGCAGPQMDDIGPVVVLITWSIVVPSAPGERWLGFLWRRFDPRSRGCQGTASMVWPG

SEQ ID NO: 1009057 - protein, 94 aa, Homo sapiens
MGDTKGAPIPGYEVDNTVARFHSWFDKGFLDPIAQALAAPDLVRKDLQAVRPDRQQRPFTRLEHPARLAEGMRACAGAPKGPPHLESRGFPGYG

SEQ ID NO: 1009058 - protein, 285 aa, Homo sapiens
MEAEACGLCEQSGGGGRLLRERAGRELHDCPGPGFQSGGGARRRRQGALEAGVGGIGAGQTREAEASDPDALAVNTTEYRWIGWSGAWRAVLLTGADTDATNGPGAASRASVVSDPEQKKARRACLTQLSWQKAEVQRSTSGQLALNVMQGPMAEGREALLLRALVTETWVTWIAGSTGGDRERAGSSERSEDLRRGDRWESQWMMSQRIDGLDNERLDLRLESAWHDGGYAERGKTHDSEEANMGDEKLVRDWTVEQEGRGVPEIGFWKGDWCKGLSKKLRIEC

SEQ ID NO: 1009059 - protein, 299 aa, Homo sapiens
QNVLLITLITNTERRHPGFEATFFQLPRMSSCGGRLRKAQGTFKRAAVLPRPTTQPNIDCDMGTVVGAQQASDVKVRFIDSSTCWSPGCACGHLHPRTTWRSMGRNTAERGPSSASPCKSNKITVARVQLRSVPTTDDRHSSDLTYLSFDSSDPCPGAVHVPHRGGVSGKELRCDGWAELTPTKGMSSNWQSAMPVDQVHVHRKQVTAKAPLLGLRQCERLRSTTSRGDRECELVPARGTLQRWSTIVAKPGVLRHKGPGRWHKVTGQDSSGDRGPERRTTKTQREHPYSPWDTKLELN

SEQ ID NO: 1009060 - protein, 184 aa, Homo sapiens
AAASLLEPPRVPSVPFPPARLLPSARAASAGRFHRGTRNSYRMIQNIQNHPLFRPLLLMQVRVMTCVPAWPLRIISIYRTSPETTAGRPLLLSTGLLHLHYDKTRQLAERVQRQHSFALLTGTCTSRRIPGNSWTQRNFPAYKRVTPNAKNHIVQITSLPEIWDTCPYVTRTSKPCKKPTTARL

SEQ ID NO: 1009061 - protein, 185 aa, Homo sapiens
QLGIGRLTCGSCARSAEPQCSRPGLVRRLALTAPTSQEQPPAPLCRQKDQGGEARGGRWTGDLTIDPYYLGSLITRRTLIPCPTVDHSQLQVLSDPFGRFQKSRGTHDLNCTKVQTHLTVLANLGATPQGIVYHGGCAFGPHWLVAPPISYPPFGIERDPRLRLRNTKGFHKVFDHRHRHFGRHH

SEQ ID NO: 1009062 - protein, 278 aa, Homo sapiens
LRCLQGDQKAKMSERKVLNKYLPAGFVTHSKIPKFKLPKDRQYVGAAVMWPPFNIEGEDVAEKYFYRGTEISSARKETGAKGGHTVGRAHSFRFYIQVCTRVPVAEIHLSRQTLENHRLHHVEHVEPTRNSQAEKLREEEDKEGRKRSGRTQEVTEPMKVLGEPGPGTPSWNMEVLEKPHRELKDLNQGKAHVDLRGLMPEDGNRRVGGRTEGGKQARKEGRRRNTRGTPDRERKARKTEQDGGDRRPRTQKDWRVDTLGPGARRLRAQPQGELGMRG

SEQ ID NO: 1009063 - protein, 105 aa, Homo sapiens
QSARSRSSRSLLPSGAHAESGVMKPVWIQIKTDSSAPSTREILHSSIKDSRLRVRTDRDIVYDHGMETGHSDLMNEAKLERRTSCNTMFENSYSKAGYQPTGEET

SEQ ID NO: 1009064 - protein, 78 aa, Homo sapiens
IPLMARCNTDKSRYHRCSTHHLSDNRPSGKRDNASYIHLRIGVLSLRMDLVMHPCDSDRPRCLARVPPPIEEGIVVAE

SEQ ID NO: 1009065 - protein, 352 aa, Homo sapiens
LQPCQPSVGDTAVFLRSRFQVDVQRLLPQSCPHLQPQAWVGGRAISLPDVWILAGGRVPMRMVEKRTLPENPDPWHGCQAGLPMVMVVTSHMDAGQLSVMLRHGVTLVLVLGPETSLRFWATADLGLRQSRLEERRRASSRFHVIEQHHMSDPIGKPAGCCVWHRWALPECLFPPAAAHCLRSISPELVFDPKHKTLALIKDGRVIGGICFRMFPTQGFTEIVFCAVTSNEQVKGYGTHLMNQLKEYHIEQQILYFLDYADEYRHRYFKQQGFSKAHPGAQENRYLGYINGLRGKRRLMEFEVESPDPVNGVAHIIKNAQGFFKKLIAAKGQTEVSRAQSSGGEQTRKAQVK

SEQ ID NO: 1009066 - protein, 307 aa, Homo sapiens
GNPALRTPPRPAAHSQPYRTPTIHRTLRTSPKAPAAAYQRRAATAAAAAYYLKYAAIDDRVHLQQVAPELTTSDSIRPALQPPRYHLGATNAYLTYSPWYHSTITNYLHPRIHCSAFAHILSGPNLTYILSRSLLHCIPHAAPTGLADTSALDSLCFAKPTSQGSALDPPIPLSMPITSTLIPSTHSCADPRPLARRRLLSLSSFPPPATRCLLPYSPISAPPPPPSLATFHLPPLPLASPPLSRPHTPFSSYFSSISLFAPPPQASALLTPSPPLHTHSPPLSNSHLLSSTPPISLLLSPPLSSPL

SEQ ID NO: 1009067 - protein, 241 aa, Homo sapiens
AFIFRSGIMLCLEKTLSPRELWHLVHRFYGSELGSHTVMDEDICLPLAAELVLGDPRRKWDDVIALSDHHLLVGQMAADMDPMLSWVRAVSHVTPKLSRASLRLQTMGADGGIDGGEQRMSMPDHDASFQAEIMVNHRCAESPDAQETPSHALTVAPSETLVAPFVTPWIDPRWTRRFISDEELQDVNLRFFDSRTWCDETGHRPFGALDRLAFPRNAFFPWARHYSVQVRTHSRWYLIAN

SEQ ID NO: 1009068 - protein, 85 aa, Homo sapiens
AAPRRAWVPPLAGSGAGCTRVAVHAVGVRCFPAPAGAACAPPPAERPVPQGPCLCLVLQLCCVLHDTLHESPSVAEVLEPDASGV

SEQ ID NO: 1009069 - protein, 219 aa, Homo sapiens
GEEEVDVAGGKRGGCVLEPFPLPHPRELERQRNDVVSVSTHLFLFPSLRTPCRVSVSLQARGCGRRQRVMAMFEQMRANVGKLLKVVSDRYKSVRTWRTPGALCRRRRPWENAYDLEANLAVLKLYQFNPGFFQTTVTGQILLEGPSPTCRTRDFYPVQVHDRPGTIKKNGNPTDFVPRGPAGDLSFPGASGKALDENMDLLEGITGFEDSVRKYICHV

SEQ ID NO: 1009070 - protein, 73 aa, Homo sapiens
  misc_feature (61)..(61): Xaa can be any naturally occurring amino acid
QVILNIYFRANGLRSNSGPRRGSGIGSKWRRHLQGQKRYQENEITLETHKDLKRQYTPVPXISKELEEGSRVA

SEQ ID NO: 1009071 - protein, 640 aa, Homo sapiens
PEGQVPLAKQPSSPSGTGSMVEQLSPQGGEQRHWPGPDEQPLCEAALTAANFSAAKLRESSTPFSTITRNPAHSSKVALAKLLTPVHQPISPPSQCFFPHANCATSTHAARPRSMGHCPTPLRLSRTPHTCTPAPRAFPRAKQGHAAQLAPCRLAHPGYSLLFIAYTLFCRHNLHAFAPPWQALPLFFTPPWRPPYCPSRRPNFGGHSASPFSATFLILVAENRSPLVTFLIPRKHLASTHRTNLYGRDYEQTYPARSPYTPNRMDGTPPLNLCAQPLSRPNLHTYSEGHLRRALRLGNPTPITDVFGPLYSRKWSDHPTPLWRCQSHTPTRLVRTYWDDFPPLPANNPVVPLLSPPKIAGLKLPLNIRCIKQAPLLNNLTAARPFGARRTSTHPTYVIPPHSSSETPSRTSYLPEASNYFAGSSPPLVVSSSRTAILTHLFCAGRSPHLIRVARRPPHMSVRAVCRLPAVTPSPPSVLWALYGRLLSRSARRLHIASPPVADRYALRYVIAPLLPWVFYPRRATFSVRLYTAGQSTRYYTAPPPTIVTTQCVKQCWRTTSGHNKLRHCRAHSLHTFSPPRNDTRYPPQQSTTMRSHYIPRYTTASSLHAATLPRINYSIDLHGIYMIPTTIVHRINRPY

SEQ ID NO: 1009072 - protein, 391 aa, Homo sapiens
MGYDIEQAVLVLRAHWDNQGLSDNSSTADQTQFDDDSRISQKRSWGYAEALSLHHKTPGIVSHRTKGLIARLPRRPSFMLNLLMCEETEDAVSLQGNLNDFYGYALRRRCLTSPRTWALQHGAPGRRARRPGQSGQRIGKRTGPRCGWVASVMGWSLRIPDKRPFLGSAQGSEATRLARSLAFAYGLRIPLGRARTSGRVTTHSAFGTFSLGGCTLGGPAVRHEIPGVAPTALEATLVIPCDFAWHVGRAIAGMISGPRRGGDRGTRVGHLAISKCVQSHGMTPFDESIRSEGPWDLDTNCLRSKDKPLCLVETAFAGAQAGLGRGPFPVAGAVIPVAPRRTAGFPLCTFGGASLPGGVGCDVPLRVVRPFTESAASLASATVAGLPAALW

SEQ ID NO: 1009073 - protein, 381 aa, Homo sapiens
  misc_feature (111)..(111): Xaa can be any naturally occurring amino acid
RSDELGPVAMGRVIRGQTDGRLEIVMFAAQHSEDTVKALLGAVAAAGRHFSLTLGTGLQILSGFGSQRRSISLHPGVGCCPPFCLEVDLPGDPVTRVVEEQVRTRGLVSVXTDRHASQFRHRGTSSGLVICGGQTQRAPSIQQQVVGTTWLTLRPACGQAPSDPFGGGVNQSPGGALTLVAADATGPWARMAGRADTPLVLSGRPILRGKHLSLWRLPPGMYFRFPPSNIPPCEGTLEGNNCKPPGYGLARTSFGRPTSSGDVLSVSENGGPHFHSPFSWDAPSPAKALWSPATGGWPRGPRSAIGAQRALWGPPGNTSLPPHEEPTPTITVLTTPSVTLGGPRSDPTIYPPPETNLPSNTRAPRPLGRQQRCTSAPRHKD

SEQ ID NO: 1009074 - protein, 102 aa, Homo sapiens
MMGHRPVLVLSQNTKRESGRKVQSGNINADKTIADIILNMYGTQVHDEDALDPMGGIVMTIDRQLPFFDEIQCPASKRPRSMIWNYALRPRDEEVRRWDHIK

SEQ ID NO: 1009075 - protein, 432 aa, Homo sapiens
CSWKMAASVVWSGQLPPGPQVLLRARRIAGPVLRYASLAEYGNASPQAAPASVPGRRMVRPDCDNRAAMWSSDADPLRPHCTSEDVLDLTVRDARFPKNRAQRQVIYTEREPDLLDAAGSTGALAIRGPRARTRGPSGTVARMRRKRRVGRTAIACERPTPSLAPYTGKASARGAPPERASSTVTSPQGGRAWTPMGGNCLGAGHTRLVCARTFPWESGRHRLDGREAKTVGSNTFVRRTRYAYPTDKQTLSQRQQGRDNTAGSQHSARHPCPASDAGGKRKLTAPAAQPRHATWATLTIARPQQGAVASAPQPHTTPRPPPQLPRRAHDTMTAARIQPHTGGRHNNAAPPRHTDTHPTTEAPCPDTTDSGATTQRPHCRTHMRDHVDKTTLGPPPPGDRHTTSTQTRRHPPTTTRTPTTDPNNPPPPHTNH

SEQ ID NO: 1009076 - protein, 42 aa, Homo sapiens
MPALRHQGAVRATSAALGAERISAHARQNDPGQPGPADNQTG

SEQ ID NO: 1009077 - protein, 117 aa, Homo sapiens
MHLTVGRIGGSGNEGATRVGFGGCPLPLELTFWGNSMGPAVPSCPRKVDPPGKGAAPKSLDNPLRVVNCPKQRYSLCCRRVKGSKMHVELATFGNVGTICRDHVAVVYHTIVGYTKR

SEQ ID NO: 1009078 - protein, 188 aa, Homo sapiens
MQALFEQISELVPCGLQALALLVDESGTTCPEAWVSREQQLDGKTLAPSPHLPGWHGCPDMVLREVSGIAPPWAPPQTACTEDCPHTPSEEGPKWCPRVQSTPRYSQKQGAGAQFPRPGKRGRACAWQGQSLGGEKGLPHQSQLLCLIQDALAWLGGLIAWSRVQWEPKPGMPGPGPSMSWDSCLYVA

SEQ ID NO: 1009079 - protein, 135 aa, Homo sapiens
VSLVRASKMTNEKKEQLVVPYKGPSSHVHAYSSAHNLCPMLLTNGQGRIKKFDQFEYDECEASRASQGQFHEMRSGLQMPMLLPEAVCECYFTVLSCRNSQVNSQSMAHLHRPLQSPAIGNLIRSARDPLDFDAP

SEQ ID NO: 1009080 - protein, 162 aa, Homo sapiens
MVQKDVPEKNTQRGPQGGGARHTTGAQVSSRGSHWGGQRGLRFRCGGADHWLPAGTAPNEYRYGWGERIPREWHSNHKGNTARKIPIGGEPFSHSPRSKISPFVSHTESPHRHFQVEATSGSTPLGHYGNMGKNAKKDVNTYTLGGAKCGSNYHFGVGVQEI

SEQ ID NO: 1009081 - protein, 129 aa, Homo sapiens
  misc_feature (85)..(85): Xaa can be any naturally occurring amino acid
  misc_feature (106)..(106): Xaa can be any naturally occurring amino acid
MRAPECGPETEECDLPWHSHSEERQILTLECPRRFKVHRRVLKLVRGGPSHVEAPATRAGSEALLGRTGWTQAGSARGQGVAVKXLSSTRPINRKDGRNERKKMPXMDRHYGMCRRTRDGVLASWVNML

SEQ ID NO: 1009082 - protein, 157 aa, Homo sapiens
MEPEVFALDTVALLASRGYRLRGTRAMASEADSAPRLRCPDCGLQRPRKRPLCCGGSVCGGWGACGRGAGLDSHRPLGDILLTSVWDMSALLTHHALVVDSFLYLEGLLLVSICSMVTTCNLWSKVAAGAHGNFMQVNFMNQLLSTEFGDRPSRPCT

SEQ ID NO: 1009083 - protein, 65 aa, Homo sapiens
MEHYDRANRSIRSNTNNGTLKAPFKPGHAHGLHAPHEGPTSNTKGPQFANTPHTQEEHLAGQHKE

SEQ ID NO: 1009084 - protein, 452 aa, Homo sapiens
MHVYAGFTSSCGQRRDSSRRASGSEQHVRHEQVLTAPDVCMHPRGTDPAFTRTDSNAPLTCAADVDTGQQTLGVPIANANTPYVAGPLSPLCAPFDSNMISCDIQEPTNLCVYDTAPMTRRTPNITFNACPRHSIPCENPHWLPNATLDGPNAASMANSSHKRPNLSARHPLGNMGKRIDPADALLSITAPPSSRAPATAGPPTRNATTATPPEPSSRNPRTLQAPPTAHPGPTHPPLRPPAPDPKPPGTPPSTRYLSSLESLQSLAPHSPVTTYHLSISTLYALRSLQPPPPHPNHSVPTTNPPNPPNPHTPPTSTTPPTAYPILPRLPQTTNLHHTSTLPTPPITSTPDNTSPFNSRLPTRSPLPPLSPPTFSPIPPPHPTTTPPPVQPPPTQTAGQTTSKPPQQWPPAQPTFSSPPTKLPNATHERDPTPCTHQYGRSYTRLAPREQIR

SEQ ID NO: 1009085 - protein, 103 aa, Homo sapiens
MVYVDEPVISLDMFINGSKLISAPNSWYTRMLRTVICLIASVRQFALETRCIAGPCSEHNGQRDVELRGDLGPNLEESTKLLALSKCCRPNNCNPFDIEVAHR

SEQ ID NO: 1009086 - protein, 391 aa, Homo sapiens
ASCRDHVCRGILWLEAEEAPHGRIAVYRSQDLGIQARHEPSEALLGVAAWLRGTQGVNDGDMNGVADGGAPSKPGPAWISSTERQWGTVVCEPVGPDMMPRSVSHARSPLRDYCRTPPQALRAQSLASGATDRGPTSCREMRSKLHLGKRGPHWALNLHKRPWRLALIAANLSRATDDETPSAVALWHRTVHIPQSRLPNMPWKTLQGSLYASASLRPEFSCPRPMRRVCGHMDQSKGEIVARARTETPLGLILVGPRRIQSLEPGRPLVRAQGPCRRKRSPWAGNCSATEVERLLQEMDAPLVHGTLTYRVTVYYRYGVEHIYPRVCASQKMALPRKPGASDDTWRHDQSCKWLRVAKARRPFVPPKDAFVTKCRMKLISPYAQWTHAGR

SEQ ID NO: 1009087 - protein, 182 aa, Homo sapiens
MSEEEDDEEEDDEDEVRPMMMWRMVTRWLVEGRRWKAVYSDCVDVLEESVLSIRFKMGSSGLGEPGSDEYGWSDVSMLLIGAGNTREAIGHGDKVSGRHECESGSSSMDFDDTRLGWSQTWTPLRQLGEVHGYIRLYRTVGAPHNDPSPLALRDGRSIPRRTAPQNYVGLVVPTRLAMRAPK

SEQ ID NO: 1009088 - protein, 168 aa, Homo sapiens
GSLALGKLRKCFGGFVQFSGLSGVYYVVGGPVRKQHFKPQFAASSLSDDHRLEDSLEYAAKIENQPERSVVVKVECGQDGFRHIYCSSQQIMSGQCQGREATENAMCSGKESYGTLLVLAIGTLPVVRVMREATRKNTLVCKRLTMELDGGLGKQVSSCPWSVCRPPA

SEQ ID NO: 1009089 - protein, 136 aa, Homo sapiens
MADYVRCSGVGPGCPVLALRHGGTACGFRVSVSSQVLHPEDRSRGRCHGAGARSRGALRRPMPDGIKEVGIALYLLDVWVARCGPTDIEVSHMSRESADLIVVSSLGPIKRIQEITLTSRSLGGALLSSKGIDGSR

SEQ ID NO: 1009090 - protein, 107 aa, Homo sapiens
MVRRAACELNVPPPPGSHGESARICRPRRLGRPWGPDAPEARAGGGTAQRHGVPYMMQRPAVYADEPGAAGGAEGPAGGMETFLRVRANRQTRLNARIGKSETEEAR

SEQ ID NO: 1009091 - protein, 281 aa, Homo sapiens
LPEPLAHEQLEGRSPSCARAEAVCSPSLRAFRRQQSAHEGVKPEPLAEKCWLEDFNVQSRRYLAMHQVMCTIRRLGRSEVPANGDKYVTLCVPCVILKTDYSGLVQPRVLRRGHSRLLSEVQGREPSPEQFASSVNERIVRGARLRRERPIYATCNQHCAEILLWKSVWSLKEDTMRDLVTAYVTASAGCAPTWHQEKLGWTGGFGLLYPFGEPRVGICRDRRFRKIGRSRDARQAGAVEGICDGEATEPNQGRIDVRGGISPARRRSRGKSDLTSGHTAM

SEQ ID NO: 1009092 - protein, 111 aa, Homo sapiens
GRRWQSIQAEDESAKLCKRRIEHLKEHSSDQPAAASRCGSRQAHWIALHCAGAPAAVAALLPTTGLLPAWPRLQPPIRATLPDIIGPLSPSTGPKHAGCAPPLPCAQPPCT

SEQ ID NO: 1009093 - protein, 325 aa, Homo sapiens
IQGGPDDVLGFLRVVRFVRILRIFKLTRHFVGLRVLGHTLEGQSPMSSCCLSSYLALGVLIFATMIYYGWVALVARPSDPRGNDHTDFKNIPIGFWWAVVTMTEQLGYGDMYPKDVVRHAWVGALCAPGMACSPSPCRCLSSSDKFWHVLLRWTMAKQKLRRRKRKKHVPWADAAGVSHVLQCLRRVPPGTEAAGEYRPPGREEGHDRAGNGQTLSGMAMPTQSSSDEAGSWPQPSPWGHLPEHTKEATGHCERAHDFEQGSSRNAGVPLLPWSDSGATMDCRPSSSVTVNGDISTSLDLSRFSVSTEGMMPSKRLESLYAHNGR

SEQ ID NO: 1009094 - protein, 253 aa, Homo sapiens
RGVMTKDAGPRVFRPRVEGDPDGSLWCAAILWLLCSHRLAPKSPHQTIEKQKDITPRHSNQTRIHITSYPTYIPPQNDNQHMQILLLNLNHHINNTMKNNHIQRHTKTHTHMAKQRINMHKKRASNLRTTHDTAKKENETKSMRPADQHQGNTHTTPTQSTQGTNPTQDIRSPTTTHELARISTSNTLTSTVNTEEIRPPTTPRRPTNSLHHRPEQIQQENRTERTSPITPRKYHNDHPHTTQKPHTGKHTTQ

SEQ ID NO: 1009095 - protein, 67 aa, Homo sapiens
MTTLDCHDCPYVTCEVMALHDVLMHATESPYEDSIAPLKLGHIGKGGLTVGESKGDEDSSGGDMERS

SEQ ID NO: 1009096 - protein, 149 aa, Homo sapiens
  misc_feature (98)..(98): Xaa can be any naturally occurring amino acid
  misc_feature (129)..(129): Xaa can be any naturally occurring amino acid
MQALLARSGPMENPVEERAGDATIMSWALTGRLRLLVHQPIRCSYLTYESGPRSRCVKASQRTHENKIARQEERRCGATWRALDEQLGSRPMGPIPMXPNRWLVSNNACSERKSRKRTGRVTRVCQRIXRLDSCVDLDAKERGPTYSST

SEQ ID NO: 1009097 - protein, 253 aa, Homo sapiens
ERKQEEVGEPAICARAPTEPVHSLGKGHAAPTNVVENPLPETDSQPFLPLVAPLVSHSSTMASLRRARAVPEGAANAVTTFVNPHKSNHIVGRSITNDSAVLSLFPVHQRMHPQCLELVNQAWTKRRADYEGGCQNQGWAQIPDSPGGRLKLPWAKEPPGEKFPPGSARMEGQIAAQGPRIPWWAQKAVENKCGGSKERAMSTLGGCPDGHLWTNPGVPATEARREGHGPYCGVVNTQHAKGSTFAAKWPGFP

SEQ ID NO: 1009098 - protein, 155 aa, Homo sapiens
RSPPVDKRPRVRGLMSAPPSLLVWPVGAKLAAVPRPLTPTRVADTDHPVPGCAQCVSLMTDAPNWAIQLWVCLAMPQSSSSSSLASHPDARIVPSSIHVAWLRNPHGLHQSPTTTISKHPPPNPPQKCTPPTLSQYTCHKHTTRPDTPHTPPTTH

SEQ ID NO: 1009099 - protein, 242 aa, Homo sapiens
GERRHCSCCPGGACDDGALPPACLPVLGLPNPDLMLFMLMSTVLPMLYDVSCVCCVLCPECLRWPSCDCDAAWLVSLNPLIEVALPILAAAVLLMMCPGGEMDGLRLCCACVLARWTRSAPSHDCSSGTLLPRAVGPVSHLLLELGLARLLSSGAYRVCHAVSETALPAPRLLAEGGPYWLQGRSCASSSASAREVIAVVMDRVHQTSTSSETLQEICRKQGVAVYILLDQALLSQISWICA

SEQ ID NO: 1009100 - protein, 99 aa, Homo sapiens
  misc_feature (99)..(99): Xaa can be any naturally occurring amino acid
LEGDLRLGRVCWALSLPKSLSSHGAPVDVGIDVAERRLAACLLTCSAAGDIRRKIYSVTVIIVFFSTHLITPLSHGVAGLKGPRGWTVEARHHVVENRX

SEQ ID NO: 1009101 - protein, 171 aa, Homo sapiens
GAASASQYAERPAVTWGSRSGQIAADVRLRFPEVKVGEVDPVTRCAPNALSMLYLSLRLSDGWRMLGCCILGAALLLLLLPACYLPAVTVWAVSPGLRPTPVSLELGGPGASAMPFDLVSNAYAGAGLHLLTCCETTDAELVAADLGTLGCQLHDHLAALRVKSRTALLPD

SEQ ID NO: 1009102 - protein, 494 aa, Homo sapiens
MAQVIQLAAWFHGVMVSFQALHAHQTTSHGGPTVQGLDAICLTFTTILRMRRYPGTFAAALTLSMVAAMDAPCRTDSMVATATTWCGRDCMRRERHFTRMVIGTVRGVCLEKIIGAVVDDKPPLFPKFPYCTECQGARLWVDVSTMWSLVIYLLATPLFVEAIPTQRCEHNFRITHFSMRSLQCSPVHGLPCEYCAMQRAELWPPPWDIYPHVHLLVSFPCVVVVPRNQTNVMSVNTFICLATHNLTGINAPTSVQRRGTDHRDREVTLKILFPQTSRAPHLGPPVDGVAPPNGLWHQLEVLAEFVDAHTKQLLDNRRNTPLCGFRVAETIGEQWLFAPETNVIPHPGDRPVKWPRLPLEETRRAARCRSHAPLIEYRERVGTEHDIWRRVPGPEGTTLSRWQPQDIPPASREQSAWFTDRTIGVSENSPTHPEGDWRRFSATTANVVPVARSTHGTTVAVWWSGASVVRPNGSQIHPFGPRRWWETKGTLRQG

SEQ ID NO: 1009103 - protein, 196 aa, Homo sapiens
MTRGFMAWGISGGSSIDNIAHCSRGGSSVAQAACRYFPTDDPGPPSSRFGCRTRPMFGPRVCNLSLAFGSQKPPARAARTPGPARGLCSQDPGIAQTSVSPSKVILPGEAPAADMRTSCDQAHSARALETPVPKKELLLPWNNRQGAMHLSTVQQRIATNVLFNCPNGQSQGNNYPRGKDSKGALDPSLCTHAKLT

SEQ ID NO: 1009104 - protein, 251 aa, Homo sapiens
MPAGAVVEGPGCGMSCVCRGAGSELLRLCAVDVAWLPVCCQSCTWAPVPCCTAASVSIPALVLLIAAWLEGRLPTMTWHNDIGCCTFLQLELITRGCLSASLLEHPMTQNTVDHHELGTWLVTSLLQGRMPTVSSCASRHINSRANNGREGLVPKDAGASTKEREAAPAETDMWPRKPTHEGLELRDEKFAGGADQDFEIRSIEDSLLCFSRINTPELPRWQEPRMGNVRRDWRSGFARNGGGAQGFRRRG

SEQ ID NO: 1009105 - protein, 226 aa, Homo sapiens
ETDAALSRERELQLPVSMASCSGRLCREWSLSEQWCCVQSAAVTEQFAVLLCGCCCLMCLLCASCRMPVSKLDDPLHLLLYHAPHDYLVMQWPMCGLVMPVSTLEEGHAQYLTSLADASALVAALTLLLPPWLLDTIINVRCHLAPVFPPPCLTCLIDTCNGVAVALVLWSSWVQLAGPCRLCVHMQCQPVLRTPLQGILQLGQELKPKSLDVRQLRSMGPWSNKE

SEQ ID NO: 1009106 - protein, 108 aa, Homo sapiens
DTERRNIAEVSLLACPSCLRSESPREAGADLDAKLDIERGSRLFERRDLNRAPLRSRVAAAMEDTAHGHVVPESRSIRRDSHRRLRSGAAGCSVSIMHPRWRRVGNAV

SEQ ID NO: 1009107 - protein, 245 aa, Homo sapiens
PRHAWCPLGPQGPQCATWRGLGLWEKGALLALEGSQCLKVLKVAALELDGPTKDMPVPIKGDIVAPWAMNVAPWGLHVAPQWPHGKTWELGRDRHGFTSAMRWVPCGAYRVNHVDPGSPCVSRVASSVHHGRPRSFYLTDGLVRRSQLVTTVNGRSGPPRAKIRRPPSKSPSPYNDKLVSPSEFHIEAGHSHKGLEPMQAFSGIPAIVNLMPIVTSEASFPHDHDNGRNHLQQHECNCTTTIAQH

SEQ ID NO: 1009108 - protein, 231 aa, Homo sapiens
MATSRYEPVAEHCVVGSLWDSVQGPVIPTVGHICGPQECESPRLEEEVEEAFPSAQIRDGGRLLQADWEGGIRRSPRVLSRLDGRLCARSTRYMTWENARDNRHGVESSETKDLKDSSLGQRALAHAGLPARDRSKDLMRQVSERGLGYASVPKGIRFTGESDSPGRQHLLGCTQWVAKPSPTRLGLNFLEPGPMTSLHGYAEWVTLPSPVVVEHSGYPEIPESLAAVRRM

SEQ ID NO: 1009109 - protein, 138 aa, Homo sapiens
MRARGTKWEKTDAAVEMNRINREQFWEQAKKEEELRKEEERKKALDSRLRFEQERMEQERQRARGALSVLLTGSGSSQIEDAQGGIQQTLEADAGQVGGVNGAVYLLVTIGTDGGRDPPLNEVQSRRWRTAQSAIIAP

SEQ ID NO: 1009110 - protein, 282 aa, Homo sapiens
  misc_feature (129)..(129): Xaa can be any naturally occurring amino acid
STVSRIFFCVASRSHIAQYTMGERESSEFNRISDRIRASCVYLWVCLINRLEYNVESLLVHHMNRLSLDHRNYCVFIIVTKIMYSHTNWTNIPTGYTVYRTDDEREKLRSSECEYSSLSTLVSECMRGXTVAETFKLAVRLAELPDGTLGRSSSVGGRVELNSMGSKGLGVAQFVAWVRDVSEEGIHSVLLYPHFVTRIAPLIVPFIGVVESPVEQGYDRIQACIVFEYSEIAFLLHREPNLVLRYPVCPDGSFQGPTFAYLCERHSIEPLCRICQIILSHH

SEQ ID NO: 1009111 - protein, 232 aa, Homo sapiens
DSKGHGQVGMRVCVCRAGEKEEWVDSGELVPGDCLVLPQEGGLMPCDAALVAGECMVNESSLTGESLPVLKRHCPRAGPYCGEHSGVTTLFCGTLILQARAMWTARLGSWVTRHRVLHEEKAGLVSSIFTPGANQLRSSINDKALKFCGLPVYCAGLSFGASLTGVLSSSSRKRGACLLAMTTCKLPGSFEALGDTVDGRPPCHHGLARAGLGVARSIGAEAALREERGYTE

SEQ ID NO: 1009112 - protein, 270 aa, Homo sapiens
KHPGTNGPGGWQSHSGPQLPAPQAQPQTSETGGGVSGQDRYYRATSIRPASSLPSVPSLEVHSGVPPGSNGSGAVEEADGVRVARTGLAWLHAWLDAPWCCVAACECLAVGKPRPWRLAPGLSPARPLFGSDFEKEHSMHEECGLSRHELELRPCEAGAEEWHGRPQMPVREQLRGAVRLRPVQCCASRRITGWWGECSPSMLLPVLQDTTFRAERSSPKYPLWFRQCVRRRPGRWLARCSTMLCGSRARHWDSSGFKVPRHMNAGMDQE

SEQ ID NO: 1009113 - protein, 182 aa, Homo sapiens
MAIVSHSLRRTSTPLRSVGGPFAKVRLYRCRANFATILFSQHNATRYYTALSDLDPNVGGSPNTCGRYLLTNYTEFPPHNLAFISRLGKDQIGDTISSWPFKENRPKVLLNYREPVTPALSYHHANSTNLTNWLGSVVTTPFGHTPAPTPPVSDTKKYSQYTQDERYQLHASSYCNIHAYRR

SEQ ID NO: 1009114 - protein, 389 aa, Homo sapiens
SDRGLQRSFGSMSSCSDCRASWHGHRPTLGNAGVPGSCSSRRLRSAASTVRTEIPGRSRSRTSLHACAAPYVLGPAILEARRSAYEPNAGLSEVILRDQTWTIAQRMRWYSAATKCNMACRLKRLPSLPLAFRQCLGPITRLRRRKANTSLGYAKIVAINNVKLFPYVVPMPPVTYGPPDSESPEQIRLEGAQHRGDTARIKASAKLLPPKTLGGTHDYTRVTDLPRHNRTDTLRHEMQRKTPSLVTEQNETYLSKRIIDGVWGHIQEPAKRPPLSTFGPPPHGDPPLGSDNIGRRSILRIPAVSHRYFGQVTNVPSCLYRAVIPYIESRGKQSGQRDTRAGDNNPTCGQPPPTSLMREETTSVRRSYETSPRHCFCPTLARAPPPSPS

SEQ ID NO: 1009115 - protein, 206 aa, Homo sapiens
RRDSYPCCVGVPVSSPCPDQTRVGALSSPPVLHSESGLAVNGLASVHPGSGPLRPGAGKMATAPSRDCAASEDTIGGPEDQLYPVDSNHFPPPFGPHSQRTTHLPTVFYLYYLVSPIAHKCHSNQTEINQKYHTNNLEHYRIQGPSSSKQMRLWIITITEEKGRKDRKPKRTQKGNTQHKETTHSDTRDTDKRPPLRTRDNYKLKQ

SEQ ID NO: 1009116 - protein, 293 aa, Homo sapiens
  misc_feature (81)..(81): Xaa can be any naturally occurring amino acid
MRDILLLQAVTDAATKSERLCLRDVISDDAGIVPLSGTYPTEEQSDSASVVTHLMVYYRCRHYLSEWKYSATVASVVCGIXDSPRSPIGALVASRGPLSGMTFQAWNNFAFSGPDAGCWDTIWCQRVHYIRKALRAWCARLVPGMLRCTTRARTDAASRISTCTVRYRNACILTSLLALRDATGSLGDSRLSSYEQFESHRSSRVNAKLPPLDHVRLAHCNYSRPYLRVLVGDVCPILPTKILTGFQRTDTPIGPGKVAHYNTYRHQSRCAFNDVLTASSPRVTTATDPRNGN

SEQ ID NO: 1009117 - protein, 117 aa, Homo sapiens
MQALEEEQIITGANAEDGNTVLMDPSDASKEHFSRDYSSFKPLHGCSWMENPGNDLRNHRGHAVDMPVVNKTVTHGERGGPVTQSPLPDARLCGAGTWYQGENAGAGIGTGCPRNLG

SEQ ID NO: 1009118 - protein, 102 aa, Homo sapiens
VRLKLGRRQSKAKRAGETQNPAGCRCSEWKSKMQEHAVPTCSCAPQGGEKVNAKEALEDKRNAICEEMADTADAIEMATLGQGDELNERAESLQQEVEALDT

SEQ ID NO: 1009119 - protein, 203 aa, Homo sapiens
  misc_feature (183)..(183): Xaa can be any naturally occurring amino acid
QSGASAFASSAEPYRSDTMGKVKVVIQGLGRMGRLVHQGLLLNLPGTQVEYGGHIRSDASCRLTLLSVRVSSYIDFLNDRFLASGKYFHWQRVKRAREREEGICPCEVEKSPINRSFARSRRSRIRKIKREGRMAWQREVPSGGRPKRGRCFEHTYWSKETGGNSLMARRREHNIGDQCDSLXPRVRRREWHTSVVAVHWKLG

SEQ ID NO: 1009120 - protein, 285 aa, Homo sapiens
GGAASGQDDEPDPSAPVPPAQCGRRCLLFVELNVGGEFHYQHPWCTLRKFPGSKLADDVRLVVSQGLHRIAEGRFFIELALSDLISDPSVDYHAHWAECPLASTSREVYREAQFVLKIKPLVKLLEDMPQIFGEQVSLEARFCCKCRATAENLELMVRLARAEAITCTERPACLCAWWKLRSRMQYHFRASCSLLQDHEDVQGLLSGFGLHAKAGSLRQYVRMISSACPGQNAHLVRAPGSYEGGISFHGFISLEREPPTMRGQRNFAYLDPLHFHFQPFYPGWM

SEQ ID NO: 1009121 - protein, 273 aa, Homo sapiens
AFVAGISQYSKLLLASKEQVLHRGSSGGESSSYEQQVAEEKHHVAELLSLFEDSISRMALKTREGGVCSVVLALVKQKGGHHGCGGCSVNNVVLMAPLCEWSLYFKPRKGVHGSICLPVDEERHGMFVARGASPSRNSCSPSWLGRARKEGRVISMRLTGSRQEDCDDFATEGQTDDYLIDGDQCVDVSQDHVRMPHYGRNTRLFTNWPFENRRRTPSILHDVCLARSRVEEEGAESIDGAPGNPLLVSCCQLALRGPRQVTGKVLGTRDAAE

SEQ ID NO: 1009122 - protein, 158 aa, Homo sapiens
EEFCTLIACSVWAEHGDMPPQDRVNRCPVAKKDNTSDQDEMKPAVILGEEDDLFRPQPGAFSHWPLRYKKKSRSSVHQMIQNNAYILNEVSDLYECLRSRRKRPEIWNEPLESQRGVVLGPRDSIRHVRPAPVPVEVVQNVLVALIKSLTMLPHSRAK

SEQ ID NO: 1009123 - protein, 250 aa, Homo sapiens
AWAGFSCTLGPAWAEVTRGSIPCDNGQEVCIRDIAQLAGVCHGAYLMAVREGTPQCPWVVQRCRACMEGWCHWQPRCPLGSDESSACSIGVVSIGSPNDPSWGTCSSLWHIATGSVIGNIPVSVAAKVVPLARGRNETSACSGKCMLLMKVVLQGYPIGSSYCLRTGNKTGPEGSTRLLRTIQDGWLRGSVAGRIRQRVSWTGEPMGMTMAWVNVKRAGKAVGGTYGLDWWPCGTMAKDIANGPFIRSFL

SEQ ID NO: 1009124 - protein, 118 aa, Homo sapiens
RERTSLEFLGFFFPGCGAAREVVYSTLEAMPSKVPLHRCRSSDAKKQRHFWRIANADNGLFKVERVALCEMIEPRTLHYKLLDASFCFSARTQICCCRHSGVPVLRGWLAHVCPNFSA

SEQ ID NO: 1009125 - protein, 357 aa, Homo sapiens
CSESCADLSAGAVLLRAGARVTRPTALSLNYEHLLVDCPGLLCSDPSAGQLCAPVRPLTEGAVSQGKPDNTITMTTSHQPQDRYKAVWHYLLHAGSGNAAPRGISSHDGHSVFHKTDLDMSQNVSLVHCLNWARTPMRSALPPASHPLPSKPQPPLTATLPNNLSMSPISPCPAPLHAHSTLPSNLPLPCIPGRVSPSSFPLRDPCAQGPGMRQSLAGLLLVIRPATPCAEQRMTRLWRNCPPGAPIILGSTPPQLHSPRTSAWLRISPSSPSMQLAPHSRLRRAGPSRLAPRTVLRPSVPFSFGPSPHAPSLPGATPPQCSRSNALGAHRGAPYRPAGALPSLSPVPPLVRPDSTV

SEQ ID NO: 1009126 - protein, 445 aa, Homo sapiens
  misc_feature (66)..(66): Xaa can be any naturally occurring amino acid
  misc_feature (262)..(262): Xaa can be any naturally occurring amino acid
GILADEMGLGQEHPDHRARSRTSWTTQTAVIGPFLDHPCRVSQSAVQVGGTASCDERGAPLPSCRXSVVYEGHHRKYAKTRALLSAPSVPRMWERSTVVQQNDRTEYDHPDDEALFSGKDRVSRRYIAICVHRMRRPAMTERYQLQCVDGTSCSNNCTYCRQTPPALASYDLESNYPALPCTSKAIPQKVCVVWRPRHSTTWSSWSLPPITSSFHKKGLREATAFPNGKVAFCKEGHTTVFCSQWEPPGGTDHGLVDHLAKXEGVRGKSPIGLRVLVRRGRIMPPLHAASLKRATFPIGPPERQFATRNGTGTHKGHHRGSAPRKRRDPPDDPLRIPKQLAERPRFCDGLGSSGRSAFLHGGHTTKHVSPNWCTVRSGLGTWHRGLLADIADPLETGPNGWTPIVAASMESDPIPEATHYAGNVRIAQTNHANKKWPNATNRTAI

SEQ ID NO: 1009127 - protein, 69 aa, Homo sapiens
DVLVTQRTGNFCMGGSDGGYIICDDGNQGHRIVASGKTSRYFISTSDKCNCFTHINLKSQFILHVSVGV

SEQ ID NO: 1009128 - protein, 149 aa, Homo sapiens
MGARHGLSPLNVIAEDGTMTSLCGDWLQGLHRVCGPGNKIMSVLSERGLFLGSSRYQPMVLPILQPFWGCDRIPAEEPVGLSAARKLGARAAKAVESGGPGAQSLLPPEELPALVFPYWGLVCLPAAVVGAIRIPAYLVVEDHAQGRRG

SEQ ID NO: 1009129 - protein, 210 aa, Homo sapiens
NGLKICEKFGPNLDTCPEGTILGLRLDSSGGLHLHVNGVDQVVAVPDVPQPCHALVDLYGQCEQVTIVNPEPGLPVGKVLEPKEDMEKADMVDGIKESVCWGPPPAASPLKSCEYHALCSRFQELLLLPEDYFMPPPKRSLCALAPTPRDPLPLPREYALPFGWCRFNLRYCSILSCRPLKGEPGVGFEEPGENCAPPREEQPPPVLLSP

SEQ ID NO: 1009130 - protein, 165 aa, Homo sapiens
GLLMGMCLGVVCATGAAAQSMQIAFVPPAPLPQCPAGVPSLATQCSGILVTCGSWAGDGAPEQPVHGQHHPGLNSTQDWNSSDPSYLPSDMTLSDHCHADLTGSGLPLDTHLVPLLLVILPLQDWHTSSQHLTPPLSVTIPDCAQALSPSACTVIHPSLEAREGF

SEQ ID NO: 1009131 - protein, 388 aa, Homo sapiens
DVAGHHHADELTVPLPQWCAGQRGAVSFAEVLRQWPCEDLHKHEPRSVLRCCGLLPERLPVVTLKPECMLLLCAVRLCGAAVVCAACRTVVCPYLRCSGPPLLPHLPRDTGHMAQAHSTKGTDMVLAVAPHGLDMATLWHLRGIQKVEPDSPTMNCDAPPNPVDPEVHLRCQKERPSAAEKARGGPNIGTNVGHQSGTDEERRAIDHNAGSCTHQRPRGPGALWHGLKSPRATFKGTQETDSPTKVYGPRDTKQARPTDGPVWGTRPAPQFTFRGRGPPYRRHRTRTRSHDSLDAPRNRAHFQPPQNAFTAGITRSPEGTCHIGCPGIPHPPRGLATGPPLAHLGHVRANRPTTCNLAHMAHTASLPKVALLSKNEVGVPAFHTGSPP

SEQ ID NO: 1009132 - protein, 125 aa, Homo sapiens
MSAGTGRHAQDGERLRTRRVGHESPAGWLARTRRPYRTFPGRRPECAELAHRVKRLDASSETSRISHFTWTRENFPKDMTRCKARKESSKVVQKENLEGHRDLHVHSVRLHGSPSRHVLHCNGWV

SEQ ID NO: 1009133 - protein, 202 aa, Homo sapiens
GCVGTGAEAALEEVGACDGSGLASPREPVALGPGCGGGPVLAGGSPVAPAHQPWSPADPEVESQMTESGHRDAPGVTSQWTDCRRGELNRLRRLITPGIQTPYLVAALDGGSESGRGHWLNHPGEFDQDKTLYEWTLKELFMLNASNPGRCAKGSVVFEARGSNKGRQIRHYNTTPNRKSCVGPIRENSFRKPLAVKAQKVH

SEQ ID NO: 1009134 - protein, 226 aa, Homo sapiens
GVLMLSHLRREKPLGPDWLVASGERLPVRHLRCCLLLPRPLYSIARRAPSTSNLPGGQGEQCVPGGEMGGAMVLLYASLGLLESDRLAVGPQSRLDTFDYDWYNVSDQADLLNDLGNKGYLVFGSYLFVCGSYWPTTLLGVSFFRVHRSRTVTLSNHGHILNVARSIAIIRSYFLCPGWATVKMRAAPGSTARGESTSMYGQSRLWELVWLPSGVMPGWYGGQAGE

SEQ ID NO: 1009135 - protein, 273 aa, Homo sapiens
MLLARSSDEYTLTLRHSAGNNKLDQGLPPTMGTMASQSQLTFCSVVDPHQSHTATKSLAQYTCQAGPPRLLYTCCPMYQQDQIVKGGQAWQARGTTRVKGLITRQLTMDKTPAAVMTQALLTEYHTGAYPRAACRVTGVTCRNLPVLSHADLHSTDYFPQVKRLGRTNVRTDHTTAPHTGNITRWEDGLYTGAHSPAGPTPEHASGRTWCQRPGKSRFRIGNPSPEGPGSFLTIPPCTFATGRKAPHWTHRDRRCGRKALRQCESHALGGSPP

SEQ ID NO: 1009136 - protein, 135 aa, Homo sapiens
MALVAIEAVGFPNRATIWAQPVGHHKPLTYKAACDKEPQKSRTEFWSANQPRGPLMHVGQIKRALGRLGFFPFTQRIRELPPYYVGLVTAGTVGTAGTTSAATLAHIWFPSAGQLSSKTCTQRRKNTSLFEISRA

SEQ ID NO: 1009137 - protein, 251 aa, Homo sapiens
CSGGHGLRRQQLQGPLPLRALRYGTVTRSRVTCNRCFSWYAPIPNVPHCRAGSAEPRKPEALDLLIPVLGLATRSLTEPCQDIRVACNIRGKIQFQGSDHSIVKAGGVTAISPIAVLPRWRWPGFPPVARRTRPERLDMRSNQEGTSESLGFEPERFLMYEEAKILRLSGKPQNAPEGYQNRLKVLYSKKATPGSSRKTMRYIPSLPDRILDAPEIRNDYYLNLVDRQFWDCTGRGTWTTVLYLLEVQATR

SEQ ID NO: 1009138 - protein, 287 aa, Homo sapiens
ATDLTWYAKITNDLLGAESDQDGEDDSHAHVKYVDGLGYLYLLVTWFPDDRQWLRIMTASQDQSSSHRTLSRICGARTGTLNVLASGYTDHSQIVVPWREDPESSLFTSDQHVECNAVKTQLATSSHYAVKRSWSHRHLRDLLKIWIVQCVMARQGIALWCPHALPVLMAKGAISVWTLVRGWKPNKVGGRMSYRGLRGCGITTNSYLEYETGLSQYRSDCPVVGTRNSTQYGGSKRQSITRLNRPHTLHVPGKKAHTIEGGGNAIRNSVGTKGRGYKKDDGFSLGS

SEQ ID NO: 1009139 - protein, 98 aa, Homo sapiens
EHFKIPQKRFIIQVSLRVPRGLSVGFLVAERGTPVASKIFGTRSERWVSYQQGPVIWDEDVFRSPSWNAYIHILSGNRPPGSCGRWDLDEIRINSGAT

SEQ ID NO: 1009140 - protein, 172 aa, Homo sapiens
MKEQGYPKEPCLLRAQGAITLRNDQDRLEVSYQPRQFDTQRPAKYTEGMDLLSEEHAGRQPAGCTDNGTAAPHPILATRPESSTAYPGDDHGQPATALTHNTSEPNQHTPGQHRQTTAMITPQATYTTRTTATNTNDPTGPGTPGTRGHVKDKQPQGQGKDTLTNYTCTGTR

SEQ ID NO: 1009141 - protein, 418 aa, Homo sapiens
GDKFVLRSAILQLWHAGVSKYEISNEAVVNILYELITTADKGALPQHGQGSLSQHGPLPQHHNFLQAIQTTIEPGQTELCSRSECPHPYIRVPAPVRQLTPWTWRPEGGTVELIQGRAMARCNCVSHAVPKPRGVTRSFRITSSTSYTVPNTQKRHPQMHGSPDVPRPGLKTQEVQEDLIFMRLNIISPGPWSGLQQRQEGASYHARPVTGESHHMGGHYLIGGPLGSRELELLSYQSEIQNNRRFATGKDGKPPEGCAQGGIEHTEPTQRGENKRKESQKQKEYRGKETPERANRHGGKQQRKGEWDNKDPTGDTHTRRTYGAQKAPERHGPMKSKGRDIASGEEHNMAQGTNQEHTTGGEAKDYHSHKDENNHKKHGKATHRTNLKGADNPHNPGTKNTKQHKREAHEASKEGERD

SEQ ID NO: 1009142 - protein, 335 aa, Homo sapiens
DNALRLYLFTGSITRCLGFSAVLNKQREIRTRRYTSALMCIKNGADKKSWVMREETDCSPKTSDSSISQSVELRPGLIWTLTELARSSPSHRNPSGWQQMTVPEEIYKADVSIPLEALGEGTRTIRSHLDSFLTPTRGARNIREEHEYWTTNKHYPEQAPEDLAVGSAARAKESNPHWSSLAIESAGKGLSPHHRKKRNAKRWPRIHRIKKDRHWKVFKSDSNSYLETSPYSRNEHPTRDTKSFNRLGARGSAILGPGSREGLRRNYFAEPRYVLMSGTDSILVWHLFGMRLECELFVEKTTMWVVGISTLIRIGNCHLQESVARKGGATMKVSS

SEQ ID NO: 1009143 - protein, 143 aa, Homo sapiens
LGRRLGGERVRDRSRETPGRPAPPRLAGPPASTFPGAAPASESDTCRGLGTGRAVNAAGEDPMSWPHGQPDWLPHDETHRRPPPVNASKPQWKKPDPSAETHGGQARKDAKQCGSSKEAERKKTKTLTPERVNTYQGKKKTTK

SEQ ID NO: 1009144 - protein, 217 aa, Homo sapiens
MPVRISYKNQGRFKSRDLRVTTNMLVVQLQRNTAVIMLSLAKHCHAAHGLYQTSPNYPRYAQYSPQPHQHDHTRPTTRRPQPQHNPNTSPTPGDTHTHQNHPPSPHNTPNQTANHTQATTRDPTAARPPTVNPTTHTQCPTNQPPQTTRAPGSHTHTTTDTPPPHSTPHTHQRQQPQPTPHQPPPPTTPPHHTHHPTRRPPTTHPPRPPPPPPPPPP

SEQ ID NO: 1009145 - protein, 186 aa, Homo sapiens
MAVGRELGLSAKLTVSPGDLIRRNLVSTEELNAESGEYWRSAIANCEVSDGSNLPVVKIRLRPHRETAGRLMEKDPQSVCSERQAALLQACCVRYCAVLWLTGKDDMLDLTSVRTCNDYEGILLYDADQLCENSMGLSELGTLGPNGPILEQLLRRLLRYPASQATTQAPSGTGGIGVVKPRAQEG

SEQ ID NO: 1009146 - protein, 239 aa, Homo sapiens
MRTATAADTTVVALSVRHPTPSLLQTSLQRAENSAAYKKTPRTRRPITLRRLSSRGEQRQQAPRQSFAPPETGFMTQRCRTNHVCCTTEQTTTLQAHGVTQPTLQHSQAPSTTRVAPQRRSSHNNVDVSVQATHPPDDAPPSNMSAPPTEFATPRPGILNPAAGDNDENLDAWSDHPQPGGSTMTNNICSRINTFSRLVESSATTARGETPRSRTTNACHQGEHCSATAVLQERAIIHR

SEQ ID NO: 1009147 - protein, 205 aa, Homo sapiens
  misc_feature (136)..(136): Xaa can be any naturally occurring amino acid
MPSEGSAAKLECRYLQERREDMRHACEPRGCTDAWNWSSLDKGDTGLDPYATSEIASMRTAVLVYNRMPGSLSVPESLLGNRKRNSGVRRRTSRGLIPVSSRVAVSPLVLTDCYLLTPALCSILPIGPRESVTVSXDNYWCDVRAFARKSDRSREQSFNLEGSRPGGTAMLWVRRVRSRVGHGRKCPEQRLLGRAPMGVPPRRSQ

SEQ ID NO: 1009148 - protein, 151 aa, Homo sapiens
MLLNHEGVARTHPNTKNKLYKLHPDRTYWCYGRGSTQPSLLAPREGHTIAMTRGSPVHNTAHPKKTKVGPYTVDNASRQAMRDTQNGERPFPDACGPMCGKYLLADLIGNDHREPRTNFGPHGQRTTPIPYSTNSMHETVHRRLTSGRTRK

SEQ ID NO: 1009149 - protein, 365 aa, Homo sapiens
GETETAIAPGACLTGPPIEAVERLTPGTVLHLPTCLPSPATPAGQGEHVCSPLVRCVARACTWRCLRGDWASRDVRALRCTLYLIDTRAHLLISDAEPCRTKECLASVVVHARRGLSSHVHYRASDMRIIKCLCSPTDDPILVLLRGHRHPTPTLLLVTSPELRAVLLGDPNGESQVEEQRGTSDYLLPHDSTRSSTRASNYTSTAGRMTFVGPQAPQLTLSNHDTQLCTCSTPSGGLADTWKSYPRWASLRSRLSTVAGTLALIVEVHPSMYIPGNKPSRSWPPLGTHYFLCCADTWPLPAPLIDTGVAPQAKSVTAGAASGLTIGRNPAFDKAGVPCLSPAIALSGENTITTIRHVPVGTYSR

SEQ ID NO: 1009150 - protein, 442 aa, Homo sapiens
IVIKPIDKKAPDFVFYAPRLRINKRILALCMGNHELYMRLSPSLYTHVRCQPDAQAQARAGEAPDSRWQRAYAGKHEQEEAVQHGEQQGDKQKDLTLATTRDGSSTRDDVLDTSTIQSGPQDPRRNATPREQKTVRKRQQHPPVGGLLRDTNGRHGNPATTSSMAREKHAEDRALGKNSLSRPRSGQQPLQNQNKHWTMNEAPYKRKAHQSWPWAHARPIRPGGTHTHGPQPTETLSQEDNHKDIRCHFGRQQIGNEETTMESHDDIRKTSRTHHKRHEINAQLRTHNENTTNTENRGKERIENEQLEQRKSEETQSTTRKLRATHNNTTGGYTNKRKTCTEYEQTAKQRSPTHEQNMRKDTMRHGRSVARAHRNDYDTNPHDATRMEAKENSQSDKGDRHTSERRTRKVTQRRREHPHNHNTTDHTLHRPPQAEHTATNNN

SEQ ID NO: 1009151 - protein, 290 aa, Homo sapiens
MSMCGHRVYHPPGPGCWHWPVARTAPTIVADLCRQSSDYGDLGLLWGTPDSNNPQTGPCLSGVEWLVGSQTSYVACVSCDTPSRARPPDLAGSRIRDGGIVPWQSLGLPKFPGEWTCPLAGSVNRGPEVPRLPEATLHSNLAGHKMATMRDRRPLKEGPISSHNHHIQGAYQTRHATRQSQVIFPQNHGIDGSPETPAAMETNHHSHENGQQYPGRDNYHMHVKMGPGTMAIGDQRTRHMGKWPNVPWYALRKRIEVHMDIVTGTTKNFMVRGDKTLDEQCMSVGCKLGD

SEQ ID NO: 1009152 - protein, 199 aa, Homo sapiens
MPAPPWWRLPPRGPEADASRWARGLQPWPGEEWTCGLAVTLVDSVCASVLCGCGTLHVAVAVPWWVRGASAAGLDQVLPMSCQPPATCARAWLTATTAVSAGQTGLAGRPQGLVAGRPGLGTCPQDGTAGPPQAAETLIENREQLMRRTHKAGLTATFPLRTVNGTWGLHADPVTRRLPQQLQTSLAFQGPHTYEEPHA

SEQ ID NO: 1009153 - protein, 377 aa, Homo sapiens
DQEMMGTRWSKLVSRRKAGTVQHSPTWILESAFKSELCCLIEAVTLVWISYVTSLALSQIRIITVGIKINATNNVCHIVTGINHMMNCPRYWRLRAWHIPNVLNKLRGYLLDTILSQASLHLCKQQSEAIGSALSSLTSPLCCKTLTAPSTTCRSTLFLSIYIPAVTPTCTHTGYNSTANISVLTPYTQPHHIHAHLHNPEQKLAFKNHTKSPYKTIKREPKPTLPDVTIPPSIASDHYHLTIELCSSSTALRIEQHDTPKAHANDPCHETHGYAPTAHPHLPPPTNLACPMKNNTPPAHPHTQNHSAPSYDLHKLALKLQDQLPTPTPTRHLQNTTHRHYTPPTIHHAHTPPPDNHTAPPTHQSTSNTANPPPTQY

SEQ ID NO: 1009154 - protein, 106 aa, Homo sapiens
MPHYNGYDRNSSHGDQSDMGLNKPPGPSLSLPQNKTTRILSSPSDIAMGREAIPQYDTYVPEPLGTHTAFDTRTRAGNYPPFSENPPNGGKMLSDSAVWDHIRTRP

SEQ ID NO: 1009155 - protein, 383 aa, Homo sapiens
MAKRTNQINKRNVRVQDLHAVIRIILWIDVISTFLIVFAIREVTKIYTTGQCTRLDDQKSIVSSDSSNLAFDITVSTEDMGFIVPPLLLEVNHFKLALSLALPLEHDIRKIDTRYGTWCFLFDAPSTFTRHLLTEPAIPSIYPAIILRLFDTPLPCHHFFRSNALSLFSVRKSYDSGAILGYLPSSQGVEALATRIYNFRLANLTGTLTFVLTHDMTPVYPPIQPAFFVKLSLTFSRVNTKPFFSARSTWRRLNIRLRRQPPPVYGTNQNPTSKSSICGPFVRTTKVHSIPFRPNCDSTYGFSPEAYVGGEIRFLYAVLRKIPLLCYTHEHFIRPFYHPLSVPANEMSPLRKSFLRREADIKHTRILQDAFKSCCTRLRSLLD

SEQ ID NO: 1009156 - protein, 144 aa, Homo sapiens
MGPPSTEKEAILRRPGGPCWRRRQKSLTTRAGLGPRPEQQAGAACTPTSFARLVELSCSRDDSSRPCRGMALGPSLLSPEPLCRWSYAMELAVCVAGAGGHPGQDSAVDELCRSFTPWIHGPPGGLGRASWLCSTCEHVIAPLD

SEQ ID NO: 1009157 - protein, 205 aa, Homo sapiens
APVSSLSPSPSPARLLEPCEPAVVVPHVLRRPCGLLLPNAAHGHAWVRMLADTRARYLLLLVAACSLLHALGCIALSCSALTHMPRHRDTLSTKPDACKSDPTQDNAYRYPIHIHYDCAHAHATPASKFTARYPLSAYRTQNPITVFHILATRDPNAVTPRNKVRHVNYTIVITAVSSTANTAPCATVTWPRVATCPVTGSSCTH

SEQ ID NO: 1009158 - protein, 328 aa, Homo sapiens
GKKSWRPGGGLETSLGGFDSFLFGLNFSAITGSSKWWWIGVGGIHIVTPGSWRVLSPTITTFRFESEGFLKLSEQLFKLFTVGVFRSKLEVSPYRVTRSVSHVVGASAISGLTPRKITPRGPFREIGPQTTGLEWGHRTRSTHYTAPARQNDCHSAKQRAISRGRTEPAPPPPRRPPRRATLARTHTSAQQARAPPTPQRNRATTLTRPSVNEAYRNTNVDKTRGHNNTPKAPRKHRSLHTRTPAPHAATERSLDPTKTKNGAQAGGEPARYRDRTQTEQRHCSLPRGGPPKRNKRDPKTNTPLRTYVGKRPTPPTRDGPKTPQPQQP

SEQ ID NO: 1009159 - protein, 136 aa, Homo sapiens
MRSLIERGGAQNRGRLAKRVNREHILEISSASALLVRKHPRGEHSVAWDALEEARQGLGIEVHVHVRIAPDYSRRVQEPGYSPRPQHYPKPAPGKADQAATGSTTEPRKNCGQWGPWAPSGTTNRVAKREQRQGSW

SEQ ID NO: 1009160 - protein, 75 aa, Homo sapiens
ERPGFRGEGLGSDTEPSLLLQPGRRTNTLREMSDVVTDRDGRPAGRECREIGGKYRRRGRRKKPKRAGADGHPAT

SEQ ID NO: 1009161 - protein, 125 aa, Homo sapiens
MPFRENEHNVNGSCRNARPLVNKAKRDHVADRIRSSRSTIAATVVQVSKLHSLKNRDMHQDHSKPRDPEHQWTSQGPASDITISDYDDGRAPKTRITIAINMPLPVLMGTLINQGHHFAFSLARD

SEQ ID NO: 1009162 - protein, 214 aa, Homo sapiens
MLEGFTKRLAIVVSHRDSGKKKVWLDPKGDQVNIAICLSVLVRQIRKLIKRWARSSCNACDGPFPGSDCRNKHLGPAGTGTAHGHTRKRKGTGNARMPEKVTWMRRLRILLPACSEDTVNRKKIDRRHVSQTCTCKVNGECVPKLSGFSWNISQKLNGRQRAARSSMAEQAECPEVKTKEARKRREERLQAKTEEHHSRFYPWREETKKLRTGN

SEQ ID NO: 1009163 - protein, 426 aa, Homo sapiens
ILDACGTRLQVELWLVTPAVYRNNHGSYSSGNLRSDCQRLHSLGECYNAVSSLARQQTRTQWIRRSGDGSADMDEVGKDVHGEVRYYSDVAGGITRVPQARETLSTMRVIDVHLLTLMDCMRMFVVIVRTSVRCLGREHDLSVVLIWRIDSFREICNDVRMKMRDGRKSGELERSRLKYGRCEDTRVHGACQARESLVGTPAFSVVSKGESYQRGVILFVRNWLDSRQSTRYGTAATAVKRKRKNSKPRGKHVHERPAVASISTHALDRRGEPFARERAGLRKTGTLDSGSGPSVQEEHWESTQELLDTWVRGNRTTHLGNRPTEGAERYQQEDHIGRQHPPMNQGPNATRQGQEKRGNNRITGGNTPGAATPDQLRTGIHMRHKKAEDFQHHTQRQRTYDKPAHQTTNGPHGAKPGETTPLQTRQ

SEQ ID NO: 1009164 - protein, 329 aa, Homo sapiens
AGNRYSRTPEHAFRTQGPASTLPDLRAWVPCFRRSDSTAPRFWHPSPQMSKSQAARVPASRIQASRDHGHQNLDLLQSSDIWGHSSSWSQGPHVHTRETLVFPAPRAKEPGTLRTPSVTDIWHTGAEQRSLRRPAWGTSHTPASTEPRNFSRCELNHSNGALPKLQSPGACDSHSVLGNVGSWEGATSRSPDHATQGAYTKAPGATTSMVRRITYIEKSKGGIAQGRRPNRHKRGGLGKLGPVTTSEGDTPKRTQRQAKRRGLNSGENYPGGNPRGRGRTDRNAEHPNTMGIVSLGVEQVCEGTEGGNRDDEATGGNRGQYDTERHQTG

SEQ ID NO: 1009165 - protein, 183 aa, Homo sapiens
MELVEVGDYFTFHRHRVWEKPLRMVKPRRKGRPTMAYLITHRPDSIGLWHGLAWYPLYCNQEQPLPKLRGQPRRHEARLSNTYERRGNLWANHIPGKPPPGQPPETAEPLPKNYGAYPFHKQHGGSWGHERGTKRWDAQGTLYGDPYMGKSSMWPSVGIPMHPGIFPPSMVGACTSFDSPTQC

SEQ ID NO: 1009166 - protein, 128 aa, Homo sapiens
GVTSSCTVEPPGENSGHGSRLIVRVCSNSARSDPEIWPQYDAGSVSVSTRRIVGLSLSWTRCSSFRGLSGVIVLNDKTSDNSCYKNKHVRKNEQIKPKETREGRINYRVREHKKGASQLGVMRASSRV

SEQ ID NO: 1009167 - protein, 110 aa, Homo sapiens
RVAVAPASVGLAETHPFSVAGRSSALTAGPFLTSVSILSRDVCACKTRPFAKKLGRRHLGRNRGRSYVRRWWTSSYDEGTTIQIATMPLEVRTAVADHDVVSGVWCQTFG

SEQ ID NO: 1009168 - protein, 194 aa, Homo sapiens
MRRCGASGSGCARMALSLLPSLRQIVATILPPEDHDGSGDDSDNFSGSGAGALRDITYVTVDPLQLEGHAAPDGYSHVSRSHRPGGYSLTPAPPCRLERGPRRERLYSCQKVEPVLTGREQEGITAEPGRTPADPEHSISAQRHTDKHEPWSQQRSNRHRAHASWQHESSTLRTSKLTSHPKRGWRPLHEKAVR

SEQ ID NO: 1009169 - protein, 61 aa, Homo sapiens
MHQRRKPGAEEKRRETEQEKATWGAGRAMGQQGNRREDREINREATRNRRRGKEQGRRERK

SEQ ID NO: 1009170 - protein, 134 aa, Homo sapiens
QRRGCRLCWGLVLFLSRHHWPPAAAPGVLPPSLDAVPGPLCSARSPVPRGPWVHGATWAAWVKLASLLGACDWCGLRAHDRPVIGRLLRVVLRRLSVRAEADRRPCALTEDLRMSREEVWEMGHWIQSSSLALQ

SEQ ID NO: 1009171 - protein, 202 aa, Homo sapiens
SRYRGLGVATLCGGCVQCDDPPEWEAGLWPLTLLLLIAHSGCPCRALQGMVPRRRLRVCDGLAGGLLVAQECAVSGPHLRLLDVPERVAAVGRRRALPFLHSPVFCALSSASHPVRQLPDSQWTALAINGRQHMDWDTNHEPFSGQPNSTSGDVLLRPQEGLGTPSSSRKSHGVNAGQGQHLTSGLVWRGEGGGTRSLSNAR

SEQ ID NO: 1009172 - protein, 280 aa, Homo sapiens
RFAYPRLIARVVACRGVGGPPKLVSGSVRVLTVHEGWLTPPRRAPDHAAEIGSLREHYVRNGATAAAGAQSGPSYAKKVALWLLVLLGAAGTVSVVYIFGNEPLGGSQDIGEPKDSLDKFRDTVDSKFLGVTSTSQPHRGPLHGSFSPQHLTSAPCTEFRFGSPHAKASISTYHITPRTPSLHGKTRLSLNPTANPQLPPIRLYTGSAVTRLVEFPFPSYTSPSKRLRIQPLQSQPSALRTSASYTATVPRTNNDPIPRTDSHYLTHGPPLHKPPFCYIT

SEQ ID NO: 1009173 - protein, 134 aa, Homo sapiens
MNDPPDDRMSLWRCIGEAEYRPGHPRIGRQSVGDKEKLTINPPAEERPRGPRDSTAVANTRQRDVTPGNNNGGPPSDRTPPRTDRRHNKGHHISTGHPAHAAHHTTTGPMSHANGQEKDAQQHTEAKATQRGTQ

SEQ ID NO: 1009174 - protein, 228 aa, Homo sapiens
MRYWIGGAGANRTKEYGHVEDVVVLASPWPRHVLTCGPALVPGSGLTCSMATLNQMHRWGPQAALGSWPHGRPGRAKGVVLCTFTRKPKSPTQQSQVLSSAAQHWTRGVCFIPGEGHTLQEQQIVLVEGGPHQDLPGVKLTVVRCMYDCVPRPEEVRLGAQVGWGALKNMNLPLLACNKGPPDLAFAPLEAATHGFKSCSALPSGPLLGIGVWGCKGALCSTPLAPCV

SEQ ID NO: 1009175 - protein, 264 aa, Homo sapiens
REEAGANRTGACCYLQAERAAPLPGSASAAEVLLRTGTANGFQMVTSGVHEQGPVSDWLIASVRWRCRVLCGIDLPTIVIVAHYDAFEWPLLSLGADSNGTAVSVLLELARLFSLAYTYKRHARRYNLLFFASGGGKFNYQEPSAGWKDNLDHTDSSLLQDNVACAVPDTVGPWQQPAPARVQGRSGVAPCSTLSAGTETVAGAPVSPKVPVLHWCTHAGSTCGGVLACEHSVRANPPNAGLRLSSLESHVDGSRRSIHDVAPG

SEQ ID NO: 1009176 - protein, 351 aa, Homo sapiens
AVPKGFTVARLGGAAWRGAEWTQVPTLAPCDRVGLRDPRLLATCDQRIPGQHECFTTLLHVSGVYNGAGGDTHRAMLPRPLNVRLECPCRDGVEQPDRDLRPGHQHTAPFFTPCEVPPIPGTPSASMPHRTHAPQCLAFQSVIAQPWPREERAHHSCSLRQPFPPPEHAPGPLEPCNSGILDIPSGKPWPLAPRLFTTVPRIGHHHITPLSSPTPRAHQAQDAVPPSALVGTNPSQPPTRPLHPTLPGTAVTRRALSEHVAHTLSRATTLASDPPATRPQRPAPVLNRSYLASYPTECDTPRATSRMSPTSANCLVLTSSALTSTAMTPSSSPPRPPVRLNTVVDSGPEPT

SEQ ID NO: 1009177 - protein, 344 aa, Homo sapiens
MACCLAPGLISCVLEFPVSWVLARSCSCVVPMLLHACLPGSGALLPCFCCSVLVCGVDASVSIAMPCDATLPACRHLHLVPGWLKRCWHACGFLQTMRTRARSESRRRAQYVLYPGRIFPLQDCRSPRKAKGESRIKPLELALLDGGVLEVTNAKKAEHHGSSKWDLQSRLLRPAESWWVGPDWSHACSLRSQNSPLLTGTLGRTDMGGSQIELTPPRTTGHQRVLNRSTASMSVRVAGTDNCRSMVGRAGEQGDGKGCCLRQAAIICDGTEGSDNNPGLAPARTRWVQWPPTRAGGNTVGDYDILWHSSGVGRTPAYLHAVARFEECRTHEYRKDCGSDGDSC

SEQ ID NO: 1009178 - protein, 444 aa, Homo sapiens
SQHAETRFLPGDAETCTSPPMTVCLYVLSGSSTVPVYTCKEATDVIIIHSKKLNYTTTASVHSGVSCVVWEAPRPPDIDKTELGGDTTEYLVVHLNGLPGEDDSQYEMDMFDVRGGVRQMTWQGYLPQRVHARATVRKRGGQYTDCTLRCPERRSAVIRLTRGPEAATDGALGAKCKPRRKPDRTSGPNKASHKRDAESPRESETETQAGTGHLQRPTSRRHTQKCPRVIAMAQNKRTQNTHATYGVRNARNTKVVCLEHRTQGPEHREGRIGRSDHAERKTMPPVNSDEPAVRSQVRKTPTEQRDGRQKARQANNTGAQHSTPEPKNIGDRTDKPDRRTGWKQLETNVDSTVGAHLTPGDTNGPRPDGEKHRPGGTRRHRARKAKRRTEEGKGAKMDHHKRGVPQQRGRRETRVEHLKGERRNTEGNTAGKSEGRTGKLTRDK

SEQ ID NO: 1009179 - protein, 352 aa, Homo sapiens
VFFENTIVSCIARICKVRRRCGELVCYMQRWTSFLKAQLLCSLCPDDGFPFNCAAVMSFTLSPMPHVTGCCHPFSIVCVFTYPMWHMGELHEVLCLVCVFTIERDVQTMSSVVPLQLSVEPVMNTARWYTCDPHLVDHTPGPWSVASAKQMPWEQDTINSSLDGPQNLLLLKLSQWTTSLNGLGMVRQTCHCIGLACMTPSDSGLPTAGCWHCNSPDYVSIGPLADEKPERIVPYVALGAHLALALVACSVQHNKWPQVRSQVGVPPRVVISEPSHIFEGEMTLAKRFRYRPSYVCDHSARLATEKCLASPLEKNRPPGGAHIGVVHSRAPVRTVRVWSVRVPKGLAHSCRA

SEQ ID NO: 1009180 - protein, 431 aa, Homo sapiens
MNATSGIMAVPDVCCLGTVNCDVCTPRCCCCAPRWAVFKTPSSWRPPGVASQEAPCPASMQLQKLNNQYFNHHPYPQEALHAWICTLLQGHQMNGTNQHFRDCNPRAQLAGSSTPWRLAAGSSEPPDGSGSRLGRAGSRARHEHTGWTVRASGNAARHIARNLRGPNGPPSAIIACLRQMVHKTPPAFYIGRSERFLHMSFGADRNHWRSTGTAIKAAAKSRDSILACVSQAPERYRHSRTSTRCRLSMIATRQRRRQGTTAERGRNFRNAEAAPGRNTLEHIAAPPAQTASISAAAAEFNPRRTQPVARRLQHTRPGEDSSTEYRQTTLMAHTGARSREPGTWHAAHNAASNPDATRPPGTQQIGEHTPEGPPQALGPRLNKHPLQTHLDSKAKEGKPRPRTTHHPPRPTSAEHSERAARRAATGARARG

SEQ ID NO: 1009181 - protein, 326 aa, Homo sapiens
CGADAVSPFCCQESLIRAADGIGARRPCPGPVHSSPHEKPDSIGSGILGGACSRASRARSLKPMNHHMPWGRPWRAAMLRGARPTAATRAAHERTGQSVPMHSGHVLNAVMHDWQHMRWTPCWQRDHPRAYTVLRTRSTRQSLSGTQLYLFGVDGAREMNACPDKHVWSYKLGAIRPGGVNSMTHGQAHEISIKWTSTDFVQGLGYLNVSVQHSEAMAEPKFSSKLKIGPDGLRRPIWETVRVGLPQTSTRPGKRNTTPWGKGTLTMGGRIPCRKRRRCDIQRDRNKRDHQTAHERPKTATDAKKTPGETSPNDRRRAATRSGHRH

SEQ ID NO: 1009182 - protein, 84 aa, Homo sapiens
GLPSINCIAPSYSGDYSRANLGQNRYHLYDLASDVDLAVSPHINYRRVAYPDIAPLQVSLQELSAGRPLLTRRVDIRLPSYIVV

SEQ ID NO: 1009183 - protein, 270 aa, Homo sapiens
MDKWMSYGSVCVCRAHSGEPVGPSNPPVTGDLGMPGMLELHDVTDGLRPSKPPVSHLMSHKDKASNKRRDEEQITRDCMEYPTLNVRWPPLSQGAGHQVTNGAHSSQPTAEENANPNEPNWHGDNINERRGTERQSRRRPDRVTASKRDDRRAQRAERGGKQRSRTPDKRTPEQHQKREAERKKTRTKHERRERTKSEKTRTTKRTKERRTGGKKGRGEHRDTRAQTTATQTKRREEGTSPGGGKRKKKRDRTKKERRGRGTAGREEREG

SEQ ID NO: 1009184 - protein, 205 aa, Homo sapiens
GERERTSLEFYFLFFFGGPKFLYWKEGSNSKTLQGLVWAHNFYTKGQGTPKIELTSDPRVHRGKSSPHRAQRGGKKLRPRRELQTSTLIIDERELPKGEGCTMGTQRGEQILSANHKGPKSREGGIHHKIMKRAEPTRVEKNQRGEEESQPAKKKPLMDGKQMGGNNKSTNKRHSIGNDRTQRITERGAIKKKGSRDKINQKERN

SEQ ID NO: 1009185 - protein, 111 aa, Homo sapiens
MGSDRKRPKRSFGTSRWAQVPLRSQFPNVRTAKPEVSRLDAPQNTAERTISKQVASHFLHHETLQIVGYTTVARIGDTVPQSVAPGYPLRETLYGWRPPLVGRGRRQRRSY

SEQ ID NO: 1009186 - protein, 160 aa, Homo sapiens
  misc_feature (59)..(59): Xaa can be any naturally occurring amino acid
  misc_feature (106)..(106): Xaa can be any naturally occurring amino acid
VRAWTWDGSGRLSVVARVRTPIQAEDALVLAVLADRASCGFYARHSEFISKRPGVCPHXCLALWDRFSSSSTSSSPSSLPRKHSPKPQIGAALSLGVGDREEGFDXSTKPLGERKASGHASPWTADNSGFGPEEDTVLPGATWGGLIPLPNFELLSDPEG

SEQ ID NO: 1009187 - protein, 338 aa, Homo sapiens
GGGPGGRSGGGPPGPAPGLTPGPPPRGSLTRVAPACTLQGLPPPRPGMTGPNGWVTSHYGPATPPGACDHAHDVPLTQNTWRLRTCTRNTSVDFQRCQKDGLITKLKNSYLSKKGEKKAIQVTQGDEEFTKSSREEMDIGFVALLGTWRSNVGRDSRDRGAFTLGVRSLAEQAHRSTQRKCNYPAVVGHSLCPKKDKASTQKHTCGTRSQGYPMDASEDKQKLYTRMELGSHTQNDAVRTTSAQPARNLRTPTELTAGIATARQQHRTSSQAKHKQRALTHGVPQPTTGDEAPPDRAQQHNESGPSHELHNHAEYRTLTQKTQAHGRTYPQPRVHTDE

SEQ ID NO: 1009188 - protein, 192 aa, Homo sapiens
MQSVGVVNRLGSFRLALLRRLEDMALLKGVPDVRSSLLTPLDLVAMSIGCLVQELRAHVHVARSDVGRLLTGQPLGGQIVHACSPSPSREAEQTTPCEVTHPIRAWVDFVRVQLVVVALESGSRVLDYALTEPQVRISGPEMRNRAVNASYRGSYGLRWTMTIGYNATELSGYRKVVLKDIEKRAKAHLAID

SEQ ID NO: 1009189 - protein, 250 aa, Homo sapiens
KDPSCLEGAFTGGRNSSGVKRSAICIQSWWRGTLGRRKAANEERGRYMIIRRLIRGFILRQAPLAAPMNAFFLDHVRSTLLCVRPEAELPRMSWTPRGPSHPPALREASELLRELCIKNMVWKYCRSIRPEWKQKAEGERAWLDEIFKGKKDNYPQSVPRLLHQNIGLVTDEIRTTECYAGLWALSPFSMRMPVVKYDRKGYKAYDHGRCCSRPRPVSNREATPNAKQRTRLSKNVKRKSLYSKTERTDI

SEQ ID NO: 1009190 - protein, 122 aa, Homo sapiens
MGQGGSPPGKFFHSHPQKRTWGPGSKKTSPKWYFSWQPQEGSTWSKERRPQIATVHWSGIENQGQESLKDRGTPHNTWRQLSLGPQCATSDSRRHSPLGDIFQTEVVTPPIWTLSEDKGLRM

SEQ ID NO: 1009191 - protein, 440 aa, Homo sapiens
QRHEPPVPHDNGGGTMTAKTERCHEENKPPSRHAGVKGSSVSSGQMCAGSDRLRKMRHKSRSQGEVGEDGWTVPRPWSEAGDLPVRSPANGSHDIRQVVQQPSVVPRRLYRGDGTLCGATRITMGAHCVRIRETPRVTDGLFVGGPGKAKPGPCVLQVAGLDCDVEQHMTGPKHEVWLEILENPLLQELAHSPRRPLATPTQRMVRPEMRQHATANGESDTRGETTRPSDVGASKKSSSDQTSYDGHGLVRTAEHQERVRQGETRLCADLSHRPNGGPPSVAMRAQRHYARSSLLVTRRHIPGRVNVAQEVAAGPKDQQNRRSTEPCSRLVTCAATRQHDEALLDVGNTTGAHSSVSRAHKSGVLNSTQSTWKHDSTDDTARSIKQQKETPTRLDTRDLGLVRRELKCTISSTHCGGFVNDSSAIHTGKESGNGHSDTVV

SEQ ID NO: 1009192 - protein, 355 aa, Homo sapiens
ETPEALGALQLVCVRAAVSVTALPPGSRRSDAWWWRSANWPAPCDVGGCRVLVHVPSCGAAWCVCVVPALCSAALASCCVPLARTLLPVASLLLADALKRRGSWPEIWLPVTLGHAPLLSRTLWHRQPCALTSVQAARQRGRASMGAELLLAGLRPWDDPVVSELLENDYGRAMAAKEAETRTGFRGQLKPGVPARAKAAKEDETSDGQASGEQEELAPRLPKQDLKWGSPLPRICLLVQLGHLQAFDLVKARPWTWRCPVYETGHNGRPALAQELRLTVIYRDLCERGSSQCGLQRPDVTSWFNPGDPFGIHANYIGQCGPGDTIHFKNLLVLAPLNQGRRPVLCIEADESGKL

SEQ ID NO: 1009193 - protein, 79 aa, Homo sapiens
MKESGDIKKREVANEEGGEKRERGKKSDGRRKREEEEEEQKDKEKRRDREGERRRSRRKEKRTRKRNTQCSRGVQEERA

SEQ ID NO: 1009194 - protein, 373 aa, Homo sapiens
VGKALARAHTLWSIREYHTGERLYVCNVCGNDFIHYSGLIEHQRVHSGSTQALQMCAVWARRFVHSISTCIRHPESTRPEQQDLFAMPQAVWAKAIQIRAPSLHLADPAGIRPRREKGAYASANEMWAHPSIKAARAVHSPIIQHPTQQVQTVCKCQRNVGTGHSDKFAIRTLYFETNQEKYQHREEKTPYECQMTQWDNDRSISRKIQTHPVTKDYRTENPSTLAAEAGTLYRYRHTRTVVRRQSRVYTRPKNSEEKTMFDPHDKSTARPVSTLLATDDNHSSTENMDQTAEEDCKATKPISAYYQRRGIAPQPLQNNSEPTHQGKTTRTQEPERTDEDRRVNGQGVTGHWVGGNTEGRNATEKETQNNPPS

SEQ ID NO: 1009195 - protein, 145 aa, Homo sapiens
MARLEKHASLQGIVVAPLAWGCNALLETPRFSQWAPTVGKWSGILWCLHAPPCYAQQRFLEHKGAPQGGFIAPQNPVGAPSNFLRYRNRFDLLQKIVLVTITRKYCPVFFTKRVYQKLGPRCSTTKTTVVFATHREDPCVLQERT

SEQ ID NO: 1009196 - protein, 226 aa, Homo sapiens
CAWPDVWGAGVWPGWRPLQSTELCPGGGALRCVQCAVRSEACLVWCEERPVPWAEWPCPVVCQQPCFQPPVCASGTLEPSGEASTSLGLQHTLCCTSCPAFGLHGLLQTTLPGAHCHHLAWRGPRYYSLWSPGKGKVMVACPRLGLSYSKSLNPGTRGHMGLPDLLRGLPGVAVPQGATGCTTPGTQVARDLLLLDFGGTVQAIAVPGWYAGCWAPVQDGTLVGPR

SEQ ID NO: 1009197 - protein, 369 aa, Homo sapiens
GVLQCVPSGTGWVGWAAGARSRGAVLVLAKVDMLLLGGLMDRLLWAGSSVLPRSSVTCCCLCLTHADVRGSCAQSLAPAAAAALAVLLHVLLDMLLRCCWLALMGCNGDMYRQLIVQQVVYDNQGRPSLEESLPQGLKLTFLDDKRQGKFQGRLGAAFRRELKQQVASVLPRRVLAGGSTEGWSLQAAQPDTALSNAGYTSVRGVRTRAASSMRDERCECAGQRHPHVPRHSHEEQAFRPRARLAAAHHAHLAPTWPVIASQANHAPCQRCGEEGGSIPGRQDACATHVRRLEHEGRVRAFGTLGLHQAGEHIEEPGRKREVIYERWRPQAVDQTRQQSYHTKTEDWLLRAACWATSHSWVMSKADAKA

SEQ ID NO: 1009198 - protein, 171 aa, Homo sapiens
DPGVRPCISGHDAIELTVSVSPQLQDVDKHCCRYCCCLAGPFVAIGRLRWPSNRLHMLQISYIPRRPYQRVVPGATAFVWGDTYRTVRVKAHDTQSLERSIQADSHPGEVAPEELGAAVSANEVDPAKLAYHGIRVSTGPSMQTWMSTTETDALDLFPLGRDSGWLSLRAC

SEQ ID NO: 1009199 - protein, 103 aa, Homo sapiens
MEEMNAMLGRRRKATPVGEKIAQRMNLLNEEPEARVPDPECNLCGDPGEKNEQAERCLTDESLHSYQDGPSFAEYRECTCYSAELHVDYSDLQRVKRGASGKR

SEQ ID NO: 1009200 - protein, 320 aa, Homo sapiens
VYVPPRWAALLYARLLALDMCGVCLVNTLVGPAHHPHDTLACRALAAPGMPMSGLHCVVRVWPAGRALTRHPHTSALDSRRHLDGSAAARTTGILGPGELGSWRSRGLHELHNDHMHNHAAIEIRHMSRLAFGEDLRVHIVTPQILTHQPPRTEPRATELSHYHGRDTTSRKDKKTQLTPNAHDSQLRDTPIPLNNKRTQHQRRIRQTDERREILALNMPRHTKRPMIPPREQRSKARTKEPRTMTHTKEKNSHNKRKSNKQTQGEIEPDAKNDEHSRTNRGTMRHPTEQNCQITKTYNWTKVARPKDKREDHHRQTTTG

SEQ ID NO: 1009201 - protein, 147 aa, Homo sapiens
SATGTKMEAFWGSGSEFGAGGPAPGKFNQISIHSANSFSGLRASCTFTEGSNYTADPETPMCVTGNLSPSGVKFKGEGGELPKNISWNSIGTSLGPRFRKKFFLAFSADLNKQITSGWGVPSWAEIRREFLQLFGKAKGSLRAKKWV

SEQ ID NO: 1009202 - protein, 179 aa, Homo sapiens
MYAFYSLLIYLLLLSLFRRDGGAVAAAEPGDPAQRCPNAPGSLGALVPARARVCETETDLAWPASSEPEDGSEGAAEGRSAAVSLAEALLVASPSFLSVQTGGVQRCCGVPGGSWVLVWRGSPSLLIDVTSTGSWALLVMASDSHQRGGSALLQGTSVLVLLGSGPPSPRWYPTFPEKK

SEQ ID NO: 1009203 - protein, 140 aa, Homo sapiens
MSVVGRCDMWDQVPRHLLRVCVCVCVCVCVCVCVSASEALSSLMVSELSNLTLSLCVSTYQLLPRVRVCWTTMIPLSIYSPSPSMWCALNDEHLLSPTWLSSHESADTDEASVYSTGPLEDKIGIAYAVPRPTTLITSSQ

SEQ ID NO: 1009204 - protein, 142 aa, Homo sapiens
MIGGIPVYSILGPTEGYSNRKTGGTLKQAFQQLRNKPILPVHHVWKPLGRGSITTIGIIQTHGYSERVLLRWAEAALQSTEFDVLGHSITLVGSNKQTEEYKNTRCNREPPVVKRISRSAKRQENSRPERLSRWYKYIVSQH

SEQ ID NO: 1009205 - protein, 243 aa, Homo sapiens
YFTVSKNLLNKKVGSRFSFGSLGWPVGLWHASTFSGPLERTLGLGVAVRGSRGAFAEIARYTFSALCEDPESRHSCPQPLRGSSRGPSWVPKGCRDSCAPLCPVRICGLLGPGVVQRRECATLPSHVGITLLWTRHIHRVSVPRKPAAVMSFPGTESFIFRIIRERGTEGGRLVRLINNLFNTTGSNVRSGYSWAKKPVELVTQAALQVRYPGSGGSLRQNHSDLDMARCPHPMMGAPCSGGD

SEQ ID NO: 1009206 - protein, 319 aa, Homo sapiens
RSHFGFLTLGYWLTVYCGVLRAIMSVLTPLLLAVLDTARPGGSQCQRCQDPFVACRRGSLRILGIAPLRLTSCFVTFLPASGLDPVTAGTMLQDGHEERGPFCPSHCDLSQHHRPILVIVTAFVAWARLDHVIQFQSPLLAIMTFDVSMVTSLGVTDPAWWGPPCNQLRIYFTTVNAQTKPSTFPGVLNFPVRRHTDVPGHWRHGPLRATLTQCAVITKSRSQNRAGISPFNVKPTIHFAMTPRLNPCTFTATSRKNDAHDHKTQRADGAAQIDQGAPNCTNPVPDTHKASDHATMPRKHAANPPMPPDDPPKQARPTG

SEQ ID NO: 1009207 - protein, 266 aa, Homo sapiens
MRTRQQTDTQSKRRTKKPPREHTPTCKPPETAHKITQAQRHARRRPRADNSTPCEPIHNEGINRKDIYTLKETNTTEKGHTTTTHAYIQTKEHHRSNKPTSDAEQTKQNRTEQNSPAETTSQNAKQNEKTRGAQGRTMNDNTDRVQARDISYAHSRHEKRQTKEHKNKKNNIRKKRQEHSTYNDTTGQTNTTNNNRYYNRRTETHKHMRRQQTASKATTKTINKDNNNTREANKEENTPRDRTDTSSNKSHEQNKKRDRRSEKRDR

SEQ ID NO: 1009208 - protein, 312 aa, Homo sapiens
ETSSVGWRLHVCAGKAEKRQFGTCRAGHCGCRQKKDFPHGIPECGTAALRFTLMLPWSSGGRLATVSHLRSRRCTTLSCNKIWNALRFILNAFGATFCATELAEALISLTPTVDALDPDADIDLMLPRSVSGGIPHPRDHRSITHALYHFLAFTKLCARHNLDGCDDPCCGTAPEPTEGTHIKDPGNPMGLNIRSIQTPGTQLTRPFHGVEGIRHRTHSIETNREPKRPGNPPDHTRETHEKSTTKTNPAHSDNQQTTRTRRQQPGNEQAPNNPPDTKTTNSATQKRQQPQTNTTHTTPPTDRAHKEHCHQK

SEQ ID NO: 1009209 - protein, 155 aa, Homo sapiens
DALQAHVLGGTLTVAVGGVLVAALLVFTVALLVRGRGAGNGRLPLKLSHVQSQTNGGPSTLHTKVPPCSGATLDLVHASAAASSETWEHARVLRFMPVQPEEELWDPTEPPLDMGELARVARDAGRGREARGPTACLEARVWRCRHGHRGKSITS

SEQ ID NO: 1009210 - protein, 118 aa, Homo sapiens
MRVRHVTYIRLRSTGDDILDYIHNLNALIMAEGLNARIPFVRYTRSLNVRRSQSVCKGDAIQPMDPQNARTDAYTYRYACCEEETSSAHLMVRPTDQMSKHCDEGEQRRTNRLSVAIE

SEQ ID NO: 1009211 - protein, 363 aa, Homo sapiens
  misc_feature (137)..(137): Xaa can be any naturally occurring amino acid
MMYAQSKGSLLRCTLEDDISGQAQHTSSTIEELCTDSSLHEALVCIHEEILRTLGIQLATDVPSQLRPCSLICSSSFVMLLPGAKTRSTGLLGPLFMWVEQSGKPASKAAERTCEPSSRSTTLRDTGFQKPVTIVHXQPSGDVDFLQLRIAHRLRDTLQRDHTALLRTATVACRDTDDIVTPRTDKRVTQRRPRRLYTATFTTGRHSRTLQRVTFILGPFTTDDGRHFITHSSITSQPYYSTGRRVLTSRQMRTHRSNHERHNDSLQRTSSCEGDLTLVDESPSDTDQRERTLTSEGAARRQHPIRVTTSGGTRTGNLPRIRDQYHTKGEVGQHEHEGSDRRTIGHDIKTTLGSIHRNQNAQA

SEQ ID NO: 1009212 - protein, 178 aa, Homo sapiens
VRRGWRIGQVFSLFIRQVSPVLAGQDWAPAAVLLVLHLPPRAPSSPALQPYRAGGVRIRGPSRCPGPTVWMAKPKWTGQLQTKKSSDTVTSPLIKSSRIRGARNLGKKAQLGDSRLSPDVGHLVLTTLCRPPRPWLAGDGLKAFPEGPHHRGSAEQPPGAWLEASVKPGSSTVPGNPV

SEQ ID NO: 1009213 - protein, 422 aa, Homo sapiens
MVPLAQKYTLGDLKFFPKITTSSILIWKHFDHPVHTIQFPRRKFKNKKWPVVPPFVGSFGHSGVVSSFLQRGLTDLVCGEVSGVRQSPRPLWAPLWQGAWEIHIAVATRQLKNYVVLTGTRSITYEKGVSLDHVCVSPHTTNTLGEFWGEPTAKSVQIHDELCSLRTLTLLFLYQRRKKAFHKWGVCVGCQGNSGNFDEGLLRMSYGVSATLDGRTCISKHSTWGRNLRRSVLLLRSGGSLSGEIISIKLWRRWCLKPPLFTTAGALWWVQNKAGGKSWEQHATQGRGIIPPYQLVVGPRSRATNSPQSVVGDDEDGPLHGGTRTTSAKPARMKGTNTAMCISAKEDKRGGRTKTRAAHHNPAGGQKRRRGMKATRQLGRSYTNETHNRWTHAANKHAQSDRQRATHINDSSTCHPPVGTHG

SEQ ID NO: 1009214 - protein, 336 aa, Homo sapiens
  misc_feature (80)..(80): Xaa can be any naturally occurring amino acid
GENEVLQNVTCCLAKADKDEHWSLRTYGSSRVTRTEQSSNSCRLTLSKHSSLEGSPCKSNGRRIRNVVEPEGISTIETRXPASSGGYVMGSNAQEAESRSPVTLSIDLAMIDVDKETSWSYRADRRMLGVINSGTYTIQDLQETDDREEKLMVPEEPSGGTLGRVHKGTGPINAALHLVRVHQGGESERYVAGCRAMLGRESSYNWLAIHTQFVGTKGDSYRQRGTMGAGAHRTGRGSGPAHGIGIFLRKMVPRGNKIPESLCFGSPPIQKFVGALYTKLGINYYHDSKLCAAKRRDNTTTNHTRNTLTEQEARRRIISTCSDDAQPSSPHGDEQQ

SEQ ID NO: 1009215 - protein, 233 aa, Homo sapiens
MNDIRGQRRRGRIRLRRSWQTLFCALTATVMTLRRSLKQFAFGAHAQKKRRGALTANRSPDTATTPAGLRAAQLVVGRCPPPTMASWNNCGQIGRWCQMSSGLALPPERQATLSASCSFADDSPDENRPIHAKLVEPMGWQHGATYGLTVNGVTSPDTKLWEKSGPPAEEAPYQRRPTRIELRCHPSCLSERRGTLRLKRGWLWETVVYQVEVERKLLTVDSMVAHHSGRCTT

SEQ ID NO: 1009216 - protein, 184 aa, Homo sapiens
GRQRYSEVGSWHSEVRQRHSEVVQRHSEVGSGTAEVGSGSECRQLAQRGRAAVQRRSDSVLRCCASSCGTLTSWLTTATHGDLVARARKAAAHKRNDMTQPVEFETSEEVDVTPTFDTMGLREGPAAVGIYAYGFEKPSRNPSKRGNQADHRKGEMSSHSLSPAQEKQHLQYLSPPSVMAYSGS

SEQ ID NO: 1009217 - protein, 252 aa, Homo sapiens
YFSPVFPADDAVIMKEIVHLHVRGSAGNLNRRQRFGTRDQRCRTASDLQQVTYHGDSDLQLELHQLCTINEATVAVNVRAPSPCSLDLVAQATMDSVSARGTHSGQIFRAVTTFSFRYRVSELGNNCGPTGHYYEKARTWWTRVTGCCDEMDWLKSCDCLLGFPRLTRLPELRRGLRSADGRNPSSSAQILEKERSSLVHADSLEAMCLLMVALRPGSCRTTAGWQSRILALPPKSTNIVARQQTETYCSAP

SEQ ID NO: 1009218 - protein, 243 aa, Homo sapiens
WDHIEVSDDRTTRRTPSIDTASLVPLAGIRARGWNACEQFQKENGGIWTGAAAEVLIRPEVAPVGCPTRDILQMWTLRVLRPDVAGQVARKLVEGGPFAIGAPKGPPKPKGTGQNKKGEGASRRSPRGNRHTAQIAFAALGGMKFARATKENRGKGKDRKCKLPPQFVDSIPRFGENRNGGQFPNGANNMGHPGAVDFDPKRPNRRAKRPTNLRRSQATFLNPPQNGPPPWTREPSATTRKQR

SEQ ID NO: 1009219 - protein, 219 aa, Homo sapiens
GRRPSALWDDHLGTHDCFLPHLRDELFKQTVIQDPMPMEPQGQKPLASAHLTSAAGDTRTPGHPPPQRFHLSWGPVTLRSPESPRAAAAAPQDHQWPQAPSRLSPNPDGPTPWVRPTMILEPWSPHCEVGRATMTLAIILNLAHRGHPHQVPLLEHTPAHRYHSPTLRSTKAGHSGDQDQCFPPGISLNPTFGCLRATKALQAKSELVLLHLDGDPETR

SEQ ID NO: 1009220 - protein, 360 aa, Homo sapiens
SLQQIPPEQPEAPMSTPREPCPHASNQSLAGLPLSALAPHHGSSRHHTESLQLLTGRGSGKRGQEEERGGTYARITGRGQAQPGGRKTATTTRRHTATQQGPLTNVTADNRLGAPTKCAQQSANGLPPNRKNPHKPIATSTNTAQSQDTRHRPVAQTTPTRLPAQNIKRREQPITLNSATQKHTLNATREDGSRPRQPAPAVQQSTREPRPHTIRTRHITPHRQPKPASHSKPRRQQAATNGKPHRGENDKRAAAINTGHTERQQESETTSNGPIHQGGTNTDTTRHQEGKESDQQPNKREERTTSGNNKPKSKPTRKSRGEKKSGGKYNGKTTVETYADRTKHSKDNSLDVQDDEVARE

SEQ ID NO: 1009221 - protein, 121 aa, Homo sapiens
MGPGGLVFIKTPLMPELTKSSVTRKGLGLGVPAITQNSASQFASTSPPLPRSGDRGWLGDMGARGGSTARQWYELPHWRVPRAHQRAYKWLVRPVGVQLDCRILNEALAESRSRLGILCGR

SEQ ID NO: 1009222 - protein, 386 aa, Homo sapiens
HLLHLSSQVEDSYNASAVLFHGYGQSAECTRDHLWNELENSRTRQRKGSRGLLASAVPPAQREVQSLTKKRMSYTAKMTRDKTTAGIEESSSEKYLRDYSHEITELHPSEGSQFSEISHRYDKNAVVTSYAQEELQAGKALLAGMKLTFEPPGYETHRRFPRGTRTQLTTGDTDRNATKPFNSAESFRALRRTSAKRNQNHSQTEDTYIKRRKLEHKGQSPKARTRQTTSRETYHQKRIGDKTSNKKQVGQNPPKQSPATGMNHTRKKRETQRRNSGGSRHRRTTRTRTPHKEETHTGNNKNGRQSNQQKGKKVYQTKKTRADKHRETYTRHTPDSTQETTIHTHSRNKRWSKQRKQRQKHNMDQNNTRRHGEKSPTSNNKTRPGK

SEQ ID NO: 1009223 - protein, 209 aa, Homo sapiens
MLRTDGQLGTQWRLTTDGRPTRHEDQNGGDGHEDGRTDHDTVTGDGHDGLDADDEAAELSYGQSGQLQMMRMTMIDTKKQKTDEDDYDSKKGTSSKLKKKNGRREPIHPPIPVSEIYNVVTLRAREARTRPTRGPDANREMTRDSHNRPNRKTMTQLCNPRSQTNKKKTNTNYPQSPPTYSISFNTYQSYTPTTQLNTTRYYYNISHKL

SEQ ID NO: 1009224 - protein, 130 aa, Homo sapiens
TTYEQPNPDFPNFPPSLISLVDPNKKTLIASIYVKIHGQIHLYNRVIVLRLGRNIQCAFNTEASSLIVRTRHWNHATLDEPEHRPLSFTTQHYVHPIIFIPCGQLFGYDGSSHRNFSSDGYTRHLETQDD

SEQ ID NO: 1009225 - protein, 267 aa, Homo sapiens
GSGAVPGGCALPGGWEAAPAAATHAEPGWLRWGACLVLCRAPWLQLVRGARGCWELLALALWWDALGLYHTGAVALRARTSTQSAPAAQLSLSSRLQLSLYQYKTCPFCSKVRDLPRIPCPCLPGGGGEPCAQGLRSRYSSYRQGAQSLVTQEGRKARKQTEMTPSVIISALKTYLGCRGRPLEGDHSTTYPGPGKACDTTHGQQKVEQSSAHKYLGSVLHTRTEGPSQSGIGAERRPEERTADSKLLHNRKDITWYEYTSVYAQRR

SEQ ID NO: 1009226 - protein, 125 aa, Homo sapiens
GRRRTREMDPVEQIDSLIELSTKLHLPADDVVSIIEEVEEKRERKKNAPPETPGRGAQQKEKKQGRRRRKEQRGGADTTDDDEQEAQKQGKTEKGEQKTGDKHRETTDKTEKTQKDKTKTKKKHK

SEQ ID NO: 1009227 - protein, 229 aa, Homo sapiens
PGSQVTMVQETSWPSPRVPPEAAAEHWEEDASWGPALAWRVLVPFARTASRQLRGLRCPSMRRVPEQEDRSGTTSTCSTQVDHFRFNRAALINRWDFLAEQQQHRTYSVTMHRTFDPCYPLLNHRTRGLLRIIHEAWAHSHVALSTGSVQPVSTTYNDLTVWLRNSLHCVSKDSTYRACANWGMVPTRFRVVPGGREGTDRAFLPGRPEREPCGLHAFLPPPRRNHKLG

SEQ ID NO: 1009228 - protein, 251 aa, Homo sapiens
QECAQPSCRLKAMQLSLSPEADAEGTVCLGDDCLLVPYATGGVSESSPVDYPVDLTPGEIRCSGHPREQTDKPVLGELVSSALETRKVVLGGLRRSRDEALHIGGRQRDQRSTVPERSLHVLTLDAVTNEEPKVVGLGAQRSANFPRSLRAPDIVGTVGTAWRHRREPCKINITVCVQMASFLFWGHSGDYKAYELWPQNMRTFWQTRRERTAALLTTLHGRAHLTTLCGARGAHTEGASHAHHLCAIMAR

SEQ ID NO: 1009229 - protein, 158 aa, Homo sapiens
MAGFLCSYCITGQKMPLIRSGYLEEEPGQVNAAVKYAHSDVGYAHIAVLLSTGNEPEIGEALKEDVGPGKAVTSGGAVSEIQAVEHKNQPEDVEPASGRHRGLTVQTWRYPGTCYPECSDLNALIAAGATNTFPADLLMGLYATDSKPINKGRLGKAL

SEQ ID NO: 1009230 - protein, 186 aa, Homo sapiens
MLYPQLEPESAARETLVWVLHTGVSVELLIRETCVNTVSYPKVGGQVASRYLEMASNGGLAQKLPTGCAVHHPGADQLYAVHRNTKHTTMSQNILQDPRVAENHIAKSAPSGVPAEIQGDTQATKTPKERTLNTIEEKGEQDEGGHKHEIHWEPPQQVKTHQQTSHIGGRNQKRDKERPTRGPREH

SEQ ID NO: 1009231 - protein, 160 aa, Homo sapiens
EQIRATIERDGYAQILKDLVWHCPGHVLVAPCDCASGTGRTSTDRWEKNTIVIVSTTRNVHRCRQTTLDPEDPMPVVTILQVALSSCPCDRFAVDTRLDGSHPSSTGLTLYCEQRHRPMQDSTACEAHGIAQIEAIPEKGVTFRNPGPCDNAYSRQAHAR

SEQ ID NO: 1009232 - protein, 66 aa, Homo sapiens
MCLHEEHPQRMRIGDECSSWGRVASVSAVRGALAGKSSPQASLGRRRESLNLGALIPQSSTRKSRR

SEQ ID NO: 1009233 - protein, 176 aa, Homo sapiens
ERTSLGYIDFYLKTCSATISLLTLYTKGRGGGAAVEARPKPGSQPGTGAALEKRGSDGKSRDQGRIGDAGSDMRLGRSQRFRWRKRSPRDKNEPAHRGRNKTRAKSSRRRQATNEGAQTTATTSKHGDQRHNERAEKNDKPNDDHEHRPTRIRPKAIKPHTTELTRKKETRKRNEI

SEQ ID NO: 1009234 - protein, 144 aa, Homo sapiens
MAEDTQWGESEKPIVLKRIVAMLKRSHCPITSQEPWISFFLEKENRAPWQGALLRRTFQDTQRHWQPQQHSVAEPEDESSSKEGELDAETWTCLTKVRRYLRRLEDHWALAFTPPQAGRYCFGFEGLWGQKTCSGVLASGGAHN

SEQ ID NO: 1009235 - protein, 115 aa, Homo sapiens
ATDLDQRIDKCRVSPTFRRTDASTMASTPSYLKKVISYWRNEFDWIKCRWTILERDTLTFKTETFERAGHPLASNVKPPTAAAQAIPQKPVADRWHGVTRASYLAMLDRDHRRAT

SEQ ID NO: 1009236 - protein, 117 aa, Homo sapiens
VRIFDKAAVSAVFSEFRNAAKDKKKKRTLEMSAKKDKDPVNNIRGQGQKEECLSKGKVRDKLNNLSLVWTKSTYDNSSVEEVPNYKLYNPECGGSLRRTEEFEALPVAEGSPFEELL

SEQ ID NO: 1009237 - protein, 180 aa, Homo sapiens
TGGRLVVATYCIDEERTVYTLSVYDIRHRTVMGRIATYASGLEGGQTPIAAEIETFYATSSRVWHVFLGVSLLHTFLLILEYTWLEAVNLPTSVSSEPIVPEGLLGHKSRYCTDHYTAKRMARKNCLVKNLDSCGDLWVSTSTICSDTTGTLTHNRMTVRPPCGFDNQIHEADTTENQTW

SEQ ID NO: 1009238 - protein, 210 aa, Homo sapiens
  misc_feature (144)..(144): Xaa can be any naturally occurring amino acid
MELTPTDRCGWPSSKVLVRIVKEYQGMWTYWVGYAILDLDHNEPRLPIKIKPINEDNQGVGCKVTGNKTYIRLGSVTMDTGQRFNRRTEKVKSERYIQYPLVEKEMHGQAIYVFPSNGDVMAKRYGVGKRSVEHFESPWTTHLXNISMDGSIYKTQPILCNSCHHYCANNTTMNKKRKKDIEKEYITETTCIGSGRYTSEYNKEEKCAHT

SEQ ID NO: 1009239 - protein, 96 aa, Homo sapiens
AELSNIMEGNITLVALSCYLLSDTTHLGMHRSTSQSPAALCEPRDVKSIRWSHRKRGLVPCRHGPYRHCQTLSNAWHVYNNQNQCAVVLSEVQYTV

SEQ ID NO: 1009240 - protein, 134 aa, Homo sapiens
LPIRITECYALIVNAVLTHQWNESRDYDCRIALDSSSVEKFLTLQSILTIDSSSDSVSIRRMQRYIHRGRPSARSSPFTESHLNNRQSKVRFNSPLAWKAIRFHVLNGPMWRTHPNNTIHSMASLPTTIEGRGS

SEQ ID NO: 1009241 - protein, 138 aa, Homo sapiens
  misc_feature (48)..(48): Xaa can be any naturally occurring amino acid
  misc_feature (92)..(92): Xaa can be any naturally occurring amino acid
  misc_feature (132)..(132): Xaa can be any naturally occurring amino acid
MYKPSLTPINTSFNKEPLNTLASSTITLYVTRPELYLSSIASSTMNAXLYQIANSPLCLERHSHRSSIIVFIDSNLVCLMRVIHRMHSDHGXMHPNLISYATDAAALGEVSEPENDICTIESQPLSRSVSTXINELLK

SEQ ID NO: 1009242 - protein, 224 aa, Homo sapiens
DLAQLPLAPVLLLAARVLRGLQCGGGDVAGCPPAHSPVPDPPLRYGAPTRAAGHPEPRAYQERHIQQSQLIWTNFKHIARFSSNIDLSHQPDLPEMYADQSLMAVLVGRTGASTTLTILAALAETRRERALAWRPFSPNQNPSGPFQLSRDASAEPGYRAREPSNLELHTDETPPRITNTWEKNESAMTPHRQGNVRPTIRRRSETNCETNQPHASTSEMTTVA

SEQ ID NO: 1009243 - protein, 283 aa, Homo sapiens
EGAAALRAGPGLVGLRPVLEPWGPRSPVPEPTVRRLRCLAHLVRLRAPFSKRRAGPASQASGSVAIFLAWLGCLCMAAGWCTCTYSSYSELLSLAYVCHGGLFVTSTGKGIISGSCLPVTCVSCIMVEWRTCLVVMGPGPAGCTEGVWRDKGCNTGSDGTLRRAIESKDPARMRLSGGSVVHDWNKGGNQRIAHIQGIPGRMSDRVPQGESWENFTFTLTGRLGIYGQWVHCVNRGFDLIQQNGNQIREVVTNRARRKVQKYTEMDRTLWTCNEVNRYFHCID

SEQ ID NO: 1009244 - protein, 174 aa, Homo sapiens
MRAPCHPQSGDLRTTPIPQTTAGYISNNSPPQTQPPTYAAISNQLIKITLQIISITHKSYTPDALYNTILWSIRNTKTRKKTPQRPKPNTKNTTTENTQNNQRSTQPHTEQQRRETHRSTNTQNNQPDERPGRGDSGATSHKKEGRGQEKRGWSDAVTIETRERKRHAEANERE

SEQ ID NO: 1009245 - protein, 237 aa, Homo sapiens
GSCHPASRPRCQEVIVFGRSCWSRGTPFPHGSSWVEDCNSCLLPGCACRDCSKVWCGWKPCLAGRASPDGPDAAQCPPGCKVCLDEGPMCHAVLPEPNPCEVPGVADVACCKKTPPSNHPFLHNWLPCGDNTFGEQHVNTHLVWPPWPPFNPIIVPKFFQNPLRWKPPTHGFDRPHIDHPAFYINGPPLCTPPGGTPPFGPFAPQGATSPFELHQWGPGLRHPILVRNFRFVATRTK

SEQ ID NO: 1009246 - protein, 230 aa, Homo sapiens
AGPGPPRSGEVEPRVKESRSPAKEEAAKMPARASPPHSKAAPVRREGQWSELLVEDDGLLMPPGWAGVHPVAPAAQAWAASAWARLGFAVWSLFPARPWKLAHRSTALSPDSARTQHGHREKRTRTHTEVEHNDREASHNINKKHRKSTNEEKIKKNEKAAARTAGRDRHRTSDASQDSHEKAKHATGEKTAQEENEEDDKKTTNHKKKKNRKKTNDDTNKNQTTTADKK

SEQ ID NO: 1009247 - protein, 161 aa, Homo sapiens
  misc_feature (66)..(66): Xaa can be any naturally occurring amino acid
GAVALPFYNQDHEKLCELILMEEIRFPRTLGPEAKSLAFRAAQEGPQAEAWRGLRGAPRRSCRRIXVSYVARVIGDGQSRVRERTASAHPSSAQVTSETDTRYFDEEFTAQMITITPPGPKDDSMECVDSERRPRLPPVLLLGQRYGLRRRWTALDDSLEG

SEQ ID NO: 1009248 - protein, 188 aa, Homo sapiens
GERTSLEVCFVFFGNFKIPQKRFIIQVSLESQGAYRKDSGYRARAPGPPNFWDSQATRVSYQRGLRSYRDEELIEISFSWESLNPQYSRDNEAHRGLWADSGTVTAYAENSGAHVVPTNALCNGRDQRHVLTPSKKCVSCARRKSPEMGVSQPASGLTWFSAVCGGFPNSHYLPRGGRPRFNLCIGEP

SEQ ID NO: 1009249 - protein, 80 aa, Homo sapiens
MHPVGHAPATKPPNPRGNITRLAGAPRTEERADPYDQPPRETTQGRETTEGDRRHEGDAYRAKRHKAEKRPRQTMCGEQS

SEQ ID NO: 1009250 - protein, 340 aa, Homo sapiens
PHLKRLREAVSSGVSAVMDASAGSAGTGLLARSNEMGVPVVRAGAPESTLGHALCLGPSGADIWGLGSCEHVHSRVGDCRSNDPGEYNRTLSHGGNQDQGPPGIRFGRGYGGMGKPACWNSDAGGGEQRILAHLRTQEDSSEDLELECQYERLRTRLHGKPPGRPLGKTTCHANRRPRLSIGRATGVIRGDRLLASRVHLKGLGVARVDCTWNNETGTEPAIRGECRTKCSKTVARGPGKGANFGQEAVLLTHRKPGVVGKGKLYEPMRDKYSGLKPLIWGIYTTVNLFRMLKHLSVVVSPWVTTPPEVRGRLDSLRNWIGGITKAPFDKPPFPWRWAPG

SEQ ID NO: 1009251 - protein, 212 aa, Homo sapiens
MGVPVAARAPESTLRRLCLGQGADIWAYILQHVHSQRTVKKIRGNLLWYGHQDSPQVRRKLELGKLAGGTRPGGPKIPGNLGPRAVKRVELRAEDIVALRDSGPVDAGSVAHYKTPKRRALLLRAQAGAMRRQQHTLRDPMQRLQNQLRRLQDMERKAKVDVTFGSLTSAALGLEPVVLRDVRTCCTLRAQFLQNLLLPQAKRGRLPNPHDD

SEQ ID NO: 1009252 - protein, 224 aa, Homo sapiens
WAQVRGVWTSLPWRKLLRLSPSLVPRAASGGSGAGRLGSQEMDRSLPHRGEKPAPGPLTFSYPVFCQSQLLQSPLALRPPSPSFPVLFLVLGCLARYGGGCIPRPWRSRCLQVRKLLSIWRRWSETWRSGWTAAWMHQCVVAHGETDCIMDGLEDSLLEAAASHPARFYHGRTRIPSGASPENDLKTRDLSKSYCRPLGTAMSLPGKGSPNRDCIVPEELNPVC

SEQ ID NO: 1009253 - protein, 69 aa, Homo sapiens
VLVRGLLVIVTLTMQIFVDIIVHWLSTTQSIACVEAHVDGALEECQMAHRSERLTEGHSPRMMHAMHAL

SEQ ID NO: 1009254 - protein, 54 aa, Homo sapiens
MPRPRQATAQDNPDHGEVGESGRRKPVSGRVKTGKGGYQGPRVHTDTLNKDRGD

SEQ ID NO: 1009255 - protein, 93 aa, Homo sapiens
ALSLSLSLSLSLSLSLSPECRARAPDIVCVPGAPGAWEEETPGEDAEDDRCSRDDCPSSLHPALLRLRHARRGWSSVDAVSSPSGNVVVLLCC

SEQ ID NO: 1009256 - protein, 221 aa, Homo sapiens
MSLQSLSSTNDPENSHVRGKTHGLQGTIPDVNQDRRRHTEIEARYGRWDGTGCWNSVHETEMVCGGVVTRRLGKRRADLRKAVRPVSRTVGSEADAASSRGLNAGPSGPPTRIPRLAIVYRSDAHSEESPAAKKSQIIIQLEGWTSDVLTGWEPQFEGKLNHTEREDGDGLRKGRASQGLGVACVRRASSGENPIVRERTTKMGFPPKIGLRKNVCVAAQK

SEQ ID NO: 1009257 - protein, 40 aa, Homo sapiens
  misc_feature (9)..(9): Xaa can be any naturally occurring amino acid
MFNVICIKXAHVRRQLEPSASSREPIIYGLKECVISNGVW

SEQ ID NO: 1009258 - protein, 187 aa, Homo sapiens
AEVTDFLPQEPTEQITGRKMKVRVGCAAWSHSWKDARPMAESMAVADRAGARAAPGDSSGRVGRALAKRVHMGRLLWITCAGCMTLSDQVQEDLLSSQVTQDTEGADWTKTMKGTFDRALAIVERLAGTNLNPRLAGGDCRWQRVVHRVRCTAEDRVHAIACDVHNGTDRVSRAGLVAVAVGRTVAR

SEQ ID NO: 1009259 - protein, 143 aa, Homo sapiens
  misc_feature (63)..(63): Xaa can be any naturally occurring amino acid
QSGALGVGQHSASGAMFEGELRTPPCMPVLVARCAGTAATRRARDSGEGRAPGSPRPKRCLGXLLGQVLVLDTAPCVLPRVSACPRVVSTLKSQGAISLFPSVRDSWYGGCSPWSFFFLAPSRGCSSPLLISVPLRGLPALLV

SEQ ID NO: 1009260 - protein, 177 aa, Homo sapiens
VSSGSRDRMDRCRVDIPHRTASERREARQEVRVKWSKTQLSLGGKTTSCWLEVIEPDPVHIHGALAAKAIAGPHIAGLLASGADSDVYRSGTRCQDNMSVSQGSQCNLAGPSTPRLVSTHGIKTILVEYLLTSGSDGHPTVLYAMSPDGEASSLVLENLSLTFTNREKIWLVNFTDR

SEQ ID NO: 1009261 - protein, 134 aa, Homo sapiens
SPCQPGDVQQMRTEIIQDVTFHDLYVANARLQGGQDILYMMGQLMKGQKNTDITDIDLRGGDYTKGGEAKYIEPGRYDLEIGSRYVAWYCVIDGPPVTRDLLAVSYNLTIASGSHLGKCLTNASIHPMHVPDSF

SEQ ID NO: 1009262 - protein, 131 aa, Homo sapiens
MAQIPGRALENGSGDGSCEQVGRGGPYAHSGVKGVTLAHSAGCPMKDSRTPPVLSLRTAGCNQGTSTQLKTSTHSPYVSLEGEPQSMKSLIICSQDQNTRTTKLDSCSHEHLTPTMDTFTLGASRGDLSTP

SEQ ID NO: 1009263 - protein, 108 aa, Homo sapiens
MLLDWGAGWSRGILHPLGGHVAPLSGPHHLGVGMCSTKLSCAIPQGKIRSFETNGGSVIEGAKCAISPRRFTQALRREVVGAAQPRVERHPRMKTQQWSCSPGSGHGG

SEQ ID NO: 1009264 - protein, 200 aa, Homo sapiens
DPQRLDTFRGSGSWPSSLCTATSNGQEPSRLGGAEEERPGTPELAPAPCSQRLWQSPWPAPGQPLVDPGDAGPAGQSRKAKLVFAVKPATAQLSVKRIRGDQEELAELGWCHPLKSLPTGVLLCTHRLAGHPRPTRVPESGLQGKPSSERTTLRLSLETTLEVEEADTRSTVNPQLENTRHISTVSKHVPRWSSGEREDH

SEQ ID NO: 1009265 - protein, 110 aa, Homo sapiens
MCIAQLAGHTQGVGIPPPGGNSERPPHIARVVGNVWRGPAARGTTKVGLRVMSVNLSPPRATRICSNDGGFLDIRDETSGAGIVITTLPPVCRTEFWYKQPNFGGHDKTF

SEQ ID NO: 1009266 - protein, 211 aa, Homo sapiens
MHLRNGTTSKCRTKYTGNTIDRDTWIPSVIYSEPRAGTTVMQVPGSDVCKNKAAETSDLTTSSVACWYGPHMLATETEIHERMWAIEQYTDEKLRGAPKERQYMRHPRAVEQGPQSGEADPWEHRALHGRVANTSNGKACRVRTHQKADHANVSPERGEAPKEQGTQTNASMAHNVTQSCHSQHAKKTAKAMPHKKPLESTTLRRSNLWLI

SEQ ID NO: 1009267 - protein, 307 aa, Homo sapiens
MSNPKPLEECVTCLSGTSVPPASDQCLTESPGTMFWDEVKKRVEISCAVPTSSTCVHTGLRPALSRSSLVAAPPVAEPDLRSRARRAQCPSSTPACITSIHDRWPHKTICAGQQSVPKMVCPHRCCWTEFENMSVTRIQDHLLDETALLPACPCPPVTTWDARGAWHHGPEWGTSTTCMASRGTATTGHTRKAGLVRHMVDRSTWAGWPREKRRQGTSRDGPQGRIPHRHVLTGGQKGHPPIILRPLPCSGEARARALTGTLVTRTGVTQRLASWALGPLNRANPHGAQMCNQHQATVVRQGIEPPM

SEQ ID NO: 1009268 - protein, 151 aa, Homo sapiens
  misc_feature (22)..(22): Xaa can be any naturally occurring amino acid
MSLHALYMHRLTYNAEGPWLNXERHVCEPPGRVMRVAEQRLHYWKGVTGRTVERRTIFVTVDVMDRPIPLDCRTPRWELLEQRSCSGALPERRYGEASQILATVPRVPSHFSRAASCEGGHEDGQSASKATLRPWPEQGSEDELPLKCNKV

SEQ ID NO: 1009269 - protein, 229 aa, Homo sapiens
AEIVCACPTQPDKVPRGQDGHGIVWTPGAEKRPLPADLSEERGSLVQRAGLHFGVLIAHKMPGLAGCTVRYFTSVFVSGANPDISVSSLAWGGTGSPKHLSFYKYPSYNIREGKKNISIRASPADDVHSVPLNGWRAACCWVRLGGEPTQGHGTDDIPRWVHSEESYPAPLWDALTDLTYTYAFALSPDNNTHGDHKFLLRSRGMTPTHLCTLTPLGLRRDQDGFCGKQ

SEQ ID NO: 1009270 - protein, 93 aa, Homo sapiens
MAGSARVASRVVLYQTEMVAKVIEVLDGARPTTRCESLLPRLGEKSQLYLRFQIDEDDAYESRLAARTREAKAPPLFNQDPKGCSSSNLTTRN

SEQ ID NO: 1009271 - protein, 873 aa, Homo sapiens
GRRFPASTSAWTEPGASFPTPARTPTSTSPSEYTIIHTTRRRAPDHPRTTTTRPTLRRAQRHAQHDTADPPPPHPSSISTDTMHRTGRFPPTRTGMTAKNNIPHHQEHHSSNASRPQVYTPGPSSPNPPCRKEHFHYPATFAINRHRVNPVWRYPTLRSLYNSYTNDSGNPRYGQIGKLAGAGHQITLAAQHATKPRSSLASTHHDETTQYKQTDIDDDHTFDTDSPTHNKKSTYILATIRLRPTAQPTPPRGRTQPSTVAAAPTPRDTPTKQQTSGNAPRALTHTAPRAPRHRTAKTAKPTLTAPTPPDHHARHTVLEALSRQPRHSDNAHAVYHMTQHDARHDDARKEKRKTHINSLTTTYETKTPSTPLPRNNAHSSPPIADHTDNKHRSRHNANILGHTPHTNTANTAPHRSSQRQHARRQQPPLVGQPTAKPTEPRPTPTTIVQLEPPHTRPRTHPNPIPHLTPPTKHAAHTKNQPMQCALWTNNSANPPQRPHTPPPTVNRSPVRGDSTNTPRPEAAPHSTTQPPAPHPARHATDHPNIAPHEARHPHVPTPNTQTPSRHTRPDHEPQPKQDHNNCTQTPPNSANNDRPPREQHTQDQPAQPDKETPEECIVEAPPRQRRNQQAWAHSDRHRHGKRMETTQQQSAPTPPASTPTAHNRRKKKHVREPGTNNQSKHTSIKLNQHTRYHNYTHTDHPINVGRPDEPHTETEHYTTAAQRKGKRPPASHATTHRQTTTKTYTLTTHHPDSCMRTTLSERTTTIYQPQRATRHHARRRQSQLDSEARTGPPTHPAPHRGRADTNSRKPQTTAPLSKTYYHKHMKAHQPTTAARTPTTHAQPSRRLTPPTEKTTTMPTTSTTPVEADNEASR

SEQ ID NO: 1009272 - protein, 204 aa, Homo sapiens
MSGMSRADFAPYRRQITTISECGPKTEQDNPYPIGVTPTSSVSPKRQAMPEPWCHPLWHRARPRCLGSAVRCDLPLRDLGLVPNIESTNRRRNSFALRQRSKISSSHKYLRAPLPVGTLGRKVSIQRKHPNPRSELRTALGNLSGPISNSIARDNSANTNSPNRSCDRGLKSRFATNEAPASCTEVLYIPNLAPGPPACGPPVP

SEQ ID NO: 1009273 - protein, 223 aa, Homo sapiens
MRADHRSSPGPCTSDLEKKRRGGTGVSGVSSLARAGEPANPGLQDFTSQDGLCAADWKCCDAYKKAKQDPSALLWGGIGSTACRHSGHVSSASTRNLGSGSSGAWYERRGSWRSRAHFRPTVVRGESCKCQVIWLKGAHIRRNWSPGQFSEPIISGYTECVIRMVSGRFYLSCLLLGSLGIYVHPLHYLLDASTGVVAFAWNGSIYMSNLAPSAYGCWHRWYP

SEQ ID NO: 1009274 - protein, 102 aa, Homo sapiens
ADATASLGAGRWRSRGSAPRPQVPDHVPGSPDYTASAEHGAGARGPPGGLLLLRPLRAASTPPLLGVSSLVPPSVLGHCFQPRIKTADKFRGSLIDQTEPRL

SEQ ID NO: 1009275 - protein, 92 aa, Homo sapiens
RELVSSFLGVFLAGLVILVGLLLLGFDFVFLIIFSCPFARSLTQPSSSSSPSSFLTITFFFLLLFLPTFFLFFVYLIVSLLWLPIFLISISR

SEQ ID NO: 1009276 - protein, 128 aa, Homo sapiens
MSSQVVGIEPLYIKDDAWPALTVQMGSSETETETSCGPGPWSSSHSLPPRPQGRGGWARGLGLVSRGVWKSMDAIRHKLHSNNSPLTMAHSSVTIGFQRYPHTYSMSTTTADGHVHAILQEAHPCRQE

SEQ ID NO: 1009277 - protein, 289 aa, Homo sapiens
VRPVHGLTRHRDPVPRRPSMWRAAPQAGPWPGPGLLLLLLLLLLLLVAAGPWAAQWGCGACVRLLEQEQSYLTARIKHLSPQMRPASHVTAEGTTMRSRLSKYLWPRLNCRDFDAGKWTILRWTTTCGKVMEPETLRQCTSDIDRSTKNMNQQVTRARHSDSTRQHQSTKQLPCMSTGVQSLPGHYLTILVHIEPIGLQPSSQRTKPTMDSNENDKQYMELRDGEQNLDTTHSTDDVHYMTTKIHNDRSQEQTRVPDDRCSRWIDRTTIIDQETMEQYNRPKPRTQAEP

SEQ ID NO: 1009278 - protein, 475 aa, Homo sapiens
SSRVPRRAASPVCMFLMTSVCEPCAPSSCGTVLCCVYCAVPLLHAPVPAAACACPRMTRSTLVANALNTTDVARPGMLQLDLRYQPSLLPGASLVHAYASAPIMHPTPSSLPASPHHTPCAQARSLPWGTPIAPAPSSFPIVVLRFRDTRHCRPRSGVSTPPALSKCPPVDVLAPPQPRTPAPPAPGTRYPAALDRHRPAAPPTCASGAPIGPAAPQHRLGPPRQQRPAQAGTTTWGHTHLSPPVTPVFPPIGPARGSPPATPPPLCTRTTTPFGAPHTRQPIVPAHPAIPLARQPPMYPLSHGVCSTGTPLWANARSHGPLLLAPLPTLLSLADQRPRSAAPVTSPVQPIQSAHCGASATPKKGDRTILPPPPAPPPAHPPLPHHSISPTHSPHHLLPPSSGTPHSGPSLAAPHHLRAPPIAGLAGEPHEPITSAPPHRGSYPPPPRPSSPGPKTHPSPRTVTSARTYYIPPTL

SEQ ID NO: 1009279 - protein, 148 aa, Homo sapiens
MGGVFPESDLINWLPKKSYFGRDPDLKVKARKEESRVSSQLVPGRFSLASFILWAKMFSIFWQPLLNFPGYAASSEQYAAVGGCRTRGVHKTAESGVRLGPGFFTFFNYKGLSYNITGGTIIFFQRVLKMFGGYLAKLLWGAQAARPW

SEQ ID NO: 1009280 - protein, 102 aa, Homo sapiens
MWTVTEIYAYKSRGASVLTQHTLLNTVNRGSVLYPQTKIWLYCLAEKNRGSPGETVVCLSPPSVCSPTGDDKTVGTPLFSQISHSFLKYTYPKNNCGKSPQF

SEQ ID NO: 1009281 - protein, 204 aa, Homo sapiens
VLRSKHLGVRDFSAKCVSVPGAVSEPRRWLGGGPGQYPHLAPTYAAVNALCIIGTEEAYDIINREKLLQYLYSLKQPVRLLSHACREIGPCGGRENRIVDSPVSTEAMPVSNIYPNRHVATLSVGEPREDVNVCQELRTGEAHTVLASGNLDVTKIIVPDLFEGTAEMDSKVSELEKVDIGRGYQGTEAQWMRYTFCGLCVLVD

SEQ ID NO: 1009282 - protein, 236 aa, Homo sapiens
RGVACATLDDQLRVITRACAYIQRLAAASAIKVSGVISVVLNVLRIINEPTACLPSPTAWTELAMVCERNCAHQFDLGLGGTFDVSILTIDDGIFEVKCHVRRHHTGCGRTFDEAGCVNHFVEEFKRITQEVTSRQNKPSREAGMRNQLRRGPNEDPVSPGNPMPDLEIRRPCIEGIGHSTGASAGLRFDGADASDLSRKARVEPVEKALALEAKPGPRSQNSVILDLESGGYTEI

SEQ ID NO: 1009283 - protein, 209 aa, Homo sapiens
MHEREVLHEALEENNNFSAPGGRRSSTTRWMLSNGDPLGTPGLHCAMRLREKELQLAEVRRNKEQREEMSWLSGPGTGLAPILRRNTFGFGFGFVHLCLDATFVPPPPNPSPAASCFSSATQRALPCPRGESLTTASPAGAAGRETRSLGADSRPGAAGSPRGPCERGGGDRGKSRSVAVGSLGPYAGAVWSATCRVRAPVLCTRAALA

SEQ ID NO: 1009284 - protein, 68 aa, Homo sapiens
ATQCNKRPLWLGVVSPCDVCAFEINSPVSSSDACMSGGAGSRVSCIGERWCRYRIPDPNPFRSRRQPS

SEQ ID NO: 1009285 - protein, 202 aa, Homo sapiens
MDRTISDFGLRTPSVHLAWYMIVFRDGDEGSSDSWHGGNELMSRSWRSVVPFYLVMAHWIRRDGIPKEGPEPLDRCDSDPFRMIVLCCETIADTSSPLIARVACVCLEHPDYEHFVIVPSVITPLVHLHGPEISCCLGVLGETPMDVSIDHECRQGLRVCRLDAVCTFVMISTYDKVQSVNLPVIQPGTLGLGWKNHDVRGQ

SEQ ID NO: 1009286 - protein, 237 aa, Homo sapiens
GAAIAGARVGLVGAASICCPCAGACLAASLQVVLELAQRPVPHSESQQRCSSIPVDNGPKCDVSVVHVPILLEWKAKPSFIYTPEVSPILPDPREVTIPSYKHAYNILLVILVPHRWTVNAYRPIVHVNVNNQSPDIILLTFRDITPNPRPTCDSPTDGSCGTRKRMFPLSPTQNRTRIDSGEPGPVPSRVATRTFSGDSWLPQGYRDPGSTLDGRRPGISPGTRERIHLARPAGAA

SEQ ID NO: 1009287 - protein, 75 aa, Homo sapiens
  misc_feature (12)..(12): Xaa can be any naturally occurring amino acid
GRNACQWHRTCXPGSSNDSSARSQERAGGLGPRDATTSVSESLPTLSDSDPVPLAAVLEINEDTGGFESLAEPFA

SEQ ID NO: 1009288 - protein, 134 aa, Homo sapiens
MARTNVRRALLMSTGVESLPQTAGHGKAAYVKSAPIYAGGGEEAFYRLQARDRERFEKIRRDQYSRNVAALSGSCPSMQVGEGDRAVISRTELRFQQRSHRCCCSEASEAYLVGLFEDTNLCAIHAKRVTIMPK

SEQ ID NO: 1009289 - protein, 282 aa, Homo sapiens
AAREIERHAICVVTGSEEEWGLKRNECPHVGERRVPSRSGGRVSVLCVCGVLHWLLPVPGPGHIIGRYVRFFHDILHTKYRAATDVYALMFLADVCDFIIIIFGFWAFGVSQALGPKPSVQQMLSSHRNIPCAWLPLTCALLATEALGWPQDITSSLQTSRYPRAFLVIAADPVSCTMVVDRAHLPGGKNRAVQGWPSSVALVLAIHLWDVLHPGRRRLRGLFKQNVGGPASGSFVKLLLLSALSGYQIRLWVPDPDSFGTFLTKKVQVIFSLFLLPGVTGC

SEQ ID NO: 1009290 - protein, 123 aa, Homo sapiens
VESSMPCPYAVPYAVGLNKGHKCDQEREQAQAAADVRWASDKHTKFVRDMIRGGVWLCPVLMRSAMELLKVSKGSNAGCPHNLVYGKGCVDRYHRAYRGSVAVSVKLLFLGRREERVLHQGKT

SEQ ID NO: 1009291 - protein, 296 aa, Homo sapiens
WAAGESWTASGPFSCPICLEPLREPVTLPCGTTSVSPAWCALWPHLWREWSLADPVRRGLLPCCASEPFPDVLQLREEPTRCPSCCSSCQGSGPRVPGPARPWPLAPEPSAPSALPRCPGAVGAPEAPEPWPAGEGASALRRVAPRARACPAELVPCRHPWTSTIHYRPPGEDLGPRNESGSTRHPSARTNGLGARTDWAWAKREEAMVTRGRSITGPAPKAAYNSRQRENRQMFVVVAEARLRPTTMESTRGDHRRLGCTGLRSQGKPPQPYKEKCWGTRGVNEFGGLRKCQKVP

SEQ ID NO: 1009292 - protein, 149 aa, Homo sapiens
GGRRRTVNLSRVSSPGPVAAAHIPCSCGRLTFPAVEWPFLGQAGRPSFGPSLECWCSRGLRGPFTAHRRPAQVGRLSPSAKGAQLELEEMLVPKEDVPQAPREAGLTGPRMILAQDLDSGKRRDCGSTRNPTQVYRPGRYGGRGARHGG

SEQ ID NO: 1009293 - protein, 258 aa, Homo sapiens
MSGTSTWERLVSTSHLAWALAIGGPLELGQAVGLPESTAPLLTTLWSFSVERGWETGLFEAFKPPEVSGRSLGECHIVLSRPFPIPVTSSQGPKSLSAPRWCVCPRTSERFGESLPDISERENPKVKVPQRVRDKESLCTREKSQRGAVTRQRHISYKVGVKIKRFSTRFSPAVLSPRMWKNHAFYKRCICGRRYISPRKGAFSTTRSTNTQLLSTRHSTRASSFTGVVVSHTRRPHTVVPTRWAADNKRLGRCPQGN

SEQ ID NO: 1009294 - protein, 348 aa, Homo sapiens
  misc_feature (67)..(67): Xaa can be any naturally occurring amino acid
MVLDRKNSNCPQWRQCHSDTRWELIKDFTLLSRVFPSCLKASRPPPPQPPPRIRPPPRLWHSWYCCXTRTTRLISCVCLLGQSEKPPICRPVPFAPVYTSVQRRPLHADNHWPVTVPREDCPLNTASVKVAVDLCAQVHSVRRDNSYRRPRRCGTMLTCNSAIFTHCASAENSTLNTKIGCCRVTALCGRAFITHFGFIPHLSLIMWHHLGGPPINTTRVGHTPLKRISACHLARRDSASAAPPPVCPFAPSPTASLWRWPLEALRGPPGLTPPPRYPWRARCPRCLVPSGAAQQAPVAIAQAQVAIRGGTTRVPLCFPQAHSLPAGFRTFDVWPLWNARRCYGLDEP

SEQ ID NO: 1009295 - protein, 307 aa, Homo sapiens
ALFLLASLLGSGSSLALVLGLKECTRARQCGAPNVPTASDCGAVKRCCQNCLDTMPGSEIPYPCEYMQMTVVSGQVVIELEGTIAHLEEETPCEDWRRAVIGLPEEAKPLSEFMHRRYAGTPYPFPVHSSGQSFNTELTLTPVLEGRVSAPASPLRHDLRSRPKQGARLGTQLELTQENVNAVAARKFHELTKYSGEQWIQMSCVRTPLFTEPEATTPPSFVSNPSERTSGPPRAMNNWHHHIRNSAFQLGGDVLLCHDELALSTHGLDLDTIPRNVARYVAPTVPTPMDPRARCGLETIFNGRAFL

SEQ ID NO: 1009296 - protein, 115 aa, Homo sapiens
RGSHGRVAGSEKTRRVKSASSPAWAGSAPPGSGLDAGSSGGHVAAGAEGRAVGAQQPGQERMAARGIPEAQQLGTGRMTTDQAHPRPSSPTSRRPSLVTCQSPAARPPPPPPPWL

SEQ ID NO: 1009297 - protein, 187 aa, Homo sapiens
GRSCNLRSGFPPVPPRARMAAAELDAAPGERRQARGRPLRGSGRAMGRAPPAWAPRVGAGSAMSSWAPLESRVLSVAPSRGPLVASLCRLGSHAVGEERLCHGEPCLDTGSRPGASSVILAPSTGRGFAFAIETFLCSGGGRGSPGLLAPPLAAFGAPDIAAARRYRGHAAGGPGSRGVAPGQGARK

SEQ ID NO: 1009298 - protein, 318 aa, Homo sapiens
MPEKPGRGHGAIRETSEGLEILSLPQWMTRAFSFLYTFREGHDRVRVSGVGQFQSLQQNWSPFWGAEGSPGGRGMSSGAGNPFKPLHVGLQGTPGHWFPASSDPQNCRGSGPPPGELAGTTLSSSRLNAAAGAHLSGGTEPGGTCHDGAGWARRGARTRLRRAWSFAGAITSSRTYRARAVVEPTWANAAVRQSLGQNLGGSKTSAITQAGAAMAGITGPSGLATHKVHPLSKGPDPQWALRTPPWGPPGPRTLPSIGVPIRRQALTEPRWPWDRTLLPAAPTTGGHINPRVALNPPAVSSLIRCPKGTHLVGCGNRR

SEQ ID NO: 1009299 - protein, 155 aa, Homo sapiens
MPGSPVPLRGDPDALLWGLLGRRCLRRLRPWLTSGDFANQLKTRSPVEDDIHCHDPCGEILKGLDYLHLRTARIPPEDIQRPANRAYFSDPGVDCARWRTFWGVDRASFTRPRHDFLDGNYHFAGCTSPFWDVAPLTCPSTGQRLCLHDFHYGHD

SEQ ID NO: 1009300 - protein, 118 aa, Homo sapiens
GKAAKEVVAAWGSGNPFGLGLSAAGRRHSRGGWPIALTFGSACPFSLVTISHLTKDFGLQFLTHFCVPLTEMCGGGQLALSFGPDLNVLRELSQAPEVSPRIFYEFEVTVFEEHVQKV

SEQ ID NO: 1009301 - protein, 353 aa, Homo sapiens
GASPERVRTGCVEELQDRGTECQCAQDRTQPGLDSLGSQEWAHPFLTTLSEALPPHMRPLCPLWPGRCRLLLVRGGAHMEVGTCPVKQDGLMGLALDSPVCTRFRTLPPVWLLRRCPAGDWLLGARSCALFAGDLARVPDGCSTNGAACWRLLGAGTRYPERLLPGRHRKALACAQPGSPHNRGRTAVWTMLEGASWGASQCHSPRIAFAQGHGGAASRDSDLPCAPIGVTNKLLAHRARPCGGTALPYMTRKHRPPMSLKGVVQSCSLSSVIFRHRYWFDVTHTQVIGMFTLYMITSGIGTDHMWSLGPGPIYRYTVPGMIHTVTLSTRVILSGVTKRYPYIYPEHIIVMWI

SEQ ID NO: 1009302 - protein, 224 aa, Homo sapiens
MPTLAPARLTVDHHQSPARGPLSICERWRDNLLEHTVAPPEDDQYVPYVRMTCAYFDPPVSVHGNTSRLLAGVWYKVWQRGARAIRFPAQATIPACYTALSRSNPMVLDPRSRLRCEPSILCGTFSASILQGQSDWLLYPLQWLPGLQNGMHAIDSCHALCHRLPIISRELRITRLPVDEGLSRYGPCLVSLDWQQLKPEPRVLEKPRRYARMSLGAAETVRDF

SEQ ID NO: 1009303 - protein, 238 aa, Homo sapiens
VLSALLGNFSHWQSSPASVFWLHSALSSLGMLQLFRADFIYYEQISITSDTTVMTILRTLCGFPKIIELLLTARYPKDDPSNLTLMRLTACAAWLLRVSPGPASLPHRLLPHHNAAPPSTRVPIPHHLAIWPTARPILLEAYPQLTFIPLNAAPTYLPRARPFSRRRAHLDTPRPIESPSGHGPLCHTTPSPLKLPYHQFRRQQTALQQIPRQQSLASATYAPIRRSVHRHREPSPSD

SEQ ID NO: 1009304 - protein, 241 aa, Homo sapiens
  misc_feature (241)..(241): Xaa can be any naturally occurring amino acid
WGLIHPSTEERTKKSSNGAKKRNQARYQDRGRMEWAQGLERTLWCDSASRNSVTTQTPVFYNTTINLLLQGVLVGSVQRTELSSIYPCSVASLCVTRVLVHVRITEYRNAAPRSDRDLAPERLPAAHSFTDLVRQWRFRRPLALSIGPSGVTGASSESLQVAQMVSGCPFVLDTSYASAEKGVPWTSRGDDWRPRHYLYTLKDLHRRQASFRYGICQNIPEGFYGTSVKCLLNVGIVEANX

SEQ ID NO: 1009305 - protein, 266 aa, Homo sapiens
TGQTPSFSQSSVAIRLTGTDSIVAVDRQDEAKVSPSGIDVFDDYIYRCAPIIYIVSSHPYFGPPLVQPDRGPDQPLTWSFTNQHKQPEVTNPVTAQNMRVALPAEPQVGLSCTCSPWGSRPGPTAPFVPFRLFQAPPQIVSPARLCGTLYLVDSRSQPVGTVFPQCTDASPKCLLPTPANTGDQGVNLGPAAWEHCPQWQGTCDCYPLSWHAPRAGAPRRFNGPKCTPAGVCGLTGANNKHLALFNQGNQPQCRLPTRAFLGDDAS

SEQ ID NO: 1009306 - protein, 149 aa, Homo sapiens
MGLHSGATSLGLAFVQPKPGQPLVWSSYKDCAILFSGWRNWRGDHNTRGLPRGAPRRLPLWGATSETTTDDHTLRPERQLPGRLVNAGPAPENYHVDPRGGPREGWTALGTTQGPLCRPSSEKIPSSPAFAFPYHQTPSTREITRGPNR

SEQ ID NO: 1009307 - protein, 199 aa, Homo sapiens
MTKAIGHRLTMWLVTPNITRVLAPKNFAAKNPPLRRLLQLRPFDVAPKLPLWTFSKCGGPSLLGYNAQTQNRTHSTLGPSLLKLDSLIVSLYSAKLTPGTGNFPPLFALAFGTGLSSQALWTQRLGRLCWTLSTDPTSVPGRLPLCARPLSLGPPQTWSSVLAWTPWPLVWHATHKSGCFTLLRPWPWILSAPASLASH

SEQ ID NO: 1009308 - protein, 126 aa, Homo sapiens
GQSSELILKRCLPIPSSKDNICLSPSPYVESEDAPPEKKIKSEASHVQLKKCQSRANRLESLSPPKTSDSEESERRINHEQLLELPVAAMMRSDPSFLRLRDHVPELVQNEKAAKVVTMRDRTATE

SEQ ID NO: 1009309 - protein, 181 aa, Homo sapiens
  misc_feature (27)..(27): Xaa can be any naturally occurring amino acid
MATRASGPVACTEYSNKSLGPPVTTTXFYTDHGCVIPPENSSPYARKRKHVASTSLGSVISCAAGIKSYSQGARPRLHSVILNTHSAPGFEAQCRTTRLFRHDTTHMTVPEEHLTTRIVHRGTPFGHRAIGPRRSLFGNLKQHNFQPGRSGSRHSKLAPGIAGTQNAGVILTAVRPPVASN

SEQ ID NO: 1009310 - protein, 256 aa, Homo sapiens
MRRRRGGLAATVACVANEFDICFTVSAEKRAISDASGLVLECQLHQMWLPVVRSLSASNERHYGGLRPVSIYSRNLLRRLGEAQGEDSWTALPIDVPSTSDGGPTILSTDNISKDRRYADLTERSAEPSCESLKDTSCQSSDPSGMKKYVPQIKEGETCTDCSHGNSLRGIVKHLEGLSEEAIMELNLSKWYSHQSMNWTRTLKAIKAIADSGGLKRTVRKALEAVGAQGMGTEVEGRGKIIVPRRTLSGRLVLFA

SEQ ID NO: 1009311 - protein, 211 aa, Homo sapiens
MVGPNASCGQRATCPAILSKSLGPCRCQLAAAIWVLFHQFISALQGLGGPGGPHFLEPRLKWLGMKPYSLTSPNKLWAHGANPRATPEVTGCRACEKQPRVVKPVLTRSGSKLLGAVASFDGYPPIRGTSTELPRNFWRKVCQKSLNKLPGGSTPFTSNLRGIVRTKLEHCILLINQMINGSFFHKDPVVTFMRPPDPRTPEPPHHDENVG

SEQ ID NO: 1009312 - protein, 310 aa, Homo sapiens
RAMTLMTTETGSTLAIIAPRRYWKRGCRSWLADDVMQPARFWTAKETVVSGGHSPKYICRAQCAMAVWCSSLEEEVPEERTPYSLSCLDSVNSINRAAMGVGLRDMSFESSYYSSLGLFLSTENATVNAGLAKQALVALVWRLSSGELTWSSQHPSTRSPAASSSWTLSSSPVAHLEDKNHFNANCSFWNYSERSIAGLLVDPRLRLVESNKTHTTCCLQPPHQLRCAHGFTVRSSSGRINELRAVGHHLGGPLGIYPWSRLAICIFNLLGILAGGLQTRTATTIQENLVIKPFPGLSLLILVPINKSQL

SEQ ID NO: 1009313 - protein, 322 aa, Homo sapiens
MTLRRLTFPNYWSNVVRFVYIMNTITDHQSQISTRFGLLSPPLTHEPQNVLWRNGCLCQDKDPTQHKNEPENIRTPQKPMPHPPGRALQASDEQHWPDTAPRLGQRTAEPPSAERIKPSLTLTTYTHLFCGPGCENIPFNPLCLGWSTTTTSRGQLPLPPKQVPEKGFEFQPGHRGYAYTSKLPKFGSPAPPTETRQPTARPHPENGGSEMGHRYEPLTHPSYQTRTREHTSTPQTLSPRLRGKHQRGELRPEYPPTRPPYSHSHPQSPVSSAWRAPTVSPTRVGDKRLSRSRGTAPLGLALTAQCNPGATRRQGPPHTRCA

SEQ ID NO: 1009314 - protein, 269 aa, Homo sapiens
MTPVQRWGPGVPWWPWDGEPRWLPLEVSGSGILVAWWSAGLWTGGRGLRPAELAGVQWPEDNGVDALSPKLGLLWSHDMTDQGLLDGRSTRLRPVAQLTGHHEDSVALVVSLGVPFFFNGIRRVFWNRLIGQVARNRMTPVPVPSCSQGFNWHFWSAYPGDLPTGPTFGLIGRGLMLAYADGHRAGTTLTQFPDSASPQFEFPWGSKWLLPKYSTPLVAWPCNRALTLGRVHNLTRKFLRRKKGHTLAELAYPPIAPHRALEPHGAPGD

SEQ ID NO: 1009315 - protein, 132 aa, Homo sapiens
  misc_feature (29)..(29): Xaa can be any naturally occurring amino acid
MSKRGTLIFTRGIHILGAIVIAYSGERSXIGDRINRSRYTERDTWWHHTGGSYYRHLAPGNLFNKWPIVGHTTARVYSGGTRPLPKGATARAAHLALTRGAKATVVTPVSPRGANHYAHTTGPWSARKILHV

SEQ ID NO: 1009316 - protein, 181 aa, Homo sapiens
MACWCVCLGCLLRVSELVFRFRSAVALPPCSPQSSPSVSCVLCGRAVRARPHSFWAPVLGCGGRPFFIRSCASTTARGLPPRSRRVHSDLGHLRAGTAARTLQSVDFATVSPMRCQPHGVLDSGPPKCPESTQILRVDRTMSFVAASPHSCSHARPTCGPASPATDGQSSTDRPIRSSASR

SEQ ID NO: 1009317 - protein, 290 aa, Homo sapiens
MLESRAGEQLAIVFDQGHVCHRKVMLQVHSVLHTIHVVHAFVLATLTTCNGFQAKWSNIQSSGRPLRYKAQEEGRMEHVQVSTSIPMSIPCRWGHAQSRLLFARPHTKAGKGETKLVVPTLESTLKGTRKTIPDPLDTGVPPKVLLNGHRWPTLPLKHGGQGTESGRWHRTHEGCLCGIDKHLRICRAPTSAAGRLGHDTDIARSKDHRPHSKSTELGPSPTQKGASNRRDYPWQSAHTWYVTGIHTWQTRYRGGTYKSRERYIGPRQLDVRMEIQVGLSAIELSNEPLK

SEQ ID NO: 1009318 - protein, 635 aa, Homo sapiens
GQLSTLCSSCRLLPSPFSLPGRQLEERRSPALCHLTNCAPGTVQTLCFMPTADAQPHPEPDCSPYPTQISGRPPRTPRGPAHCAWRQLAPHRTGTIHYRCWRRTDAPPEATVPVEHFHGTPCTRYPHSRNAHAPTSASHPNNTGATGNHLRKPNATSWGQPQPSTLCLTGNRTALASTVWAAPRGRHAATPTPPTPGPWAYETPERGPTPPVGNTPPDMGAAPKPTGTRTAHPQLGTRSHSELIQATLYKGRQTPHHSSNPTPPPVAAPNLGNSPHRSPQRFPKWSDPWLWPYRFPPLFPYTLPPFPMGDRPGPTTKTISAPNSYRRSQLWDIPLSVREHAKPDGGGYPTHAEPHNDGATSRPPPLRLHPRKPPGRRLTPRPPPSPRRAPETTWPPQDSAHWPARSHWGRHPPIGPPPGGAPGRRQTRAMHNPPRIPRSNPPHSQHQRHHTAPPIPQLTQSPRAKRPAAKHRPQLHTHRPTTFAPTPRTTGTPPRDRHRANRPRRPRNKHTLAAGRGPGSTGKQPDFPEPRDHSPHTPRATRRPSTPANPRAPRPVGAKNAMPSRQRRTEGHSRSSRGTPQPREPTVQKHHHLSLGYPSRASAWAGPRTTRERTINPRRPALGPPPRQLSGDPRG

SEQ ID NO: 1009319 - protein, 199 aa, Homo sapiens
MVELRLTGNIREREIKRDVAHGGGPPRGLNAEAERQATGAKALNKWGRKRGQRGGRWQTRGPHTNNAVRNHTNTSTRQAHTPTDKHPDISTAPHREQGERSASTPTANRNSPAPPQYNTIRRPNTTGRQTTAQKKKQTQRKSNTPPHTQRDAHRPTEKTHNNNKRPMNTTEQAKDTQYSHDQSQTGPQRKRDTRAKRHP

SEQ ID NO: 1009320 - protein, 157 aa, Homo sapiens
MRTNGANNHQTPHPDTAVHNTAAKKNPPQATPPDTPHDGRLRTLTVAQHPEPAHDAHQRLPPTDTTNADAGASNQMPGHAENNPRAQTSKMDYCHTAIPTPQNTTPHNTPHGTHHRTRRHTDSTRRNPAHRRKPAPPAQKTTAARTPMPTTDCPRSD

SEQ ID NO: 1009321 - protein, 251 aa, Homo sapiens
MGRDLGEPEPSPGASPRTHEPPDRGAPGQQPRQWAEPAARQSKHERDASSVSSRATVMLYDRRQPSDGSLLAPASPGHSARCQIYHNPTANFLSPSWRQEDAARTDRWSYNCAIVLAVSKYQPRPPPNFHQLARTLRTGPGGPRTPAQPSEAHAGPQHMHRPAMLPTLPLKAASERDATGDTHASPTHCTKRTTPHSATQVPREHPRLTHPTRVNRKGLRRHATSTQADTVHEQCAPRISYSIAHRKRSHD

SEQ ID NO: 1009322 - protein, 270 aa, Homo sapiens
LDKLLLYLRIVHSLDYYNTCEYPNEDEMPNRCGIIHVRGPMPPNRISHGEVLEWQKTFEEKLTPLLSVRESLSEEEAQKMGRKDPEQEVEKLRSPPKRPGTGAHGLRWPWCPPTCGQEYPEGLLECVRKPISSTSMQRKSRKRQKEVAFFNNFLTDAKRPALPEIKPAQPPGPAQISPTGLTPGLPYATPDSQVLMTYGQPGPRSWAMELVLSSLQFPQEGLHNPDARMEQAKELRRLPAAREATLGKLGTRCYEKTQGHSGHNGTDAQT

SEQ ID NO: 1009323 - protein, 477 aa, Homo sapiens
EPWGIDALLPRFACALVQEQLCPLGAETRLHLPGAARDLSWCYQEHAAGMVATVLYWGILKAKVDPCAHLSPVPCLAPVELIYWQPASELHSYLEGTDCWRPQALQRAFCRTFAHALYPHLPANLNETVPVPPLQEAGLQRNTQYTVLPEGFWSLRLSTRTVPRPIEATGRGPFQAYPEDPGLLSLPILRNRPSPEGPCRNSFGPHSLLGASQQHHDGVPRTQGAPCTSHPYHGIHQQRGLGLRNLGLQRLQATLAPQVRKAPHNTRYSRRLPADTYTNREYLARERLPLFSATRTVIPRSSPSLEIRQSCRSRPRNCANQKSAARMNRPTYVGHEDCRLFVHNNSPPDEAHSECVPIRTDSRVGAPSHTNLGEVKLRSTREHRSGHVCFVSLLKWRSERIADLVASPRNNSEVKQHYHLGAAPPLTVPSDRVLAPRNHTEDNHVRVTYLKRGTQLATVPSSARPDFGITFVEPARD

SEQ ID NO: 1009324 - protein, 493 aa, Homo sapiens
AFDRQLCVFGGYDAETRKTWRLLLRTFNITGQERSLQTNELPAVHTFISTRHNKAMAAQTPADITQRRRDAGAAAAQSGHGSHGGRMIPCNWLTTGQPLKTPCIWTHTQRGCNAETTHNRRSYQSHPSDNRTAATRRDPDPSRHLQRESQATLPYPPQTERAHTHGLTAEPYVARHYYARSMRPPIPILSQRRAFPNTALPQLHAQTTHTAYLAMAIRLEHSIATPTRQRLRTKRASRLTPMEGNTTQANYNAPQTTIHNPPHTRSDTRPPRPANKTHTENHNTQNWDHKRQHYTQALLAPKHGAPLQNDTHTRNTTPAQNNTTRHYSPRHTQKNGQETQLRNTRKTTLETIREQAHTTRDQEGKPENPSPQGTEPPPRTGTSTRHTGQTHTHTTVKDRTQATTIKRDGADTDSTPKRTTETTHQSTDSNIQALKEAEDIMETDSTQDKTHNEGTTKEERHGRRLTDQQQSVGGQETNRETKTNSTKERTRRK

SEQ ID NO: 1009325 - protein, 173 aa, Homo sapiens
  misc_feature (120)..(120): Xaa can be any naturally occurring amino acid
MTSVSTMHCLRKRQMIPMSAFSDAQQGLRTFVMAFLKLQLLPRHDAPLEVPDAWYHSDSCKWVLVLESTFSSLTKDDDKVEGIGRRSLKAVFMTPDDGDADRLWPPLTIKSMCMQTYERXVLPSSMNVCNTGHIRNRGALGAQSLEISGTCEHALIPLVLRILKGAESLHRGG

SEQ ID NO: 1009326 - protein, 243 aa, Homo sapiens
GSEGNELFRGGDYGVRPGGLHSGPGSGRDAPGPGRSAPEPGRLPPQAVKITDKCMKHDGGANAIEKDGGDVKALYLAGCQCPKMNAWCLPGPVLSLTCMRCVDAWMPKNKCFRSDGLAGTSGGQIQEKVRYMSCDVMPKWNRCFRYCWTQKSKGTEKKQKASQNLVVLARQDAGAEKIFRSNWGSALAHVYWTMGEHCAHAGRPLGTLGWDLAPEHSVTDSANLSLLRTRHVRSLLGVESQVC

SEQ ID NO: 1009327 - protein, 126 aa, Homo sapiens
ALSVITCIVGTLHQLPPPSECCGSMCICVLVPAVLIACGWKLFYVTCAACLLAVHELVMCLGEGEPSSTMMHMWKVVLKTFSLYNECLLDSFHELATTRWWSCSMMSCDVMRGGGRRSGYFGKGYM

SEQ ID NO: 1009328 - protein, 72 aa, Homo sapiens
RSGAGGGRSVAVVVPRELEVQLGFPRHPSTSQSQKIRKQKKEEKKKRDKTLHTTRSREQHKDIRKDKEHKNI

SEQ ID NO: 1009329 - protein, 164 aa, Homo sapiens
MLKYKSPLCENSEFLHLVFGPPGLQCPTGRRDTPRSLHVAHTSMPSRGIQSHILLVPTSPPRVYLWRHFTGRLFGANNSPRAINRGTIHTTHTYVGALFQPICCCPPAAYAFGTPPLTTENVNSRVACRVHPPNKLLAQFNRGEFDPNCARLVALNMAHTQRTT

SEQ ID NO: 1009330 - protein, 109 aa, Homo sapiens
GSLEFFFSLGFPRNPFVYLQQLSRKKVEWAPLLSAQGDRTEAAPPWPMALLQSSLHPSPGVVHPRVDKKDVLFNHQGLDFGETAELGTTVYGPYQHIAPPVGGSQVSER

SEQ ID NO: 1009331 - protein, 195 aa, Homo sapiens
EQLGSALAEMDRQLSEAGRHPVCSAILHEPGDEESVMLDLAKRSRSGKFRLVTKFKKEKNNKNKEAHMYAWEPRFTSGWTEEVAAWLEITSVSVSISDIFTLVRLSGGSELLHLERRDLMDLGACTKVVPHVRGSCVRIKDAGAGSVPRASRPSLMSSSSSVALHYPPSRLSALAILPSQSLWHSAVLLHTEALG

SEQ ID NO: 1009332 - protein, 49 aa, Homo sapiens
MRVRAQERAIERASKYTPCVLTGVPSCANNLREIVLPKTLKGTCGLGFY

SEQ ID NO: 1009333 - protein, 77 aa, Homo sapiens
GCAGGCGGWQAENNKPRSLEPGEAGRDVDGLTAVRGLPECPDMLLPKSPSPGKSTPPFILTEEQGHNAFIIQTHRPS

SEQ ID NO: 1009334 - protein, 179 aa, Homo sapiens
MALSPAVCLSPPTSSSCPGLPNMAEVAGKRLFNKKQHKNSKATLTPDRAPKAATGHRAHHRAPHARTRMNPKQHPALPQRGPNIQPGHPKIGEARNRTPAINARGYQPLAPLTRDASRPTPPAHRPKTHRHTTMQRYTDSRHTTPTARGKTQTNNTRPKTQQASDDARPAPQTHTSAKH

SEQ ID NO: 1009335 - protein, 65 aa, Homo sapiens
MGKGQRDGSAHDDEVGPDEDRRRHTERKRVEPRGEDDGKQGREKRGQGRMDKRRDKRAGTRGREI

SEQ ID NO: 1009336 - protein, 209 aa, Homo sapiens
MASSPGPAIERGIDPLDLQPWRSSRRTDALTPALAVIFHTFEDESDVLHRFDRGAPWRKTRMERSDQSELAMGAGLRAIPDAGRTMRREGGICIMRHVDDGDGQDQIEEPRGPCCPVDPVRWVGPQDTKRCGDEAAKIADGAAGSDPGATLRPLVQKDGPGVELCVTGMARRNAMNCRDHCIGEIWRKLDAHHPGDLLQLYPRVNAWRE

SEQ ID NO: 1009337 - protein, 276 aa, Homo sapiens
MRGPYGVVRGFPSKLKGEIVQKCPEPLDVLQDEGVRMSVKVRLHAENRTIVVASRDRMTSHVWNRYNRIEKEDSELASLIISNTLKHGPWDEASAWHTRASCCHLKTLLMSVLYPHRNTGHDGRVREVCVLPHVSHVQVAGRFTPGTFSYPVSRQPSGSHGVLVVTDPRADHQPLTGGIVYVNLATIALCNTDSALRYVDIAIPCNNKGAHSDGFDVVDCWLGKVLRMRWQHFPVNTHGMSCLICTSNRDPASRFAPRRARLLAEKAVTKVGIPGE

SEQ ID NO: 1009338 - protein, 123 aa, Homo sapiens
VVLLAWTPQCPSVSLVPKMACFPLASIPSGVRVLSLVAGNQGPLMPCRQVHLAANVALVAAETLCAFQELLTVDCVFRAGGIRNYRISRGTSEHDAAAGLGMFYCVSRNDTRSHTLERKHAYR

SEQ ID NO: 1009339 - protein, 102 aa, Homo sapiens
VKVDSGDSEVVMGLCSSNITLLMCSAYRNQTASSTFCAPILSSSSIADDTRFQERGCLQLLIASYVVFIADEFIFLPGNDTRGRLNEGCYLLCRSEAIQVIY

SEQ ID NO: 1009340 - protein, 196 aa, Homo sapiens
AAAVLSSSAGLACPLLIVFRKHGLTYVAVSDGVINVFTDMKVRKSSTPDEVKNRRQAGVSALSEDSEEHHPGVRAMRSWWSDEGPTVEESLPPTLSRCWQLGTWRYALYDANYEMQWMSMKDGSGVYRSETAPSLRPLNIQVIYARFQWNATQQNEADYGVKHELQAHVLRRRSRTGCTHGRGSLGGKGGLSLEGQ

SEQ ID NO: 1009341 - protein, 255 aa, Homo sapiens
WAESGWLSRDLVVDSRNPEEKRLSGAMAVTLDKDAYYRRVKRLYSEWRKGEDEYANVDAIVVSVGVDEEIVYAKSTALTDDGSLVMNKADTIMVLDVSDMKVTTVWHSREKSGSSLNTELPDTEGQVRMANGAPWHHSCYYGDYELEKLTKELRLLTPMTRKPVYRAQGTALALKDLRRVQATHAPQCPWQATLHSERSLAYTALCPFQYLTYIGLLAPNSVAVFTRPRGQAHSSRTSVPDLASTGNLRSPDARL

SEQ ID NO: 1009342 - protein, 288 aa, Homo sapiens
GLAVVSGCWSAALQCRVCWAPPSPASALSARSPFRQLLQPAPRVCTRPFVAAQGALQDSEAGSGLLRLGTLACVVAAVSLQSDWDKAFCCIDLSYAINGRAKAQDFQKHKTLPKMSGGWELPLNRDRQRQLRADNLCRATANLTVTFTIDHRIPPTIMMRGGGTLASGQRLTEQESLNLTSNYPTSVVSTVINSNDDSATKALMGLEPCHYTTTDSTASDHTTDRIASRSDLSSPLIRETLAPTGPTLRYPTWPRNPYVYPTPGPTAPLCLRAYCDPPQLLRLPDRSC

SEQ ID NO: 1009343 - protein, 409 aa, Homo sapiens
MYVVIRPYVLEIETYVGLRPTAGLRRAANDLRMGNYGPKLGYKRDVGVDGYIETYAKYMTPSDRNKPFNGMRIGEELAGVDKTTHKQFATTGAKGQKWQVPTNITKTPEGAKQCPKKTTKPYEEERKRKHHHKTTAYNKKRKKKKRESRGNNQTRRTREKRREKKTKREKHQKEHTYGKKKRTETMEQNTTAPKQKYTQPVKTQSQQQTGATGTESIAHKKNEVARKRTSKQHNDCTTGKQHIKPMRDKKPRNRHRPKKGNQNPRQQRRTNKKANRGTYTKEHQTGASNPKTHGAKTQLPKYTSKQRKTHRKKTKDTRQQITADGTDSRTTRATQETQQEDTDARNRKTDNRQKKETRQSKKNTNTEERGESQKEQGEPTSRWTDPNKREANQTIAQTSSERNTTPLTP

SEQ ID NO: 1009344 - protein, 57 aa, Homo sapiens
MVPICREVAVNSALHSTCGWRTRKCSSVVVYRDTTWIPSRLVVLLAWPCVVHLGVPY

SEQ ID NO: 1009345 - protein, 162 aa, Homo sapiens
IKKKPRKKVRGERREKKKKGGKGLQNTGTNSAQHRDRPTCSKTGGASKRTPPRRRAEKHQHTRTTRHQTHPRNPHPRTTPSFLLSSPLSSFQLYLTTQYLLPQHYTHPIFAITHPFSHYPLSSPTTLTTHHINIYCCVSSLLSLLISFPTTTPNTSFPPPPT

SEQ ID NO: 1009346 - protein, 287 aa, Homo sapiens
AVRDARRVLVSAAGALWVLDDVQAFRAQKLVVLPCVDSVWTNEEASASIIVNMTDSFTEQADQVLLRFGKLLGDRDRWMQFFAVAGWMAPGAMANPSLSLQNCDLDVERRAYGSSTISRHLATKHLKEGGLLTLAGAKAVLDEELLGIDRVYVHWPRDAVHQSLARDLARARISVMPVQGEDAHRMCSRLPWIPQMNRKSMPEADFSSWTPLEFLVETFHDWITGKKRASSVKPNPGGNHRKEGLELTPAYLKASSQCLLGACRKVTNLSQCGLSSLVLLNPCLVYE

SEQ ID NO: 1009347 - protein, 405 aa, Homo sapiens
AILVRSKVGATVFPERLLRLASISPLTTDMSRDQCSGVRWRWRWWLPQSVEEAGGQWRVIRRTSVSSSLTLAWSPSDVIDREPRIRVLWSRGREQVAEHFTDLRHYLHIAIAENEPSLGEALPKRGQLRAPDRKMSSPERDQDRRVQSVARDRRSRLASRGRRPSAARTLSKARSIASGNRGTPHPGRKACGHHTDASSVEPQTRHVQQAIEGAPARVRGQARTPSTRRLQSPSDPPGDADRQTLHKEAGDPYQYLHQSRKARHAVTPREVPGTRVPGPKQRRRKESGVGIPRRGGNKCLEGGPDKPKVGSPGAIKEYAQFRRRPTAAKATSGDRQAGQGGRPPSVWGQYQDSTTPGTLCTKQRQEFPPRGGPPATPGGGTQGRGTTVVGKTAISPERREGGVYT

SEQ ID NO: 1009348 - protein, 286 aa, Homo sapiens
RKKDGSGPDRVASLAASLRFVSGPRDPERGEADRMTDGARDGQLESLLGSMCSAGRNWTEGEVWMAVADSRLEAAEHSSADSGLEPCARTPAELAGAPGGQEGLGRSTAWDVPWFARGLFLVSHYHGLERNYRKCATRGIERSALRGVLDWTQQFYQADGGLGLRLPRFPCALLLPGSETVVDQLIPVLMKLLVPSPAASPVGHSSPPLDASGDWDWTPRILTFLTFWFPVVHCAPITDTAEPKRPCKHRTPIGRVPLEVEQNCEVQGWESHFSLAAWSPGALPSW

SEQ ID NO: 1009349 - protein, 115 aa, Homo sapiens
MVGDHKARERMTVKEVHGNVAPRYQPEAPPLGTANTPTQRPRYKRQNEATTNNTPPQQGSDHQHKSARRRTHSAPTHTHPPHYAPQQNTYQPRPPRQTPHYPATAAPTLPDLNPQ

SEQ ID NO: 1009350 - protein, 79 aa, Homo sapiens
RYGRIPAGRGGGGAYGALWCLVHDFVVGQQEGPADQVAAGPLQRIQNPELGHEESSCHRCYLPCSCKELHLILSIRSSE

SEQ ID NO: 1009351 - protein, 137 aa, Homo sapiens
  misc_feature (52)..(52): Xaa can be any naturally occurring amino acid
MNAFYIWQLPALHKRGVSVVEAVKLLERERGSGTVFLDIELYLVRQSEGSGXGSVDVSIESLPSDPMELRGPVTIVCLIYRRPIAEVRRVHVDLMVRSAGSDDDDAGQRGTVNQSPTLALLHGTLHILLLIRPIERK

SEQ ID NO: 1009352 - protein, 131 aa, Homo sapiens
AATVHRAEEGHASPVSKTSETRLSRGRSGPRQQMALKDYALEKEQVDECSLARVNTSDDDTLGRSKVQVVEKPGWFESGVQSSDTECALICVIAGWMVCARSEPRVGLDFNFVRNAQEVLRRLFADARYNE

SEQ ID NO: 1009353 - protein, 46 aa, Homo sapiens
MDHSRCRTTAAPQSANNASKRPTTAADGQRARRTTLGEPGAPTGPH

SEQ ID NO: 1009354 - protein, 219 aa, Homo sapiens
MHVIDHTEGAAVRRRELRNVLTESARIARGKITELANLSAANNDAAIFPGGFGAAKNLSTLAVDGKDGKVNKEVERVLKEYQQAGHGQSGVMLPPRPPGNLIHVGGPRKRGSSCWFTVVRVACRGLARARSRGLCGGVEDRVDGGVGKWGASLPSSVTANKDEGSIGNPVSPAQRHSLKDLRGHCPRKAATVDAQEEVQGAEAPERKVLAGDRAQAGLK

SEQ ID NO: 1009355 - protein, 350 aa, Homo sapiens
  misc_feature (47)..(47): Xaa can be any naturally occurring amino acid
GVLEASGGSWNRCVSRRRRPGREAGRAWGVVIAVAAGPGFWLRATGXISYSQGATDKPFHSVLLMLVLLDVWGVVSVKANVLDELIEDEATRHYATKLLTDYTALLPELLTRLINGTRPLISEFSYNGLIIQLNDIVLTRIEEPNLVRKLWAHVASELQKTERDSEDILWKRTRPRINPKAQAGKHLPVQRKIGKPNYLHLKLHSATLPRKRGSTWNSGTKICEGIRRFLCPLGPTHTRLPQKTPKRLRSGNFRGYANLVLYPLGPYRHRLLHKAKTPNETLEGVQHKNYYVTTFPFKRKKNSSVHGKFGDSGSLGRNSMERLIAPHLTLHSNVGNTLLHTRIINISADA

SEQ ID NO: 1009356 - protein, 232 aa, Homo sapiens
RALPAVDKLDPTSERPAEQAHAPDAAPEGSVEICHVLLQVSTGPAHASFTRPLGPSPALLPGASLLPLKAGANINAVDKQQRTPLMEAVVNNHLEVARYMVQRGGCVYSKEEDGSTWLQHAAKIGNLEMVSLLPEHTDRWTSNAQGTVRGGRPSSWACKQSQAHLDVIRMLLDTGRLRHPPLTTQENILPALGLLSRAASGHRRQSFCNARCDPPCCQLTMGTPPCTSQSAQ

SEQ ID NO: 1009357 - protein, 100 aa, Homo sapiens
MSFFPIKWTMILTRCRCSVPLLHASAFLPFSLPSTERLSPYFQPLANSPLPALLLQRLFETLALTLANGFQRSDRFSPPFTHFPQNRRGLVDRCKFWDNA

SEQ ID NO: 1009358 - protein, 39 aa, Homo sapiens
MGPHLLRANISPLFVVTSPTGGNILGPQEVAQSRSIFTD

SEQ ID NO: 1009359 - protein, 208 aa, Homo sapiens
MPRTTVSTHSIEPVYIKSRRTKRKESNRLLRAGFSRLETPIGPSYGVLCRIENTLNGILRNLQQTRENNKKDAFGGPIERGEWCLKVMEPSHPYLAHTTGTSILAPTGASIRGLKKGQSKRHNAKSHLGPVVAKRSTNSGPKALADSQTQASMENSQSRVGHTSYNFGPPQTTNHKSPNSRSNFQFRFIRLGQRTLGCTKQTWGSKRV

SEQ ID NO: 1009360 - protein, 222 aa, Homo sapiens
MALMLVSGRRKVIHEFCCLAQKVALYNLSIRHDDVDACSWAPHTGVLPHLGLETGNGGVGYLSLNAFETHSQSKTMTQFLETRGAVPPSHMAANDALDVPRIAPCATHGSEEAFLGVQSHDSDKVGVVWGMNFMVARTCKETESCPVAKENLSVVAGKDIAAAPIVAGLVMTWIRAIREPGGIAFGHTWTLATVEYIRKKEQGTRTIKESDTTSTGLWLADD

SEQ ID NO: 1009361 - protein, 296 aa, Homo sapiens
MPFTVLLLLLLLLLLLLLLLLRQVLLLLLLLLLYGLLRFVLIVLSSFNPSMLALRRFEYRHLKPYFTSLELTNSARSSSYPSVALNKTLARLRAQRPPQYLPSGTGFGSTVIFYKADIDRCRRSGTFWNTSGPAPSGTARSPTTASPEQELYLKSNAGNSLSQVFRRKLPLRLRQKTYFSQPPADNSSRQYRKTSTGPFLGHSVDQKDSSNPVEADSSYWGYQLNVVHATSFTSPDQSLSLQSPDLHAKTDTQPGSTHLQETTTTLFPPQRGTRSNPSRHVTPGDHEPPKNAANPQ

SEQ ID NO: 1009362 - protein, 175 aa, Homo sapiens
VVLVFSKPSSAILVAAATTRLLLSDMTDQMTLRWRPVEGPERLGNPGSDTYPVVSRTVIRRRALFEHKTIIMWKLTRDESNYGIPQTYSAGSLPLMSCDVVIIAQMYSIDALRHPWDVTPDVLWDLTKGQAARGDQVWPYQGCAECGFFLLDKARRIVSGISEIRNIKGYGIPWV

SEQ ID NO: 1009363 - protein, 608 aa, Homo sapiens
  misc_feature (509)..(509): Xaa can be any naturally occurring amino acid
IPPLWGGSAGGVGLGPLRKSIRAAAADAATAAASAAEEDSADPGTDKRTPAAESHRHRPRAQRRESCLPRERHGDHTSEHEIRQNKANEAPHGKRKHEHQAPKATTRKEKQDTHTGKDKTSKTPPRRTPQTINDKNQKAETQEQPKQRTNKETQNKEHKKDRPRTRKDHRRKTERNRRGNNTHKQQKPITTTKTDEERRRHGSRETNSTTQKQRTEATDKGERREHEHQSKTTTARAPHRQEGRTNATTADRSTKQTTATGTAQEATRAETADRTTHHVDALEGTTSDAPKRRPARPSKRPKRRTQRTHRASAEITKSKQPDEPDEKATRTERSEERGRRQRPQRTPERNEVTRQTSRRQGATRRERTARARTARDRRGAAKSSTARKARHRDRAEGGERSRRTQEKSRTAGAQQLEDRRQSLNSCHDVTHDRTHRAHSSLHAQPTAASTEHTASPHSQQTESEKQHIPELCVGITAEQLGSQQQRSSDRIVTGSKTSKQRRSMRKSLXMRRYRDYARRTSESRRTHGTIESRYRERASRHMTTAHRRRTKQMQEKQRKRIETERRHQRQLTTHTSNGRRSSERTQDAHAADEPHTRTPPVRRERSST

SEQ ID NO: 1009364 - protein, 262 aa, Homo sapiens
MGTTRWTTRCPWGITPKSTPFERNFNTRHRLEHPTTGHGHTTHIPLTLADTMQTASGPHRGLARNQLAASTWASVQRFDGYSTCDNQTSSVRDISQYYPWRNFPTAQIFGQTVPRGAATQNRAPYRSASRHEGDNLKGVTLRESRVTTLEHQGTTCNHTSQTGAIDDFPATLQSRTAPSHSVATTYTCGTAGEDAKRQWNKIPKCDEDNTDKRMQDTPPYVETSPTGTHGIGIYGTTGGDRFHPRTQPSFLSIAPIDDVELM

SEQ ID NO: 1009365 - protein, 78 aa, Homo sapiens
HVGDYVYFEKLLQQIAYLIRRIEELIARRPLGTWSANVVCFYRRRDISSILITPWPDKHCTRELERSEIGAILEHGGT

SEQ ID NO: 1009366 - protein, 183 aa, Homo sapiens
GWRGVAVAWRGLVALAAAPGAVDGDVPPSGLSFLMCSTRRHGPDRAPEIAPCNLTASLGWPQRTVDGTKGLWGSSSLTTVLVCDVTRTHLLLPQDDRTKPRVPGDLYGSVGWQHVVRHAARGDHLAFMRTVLDDGKGFRGSSQFALMEVMIRKDRSEQQCNVVGWYQSACEHFLSVLDRSLGG

SEQ ID NO: 1009367 - protein, 276 aa, Homo sapiens
  misc_feature (158)..(158): Xaa can be any naturally occurring amino acid
AHSRSFRAKERACVAEEVSASLCNGGAEPSGPQGPRRRFQVPVRPGPGEPWINEPLSAMRMSEDEMAQGRLPRGREHAVSRSTGASGGGRGTSWRRGREAQEARSQCPTKPILYRRASAIADKKRYQGQPGAWKHMPVVQIELSVPYEGSMGMHNVRXRYVTCLDRGSERLTGAVSHVEERNKVGMDNQSERRLDEDGACVRTKWFGCSTCDSVPREHRHTHVANDVRYQSGQRAVENGPVTNCLLAPVQNCRNDKRGPHKRIPYGGNPVISGAPW

SEQ ID NO: 1009368 - protein, 134 aa, Homo sapiens
AVLPRVEGAGIPSGGEAESDPRCVSARTGPCLGVCCWSRAVHRPSLQTAAAQLPDRFGVLLRMAWSDKPWATGLGVSVWLLWACRRRRFAALLACCVISCLRVGPVASRAHEHPSNLAAGCSAALSDEDPSGAL

SEQ ID NO: 1009369 - protein, 122 aa, Homo sapiens
MLPIFNCNFMGICIQPIPSSNQFYVWYFHNSARNSCGPCLQRWLTDLLKVDRCWGLNRSSPWTHITLSKFCSSGGLDHYANAVITAVTASGLEDRETFTTKKRPNTAKKSALKVQPIFPKGT

SEQ ID NO: 1009370 - protein, 289 aa, Homo sapiens
GHILPTPTPIQPSSSLSFGHPHPSSMVTAMGWEQMDVEDRALPGWVDQTLSSPAFPEGRHHSCQPGSAQHPLSWRAPSSLPAVTVNVPHRWEAASAPDRCPGGVSCMDSCWENNKDNFMERQGGDGTDEGNHFLDTDTRLTAKIIYFGSVISNKDLETWWSELSQVLRVLTSRLDGIHQHRASEEQIREGPQPAPIYITLGIASTDISRTPGWASAQQPQWTRTREGELVPCIDGAPGPYTGHDAKPTARPCRRIPQANGLETHRQGTQTINLDTGTHVSPASAPYGTR

SEQ ID NO: 1009371 - protein, 163 aa, Homo sapiens
MRAGVGEREVRSSRSYTARYIAGRKRTNSGEHTNQYRAPLAQSAQTHSRKYNDWDYYICTRRHYSQNRHSTVDTKQTTVAQTRAWHRHKPPQKRGTRPEGTWKSPSTPGHQHNTSEQRLKKAYVATQRNRPQAHTRAQRKQQEQQTKKDEQTGQITKEIEQHE

SEQ ID NO: 1009372 - protein, 126 aa, Homo sapiens
MAEGVHNVRTSNYWPKLYLPILASSPGMRTHRNRRFPQLPPHPKSLSWGGNYTTEFPNAPSGDSAHVGGRMLPGEGPAEGEKKGAAFVAQFGGLYRGTHIADKQLVGPSGSNFFPVNQTLRPFSRR

SEQ ID NO: 1009373 - protein, 277 aa, Homo sapiens
IFVLRLFMTPVAMVHVFLSINLLLASAGAGVKLLLQRWTVSVKMNVLLFGPGLLFLLLTAVRLPWGPPQVWESVLAYRVVLGLPFLLENPSGYLCRVPFELGRQFLFHWTVNWRFLPEALFLHRAVPPGPVDLTTSRCSCCFASAGGTGQGKVSCQLLRDPSKRKVPPQALNPAMIVSSLFSLQVHWHSSFRRSLPLPSSTSWYIHTVPNLCGACLQAGHTPAQVEWCLGLIERLLEHNTLLTFLKSVACTYCHAVIWCSLGLGPDFPKSTQTEEGH

SEQ ID NO: 1009374 - protein, 219 aa, Homo sapiens
MTYVNAGTEDAAAPGRKLENVTYEAGMNMRQGRTVRNERVYMAAFHPELGLCPGHEAQRMEHIVPDVPQGKVGKVRYSTYGYNCPTAHCDVSAQLTCREFDQMHPRMDSAINDVGLLAAITWNLGTYSALYVRNTGVGNTWPLVSMTDRVGKTSTDETIAKLVSPLEANATVSPHVVRHTGQCMPIWIHPKIQTTAQQHQKDIPSGAFFISPAELARPE

SEQ ID NO: 1009375 - protein, 255 aa, Homo sapiens
MGLRATVSVVRPFLTKSLQFAQSPSVSLVSVIGDIHWSVITGSGSRLGCLTSHGLGPTRSPIRPVAFLVSGPSGGASGSLNRHDLYCISLRQAQAHRRPLEGCPGSKALSAQAHTLARAHVFDRVRLSVSSHRANALMAWAAQKRFQQGQLLDGREIAELDANYFRIPTEAPFSSRLRARVRNRFKHPMKIFQLTNARDEENLTVGIEQKKFFREDPLGDSEMPTVTKDPGYKTGKAEVGRKQPGPKRCLTKPGV

SEQ ID NO: 1009376 - protein, 342 aa, Homo sapiens
MSSLRLQWWTSTNGFWRSPPIWVSLLDCSKGEPAGELAQLCGKSIPGLGRALTLRPTCGECFGAHWYRRFPIPIRLLATREIAGSPFLCRDYRFRISGMRDYTPWVTFRTACSPLYQFRKRPESPHLPIAKSPLGFHHLLEAWVATRYRISHKAPPYMVTPVNRAASSIWRRRTPHHKMVARREHFHTHDALIYGVRAPASMDEQQTSAFPQPPRSTRCHRICNTRRYSLRGNIWAVPPRGVTHKRGKQCLAPRAVYEWMCGGHPPGRVIYEEYSSNNPVTLRGDLAGSEGNTLFLNCYSGGEIARPTVAGGHTGHVVYARAPYYAASNDEGTTRCDGWYYK

SEQ ID NO: 1009377 - protein, 702 aa, Homo sapiens
  misc_feature (109)..(109): Xaa can be any naturally occurring amino acid
ADSYHPWIADDPLDWRSEKWLQNFLHMTKIWIRPSFNTNDRTATHNGRLSYRTTRLTPARPLHAATRMPTPQTQRAPPHRRPAQARCTTHTRAAPTLATTARPTTTQPXANIQLRTHFPPCAHCANTPLHAAHTRERPLTTTQPHTRPRTRPHATASQPHPSRSPALTPARNHRPQRHTPGGQRTEQRKTTPTEKTSLSADIADENWGPYATPATRPLGHTRPKATPPSPRPPRTDAPEGPTPDTPTGGPNRQKTRTTPHLGRKANNQTAPYPGPPPDSHTKTNRAHHTTTTGAKPTKHQSKPPPQETQTRPNTSHPPPKIRPSTTHKRAMEKKEPHPHHKQPATDHPTQPAPTHAHPDTRPHKRSNNTTRGTPHAQTRTPTRHALATLHSPNDPGKTHPLDTHKTQHNRNGTPQPLDTRGTAPHNAAKTTHIANRPPAAPNTTPLGTPEATHSGHTRRPINPQPKRPPPPPAWQPHTHRHKPAATTPAKNARSRTNPPWGHSSRQQNTQSPITATDFTTMDPKWQTTPHITKDTTNRHETKTWHTREKKRPGEQTKNKTSTTQQHTITRAKEKHNHDRKASHARPTKQPSTQQQTEMKTTKRTTQVQNTKRTQNNRNTTTSRDSTTEHNNHPRTRKATPYQPRDNKLPRHEKRRDDKRKQQRSTNSEENRNMEPEAKRRGEHDHTTKKKKERASKTQNTTQ

SEQ ID NO: 1009378 - protein, 234 aa, Homo sapiens
EKQKIAEGNVEENYEQNNSPTLVAKRYRKSEDNHPGDADGSKGPVGRPRLGSYFLLPPSHSWWGQRSVCRETSFSSGPDGCFIRMAWQQSRFKLASPAGDPHCAFPGAWQVIYRGLLPVTHAYVSQGHFFSSRRCVMNSQERGRWEPGQDYGKLCLSLSTKARQARPTSHSVCPTSAKPWLPLSHTATGTDRLTKSAAAPLLQTPAFCSPLTSEALPSHERDCGLRTSSPHPLP

SEQ ID NO: 1009379 - protein, 172 aa, Homo sapiens
GEFGGSTVPNPYGRHTSGTVGIAVVMESGGRPSTVPFQSSCGTHRRVVTCLASCYLRCYRAKKGRPRSSPKEASECELRHRTFTYESEGLSNGGTSIQEQHPCERHCRLPLIACLSCTWRARAGSSLYREPALGASLRICSWDTTLLRRREVTNSQAWDLDELYRWMPPIRN

SEQ ID NO: 1009380 - protein, 154 aa, Homo sapiens
MNDTVEYPHYKVHEQCEHTSEETNGHCSVLTSPWKATVPKTEIREKLAKMYERAHRMSSLYCGFSELIIGGGKTTGFGMIYDSLALCNRTNEPKQIDLHRHGLYDEEKDLIESNERNARTDTDRKSWGTAKAKLVLAKSELEIGSQPKEYKVLQ

SEQ ID NO: 1009381 - protein, 373 aa, Homo sapiens
CIQTSSGCGCYAAHLVALNIQRDCQDLLAAGGGGGGLGLQAARTMSLLSRGKTPRPPDASGPSRDCSPAPRSRLQPSAAEAATRTELSCSPGDRAWAHVDALLDWICAIWPLLGASAGSPWSVLLCSPLGGWSCLSGHLPPVLRLYRSHSISKVFSRESHLIGAPAKKRDAKRKIGGKAGTLTLEPNALFVIACLPPIKVTKALRRPLLTVAFERLEPATATSEEGALALTKVTFNWRDFDPPSCYQIGFELPFGRSAKSLPTFGDATPIAVEQWPKRAVWIGIDKPAVQLRWVLKFNTNRFLYSPVRVESPPDVLGHPTVSSKEYRKIIQADFQSVAAKQPSDGDSGGTPETRTRAWSFYMAPIGLRLRRFQ

SEQ ID NO: 1009382 - protein, 132 aa, Homo sapiens
MYPNGSLCTPGVILVISMWRLFRHALVWDERHYQSFERVSRLDIRNYGCERHLNLGALNSFSVGRFEMTKAQLHTTDLALARFLYRTELIGTGLSSDTWGVSLGPHRVQELLGENFGILWPFARHQKRHVQS

SEQ ID NO: 1009383 - protein, 289 aa, Homo sapiens
MTQPVPRLSVPAALALGSAALWRRLRHWPLPGEAVPPMARPVRAVPCILPQRTALRCVQVSFVKPHPMLGAPGCCSKPGGMLTLEQLAGGFYRCTCCSIALGSWATMCAGISPEGPQKGRLEPGQPFTGYVRPLALALAAVPRTGRVVTCEVDVQPPELGLALWRPGRGREHKIDLRLKPVLGDLCDELAVPAGRGRRPSTWPCVDADKGELLLYYERCLQLLGPGGILAVLRVLVAGKVLNLRNGDVAAECVRKLNERIGGTSGSTSGSCPCGDGLTFALQDLGLAPK

SEQ ID NO: 1009384 - protein, 84 aa, Homo sapiens
MIRMRNLNYFAYTTSTHTPLTINSTTIYTTYSTHRSLYHTQLTTQNKHDLPATPRERTLYTRYRNIAQTITCVDESAPYDHHAL

SEQ ID NO: 1009385 - protein, 109 aa, Homo sapiens
MAHISTRRYQVPAPRQQQRRTPRAQTSGHNDEAQLSAINVTTNKTAPKLPNTPGAPTPPPLHYTTSTDPKGYHLYTHKQRTTTQRQRYTTGSRTNFCDLLTASPPQTTN

SEQ ID NO: 1009386 - protein, 374 aa, Homo sapiens
GLGSVPSHAPAAVSQLSPVCADTMASSDEDGTNGGASEAGEDREAPGKRRRLAVLGHRMAHLLRHRHDRRGALVLAIAMVRSPYGKTRNTQRFYIQSIQQDTSPVSTTLRLAVRIVHCLIGIVPTSVIVHWGPSESTTLHGVAHYVTVLTTQSRTDEECAPPTLLRRDGTCEQQIQLGQQPVLTAFQSPPSEPTFWPTKRLITHTVPSSSYPNTKLISYILPCSAQLTIGEHISSTTLHSRLSLSPPQHVRPQQHATGTLGSAQLTPTRFAVAPPSTTTTTESLTILPRPVYPYFIHSPLSLQPTNHQYAHHFTPNSLTSPITSYPPTRTTSHYIILTSYNHVYTQIPTPTRKTRASHLLPSSNHNAYATRLIK

SEQ ID NO: 1009387 - protein, 348 aa, Homo sapiens
MAPTIVKPNGEKPDEFECGISQALLELEMNSDRQWLYLTRELTYYWLAKEIEGCVVVRDTAISNLCSRSSIVSILSEQNPNGPASYAIFVSKEASGGEGMSVFIRSVGSNSVLTSNLEKAAIHDNYSHIAFPGGRVLLNSLCLRMPSFERLGILPPKRTSWYAAMMNPRVRRANDCAKTQGYSITVSIFAHQKATSQGITIAVNHPRFVTTLSLVGPYPGKASTGAHEIATNFLAIFGQMFLNFRDTPNNIGAVSSNDPLLLSLSPLVQRIHWLSTGHRSCGSASGGSPRPEDSSHGWGRSLPRLAGASPGSGVLPGAARQVIESPLCTGDTLAGGLPGGGPSGPWPP

SEQ ID NO: 1009388 - protein, 292 aa, Homo sapiens
HTSNLDIVFIPLMIMQSEAAYEPYAYPSDYDMHTLEIQSRTLLMNVCMSSKRYQVIPEVIEGFIQYFHKTVSDLIDQNVYELQVSRVSSDVIEQKVVEIQDSLLATAWIAMLTERFFTEYSLGPRVAAIVPQVGNRCCLPDFILRNYSTEHSTMREVMWWDRSLEHEVMKYLLTTTSNSLQRTILNAMVLLPLKVPKTVDLGYYRLTFIYQCQSFSQYRCKTATKSGGRQIDLGFVQIPKSGMSPVSSSVLHSLVDKSKHLATGWQVKQRRRRLTLRVVVGTFWGGASVRTK

SEQ ID NO: 1009389 - protein, 143 aa, Homo sapiens
MHEKRAGHMQHLAKLQGGQKNVKSVDKLYLSVETRRPSWGTFLVGTKSGTYISPLRGPDSIKDKTLSITSDSALTFLEHSVIRSPAKTRTKNCSPLNSEQGRQTNLPFWQYAQIDAAINNAAGAPVELPVAPSMLKAPKLVRG

SEQ ID NO: 1009390 - protein, 112 aa, Homo sapiens
MLVRIHKNRRLTTYGSLSRHNLLSCTTSRGTSCDQYVVPREDCTRIERLLTKTKHMNRESTHQNQQYKKIGGAKGRPDRTEIQHSLQKPENNKKQHPARRKKTQTGTTKANQ

SEQ ID NO: 1009391 - protein, 48 aa, Homo sapiens
MAQCNTEAKQAITVITREPSCKAQYSYIELQVFSLQHGVSDESTVLEK

SEQ ID NO: 1009392 - protein, 123 aa, Homo sapiens
CICTDGWDGELCDRDVRACSSAPCANNGTCMSPIAKELYKAPDAPGYSRKVTEPDKRDGARAVINSESPLPGQEEHHAVGMTDGQQARSREHNQETRRDTKSAPLEGNLTNGNDNQPTPPYNH

SEQ ID NO: 1009393 - protein, 302 aa, Homo sapiens
MAPLKKVDVVFGYHMLEPWIRAQCDYSRGLPHVQLHRNYGHPGGGHTKIAQSHTHSNCKAHCPCRNWHCDTYALVARPIPVSTFSNVVLAPITSQTNWGTQGQPALGTTSRATVGKRQLRGPPRHTRHPTDTPHTPYHRGPGTPKGPPCSLKRYVLGAEDTHWTNTRKVSTTTDTLLMKMAFAEHPPPLHGTLVPISAALNHCAPFTLRAATTSPTTTHGGPPQAQAEYHNLTPTTCVFVAQCVLSPVHKRPFHSSYLPSLGLPTRGATITNRLPITLTSPHSHVDTLYLCGRTTTCKTPSG

SEQ ID NO: 1009394 - protein, 344 aa, Homo sapiens
GSHVPLNKLDAIILKGIKREDWVAPNAGPAMLNGACEVDGKTRPGSGPIISGLISTGLEVSCRCKRPPCWPTISGRIDHCPAGASSPISGHSPGAGPPSGALPQALPRRELLLSAARPRVHACRRLAAASGHTFCYKLARKDYCPAVWRTSVQAAGKVELRRKGPYTNLLAPNFWPFFAGEDARMHQGGGPGAPLGGPLRSGENPRMSSPQERIRTRGQSGEPERHSAPDETAARVAPKAPAGRLQAERPGPRRANQRDDWTFRPRYNPTNVGARTWASKAARLDVIRGFPPGSGAHTPDRLFTPRGSLMNGDRSPTSSHLGFPIYGGGDPPLPKATASTSNTT

SEQ ID NO: 1009395 - protein, 226 aa, Homo sapiens
MRIRRCSGGVALGALVALGLGTAVASAEVLGSGIRWPGSRPCDCVAVGRGRRSSAGVQGTRIRSGLPVTKLEPLGQGHEDQVPGREIFSRRFSPCTYLKGTQDDQLTMCSIGGAIISRTEVYRTIIAQLQGTPGATWPEHKTTPKRFPRGQFWVGDYSGRELSKVGPTDQSLGEWFKGWHSPRGKEVGRKSGRNSQDRGSQLNFPWGPQAFFRIQINTRWRSKNER

SEQ ID NO: 1009396 - protein, 303 aa, Homo sapiens
MPGDTEDQRYHGYNYRARVIDINERYSRRVCKCRRVSWLEARTRNVELALLESNLVSYQPSIICREPLASIYGAFRLVHAVRASVPSYNTGESHMRTVQQEEAKLDSEVRPRKRTGMTLYAPGSDGFSVPLINQSVASFTSHVRNATGTGEALIHRKSGALVHLRRIESALRLQGDLTCTMGWQRKVPTPLGKNTGNGVEPTCQLAWCTRSLLRKLRFPRLLRVRERDNHGRVYTHVTLRAYNGLPKQTCYAALPHGFAQRSPRESKASMLALCIRRDQNRPCAPAKCRGQHSGAFRDPFRTT

SEQ ID NO: 1009397 - protein, 153 aa, Homo sapiens
CGLAGPCTRSSRLDPPRPSNEEYTLRASDCGGCTGYPSSDSPPALRSISRWALAAFPQGRARDLQPCHDLSLPTPPLAPVLPSLPDERRPLLQSAQSHLSTQGLRSAGARQRDWQAAPPDRPRLRDPLGEASWAPESGEDMENLDVQLKLQVR

SEQ ID NO: 1009398 - protein, 286 aa, Homo sapiens
AGEVVVLVALSHPVPVLVCCMQTHCSRQRHDWADDLFVAALNGPQQAWVTPDRLLTPAGSLDMILSASRDKIIIMWKLTRDEINVWNCHSVLCRGSLPNLLRDVVYLAQMASLHLLQATLGMELLTTYWDLDNEASTTEAELMGPYQGMLLSCGPSRSEQPGTMVLWTLRALNDRSELLEYPWAVLRNYNKSKRMMQPLQQLAMSQMSRCLAAYTHGNPSHTYFLVRWDNARSQVTGTLAKPGNASKKANRQFGSTTGVIVDTERVNWDFYQELGLPFCCLNWQGK

SEQ ID NO: 1009399 - protein, 152 aa, Homo sapiens
EGGVCADRGPSCAKARVAAEGSRGRSLIPSQEPGYSERDGGDRAPGSCSAAVSEPLSRTMKGRMCQGSSHIHDDYQSSRRLRWCNSGLATVPASTRYERNYDDLRLVESFATTIFQTSHILELIALIVVKGVPYGWLGPFTHFEWHSQRKVW

SEQ ID NO: 1009400 - protein, 138 aa, Homo sapiens
HGELTVEVAALTGLSTRDSSKMFMKTPLQCLKIMEPERQVPFNEVRLPPHLIIKKEISEGDDVEDIQETNDQETSGVAAANTSLEKGEETVAGICTRKKGVTMTTQQHSDTEHPEDSAKPKNKHRPTNQPPDHTAHTR

SEQ ID NO: 1009401 - protein, 156 aa, Homo sapiens
RAAAAGGRRMAACGVPVATTPAAVRLSAERAQALLADVDTLLYRLRRVLWRRGDRTCHGAAPEALTGRCMSPTDKRHGAFITKQQQHRPALPYAEKLQAPWSIQAGTQQGSPDSQGHRKGHSGTESIHRNQQHLHIDSQATVDLDSHTGRPQKAYR

SEQ ID NO: 1009402 - protein, 81 aa, Homo sapiens
MWTTTIQIRKQPVTVYSRKATTRSNIWRMWAHKDAKKRVRQTNGTMAPQGQVERTQGQALRCDRHTRRKDDPGKAGRCEPT

SEQ ID NO: 1009403 - protein, 269 aa, Homo sapiens
VKSEKVYTRHGVPISVTGIAQVTNPGRTNTGDVGGRLSMFLREARTADIAHIALETFEGHQRAFMAHMTVEADRIRTGYEFSEQVFKVASSDLVNMGISVVSYTLKDILDDQDYFALFEGRLEQLKSKKMHGLEQAEANEQMLGSWESYSHSRKTVSAQYLSEIDDGQGTREITELKKAAYDIDGQPPAVALWLTLAFCFRVAKTKQQIEEQRVQVQVVEPGPAGGQCRSREIARRDKELEGRVRKDQRERSATSLERCRRAQKSHNYA

SEQ ID NO: 1009404 - protein, 291 aa, Homo sapiens
HQIADDAGAAGGALVGPGGPGMGNRWWLPRRFRQLCILVACWSLAVDCVAWWPRPAVTHLLEEQGHEDHVTWTCPVNHSYGRYGQGTEKIKSRVRTIYLFSLDAITGNQGGSIGMSFLGGLVVKGNAALCDGYSAEVQSKRYTAVPGPKSTHPSGYKSGNTAGHRSRGTYHSRTKRLRSPLGACYKDRLRKVTRLAPARLRLRPYSGEADKFQRRLGVPRNARSFRKFSVCPTAGVERSPGTVTHKPLRGGVTPAHRDFSVVERGSARVSATFEILPEFVQQMGIGQPRVD

SEQ ID NO: 1009405 - protein, 251 aa, Homo sapiens
ASLDQKLKYQDDKLIKTAVTGSLSENDPLRFKPHPSNMHAASCSSAGMQAGKHASQPSMHPVCRLPGQRNLCKGSVSSNIMFLHALVPSTIMHETEAAAARKHSVYHTEPKQTGIAASSVHSVNSNTEQYTPECSQEAKSVMASGHPPMVYHRPRKSGRAPNNQGISTSLAGQQPIAIGLQVYGEARSEVKRRQHAQGGTGVPKTGGKQLVPIARPPTKVSIYPIKPAHFSRLAPIAEVASLGHQRSAQLW

SEQ ID NO: 1009406 - protein, 257 aa, Homo sapiens
RKARRPRDRKVAPAPAVVKKQEAKKVVNPLCEHRPQNFGIGQDIQPKRDLNQSFVQIVEPRYSLVCMRHETPPAIERLKSASCDYTVLPTALRVAEPVLQLLTAGPQDTEPETTSKRRSRDMWADGENDRLLAKEGQSPHTRDPPVPSKHGVSTVTHLWMETQAQLTLCGDVHNDVDPNRRWLSIYGLPCVRKHGRSLYMHNPRGQGKTGRRLVHRDRTCNHWSPTHTGETRAEQRQHRVKTGWDSSHKEPKNNSTD

SEQ ID NO: 1009407 - protein, 254 aa, Homo sapiens
TKLRIRRSAGGARWALVALWMGNRGGFRGGFGSGILVDLEVAGLCDVWPVDLMAAVSSAECKCQRIRELDCTVTQSCGTLGSNDNEEIIVTCDGESYLRSPLAPIQRTSGESVEFRSLGSLFSMVLTVFEGLLPGAESRPRAEPGEPVFKCMSLLSGDYIMATVESGLLTCSKAEWAPTYRGAIILGKALHLYTVTAEATGGTQIGQGAQLSLAEVTGRCGSALDTPQSLNQVQTGIVSGTMCPKTLFMMAGIR

SEQ ID NO: 1009408 - protein, 430 aa, Homo sapiens
EAVPRTKAPRVVLNPRPSLVYKEIRKGESRSEALAVDGAGASLWCLQCRLRHPCTGQVAATMELSQPATAGRQAGSMASCVPAKCLFLGVGKQLEEAGSTERRTLALQRTWEDIPKQLDSNAGTIHGPTDADLLLDEAGWAGARDGATERPTREKTELANRQSITEHIHMKPHEDVNRQNYQVERHNGADLQGLCEQNGDEERTKSNKTEGIGNKRHIDKVQGGTNGTTRQQGQHLEEHITDPDIPQTTKKASERNGEQEKEKETDEEDQKKGKAHEKKEDERPQRQRRDTKETAEREAIGETQNRMGHKTAENEKEKKKRGERGREKRKRPGREADNEGQRDRKEGTKPREKKPEERTEQGRARERRKRVTRRQRAKRGKREGKGRGIRTETEERGKRKSRETKEKEEKHDTENKKATERTGEKSEGTK

SEQ ID NO: 1009409 - protein, 342 aa, Homo sapiens
MEELYCHLCILYFTRKKPFRFLLGLLAPFATAFATCFSSARLPSYDEDALKRTSGVDKRISRFILPIRGHREHGRSSTSSSVWPAVLIAQLKQQYELNCRTDFHHSSDCHSVQCWSSRRASWRGPQQLHIIHGRPLGWLDHELTLIHGCGLDCGTDHKVVNVEGDATENARHYTATEYRTAKHRKASRNLLRVKVEDITNAKSEEEDIDPLDDTHRNPLNPVDQDDPRKLAITTGSKEHSEWGTWAIRDIALHRTVYVTQPMESTTQTDESTIGPHTRAASTSKDHHIYKPHTPKSTREYEHHKPRKGTDERIITHKSRHTVLDIREAVTQRTEKSEQHHHA

SEQ ID NO: 1009410 - protein, 30 aa, Homo sapiens
MATGAGIMARIIYTTWHYFQDFNERIVTGP

SEQ ID NO: 1009411 - protein, 128 aa, Homo sapiens
ALRPRKPESATVMKAMPLTLFTDICVCAVTGDRVKDLVPLHRHSLQSGLCIQVTRSSKPLKRFSDFGSMVRTGFLSRQEDYRWFPTLVGSWSSQRALGQAAKIPMCVLIGMTLQIRQGMKRMLSHTIV

SEQ ID NO: 1009412 - protein, 258 aa, Homo sapiens
MESTTLRVVVAKLTAGSHTNEAAQTQASWGLSSGVPLSVRAHQTGKAAEPTYLPLRCFHLVEACVGTRQDLGPRGGHAKTALWVLTSLANGLGKWKRHNSQQDIVRRQNNKGAIIPEETSAWQPLVLPYPRELEHSHQSHGIGQYSERNEATTAAMGAPEGGHIGSMRGNPSHSEQGAQTKPFSTSTHKKWGRSEPIDITDTVAQVDRPKTPLTRDNTRNREHGLAPTQGPAADTHDAQPGANTTGRGDNGSTQGSAT

SEQ ID NO: 1009413 - protein, 164 aa, Homo sapiens
MEPVFELSRLTDSLLTTQQPFLLNPNTAGLLTLRIFHSPSIELHGHHQRYGTRHFLHQLTVTGDTFYPYTDLIPFLYTRLDLPKLLETYEYAPMLTVSSLGRSLFEQGRNTSEETIPCIAGTNRGRRQTTAAPSRGLLRLAELHFDIHLVQSPRCTSMPFLLTA

SEQ ID NO: 1009414 - protein, 309 aa, Homo sapiens
IDPVANDNSYDELKKMQSYVHHLPVSGSCYSTSSMCLWYFRCYNKQHIVKSSFVGRARMTPITEPSSRPMVIFITLFIYSSNNEACQVKRISRWPGFIQYFLDRTKTNCETSIRTYMCFATKALLAESSINSMYSSSLAHMGPRHYWQTTNFIDGQKYAKRKETTLQTKRNQCRGNAMRISGEEEHYAQMSPLQCNEDYVEDTKSRTRIHIGTDGIKGNLWRSRIGWFSVLPQRTHFIHGIVDQQHLGVIGPHTVHHRQFARLRHVWQQEFALQLHFPGKPHINRDEMAAAAPRHDKNDITWQSVYRIV

SEQ ID NO: 1009415 - protein, 248 aa, Homo sapiens
MRTSLELYCVSFRLRGHRILPSDGPCSNGAVPLGPSPLQGVYMATVEEGEIQHVLGETRRVAGTHPDYGEELCFYLRILWLLCCRLAGPGVIDILESPIVGPLRSTQPKVSCYAQKSRMRHITQGQTRPLRQTPWAPLAAGKSATSPQGRSQTARKRRGIVTCDETVNHGKKPSPAGTPPTLDTPPESNCPPLNRGTAPSKDGPMESPSAHYPLDQLYSTTSGHGGLSFTIGHESRVRQPRDPVLPSR

SEQ ID NO: 1009416 - protein, 134 aa, Homo sapiens
GCFRLRLWMLRLSDTQMKVLLAALSSRGPSASCCCRDLLRADEKKKGPKVAVQVYLTYNGDEDVGRVIQVSSEKTVPKQWIIVALGYRREGDLWLLESANSHRVIKDFMMQGGDLSRRDGAGGKKHLKGERFPG

SEQ ID NO: 1009417 - protein, 211 aa, Homo sapiens
MQRPRAGESAGSELTQPDMHAYPLAPAKRTRYRQPPTHRSQRQPLSRSAHTPSSPIHTPNPLSHGPPTAPTVPHTYLHPTAPPSFHASPGHPTHWPTRHPPSAPRRIRPPPTARSVPPTAASTPHTPPRPTLPQAPRRPRPNQDTPHIREQIPHHSAHLSPPPTSPSSKQRDVPTTTQRPHRPRTYAAQPHSTQHPSNRPQPLSRRQRPRR

SEQ ID NO: 1009418 - protein, 197 aa, Homo sapiens
SGAARSQLGPRTARAPKPGSQSGTQLNARLLCIPNQNTCINESAGTLSMHARKQGSPAAPQPAHRTQHRQNQTKKTHKQRNTLGRTREKRKHSRDDKTTNTQGPDKAQDKHNYPRNATKKREQSTERKKERNRTTDNTTENGRTKEHTEKTRKRKKTIKGTHKEKTHTRDKNNTQTRHTRNKDERKEHNKAKKRRQK

SEQ ID NO: 1009419 - protein, 123 aa, Homo sapiens
MGSAPQESTEHFVTIMQTLLTEFSAPHDIPSYKSPLSLKTSRAIVEDPHTFTGPHTHIHMEGTHINAETQITVGSSRQHASEETLNAPPNQHTDPYNHARYPTEIYKKRGLQRLSPPSQLNPY

SEQ ID NO: 1009420 - protein, 233 aa, Homo sapiens
VIAILGSRCSRTVRAPVRVANPFKTPHLQLGARWSQEDLRSNIPSGPRAKPPAAIDNPVQPPAVRKKYQFRAILAPAQGIYATSCGSTSIARVYKASDGILTHNHHAMLHISTLTNLDEENLAQIIATAWHTAPKKVHNGATTIQRQFLQALTPLTTTDGTWVRLPIRGHHGAVKTSRLRRTSSEHIITVLQPYNIAKVDKRGAPPPLQQKIFMNHITRNSKSTSFYNTVPLA

SEQ ID NO: 1009421 - protein, 193 aa, Homo sapiens
MTTRRHHTQKLKEIQNKSAKTRREAYQGGEQDSRKVTRQRSEDRTPGSTELMTTNSHRPHTNGDIGNNHDDTLRGGPTVRRHLHHEGAETRRDKTGPNDNSYLKAEPPDKKRENELTTAERTPDNRQKQRTSRHTKHQPDNEDRRKGETERDVESTGTAEVTEGGDQPSDDNRHCKREKREETNRTKRSNRAK

SEQ ID NO: 1009422 - protein, 153 aa, Homo sapiens
MRVVHLLVQRGQAGVRVSGNGLLGSYYVAWNTGIQPRWPDANVTETIAGEEIDCRSRNLLQYTTEGAEASNVPRGQCWLDSGNPTSQSECHVSATVDLRQAKRRSDRLKPHYIYQGKQDRMAGQINLMAQKGCYFKGYYGAHADESQLNPSDC

SEQ ID NO: 1009423 - protein, 302 aa, Homo sapiens
GPFRKPLLETLSKPVANTEKPVCPPALMESGIKEKKKVQKRARKERQRKTGNKRRKNNRKETEKQQRKNRKRKNKEKRETQREKGAKKSEKKGEREEDKQSREGKNRDKEKKEEQRSKKKKRTGKEEKKREQKKQKRAKKKKKKEKTKERRNKRKKRREKEKKKRKERKQRRTEEEKERRHQDEEGTKRDGKGEKREDTQDNKKRGRKDEEDKGETRKRNEREKRRRKERNRERKREKQERRQRGRKQRARRPGRSKENERKEKKKKKKKEEKGAGKKKRKRGEEERGRKRERRRERKEGEK

SEQ ID NO: 1009424 - protein, 383 aa, Homo sapiens
AISQNGRGKDSYSTLSSYGHVDSGKSTHYWPILIYKCGGLEPDDTILIESLMTWRPAETGKGLLQVCLGLGETDKLDGVETLVINIDMLLVEDTEEPVKLLSDELVIALTPRTSSTYLCIKRTTDLHGSTLRGELVLIRESSAAGCVGEHCEKAGISKNGQTREHALLAYTLGVKQLNCRCEQNGIPHEPPYSQKRYEDLVTGKSDTYIQEQLATNPKTVTHKCQIYCVANGDNNAGNKVLQHCLGSKGLVNRTPRTGTGTRPSGQTKARHGGALENCNTEPTKTRTNRDKRTRRLALPDQGKWQQRKKLGAETTEPGTGDGARNWTNRSGTNHKTRGNTERTHTRLPRRKKVHKQSEAQTNPGGKRHHGTARGCNSIMTRGN

SEQ ID NO: 1009425 - protein, 272 aa, Homo sapiens
MDVNAAIVRTINDQCVPSDVLWDGCPSVGFHMAWAISRTQSSHICWDGLRRMIRAPMVTMETLLVALRVAKNHQATRLSALGFRPWIAQSVGPACDAKQLPVVALVTEARGGMRATGRRSLQETAPGQRHLRLARRRAQGTRIQKPGKGAENQLGNGHGAPGRTSLGRGSRDSNIPRSQHSPDKTSIGSHPSTARANGPTRTDTDERNTTKVRPQRHGGRRQAEQTAQPSPTFPKHHATKQTRRTKTDNHTMEPTNDTITTTPKRTASQAKT

SEQ ID NO: 1009426 - protein, 205 aa, Homo sapiens
ALTRRGVCGMVMSLSDPEKFEHIWRVLNHRYIEWCGGTIAFAIMAIKGRGPNDMLMWMLQDNARPLTFEQERRWENVDLSDEVLNDVIIDVMLVISPPNSKIPDVVLDTDPDRIVYWTGKNLPGAGSLMRRKGHGIHNMLPVERPPGKSDSIQNMTLRGAPLGRDMAVHVFVEGALSGGFPEGTQGHTRPKREPNLWLRRRFVGP

SEQ ID NO: 1009427 - protein, 142 aa, Homo sapiens
GRGFLSSTVPVDGTRRSFPHPVTAAHSQPSVTSSPNPRTSPSAPGAAPPPRKTPTRRTDISLVAAMTDRVTTIAEMRQKLPPGTQRPTIKPNRSTLEALRLLTVYLVQCRYYVMDRDDVAFEDTLPNTFLSTNLHESRGNQC

SEQ ID NO: 1009428 - protein, 325 aa, Homo sapiens
APQALGLCPRGPALLAPSQENELEEDAWCPVPAAVPCGDGTALLLPCLCCHGNGAVCCLLLVPLPGARRRPCRPATGRPPCLLGPRVTLLAPESVALGPGATQRSPVSSEGVLRTRRPCRAMVMSQGTYTFLTCFAGFWLIWGLIVLLCCFCSFLRRRLKRRQEERLREQNLRALELEPLELERQSGRERPGPWRQRSHQHTDSRHGWRLAITRHSPFARCTLHPDACTTGPRKTARARRTPDPEPPGRSRTRRYATVSDDDNGRWSFPAPTLELVHIVPNHTLLTTQAGADWQSPPTPNSRGAHATRRGHLPQDRQAILDCREE

SEQ ID NO: 1009429 - protein, 473 aa, Homo sapiens
AAIVLNSRIPCLDQEYYRKPVEELTEEEKYVRELKKTQLIKAAPSQGKTKFCVCKHPSPSSQDSNQPCMHASGRQNQQSLAQHPSHAFQHSWHSLCKHRHSQFCSKSPMPALCTQATGEHIRHAKPVQRILPIDSTTTTTGSSHNALADWIPDHINGQACIHNQSHLVHPVTRTSDRPDFTSDPLDTAGIAFTLQMARGTEHNKTHHAGTNLYRPGRNRLGRQHTLAGPGLYSPNTHPTGAPDEYETAGHTAMHLSPHKALGQTEDENLASRPLAHRPNPHRTRDSRKILPRRRRRTRRGHLPLARANRKHPRCSHSLPYGPPRLRHTAYTRWDGARFHHGGTGHTLPRLLVNRPGSPPTAAPARSQATRPVVPPLPPYISTPKIQESAKLVTHRERYPDSAYESQQHRTAPHLLCTLTIRSTPYGAKPDKGKAKRRFRTIVRAETLVDLSRGSYTYHAALSHHRNIEHTIKG

SEQ ID NO: 1009430 - protein, 328 aa, Homo sapiens
HRQIELYGVCGECEREAPRLYFYDLPFAWFVAPCDPGPLPAASRKLLLCSCATACGWLAAAAQLAGKMKLSLVAAMLLLLSAARAEEADNDVRTWARCVGIDLGTTYLHASDSVQERTACEIIANRSGQTASQPGPMSTFTPEEGNSLIGDAGKNQTHTPTPEATRSLHAKADSSDEDGIDTVMCSPDTPSSLPGHGRLNTDKITTIPLQGSNIGTRRSTTKDNLPHWQNNFLATGSSLTHDTETRLQAFISAQRQGTPMHHTATLQTQATNTPPNCPKRRERTKPTGRTTHCPAPTHGDMLDRQRNATSDTGRQSETGPRLTTRRAQ

SEQ ID NO: 1009431 - protein, 251 aa, Homo sapiens
MNTHIRGGREQRSNTHGDTRARTRNQRTHTSRRAAEANIHRTSTTLIGRRTAKQHSAKAARARSPQPKSNNDSADRKQSHREKQQEKQQPPRQRRKQKKQKKEEDKRERPGGSEETGGGCRRELTEKREKRVREDEGRERKKKKGGRRTREKTRGRRGGRDTEGGGQRRRRCDVEERQEGERERCNGGSRSSGDGGERQREGEEEEEGGERGERGRKGEEKSAASERERQERDRASESEQREAATRTRRRR

SEQ ID NO: 1009432 - protein, 328 aa, Homo sapiens
  misc_feature (129)..(131): Xaa can be any naturally occurring amino acid
  misc_feature (174)..(174): Xaa can be any naturally occurring amino acid
  misc_feature (235)..(235): Xaa can be any naturally occurring amino acid
HRIEDQQKDARVWKVLMRYYPAVEADSLLVQAGNGWSGAGRSFGPVSTFVDQRALLTALNLARAVPGALGTQSWSDYAVASVVCLLCSVGAFDRCYLCCVCRSTLLIAWMCALVLIVLSPDVPRLHYHXXXCRRAHIGRFAKAFWLTVLLGTASTVAAHQQQILGKWLLARGVXHNFSLVPAFLSLGRSVMGLSGASRGRVHLIVVCHGGKAHGRVLGSIGVVRNSRDHFTAREXRRGCCRPAGTDALPGIGKPRLIDRVDHIHGGNHSPETLHQRDQSLDAQHPLRTLTLVHSSVLIDVHQGATRRTVPSLPKPRGEGESPGFLHNL

SEQ ID NO: 1009433 - protein, 118 aa, Homo sapiens
MEDRDQQSYELWLRVREQFVRGPAKKEAVCYMVSMSFKRNRSDRFVQHPVLRRGCSVQNRDDHPGDHGYMDSKPIDGKFCMTCGSDSSKLHASCQHSRMKSSVITILLREWLIMPDVR

SEQ ID NO: 1009434 - protein, 263 aa, Homo sapiens
DPIHFPRPSPMAVSDQECIETLRGDERILFHSDTSELTEGAPRTRSPRRQGEGTISRRNTAVVKDELSEVLENQSIQADAERGGGRAIIQGCLWRKERIPRRQRKVCEATDVSQAPRVPPGGPCRRSKAEGHTNQATWGGRGAQEERRPDKTNSITPKDTQYCKTITREGTQQVTTWRPKLKEPYYKRGHEMAQSTQAQGGHTGWETRKGEAENTDKKGKEGRTEQEGKRAKAKVRRTNTREKSERKNRTDKAERRQQTKPGR

SEQ ID NO: 1009435 - protein, 328 aa, Homo sapiens
  misc_feature (235)..(235): Xaa can be any naturally occurring amino acid
  misc_feature (307)..(307): Xaa can be any naturally occurring amino acid
MPQAEPSYRMRIYAALTSWYDQRHSPSCLGNCGDLQLDERCKDMSSRGRVVPVLVWQRSDVRRLVTEWSRNIIGESWNAASLNPTGSQRRSSTQHGNPEGQYLEMLEQLGRTDDLYIRKMVIVGIIVCGHWDKQVSTECAEIRGPMKVIDKGVTTGSNTRWSTRADDRRRAWTRCLAPKDQGERQAGTIPQKAIQQVYLDLEARTTGKIHWGDTVTMSNTRTKRGAFNQRPTTKXGDGGPHRTHRQRIFDHSITRIGQKGGPIKTTQGGNEFGTRGKEECTERSQVTTAEPTQIHKLTHKAQTTHNXTRKNDSSPTREKANSNTKDRQ

SEQ ID NO: 1009436 - protein, 406 aa, Homo sapiens
MSAKRLLVSGETPASGAGAGAGAWQAAAKGRLCWGDSGQIQRVAARLTLRRLSRRPLTTRRRLDSNGHGLRTDGGRTDAARTHWQQDQRQLRLGRKEPLTPYERHDVPIAAHTTGTGTTRACTGPTEGTYERREDDHQLVTTEEDHIGKGDEHWKAIERQQTIGATVTVDDETQHRRVGPNTRKATSQGDNPTNVDMHKPLGNTVTAQIQHNRGGIDNTKDDRHVSSQANWRARAMRSSRATATGDVETRSHRQPSDWIAMSVATLAPQQQRTLGRKTTVTGIQRVGAKAKHRGQRQACGNSGKRALGQQMERQAYTGPRRSSNRENTESIAPEEEQDTQDTHDGGGRHRRTRDHHRQDGAMRQVSPEVRRIPRDEEAKAGDSPREGARTMRERTTTEHKGPTEQP

SEQ ID NO: 1009437 - protein, 363 aa, Homo sapiens
  misc_feature (91)..(91): Xaa can be any naturally occurring amino acid
  misc_feature (121)..(121): Xaa can be any naturally occurring amino acid
MVEASSWAAWTGIVAKQVLLGLEGWCSVRCEGITRIFVANFYEKTTVEDTRGISFTSSRSEHQTLYPWGPHTRLSGAPLAVIFWCGPMLTXNSLDAHKIAKDEGPRGPCVFGAPIIYRMFXDRGDFAISARIRTKGTETLLGKWGLGGFFAVGALSTPFHQGIRGWGRPPFGNNGATINPRKHNTYGVIHGPALISFGRRGPGPQWGAWFKSRRKWAFGGAAEGPEEVDTTRVHKRWANKRGTAAAPFGGKGRTRQEGKAGNTHGTENKTAGRKDRRQFPPPKGGFKAPPGVATQRAQPNGGTQVYRQNVGANYQTGFETQKRAAISTSGRRHTKTAPLGWRAPPGTRLDRTLGTDTLVGVGG

SEQ ID NO: 1009438 - protein, 406 aa, Homo sapiens
GHEYVQASDEARTLVVLRCAKKKVWLDPKLRPDDNLRNSQLPSADPRSVITMMGLDHPQGLVRVHSQWLDCLVIRHSCVPAAEGLWRHGAIGNAEVVHAKVLTEMNHEATCPRPAKLTRRTLDVTLWQTQRIGIMTRNIPVHTRNRNEMRNSVPSTCLSTTPRIPVKQGLDTGRKTMVAHHSNTRTQHGALYASNLCETNEPASQANVRRNRRRKEPKRGAPGDRRNRALPVGGQWKASASRALARGHHGHKRGIHIKGKAPKKVKDGAPGQLTCPAPRDGNTRNGTGRAMHRTAGPPETGQRRNNEQGKASQVAQDGKRQPWARTPPHSGHKGRQQSAMGNTANERDTQHLNTDQRPAYHRRTRQLTKGTQQYGGVEPTDITPTGRTTQSPLSRVTIQQAERLSN

SEQ ID NO: 1009439 - protein, 321 aa, Homo sapiens
MLEEAGEVLENMLKGLVCLSDLHRTFLPAVTAAGVRRTDDMPTTTAHEFTVITSMTAVRHVTGPAPNGNTEMPVLNTRTGRTDGRRTVLMPPHAVDDIAGYMDFLPTEPVPTNGALQGSRRQAQHQMVKIEFALPQGPKLGPARVVPPKEDQVRYPGTNFHIGTELRKAQAGNCVGTQLRRNTRPGTTTDRYLCGPEMRRDTERGHLGMYQYSNQTRPMQPTTGTCALHGPIRTKKGHPPATSFVHRHWKRITIDIWPAYQGDPQRLHQTHGTVSPEIEVTSHMTRGADFPKHLKGPGSSVTLGPRQYCHTGDPKTSSAGY

SEQ ID NO: 1009440 - protein, 379 aa, Homo sapiens
VFGNARQPLAEAHSRGGEDASEGGAEEGRRLCAVVAARCAGEWPGHNVRSLPMTIPDVFPALPLIAITRNPVFPLLFIKIIEVKNKKLVELLSKESSSRPSLMSASFYKRDDSNESDAGREPGLNIYHTGTFAQIHETAGPLGTKPAHDRHGTQKSPYHADELAGGARGAGGPEQQATRPRRQVKRGGNERRRRTELRRLGTRVDAWRTGSPNPLELPPGLRGAHWCDGQTKRFVPPMDSSQASPDGSVTQPLYLAHSIRLKRHPLTGTIPFAPVHTTHPYIAERTCFAFVTQMYCRCAVDPTSGIVVVASNRPKLFPLEVTKIWERTRAEPHIGASPISSPLHGLDTRTSLVTRRRRCNSPKSCHCIHGTYVPRYGKQ

SEQ ID NO: 1009441 - protein, 348 aa, Homo sapiens
  misc_feature (57)..(57): Xaa can be any naturally occurring amino acid
  misc_feature (114)..(114): Xaa can be any naturally occurring amino acid
RELVSFFLFVGFLLKIYWVLEKGEANSCLPFKVPQTLNVFPWPLIGDGFTVLKGSAXRKAIELWAGAHNGRPKLFAEQQRGTAFTGTSGDIETISGFTKWTAPRTGLDQYTAKXTYQCVLPHQSEEGTVTIPVELRGRQHEGYLQKCALTLMPPETEMPFTKLVTYLWTRDLSKISIGGGEKLKGKETDMIGLSRGRRLHFQRSRGLKNYSQRKLFNYTHTRGVEEVDIHVASGIPVFRYKERPNKRGVVARDHTKGSDKTTRRQVGQIVAEHRAQPTNGRPTDDACTPEKNARWNNNDTRRETKALHPTRTSSSSNGNRELNEELEQAPPTGSATQQLIYHKGSANR

SEQ ID NO: 1009442 - protein, 207 aa, Homo sapiens
MRWSKGSNILERPLWRHEVHHPSALYANIRLSYTEDNMSLHKVVDCRANASPKGSTGAQACGCSLVCKYRRENHRGSPTEDKPTGIAPMREWAPSEATVDYNTHTFLWNRYITSLEGTGLLPIKPRECTSVPTHLRHLFSEMMAGRTHGDTRRRISSHKGVEGYHPEIPLTHMWELAPFWPKKALFAARSAPRYNGARGNRMRTSEN

SEQ ID NO: 1009443 - protein, 180 aa, Homo sapiens
RDLIDNSFNRYTFNEDEGELPEWFCARGKTADTGYDSCLSVRRRWSITVKRWRDTFNARPIKERVAEAKARKKRRMLKRLVQYHGTEGMNAVSEHKCDDSQNEMKVAQLRSLYNEGWAEQGETGHVTYVVAKKGVGRKSAPATLGTSEVISRCVDSRTEDGPIEHSHVQEQTAIETANGK

SEQ ID NO: 1009444 - protein, 440 aa, Homo sapiens
  misc_feature (53)..(53): Xaa can be any naturally occurring amino acid
  misc_feature (110)..(110): Xaa can be any naturally occurring amino acid
MLQPFSEDVSSSIRTVIDSMAKNEASNFKANVTTVNFALDEIRYGDLTMEWDXMHRNMVVLLIESRTKWTVVGVLPEWARHGHDGTPRHWLPVSSARHGQWVVLHGNGEXLRRATPNVYSANNGVESSDGGLRLRPDSIRTIPLVASDKTSPMCLMYKRRTRTPRWGDPFGRPPVTRRAEIGGPQKRAAPKRVIGNNFWPRGKKDHRRHKEALLLDHTTFYKRAGLATKRNYRPAGGPPKWTQPMEDPAYAREGTQEGRGGVPKWRSTTSWGNRNRSDAISTSREARSPFARSQYHTEGKQHGEQDDWDTSPIDKVLTVWCGHQYRNRCLLKGANRCAKPHKRISEMANSVSTNFIQVGKAQHSGAKHTIGHPLEHIFGGFVVAPTGPLKRNDSAIAKTYTLPEHQEGTTPGPWRYKATRHNGHTGPVQRPSGERDTDVH

SEQ ID NO: 1009445 - protein, 120 aa, Homo sapiens
MSSEPQLTTNRRRANTARENLRQQPPDHEPTRHHRDPPKHALEDPQHRRPQRPGNSTTTTPTPATQPRATTHIPQHHPAPTKTRHPHHTAPPTAAPKHNQDTTSPPPPPTPPTHTKKTPT

SEQ ID NO: 1009446 - protein, 239 aa, Homo sapiens
SQSRDHRRAPLPVRARPACRVCSAARPWYGCDFRICSWPQGAPLSHMSRPGLGLAPRRLVQPRYYPSAAGSAMGSNAGSLPTAALPPVLTVRRDWRGISSLEAVRRKIRSLQEQADAAEERAGHPGQSRAWTTRGSLRETAEASRSFSEQTHQLVRGQSWIVPMERLGNSFAERWSEADQEQQMQSEMRHAQSLRVEPKMDRSTKNGNSGRSNVRKKGTTHSSLNNADRPIIQAGWPGS

SEQ ID NO: 1009447 - protein, 489 aa, Homo sapiens
MLQEMGWALLNLLSRCRASSTCFSAGISLKLTLPWDAFLPTPPDSDGDSCDLYACFMTPLLADGYRRVLKDSRSSHRERGTRAPLVKPGARHRGLRLSTGGYHPIQGSEKRDSKTWAEEESKPGQQSDTNLETSTYGKIPPKTGGQSLANPHAAIPAHKKYTETGTEPLEQKLRLHTGTDSSIGTRDRLTQNTQCEEHKPGKRQSKHNNSKKGNNIHGTITPTHTKNNAVHKRATRRITGKEPTQTHKMTTANPKRHTTKQGNESDKFTPTKTHSATDTGNHPQGNGETEAHGEARTIERTQRTANREGNNGKGKYRHTSSEKDKTQTLDKIETYNTTLEQCNSHGSGYRPASERHTSYMNTNNTNRHNNLQRREAPQTITKGGNSAKTSDKGQHRAPDTETPPRTTRQKTSPSTKETNAATTTGTAHRPDTAQEQATRSTTQPRAQNERQERRRRRQVTQRTRTTPVRTEDQTQTVARQTEHTTDNKA

SEQ ID NO: 1009448 - protein, 137 aa, Homo sapiens
GSQESCERAPVSRAVIYASIWLLATTVVSHPRYLELLERTSRPLKDPDGTRCSTTRDDGGGASDPRSSAKALTWQRRGAHYILRTCMQHLPPRTLNFLPRAMGEDAALREIAPQTTVNSHTSYNREQRYDDMRPKGA

SEQ ID NO: 1009449 - protein, 321 aa, Homo sapiens
ERTSLEFFIFFLGSPGTRAKSAGPGAGRLRPRIPPGAQFTTRTPFLHGAKVLSFSKPVVEGRKGVCTGDEIKRGQISSRGSVIEHPKEAETSVGTREWGSIPLLVFHPKRNVHPGIAYRLLPNHVARGQRNSRGLVDQFRLVFPVNLLARYPLCRDPSPKDRRPWGNSSPVPKGPIELISTKGDVHDGHMKAEYPMGGVSHNPKMPIPLNSGTSKYSQQCWGPNNPVGLHKAPVAPTHTVGSTNIQHVRMQTGPITRGATPPMGWATKREHTYKGRALNKRSCGTISRPNRGPPPHMAKKRYTGLYAQHNPAEAPHNLWRR

SEQ ID NO: 1009450 - protein, 337 aa, Homo sapiens
GPQATRPPEGTLSVDFPEPIPSRDWRYQRPLQPPVSEETSTRPAGPWTYRCPPVQTCNLREALDGCIPVTPTFVHRDWYRRLYMQHLVARCSSKKSHVLYHPCAHFTGERLLTLVPWLLSSRFQLILSKPGPATIVSITSTGRAALPVWGLCAKAYHSKAATLRPAPFVCMHQQVALAGVQECGAALAAVTLTRCFYAPVTNSLHGEISLISVRRVATRFPSCLASGLRVTVHQGSGSRARAPSTRPASPFLVGLLPIPLLNGASSTLQDCRGRLRGSIGHNDRPLARCWGPLVGPRKKGGLTNDSKHGPGHHRKGGPLCHGYDGDPSMNGSPADNG

SEQ ID NO: 1009451 - protein, 259 aa, Homo sapiens
TKGILLQPLWRDKEGISVTLEGANFGLRSTSCCVSNPWYQQVPAAACTCTTIVPYGASTDVWEGLQCSWLSLAYVLKDPETRQLVLQTGALVLSDNGICCYDEFDKMTESTRSVLHEVMAQHYSVHRNRTGIICQLNARTSSPESSHALIPLRSQVEILMRNQALKHIQVPHSFIDQGLIVIFLMLDPQDEAYDRRLAHHLVALYYQSEEHGRGGAPGHWLRAKGQYIAYAHSYHHARGSVQEASQALIEALCRHDDTL

SEQ ID NO: 1009452 - protein, 98 aa, Homo sapiens
AAAGHGFQSAEGEAAVDSGPGTQLPAARKAERPSAAPRARASYLSSPAAAAEDKRAAHDAGPSSVIGAWETEHVGKTCLLISYTSNALSWRLYTLTGL

SEQ ID NO: 1009453 - protein, 102 aa, Homo sapiens
ILDDRRGVESLARIAWSCIHQSETPALDIWMPLILLHGYSIYWCVLHEPLTDQGCYHHDPAKPAYLVKSLCLTTFYGPCQITRGFNAASSRLRVRGQLNYLD

SEQ ID NO: 1009454 - protein, 261 aa, Homo sapiens
DSSSNPRSQIRKLSVSDPAEGEAETELDSFGFPDPFTLTTLACEVLGWEYFTEQYTLLPCAYGAPNVPIYTWWLTTGRTWVMRWRLPCEQLNRRYQPRLRFQKQRLLNGYRRFDPARGMAYHPGTCCLELCDTTVGHRRGPGLARGQSCDGHLKPGCEIHTICPNVTWWSPDLQLVLPLTEWLKLLPAPGYLEAFADNVLESTKNMPELTSDCWSSGPPKTGGRGMLQNTIFFGGSKVQELEFRSDGYPWVLRLAWFGVAK

SEQ ID NO: 1009455 - protein, 116 aa, Homo sapiens
MALLKIGLALVNPLRVNSSFPVGSNVHLEIHISTYHVTSPSFRLGRNAPRPPSDTRGLRGRISALTADSQKRTAPQTADNHFQTVTQRLTATPSTQTRESGTTAPRATRATRTSNK

SEQ ID NO: 1009456 - protein, 255 aa, Homo sapiens
RALRLQDETRTSQVTWRHVLAVWGLGAKVILLSQRKPVIDFGGPGFLADISALEVQLASKSTGDRRDETTPRGIRVYYTAKLRRFNAGIMELGLVVHGQVMAMPPRETAFILTGYCDGQVHASWHCLPPEIHIFASQIHTHLLVRKVVTVLVRDGREWEIVNQDNHYSPHFQEIRMLTRRIVSVIREMCSSVSCTYNPEDRELGTVGGFGILEEMCVNNVAYQAVEADGALKETLWNARVPAEVLQLIKRYQKED

SEQ ID NO: 1009457 - protein, 222 aa, Homo sapiens
MERNEEAKVPRPHGRDDHVTDVRTRDHRENRDDGRRQWECPPTKCRPKQEQDTKNIEGDKWEEREQGPAKAKTSDTEIGRRQRRKPHGRQEVDNRGSTKTNKAKRNRGEPRKRPCERQKRAENRDTRQIKEGERKRDTEKGAGEEAQARKAAGSRRKGSRKRKCEPQKRDQTRKTEDEEKTTEKRTRKTQAQDTGTGGREERTTKRKREQRESRRQKRNKER

SEQ ID NO: 1009458 - protein, 133 aa, Homo sapiens
LEGTFFTRKYLEESVSTNGDHGDPPSCEVAAQRGLGVEIPSTPPESSYPRRAKGSCRADCVAPRFQGTTWDPIFPSVWPGLFETAVRRGRIPTRSPVGHPCGRQTSPVRDSQTLSARTIVSRSDSQSLEIYAI

SEQ ID NO: 1009459 - protein, 74 aa, Homo sapiens
  misc_feature (50)..(50): Xaa can be any naturally occurring amino acid
AHVLALEPQDFIHVTWHPIPKTTETVKIITDCDWEHSCVMEQTSCFLPIXHLGPEQAVMLGTIICSRLQSSRTG

SEQ ID NO: 1009460 - protein, 283 aa, Homo sapiens
MGVRRRMISCRCVPRWEAKGAVAGCAGNCGWGPVVRDAACALLSGKRPACSGRLCAPGVPCAEGVVGALLQEDDGALRPTTKWPPPGGIPHSPNCCPSEPREMHPSSCDLRDTGSWRPWANMKMEDLRSKASGDLSQGFMQTRGWQASKVHRGIVPSSRGNTYPDPLIRIRIFGPYSTVPFRCGLRIVNPRSGWESPVDTAERYGVEGTLGQRFAGRAVRSDPIGRVVDHQRERGRIYRRACARQRRGATRHHRGLVRTRRGLSTGAAAPEWSPQESRLSAER

SEQ ID NO: 1009461 - protein, 274 aa, Homo sapiens
MPERAGSEGVPLWRLGRPGAVLLADVALAGGVGSGRRGPVFGPVGMSGRWVHRAVEVPVAAGGSMVTAWQLQRQSLDVCHPDGPTYEGTRTIGPRNPHSWRTPYTEPPRRSYLFVALKRNARQGPRTSAISLRRRGNIGLIGGRQDTGATTQQPGGTLALKAYRGQQTICYKAQVGVQRGRMGRIPPINESIYEERYSQGDKGQPSIPVNGRATQKNKIYKRKWGGTIIKGTSKAQRDDSFERYHNEGPNLREEIYRTNAESGTKPWRRPCDER

SEQ ID NO: 1009462 - protein, 84 aa, Homo sapiens
LRRRRGSGAYMPVARMTGFVCTTYVTPRRTLREYSRLDTRAEADLAELWARESRREVWRVNIYRDVPKITAKDRTQVNLIDGFE

SEQ ID NO: 1009463 - protein, 305 aa, Homo sapiens
MGIHWWILSFVLLHVSHDTMFPFYMLLEDWTATTTPGCGSERILADMKKKLATWRRTRVKSQRKTLALVHEADKHCLIDSFEEHCGPGFRHIHLHLQGVPGTLGNQHFLGQCLGANQSRSNGKETVVGRLQRESHAFNGSNWIMLIIKGVMTYDPPAVAHGASARAVLTDSPCTPTHPTGPLQPLSPEDPWHKSPDSLSYTPPSEQWDYASTAPLLQTRQKLYPHATCEALIPACFNTLTHGYLGHPPSDSNGSKMIWYGEGIPLRSAQAPVQARAGPTGDPGRDSWPPTHRPPLASHLAQTPAR

SEQ ID NO: 1009464 - protein, 104 aa, Homo sapiens
MSWDTGVREQILVGTGRDVLIDIRRPGCGIDNVGCNHREFSYKNVPETGDERSGYECVKYIPIGSGCGNEKWNIEETGIGERGKSSDNTERQVGIVQITHRPLS

SEQ ID NO: 1009465 - protein, 142 aa, Homo sapiens
MHANSWPCDIHGDLGPNGASYARTSPPSSCYMAQLKLLLLLITMEQLPESAYMHQLLGLKLLFLLYQNLGGLSSTRHVGAAALPRTYRPNVYINAPKCTLEQYLGWRASYNKVFLGQGYTFPSRRAYSLLSFDIPAPTYSGD

SEQ ID NO: 1009466 - protein, 42 aa, Homo sapiens
MPRPYDGNRNSARSPPDPRLDPVHENTHNPPPPFRRVTPCQR

SEQ ID NO: 1009467 - protein, 389 aa, Homo sapiens
VARRHVSVPEAGEGKLLRSAPGEEEPPWSFRVRARPGPWIQCLSPCPLSSASSLAAAAAAAAAGPELGPSQARQLEENRMGSPAPSKCEVCKYVRCGADSQPLSETGKDQGGDMDTGLMAILEPRRPLAVKYNQVGPCASNRQSTETICTDDPWHYSLTHMQRTGQQSRLSTMRMFTDTFAHIYSNLVPPQAVKGRVHGTSPYEAGAHRRVLAERWLDPSKRRPGGEFDMQRAKRFRPGQLAPQGNGIHTGRPPAPRRTVTAQSTPAPQHATREVKAGPPRRRARTRSPTADEEPARGARRQARKPRQSKERGRTQTRATHNGQTRQGRSERKEQGQERAGKRETQTAPEREAHEKRTTREREGPEDRQIDRHPERRRREQGQDTTEDH

SEQ ID NO: 1009468 - protein, 339 aa, Homo sapiens
GLFENTGLGRAREAPDVLALPSMDVRLCLRSMLSAVIARLVSRPNSLTEKSGSWLERLRSHPCDLYRRRHSLEACPRATTSPFSAFRTWSSQEAPVMGVDIRSITRTERVRRKEPTEPRSSAYRERWLAQGEYSVYWRRRINIPQYRTQDEVATRSVQRRSHANGPTSETLYPGMNPRRMPGIHGGGEKTENWPGWLRGSSNGIECSGAAGEGYPKHMATRNVALGTRGITRGGRAGPESIIGQQGTTESIQREQEPTYGRLGDLNSRWCHVGKVFTLALIPGPSDKGAPNQGWLTGATNGGKEPQGRPAGASPSTPEARTGGELPEGPGHCHRTVCQE

SEQ ID NO: 1009469 - protein, 30 aa, Homo sapiens
MDLALTAQGDAILGCCCHRHLSGVNQPALP

SEQ ID NO: 1009470 - protein, 410 aa, Homo sapiens
MTLTCRNLCADVNVLMALIINGPIKSFCYRRLHVPRPTQAPRRMCYSMTTEGAGRPARQVPHRDNYNIRQVDTHIHASSCMNQKHLLRFIKRAMKRHLEEIVHVEQGREQTLREVSESMNLRPYDLSVDTLDVHADRNHFPSTLTRSNAKYNPIAESVLREIFIKTDNRVSGKYLAHIHQGTVNAPAPWQHEHHTTHAHTATPHTPRPHPRDSPPTNPGPKQNPHTPPRDTPTQQNNPAPAPTEGPRPTQQTTRTTGHQTPPKLTAKDPNTEQNHTKNNKHHNHNSEKKATTPTPPPPTTAPTPPQNPPKNTQQSAKHNRCHHAPQQPNTPRENRNSDPQKAHTAQQQNKEPPTNTNGQHHPHRTENENKITGPCHGTANTQTHHPSTPQTHTEAEHNNHHTRHKYETKA

SEQ ID NO: 1009471 - protein, 225 aa, Homo sapiens
MRWEDLQGTSVPPAEEDLVKRVHDWQRRVMKRGTEWVRAWGTETVSPRVRDPRGVSEPFLVTKHVCIRPQHGGSPLGTFARGLRDSNGAITVTGNTWQREPGIPFSRKCVDRHLARGATGTRPQGDNAPPGPPRYTRRRTSSTGKDDTAHNEGCTWRQNGTSRCSSNQQRGETPQKPITLVAYDESTLNKGGTWTIIVLRHHLRGRKLSTEQLKAITKITWEEIQ

SEQ ID NO: 1009472 - protein, 263 aa, Homo sapiens
MVDWTSDYLSTYKRPSAAFVKMARYVRLHAGSEKPIHRIKRVAKCRPCELTQFSTQGSVVLAQKSAYLMHALKVRWTDYVHDPKEVRQYANWRMRGHEDLVEGPRVRTQWNGLACAPSGDCLRNETRPTVSVSERVRLHKPSEPALVGETQDKAQAEWCISTHRTSVIPRSKLDCRSLPCPLIVRIELRGPRYLRFIQRGNKGQRTWRPVLSTPGKAPSQPLVRRIISKGEPSGRPKGRILRFKPWSGHAIRWDPKFSKMNAE

SEQ ID NO: 1009473 - protein, 138 aa, Homo sapiens
KCADDAGAAGGALWGPGGPGMGNRGGFRGGFGSGIRWPGVAAVERGPGPRPRELAESKAEDTGVDALSPKEEPHMVKDMKNKSLEEIYLYYLPIKESEIIGFLPGESLSQGIEVMRDYAQCARSNTRDRGSGTKVQGI

SEQ ID NO: 1009474 - protein, 431 aa, Homo sapiens
AKHQMADDCRCSLVCGPWGALVALGWGTACGFRGVFLAVASWAGVAAVDGAGAEAAELAECKAEDKEWMPVTKFGPVGQRNIKHQVPWRRSIYSPCTIKESEIIDIFLGGLSHRTGRFRSIIASDRSRPVTASDNQVQGIKYAYRGTTMDTFENWGCKSAPKRGGQPGQSVGEHHTWHQALTIRPRMQTEATVGNKDREKAHSKLSTMHRVDQDRMKIHENGSNDTSNNHSNTEGGNIGKSSTSTKTRCEREGKAVSPIECGMAIYEETIGNKHYKTPGGAKTYAKPHKKKNYTTHTGEPIWKSQQVLKNAVNEANSENPKRESILSNGRQMGISHAKDITTIEYKEESDVTHKPIRIKQTPKRKTELNGGQAGNPRDSQKLSGLTNTKGSNKYTRHQAYTMELSGVKRKSHTRQEKQDDKEKTKKDMSEA

SEQ ID NO: 1009475 - protein, 81 aa, Homo sapiens
GARPASGASNASGGRHDLSATVRGSCMRRHMLTQVERHAACRLGQVHEEFKQNIENVSRGDSYSGSLQRVRAQAGRSLDLW

SEQ ID NO: 1009476 - protein, 485 aa, Homo sapiens
ASFASPAEPHRSDTMEKVKVGVNGLVVLGAWSPAADILTLVKVDIVAINDPFIDLNYMVIHVTNMIPPKDKYHGTVQRLENGKLVHQWKSHNNIFQERDPSKIKWGDRWPLSTVVESTEVFKHPWKKAWGSLCRGEPTKGTIILCTTTADDPMYVHGDDEPIEQEMTHRAHKIQYKHKAYLQQTKVAYKHPKDHREHSMNNKEVYGEKGLIEPQGQGHTLDSQERNEGHRAQHGDNCRKMNETERGNITENNYSHLEKHTRRRLAQETKRGAKRRDPLKACETSTQTNMDKWTKPEDHNTMTQRVNTEWSGKPETPGANTRNNTPEQKHGMHHTTRGGATQSNRKRPTPKRTYTEKKQETHRRTPHDKHQKKKQTRRNRHTKAGEGDHETVHGKTDRTDTQTDTQGTHNVRDKNKREKTKSTKQHQQAISTREHHAKKNTKGKQQTTRRGDRAQRNQRTQNTTRKNVNNRKEGARQRKHKKSRTT

SEQ ID NO: 1009477 - protein, 301 aa, Homo sapiens
GARAAWRAGDPPRQCQRPAPDPRPALSGPSPALGTLRARDSRPVLFCCPSMELRVLRMAPCASAPRVRCRDPAGCCGDQRVLLEPAPPGVSSYVPRASYFQCVHLGRSSRTLRKMLAYWMLEVCEEQRCERAKVFPLGLSYLGIGLPALGVPTPDHAPLVREGSLRCRVCSAGWALPSLVTKNEGPIDPFGKTMLHHSKRTHDVSSFPRRSCRGPCGRRACVPKGDQASKQREPKGPDLVRSDTIEQLPCAPPNTLASPGPHYTINTMNEIPNHWPPSEPPTKINTMPYTKTQYSWTPVSC

SEQ ID NO: 1009478 - protein, 336 aa, Homo sapiens
MLSITLGDRANTPCQAATRIGPLDRNRTGPDTPTGTMTKRRSQANHHESTPHDHSSPHLARPTTCHDTTMIEPAQWPSTPSTTALRHSPPWRHTPMPNPVQHENTIPRWHQQKRTHPIQTHKPRTQYRHNPPPEDNAPHEHHHTTEAPYSQQPSPSADHQPKPHYPPISPHYQKVQHPNTLYTHTTPPPLHTTTDHPSTPPPITPQTYGTIRPPPSTPTCTTQNETAPSNEERNYPRSDGTINNRNPRAPLGATNSQRAAPPIITTQEPWASQHISTTHIRVNYGRPRINTDTSPHDNGRVLTNHTTTARREHRKKATTPNTTATHKTNTNAPHQP

SEQ ID NO: 1009479 - protein, 105 aa, Homo sapiens
LICSPPCCMVQRAGIIEMREEAALGRSAEPSTGRIPDSLNNCVNKDHLTDAIHWASHGPRSSCTLVAQLGPALSGTLPGVVGVVPLVASQLLWKCIGRTMGPVYP

SEQ ID NO: 1009480 - protein, 173 aa, Homo sapiens
MSQTIVQHPHWSNPNAPVESCIQEETAGRHTKKGHPKLTPTFTEVPIQHNGLENANVVQPGYTRTKSLPQTRRPRGHGYTGPRESHTVRFPARNARANLPTRDIDRQPYSTWRHITLEWNRASLEKTNKRHQKVQYLQRQKHNQIKSRATKNNSRLIPFTITSDLTTKMNRPI

SEQ ID NO: 1009481 - protein, 102 aa, Homo sapiens
QMVCLRTAAQHAGGPTARASPELPEGPPFPALAGCWTLAIFTRVCLAGTDLCPLLSPGLWLQPHRTGGPGGRLERGGEEGAVSPQRPWAPDFWQRFPDTASC

SEQ ID NO: 1009482 - protein, 69 aa, Homo sapiens
MGQVQDRRQGVGFRDVVLPWWLSEEGSASSWCSEGDMFVSNGWVVVQWRGDVDRMLPRWDMVIGCGERY

SEQ ID NO: 1009483 - protein, 160 aa, Homo sapiens
KRAKIDFFEGKGNEDNCKLTVTPVEKKNNKGGGFCLGGLVRAQVDFQEQGHFVALSKFLLGIIFWNRVYSHHCFLRDLETTRQTCLETQTLSITSKKDPFSVKLKVNGQQFWELVRGGSSPVFAPTWDELIIRDKNSLSLKQAFAKRGVERVRQEEAGAD

SEQ ID NO: 1009484 - protein, 103 aa, Homo sapiens
RAPPYWLLSCEGSGSGGGGGGGGAVAAEAACAIYQASIKCYGGAAASDNLPDKFEPKMTKTKGKEERIADICSSRPMLRRRWSCAFGHIYAESDEKGDICSTV

SEQ ID NO: 1009485 - protein, 146 aa, Homo sapiens
GQTVPAYVGLPCGRPPAEPSAGPAAMEVPQPEPAPGSDSQVQQACAVCAQEVSRPTSRCLHAWDLMASMVDPRVQRLACIPRRVTTLTPNHARTSPGAQEAESTKGRQVVGHLDSITTGPHRRAEEAQLIPLILRTEGNSEKFHPA

SEQ ID NO: 1009486 - protein, 426 aa, Homo sapiens
EQRQQPDEQRMRSGAMVKIACVRGGGGGGVPLLRVAAVRACRAPKRLKIDNACADQAQECVLCWWLGGGAWGCAGWLACGWGELRMTLNKTPASPVVHIRGLDGRCWCKQTFVEALQEFGPISYVVENALNNEDKHWLEVSNDCVGGGLATRSMKQTAKPEEKAEVLRIWHGSKHQTYNRNEITYITRPGKDSTTGAMGRPTGNRTYHGKALQTTMQQQRHYYHKSLGKPRNYKFTKIATQQGLVYTIQEDLNPLVRFPYRWSTLSPPAKNLGTHQLPRNSEPGEDTTAATIGIGTPYSNHPQIYNISRPQGRTHTALYSTKDVEAQNKIHHFTLGNWQRSALSERKTGKITDQKPTLTTGDLNNVRLYHSKVESREINHCKHTYENKHPRRTIKCETQRLKRHLDRHKTTTKQDHNPTHNNITRY

SEQ ID NO: 1009487 - protein, 198 aa, Homo sapiens
MCGFYRLLLAEHYSALMVPGFAQLSQGWIACAAFARRTPCDPARLLLASTDDKRNSPKIRPSPSHAVPACLALPLSGPCHWPPRPQGLSCWLLGARRAWEPPWKGQRESQVRGQLTVIRRLSQVPHWETTVALVRGVTLGHTRLCPQQPSFLYSSPGTRPSRLRRPRMLHLQRRGGPEGAHIADVLAAPGGAPGVEAD

SEQ ID NO: 1009488 - protein, 192 aa, Homo sapiens
GISDCGGLPEREVSVPTFSWEEIQKHNLQHRNLMVIDRKVYNITKVAIHDTTGGAKTRSSRTTYAGEDCKRSAIPTPLRNTDLEITMRQRSLNIPMTDLGETGTPGEGTPQEPGSHRTTKLHNESRRANIPESALKEKDGHDGNDENPAIKEAKSTDDILSITYPSHMGTHNYRYDTLRTHADFSKIEDYPT

SEQ ID NO: 1009489 - protein, 105 aa, Homo sapiens
MVGDDVIMAMIRGMMDEKGTKIVALFPDLIARRLYERPGQGGTQERGTTGLMHQTALLSDLTKHSARGATNWNVNEQSLHKATPEENQRPSILTEERSRGQLTTQ

SEQ ID NO: 1009490 - protein, 252 aa, Homo sapiens
GCLAVSEAAVSELGGSGGLLFLLVRDLGLMCPTWPGRALPWLACASCLMRAEPARDGCRGQRGGPSSRVRAVGGAQAGRLGSAAQPELFASGIRDLLLNIELENGPSSLTDFYELKSQSTLPHYAQSTPNITCRANTKATPATSSLASSFLQGGAPGTPDMSVILSSIEGVLCMRGNRLNAGPGCRRQGEGVSGQRKQCQLRGSLSHRSANLRIPDDTMWIGSILNGGTNGGRQTPGQGAREVIKVQTHLEN

SEQ ID NO: 1009491 - protein, 161 aa, Homo sapiens
RRSRRAEQFKMCDIHRRPDRRDECEGAVTLSTFCRMLQTVAKNKDQGIYEDYVEGLRDDLTEVKENGHRVMELREDREHVSLVTLGEKMTEEEGRDAVGKGMRTAKRDRLYRNDNAEMTAESMSEDEEEPKGARDIRYSSGHAAMRRGTVPQHLTPKPTPN

SEQ ID NO: 1009492 - protein, 342 aa, Homo sapiens
YPSMLYCNGDGRFELVPNRALHVQTQCFDAVENWHRLPEVVHLGDFQGPTKVDDGLYPLSHQHAGPLLNGGHQLCLPAMATTEHDLGPPVTLPCHNTSPPRPIAVDFPCCQIENSHSIAWMLDPIPPANSCDGPISEPLVYYTIHSAKMLVAFAGLESGHRQPMPRWETNSIPRVTGKHNLPNALRGPCTPEVTTHQYLTIHVRHLAIGHPNNTLRSNTRFLQSITSDLVRQNGSHFTIVTNYYPPFTSGPVPIYYGPVLALKRDFDSNPHRDVRQAIPKSGSQLRFRIPSCHFQRLTPRTTRWWHPSHFTPIGRSGPPSAQGDAHGAPTVRQVGTPMGPSL

SEQ ID NO: 1009493 - protein, 73 aa, Homo sapiens
FVKPSGSESCHEGQEAMVSENELWMRCLLWIPGLMDLRYEDIAYAYDMTIEVGLAIVGSSEAPPYITLGLTGS

SEQ ID NO: 1009494 - protein, 130 aa, Homo sapiens
VSTKPEESWQCVQLCPGQRGQRCICTVVSPTADHVFTGMPAQNSSGSYCEKVQNMFNAIEVLEVRTRETCSTVENDGEPNERTWRSKVQTGGGEVIRQHWTGQILPGLTFKGVYYKCCTRTERSQIQVHM

SEQ ID NO: 1009495 - protein, 66 aa, Homo sapiens
GPDFLKRLGGLAAILRVFEMPPKDNKKKKDPGNSAKKDKAPSEQYPGAGPKRRMWCPRANVRDKSQ

SEQ ID NO: 1009496 - protein, 308 aa, Homo sapiens
ATGLHLPAEGAAMNPLFGPNLFLLQQEQQGLAGPLGDSLGWRPSSPVGGDLPPVPLSAWRACCLLCLPGPGPGPCLPPWPSVMTMGSNINVLKTLNLRFRCFLAKVHELERRNRLLEKLICSKRWRRVMQGRRGLGTSTHRQCRPASSGPSAPVGLQLGAARSGRCLAALRRACWALPARSPVGPSRPRWQPLVVLQLPAPALILVGRFMPGTSGRSRTPAARAGMEPTLVQRPGLSVGCTRMGWASRSETITPEIRALYKCLANVKRERDEYKRRCFDRLNDTKEEEEGFDKICMVREKGSRIGDGV

SEQ ID NO: 1009497 - protein, 533 aa, Homo sapiens
RRLLELLKCRITSVPISGKTKAGMTTDDKPIRALACRGPIALLDKLTGQTHLTSSARLKAKLDRLTLHAHLRHRTYYTEPQLATSQELLTNWPVDPHQSHLGHHWTCTHYTPRALSQEVVTGPFYQRFAHVDVTKTTSFQIGLTFSERGTLRMTLTSFNFQKPIEKMIKRFDANGVYRLAQWSKPLLTPGNFPARFAGQTPLKPLGNPLFRHNDTMVAKLSNDNRLAMPQIGRHFTRTTHFEDTLTLPRDHFRTTKVSSNKTSCTYYSHTYKKQNLVDKHHTKISMHCNRPHTSESCAPRRLVCKNGNASQSRLMSKLRIGRPLCMSHTDSGQHRPPGQTKRTPLAHTHVRNSSPTLHLTRDEHNNQPWRANRDHGLEPICQHQESAHPYPSTRFLRQSPQEENTTGSKEPDNQNTARYCRDTRSRESTYTTLPRPRIGPTGAFTRLEAIAITNKERTMAQQPTEAPMDTRVVVTTRQPDTVSYCVLRDPRVVPQKEYQVPSTERHAGKDLLDRDDGGMSTLIRCSNNNVIYN

SEQ ID NO: 1009498 - protein, 165 aa, Homo sapiens
MGYRLTGISCCRVLMLDRMYDVDRAQREWIATARVTWLWNDGHFVSPRVRIRLGMCLGLGPLIDDEASVHTKEAVSIIAGYGHQQSSDVLVPPHWYIAPKAALLSFRNANNDSPYNRINRSQPGLRLQSEAHGIMPERIATDTDTHVVTHYLPSLPRFTSLTCAE

SEQ ID NO: 1009499 - protein, 271 aa, Homo sapiens
MSNSIVRVDQSELGYLANLTEHGPVPEQRFRMPETVISMPCPQSAETCTYEENQLSRLDGPLVFAGLVSLQELYLKPVIQLYRIAPQGLFLASGNVAAAVTLNSNRPEGHLTCRWFEMLPKLEILMIGGNKVDAILDMKLPAPGNCVALVLAGMNLREISDYALLRGLQSLESLSFYDNQLARVARRALEQVPGSSSRLNKNPLQRVGRGTLPTCLNLTELGLSNVEGAGLHRQVWPVEPPELTKLDITNTQGVFIHPGPSTTGPDETFCQ

SEQ ID NO: 1009500 - protein, 73 aa, Homo sapiens
GDEVSVPSLAEAWLLAMVKRYLTSFPIDERVQSHMLHLEHDLVHVTRKNQPGRREFEVLDIKAEFTGPTVPPI

SEQ ID NO: 1009501 - protein, 101 aa, Homo sapiens
ASICENARRYCEALLLMPYKSLLSQYKEREVVTIKMSWYVYIEHRLMMEQRIRDPGMVRSPQKQYPAELMRRFELYFQGPSSSKPRVIRECAGLTLWATVR

SEQ ID NO: 1009502 - protein, 186 aa, Homo sapiens
GSSAPESLAARRCMARVAWGAAVVAAGHAAGGGSTEKYSFRGFPPGGPDACCACWLYCGTALGAVLRVDELGADELRCYLGVLAAAVLHLAPALDMRVPSVHAKSCSVVPVPCGQALIPERLDCWQTELGLAGGFAGFFVACVPVMSNALPCPCGAACLKRALACPRSFPGLRLTRGPGGPGLACR

SEQ ID NO: 1009503 - protein, 231 aa, Homo sapiens
ELRKVVEFHHARRSSFRETSFVVQWADLIICKTRRNSVFQEGMKNKIVIFGLVEAAGPGCLPGTYCPGDGTMALALIVARHQCRSWMDSVTFAYSFTHLRLLTTNPQSSFLRQEPRAGWDGRRERHTYMILRTHSREVDPIVMYPRCPRLKGRRGEAATNSERDPQRKITEVIHVEKAKGKQPWDTERRRGRPPRLCRWMLHQDTQLRGGRTADPVRNKTHKVKTVRHRTE

SEQ ID NO: 1009504 - protein, 169 aa, Homo sapiens
LRVRSRPVNRRVRGPVRGAANSPPRALLRVLVFSVWRLVRGTWEILVAAPWGMPWLGAVRSLPDRAYVLSLYALHVKCRARCPGTGDYRALCDVGYSRHQPVRRVFSSMVVARGFLGWWMHVLGHVTESSIIPIGLYGCHLSSNSLLGLLVTRWLADHCWAPLIREVLA

SEQ ID NO: 1009505 - protein, 75 aa, Homo sapiens
LRYAFSCDIDEAEHLVPSTMWVQDSVIEVDCLNVEMFEIFLLTNAIMAEQTVACLYQLCALKILEWPYCSFQMVS

SEQ ID NO: 1009506 - protein, 295 aa, Homo sapiens
LSGLVRQPGSRVDVPLWGRPISIAERMRRAGDVRAAAWYLIGAHLSMPSAGHREHEKHNDTWSRRQCAVSVAKRLDSWMPVNVGGKRRGVGAGQRGQKAESPWEVSHGNMRLRAVGQCDSPPRCAASKPGRRRGLNGLTEGPVCPRSSQEHLHVEGRMPSLQFSKHSGRKERKQVFPERNQGMRRFDNPRLRTGLDCHIKGNVRGWGPPQRRQGMPPVDEKRGPSSYVQFHKPLYLGPLLAGTDARQGMCTAFGRGKEKVLGADVLPIQGEGNSLALVLEKRSHQAFGVGPVVRE

SEQ ID NO: 1009507 - protein, 170 aa, Homo sapiens
DAAAHWTPTKTHMTHSSPVSDHEAQPMRCWAPVASTPCVKIYICPGQQGWGGRMTQDYGASVETQAVQGDGTFQKWAAVRGAFCEMEHEIHLPMCSLRVCPKPLTLRWELSSQHQHLPIVGDLLLAWFSIGAVITGAVVAAVMCEEEDAQIRKGGSYHSGCKQVTVPQGY

SEQ ID NO: 1009508 - protein, 271 aa, Homo sapiens
MMAPCWRRRVSAGPEPGPATLEHERLLGASPMDDWAIYMMNDRGSIRALTRQASWTRTTDTPTYSAMCPLGYHCHLPGGPTLLPTLGSRQSDAPKDDLPLTPNGCLSDPCQNTTEPISRVIPIGTDLPTRRPPATPLTDPPSATHDLAHEPKHSFPHEPPMQANGPYPDPPPSPTTNPSAPPPSITTSLHTSHTPPHANSPRHHPSPQSPIPPKAAMHAQMAPSQTSPTRTSFSAADIRPPPAPQSHEAYPRAGVPPPRGAPAWTAPHDEA

SEQ ID NO: 1009509 - protein, 225 aa, Homo sapiens
MTSSALEYPYNENTIVQGVPGANWAFSMALVCGPMVLTLSPDVGNPTYEASGGIPCSPYGGPKGVVPTGVRAKKLVTGLEVILIIETSFDRGLDRDGAMETKPNRNSARSPGPIRIPPPKGVRGKLLGVILGQVTPIGVPPFIRRYLNPGWNSLSPYGHFPNPDGNNLRKGAFPTMELAGGFRNRGRFGQRGHLTVRHLQLVSVGTIRRRLGCGHIALDCKMGSP

SEQ ID NO: 1009510 - protein, 73 aa, Homo sapiens
GELALAEAGAIDTQTCRPRGILHPPSRRGSTLEGHADFLDSRTGYRLHCTVSITEHGGGQNFGNGGRGVACAR

SEQ ID NO: 1009511 - protein, 73 aa, Homo sapiens
GRSGKMQLKLDGDQSRDAVNKVLYRMRVAGQLGFVDVLGLEQESLALVPAPVCALLLLFPLTAQYENFRKRAD

SEQ ID NO: 1009512 - protein, 110 aa, Homo sapiens
MWRWCRGPSLWPPGGMGAAALSELPPRSAVYSGAATERCSSITSDHDTDPERTWWSYKGEIFQGKTFDARASFLGPGECRRGRLCAVGKRQQPRWIVELTQGSFMTPFLP

SEQ ID NO: 1009513 - protein, 144 aa, Homo sapiens
MPSEDSATWKSNYFLKIIQLLDDYPKCFIVCEHDNVGSNAWVQQILHVLFRWECAVCADVAMNTMMLQVPSEVHLENNPALEKLAAPHIPGGATFGLLVFTKGRTSLRIRDMLLANKCASCCRAGAIAPCEVTVPAQNTGLGPE

SEQ ID NO: 1009514 - protein, 250 aa, Homo sapiens
REFLLYQQRLIFAGKQAGSMDCTLSDYNIQKESTLHLVLRLRGGAIEKEEEVLHHSQVRIMHKHESKVQAGCPDKYQYGGMRHGKQLVAFVESALLMNVVAGVSHWQHFAIDTSTQLWASVLALIVTVYQTKPERQVNLYDVHSHTTMNLTPHQQPTKTSKRQFILLRGMPRSTTLDGYNSNNLSRPSRAQHHALDSTVDPQELTLLSTTRLGKRTLARGSPTYISRDQEHELFRTNCQGINPCSTLNSG

SEQ ID NO: 1009515 - protein, 96 aa, Homo sapiens
MAAVTLYRKPENWRAFKDSHQLLQYSGAQVRVLSEQPTSILAKATAAHELSSRKVSCRARSTDDMRGDDWILLVFAEQAAIAYAYREQMSDACGDS

SEQ ID NO: 1009516 - protein, 199 aa, Homo sapiens
GQRSHAKDPTSLEEEIKEIVEAGSSKALDNTPEFELSDIFYFCAARGMETSYGLMRCTREISQRERTGGPGDLLQQNRIIDFQYDQPFGSRILCGVRTADSGTGLPRLCDVRDTSAGLSSPVLALLHGCWQPNWSVSEDITCSKDGERVLEEEVAVDYRHLGHALEGGNIPGQSSDTRVTCPDGSQAPEPNHCLLAYVV

SEQ ID NO: 1009517 - protein, 166 aa, Homo sapiens
MDLYGLNSFPGLQRPKMDSARMTMFACVPAWLGWVPFVTSADLSLVAFTGLLWLNPGAVHFAADWLGDRGCSVIEMFGPAPRPPVANNGTCVSLDDGLYECSCAPGYSGKDCQKKDGPLCDQQAPPASTEAPCVDDEGRASHASCLCPPGFSGNFCEIVDNSCTPK

SEQ ID NO: 1009518 - protein, 239 aa, Homo sapiens
  misc_feature (168)..(168): Xaa can be any naturally occurring amino acid
ALVIMRRERRGIAPARSSVADNGDDHSEGGLVENHVDSTMNMLGGGSSAVPESPQCRVWAVAVPLFRQKVTESDTGRWARVASITLAWRSPCKLRNTPLAGSSRSQLGSCDQSSWKLASHDLCRTSRMMLGHLVVATSSLHCYYPRNVCTSHGSSTNSFKLVAYECRXVNRGMQMVDDASSDCEAPLNNLRDSLDAQVAKPPNAITLCWGNPPDVVQILRFVSKLEGQGEAHEASDSVG

SEQ ID NO: 1009519 - protein, 179 aa, Homo sapiens
MQEKRQMERILTEGIQKPKQRVEDLQQTPGTKSRSHYDIPQKSAGRSSRHAPRYGSSIEVYAKGHNWGRLCDNHRIYSWKHGINKPIGIYCYRTCVDRTTVYTINTCTLDITRIRSVPLERQKKAPYGKQYKRDTTANRNGTGTRSRTVHSSSVTAPIGMMNHGIMVKQVYQQPGRWDG

SEQ ID NO: 1009520 - protein, 124 aa, Homo sapiens
RASNYNASLRYAQAWGGASLIIPVGITFFKDETTALWIVFNVVSATFFLVDLVLNFRTCINELGTPALLNTASTRNPAQTKPPPTHETPTEHTRTPHQPHTHTHHHTPTRKHNTAPTHPNKPQH

SEQ ID NO: 1009521 - protein, 52 aa, Homo sapiens
MVMQCSRVRKPGSWREPGELALNMGDSGGLMDKWKVSKRTDIGDTGELAEGG

SEQ ID NO: 1009522 - protein, 126 aa, Homo sapiens
MGRSSCCPPPLRPRGTDLRGPSALALLGAPDDLLAVGPGRGEGASGEELNFDDEGFSHSLFNPTGLADEQLDLLDYIRRSANKAFRTFHGDFQRRNFINAVQDLPQRLRFKDFNSANCCRTQRPRA

SEQ ID NO: 1009523 - protein, 150 aa, Homo sapiens
FGLSFVFEDIVSDELRNKSPPSASEVCTLVASSGKRHVGGRSSLPMGELVPCQSEPILLARESSPMGDKAEDGFYGSLPLVECISAALELDTVLYDLLGNCVGVDSITCTRLLSLGHALFSGVASCGSTASMMALHNHRARVTTRMGKTP

SEQ ID NO: 1009524 - protein, 197 aa, Homo sapiens
KDLVPALIAVEWNTDVLMEGVKTEVEDTLTPPPLGCWLTFPETAPMSLAQPGCMLASCVCSVHVTLEPDYAQSFEDSKAKPRASGLSLHSLGALLEPSSQVQWHLCDTGSWSYTSCTCILGKTHAYWAHPLALVRHLGGAFHPRATLQDTTTQTVHNPIKHPLEACKTSLPSGGTPEEKATTDLAHLRPWEPSKDGL

SEQ ID NO: 1009525 - protein, 37 aa, Homo sapiens
VYGHMSTARSDRLCWRRSCNAPLTDRATGRAWRPEWP

SEQ ID NO: 1009526 - protein, 42 aa, Homo sapiens
  misc_feature (6)..(6): Xaa can be any naturally occurring amino acid
QAGTPXRYGISSTPAVGFGLCGGETRSRLLVVADSLVRSDDS

SEQ ID NO: 1009527 - protein, 157 aa, Homo sapiens
RKINPLIKLISPLIIDLPTPSNISVSDEHFELTSYGCPCHNRSHNHHKDYAIGHALITRTPQPVYLIIAHINLRDVDYGCISPATLHLPIARLILVLLSRLFLHIWGEGATITDHYLYTSESSKCRDYSSCLATIRNSLQEANVLPVRPNIILMGRR

SEQ ID NO: 1009528 - protein, 207 aa, Homo sapiens
MYAVQLVLNLICQKMAYPSVPQSSYLRSHLRLAPVRVYGYTFPPGPCLVMGQVSPVNSWCLTHEVLGGGPRPASVLSRAAEPGPQSPVLPLSAGCSRWPDTYWPPSGPWADTLASYLLTCRYLDSLASQLQGGPIHPTSDSARRARSPAISSRNSTCSYSRLWVTKHSAVPHLTDTVLQGSRKLGEAHGLQGRLPALEVKLGGRLGP

SEQ ID NO: 1009529 - protein, 138 aa, Homo sapiens
RIWGCGSPPYPFPGVWVVDIVTGPYVGSRCHPMRTPQLSRPRHCLTWQAPPLLTYPSDQTIGWLRCTLELHMTSRPDLAFALYSLHPQMARWTPASTIHHSLVRRGAYPRTRSIPVMNISGQNTTQLPRRPHPPNSPT

SEQ ID NO: 1009530 - protein, 97 aa, Homo sapiens
KSTVTVSRFLYYLSRCAQRKRNLLSQLHFSKQLLSAQLAPLACALTTTPAHSPPRSCPLLLYTHLTRTSSAHAPAQTFTPSSSTPRAAILLLSPYPR

SEQ ID NO: 1009531 - protein, 220 aa, Homo sapiens
GDMRRLAAMCWCAGPAPVTPVGAVRTLWSLGPGLLCIPCGKRRRWNCVDSEHVTCVRWPCLSMEVLGAPCTWNPNCCACVCPLSPLGPHSRSDAVSQPAPVIRPIIATQHISSMCPGRLWMARACCCSHSRFLPWWCGPPFVGPVGFGPGDRSHLGQARGSEKPCSSGGQLVAPRGPYPASSASSPTCYRRADSDLFLMHASPGLTAETNNIRNINKTYT

SEQ ID NO: 1009532 - protein, 176 aa, Homo sapiens
  misc_feature (5)..(5): Xaa can be any naturally occurring amino acid
  misc_feature (98)..(98): Xaa can be any naturally occurring amino acid
MSYTXMLIRKNQHIEWPIAVTYTLVIFAVEESFKPVYTLTPIHVYTPGIALRSTGTGEEEENTPGVSLDVVQQCGQITTPFAHDFFKWGDFPMAKSVXTLYKLLLRIYTKGLWGETYIRTSKPWGKPLRLIALDSGTKSKTVRSRLRNTKWNGDTKVYQTLTIHSRFLHTRNRANF

SEQ ID NO: 1009533 - protein, 122 aa, Homo sapiens
MSDAAVDTSSEITTKDLKEKKEVVEEAENGRDAPANGNANEENLGTQEADNEVDEDTSERNGGDGTHGRDGHEPTRVTGDWNDGLRPLTRLTEAESATGKRAAEDDEDDDVDTKKQKTDEDD

SEQ ID NO: 1009534 - protein, 240 aa, Homo sapiens
AHRQSGCRKERRPKGEEGGSGPSHVVKKQEADMKVVRFPVWRYRPKNLWLMDEDYLRPQNMKTSPCCVEDGARLILLELLRRPEYVHRSGVNGCAIDIGAHSIAGNIHAMFINPLWVLMRSTAPKNNGINVQACRIKWRESPTTKMYLWNTMVESIEVEGTKWIGISMYLSICVRKRVRASKCEKCVGIIVANTCGNMVHGVHVEMERRKHIVHFFGYAVVGYENESGSIRDSFRDIAAT

SEQ ID NO: 1009535 - protein, 261 aa, Homo sapiens
DDPGHGMTRIRRKRRNEVTIQPFPMRLPLLPHPSLPFCTTLQVDDDSVIMKSIRKALVLYVRLHLILGHFSDQIDWIRQNIVQEFGLHLPGVTPRLPLGESTPNRVDLFGSISGMYDPRCCGLKKVGDRSTGAGSDYQVVPAFLTSKDSTYNSKLDAENCSCDKKHEIAGTVSLSLHLLIRGNSQSTVYTWSWELVSPVEDFCPTPGKKEMFHVGSPICLTYKNLAKRRTKTDSWALVTNTYRIGKEAVIHGWDCLLTAPS

SEQ ID NO: 1009536 - protein, 261 aa, Homo sapiens
TRREEEDEEDMEEEEGAMVPQYQLAVDDSSDEGELFLKKSGGLGDMKYKFPVSQEPVLSHRVKTLPYAAICVLRAPYQDELLERRSREETRVANENEGRNAKNRERCSNAVCKNLKQEGDSGQAGEAAERGRRTRMLGLEEGDLEDDFDPCRQHDQRLCTKCFGDVVLTGACARTEKRYYCDVKNEGLDDYCNWDTWDGPDQERRLEPVRSCTVRTPNFNIGLPTIDPSPGRGRKRMREDPLDLGKKKRKSPFAAAVGLGE

SEQ ID NO: 1009537 - protein, 132 aa, Homo sapiens
MGLDYATMKPKPYSQWRKTNRSQQGYITTTDMTFQKRHKIESTQTPTAVIISSHPPYYVVQPKSRTSYLACVPNLFPPTRANKPRSYILNLADSVTAVNNRWLSASRALDPVTPTIDRKMNSYRPRIANLRV

SEQ ID NO: 1009538 - protein, 294 aa, Homo sapiens
MADDAWCSGVGPGGPWCARVDWGTACGFRVRFRQMASWGRGRGRGLGLWCLECRGSSAECKAEDQEWMPVTKLGLLGKDMKIKSLEEIYLFSLPIKESEIIDFLPGGPLLNGLRYSDQIMTKCNRRQDPVPDTGAHRYQGHYVCYRGTTTGHSLVWVFTLLHRTVATCHPVVAIYSLANNSSIRPRAAEAYWRGTQNLRKTHRTCTLAQVVDTGQACALMLACERLNHLEAHGSTWHQILSDTLVAITKGLPQCMGWILRNDMAQTYSPGELQLANTGRTLGQGHTNDTHNKRQ

SEQ ID NO: 1009539 - protein, 67 aa, Homo sapiens
SSLALLKLKPKRWLYKAKKAAVDKVSTVTNIEEYPLLSSTFRRTKYTATPDDSPNILGMSSSQEKQA

SEQ ID NO: 1009540 - protein, 296 aa, Homo sapiens
VTRWVRVWALASMELVIQFQVLNQSCLLTGMEPPDAVDCPEQQRLAVLATCDCCSLRILQTSTRYWSWSSKMHPPPWWRLTTVAFSTRWYRLYLLLETRMGSLAVSHPCTGDNTSVCLSDHQGLPNLYHLVSRAQECDDLGSGVAQTYGLGLPSGDLTVSLLSVASRTGMREPTCDYYVDLDDVPNAMHTTGGTTIAACDYMVAMWDQGTTITAQNTQAVHGALWKNIRWHTILTPSPSHFAFDPNPDPLEDIMAAASTMQCIQLVTLRSVVLTQRLTVCISISANPSAPRTYSGS

SEQ ID NO: 1009541 - protein, 80 aa, Homo sapiens
SGILLTHAVCACVGLVLCCDYAMSWGELAQLSVDAWLAGRVWILCGEPGVPADWCGWSVEWALCEAAMKPERRGPWLCCL

SEQ ID NO: 1009542 - protein, 80 aa, Homo sapiens
ELAVGGGAALSRRQGGWALLPSKRRCLVGLAARRPAQYCKIDVKGMVFTPLHQRTEVISSFGPLFYAIMYVIESARLETS

SEQ ID NO: 1009543 - protein, 62 aa, Homo sapiens
MTTTVPQCNNITKESVPQMTLNAILVGTTTFHQRTAKVQYPKTSYWVTKPKVCEVGHRTHNY

SEQ ID NO: 1009544 - protein, 131 aa, Homo sapiens
GSARVRNLSRRLRAEAAWGRVRRARAGRRGRRSGQPSLCGSRGRGGAGAPGRGRVWLLLIEFLWCSLACSSVFCISCSVLFKLRNALCGSSESHLWFSRHLTEHMTNSGKLSSNGTSLLDTREDSFVWYMA

SEQ ID NO: 1009545 - protein, 68 aa, Homo sapiens
ERDPHVLGSPCHTKYPHSSTDICPILSSFHVDPVEEGRGLGSQHLVMYHRIRVPLLLNPIKIQEKKMG

SEQ ID NO: 1009546 - protein, 216 aa, Homo sapiens
FRSGSADQARASSWAPRSAAGTHHLPAHAQQSIFEPYVAVRDAAKMNDPTQWASQWTPNMLTARASSPYPCNPAMTTSPLACAPSYCEALPDRPSPWAQGEARSRLRLLYRLQGQKEPGDPRAKSAPLHGADDEPFAVCMFDIIHPKSKLTRPSAVVSWESLVPADLGQRHPSVVVTYSADVAVQTSIVPHSRTMWLSWTNRCHVRCNCRGTEHRG

SEQ ID NO: 1009547 - protein, 57 aa, Homo sapiens
MNETAEPVRVTKESSLKGDSEHRSDESSDEREKEERRKTRIEGGTEEARRDEERQKE

SEQ ID NO: 1009548 - protein, 429 aa, Homo sapiens
MCGVSRTRRNPGGLIKSASRSSNQQGLFLTACAQESELGQHHVLVFSCALTVPGGAPDPCGVHLSFISVHRVGFHTGTWFQLRCMQVWQVNANATAIISANMDAQPMMPTPNIIARAAQKYREKIRQLGSAALARQWQLINGLDNMSSAVPNHYPQRRRTLITFTRNKSQPPDGEAARQMSLASGPQQTKAPDAQRAEGLGNSRSHGRTKQDLGIEHPSSPEKHVNACMQETRLQVSGAQDKKAKAAKIRKTGAGDARRKEGLKGTQARVTQTKQPSEDECSGKGTQRGREHKVSREREGRVRPRLGREVMARGDIATVRTAAGTILALITEKDQRDDSEEKGRKQKNEKRKGQVKEGREDRQVRDRGGDQQRNGERAGREGAKGGRKRSTERGRKERRGGEKRRKGGSGGKGKRRRGGRERSQSGERR

SEQ ID NO: 1009549 - protein, 232 aa, Homo sapiens
MRQRIGNDESRMKVKVLLSSCDETEILTQSPGRSCVDSLLVALSTKTRRSVLDWSVLEPVTSQQISGMREEINVTPTCKSQHNQLDQGWGKGPRRSIENGYTAEQRFGTSSDRDDWKHSKRKCMTQIACDPYKTLMQDESPKRTRSKHRDLRDIHLRTNHEMQGQLPKDAVRIHTLTTRRHVLTQHYDPQNVLTERLFHCTALTIVTRGHIGEIPGRVQRIFRRREKMQHMT

SEQ ID NO: 1009550 - protein, 363 aa, Homo sapiens
MGFLLQQCLDGTRSSFPTPGGSTIDQPSLTSSPHPRDCPKAPDLTSSAAQPPPPSPPLLSRRHDDLVHLARVRKNYHQDSEAGINRQINLEPLRLLPFYLSMILLLCPRMTVATEELLPRIRYFTTLLMRRGNMLSKPDDVLQTTTEAGRNLPFSDIKEHQTVMQLRQSALNATGVCMTLDNTLCTSVTKLATAPTLRHLAPTNGTPRHKVTDSSSCTKTIKPVTLTQGCKNRITKNMADDPKDKRRTMETKESAGDKQTLRIGQGRRNSPPMDQTTHNPMRNHTADSLERGDNGPPGEKKAAAASPAETTHRTKPTQHPANATTRPARYADAQSGLTTRHTERRTATHGNQADMREKDRTKR

SEQ ID NO: 1009551 - protein, 104 aa, Homo sapiens
MPLTLYPITLPRGLRNPWKHPEENPTRCAGTRSSETSASRDPGTAGTWGPPKRGQPGCKTPASTQLRTGLRECRHSRHSPRRPEQKGTQGAQNGPPEAKQTHTT

SEQ ID NO: 1009552 - protein, 332 aa, Homo sapiens
ETIGRKRRGTLAEAAEHPGQEQVQGAKDERDTLDKATDMKDVREPAGLLLPSTHLPAICARRMSPAFSGHGCESPCAKGVLLEPLCPPGRGALMRAPIQLRQPCASPCVTKGTSVLRDPPCVRCANSLTSTEVSLDTRVSPESPHMGGRWGTDFGEDYTQEILAQNCFLVLQEHQKARVTQGAKTKGHLDDAWPIPCRDRKPIDDTMPLVEHRGQMMRHDLTPTARAPIRQPKSKRRTNTTGKMYKPHILNHQRYSTDRQGEGHADSIRQENAWESNKDRAKRKDKGGTSQHTRKEQRDAPRPTAKRQQHPRKTQHQSPNTLANTNTCRPGK

SEQ ID NO: 1009553 - protein, 405 aa, Homo sapiens
LNQVAETRYCVDQNLLKEYLPRAGGHAQVLLGIYQCCSMCGWPFHHAGVAASAWHDGLCWLYTCDGTLASWGVWSVKVLPGPVTRGKEMYRCTLDCLWPASPGMTLQARMSDAARYAHLLAMVGTNISPRPNKDCHAPDACMTEIDGRWQTLHSTGVTDHVTAPMLMLPRTDDIAHCSGRGHHTVRSRDLCWAGAGNGRKCWEDKLGVGRRQAGKTMHSMAGTGTPGQHTQEQGHDAQGTHGESHQWDPNASTQRSPREEGPKTQGALIANPWSTKNSEQTAQRGGPKGPRQQRHAPETPDAPTRRTERERRIMDNERNPSRNPRKPDQRKPNHQTENTITSAILEKSRKNEQAPRTQQRNPRTEDQGQQPNGTAITAATHKTRKEAHETSKGQERDKNNTNTRT

SEQ ID NO: 1009554 - protein, 180 aa, Homo sapiens
  misc_feature (157)..(157): Xaa can be any naturally occurring amino acid
EIWMASTSYDYCRAAHEDGDQRCKLLLGIGILVLLIIEILGVPLIYLHHQRPTAEGCRDGPSGQVTGDVSKCHPSPATKSCPKAQKGLQDVEAHGQQLLSSIVMALIGFPGMQEKWPIRYKKNTWRSLTGEITTLNHKLQRRVCRGGATDEENNLGXYRRADIRCDNMKYYPSSQDSSSA

SEQ ID NO: 1009555 - protein, 247 aa, Homo sapiens
MTAYKLNKETKRSGRGCEQKERVAGAVTLEDEGIHMSILGKNWNESCSEAVVNKRSNAVLEAASYQYQEPGGYPGGSYRSLKLKNTESLEALVNVICLDFTVVKDDNSRRLICATSHQVYTTENNIATISQDVCGSNDLRGPVLMDFTANKPCMLSDLTIAFQDLPILTLTPRPSATGTSRRTLEWHPTTVDHVGPSCRLRTIVSNKILLLRANRTYRITVLRQTRNTRKCDRRRTDPLTTTLTLQP

SEQ ID NO: 1009556 - protein, 227 aa, Homo sapiens
MAGTIMDMSGKRCAGKLDGQTPASKCFLNGLGLALHLSFQATHLNICHAGCAATEFCGTTKSALHALISVATTLPLELWSHRICREHPHAGYILRENEITTILPASAYRLDTKCLNTWHSIAKGRLSVLVMSALHSYGRRIYFHTSSATTPNAFETQDKQGRTRATIATGHRRQGATHRGGSQYYGLHTFHSNNMGYSPGVFIYDTDTALMRQGTRQKQQDDKLRNV

SEQ ID NO: 1009557 - protein, 326 aa, Homo sapiens
SLKDHQRMPPAPSSGLAPLAKVIQWQLWYRGRTHDQQSSAIDCHPEELWMAPPGKLWRDRPRGSPELSSHASTGRMPKACVAGGHPCSMKRASSLAWALAVSHYCSTCHVVDRDRCRLEKTVPRYDDIKKVVKHGVGRAPSRASWATLSTRWSPSEFNSETHSSTFDAGAGHCPQRAPCQAHFLVMTTNSGTATQVVDLMAHMASKAYEPWTTSPSKSTRGRERPSHAWRVPDTTSVTEQHGISASSQSPCRRLNEGQGLGSRPCHVPAQRYPCDSTHDTPHHWHPDSAPAHRDPTHGAPQRQHDPAGATGRPHRHAKRTGQRPAA

SEQ ID NO: 1009558 - protein, 291 aa, Homo sapiens
PPDSPSKRERHKQLVSPRRPSGKHGAFPTHPQPAPHGTHETGCPERRHAMAWISDCRIPPCSRAGPGPGHTGPHGYGKAWATWSPLGRPRALPRPLVVASPSNTFSGWKEFVYLCKLLRALKYDGRVSSRGGHAWISRRERRGPSGYHQRMKARGISRESPQMLQVPDKERDHRWDTTAIPNIAAGLQGTTEGRGGASRNTLRDCHPSTTVHRNANNWIAKARTAYHHNTGTTRHKLDGSPMGPKALRLNELPNQDVTTGQKPQQQKQTNNKENDEAAPPHQTHKKAAHTN

SEQ ID NO: 1009559 - protein, 181 aa, Homo sapiens
MVILLDMSWVKQPLLIKQILAYRGWQASLRRPYLTMGHNCITRDHGPNDAMVNITGDTHGVSSPWNKDYQSTWESTQSNTRGKHTGRANPKPEFHPIPKGADTLPHRAQTKRSPRGHTKGGPRSEEHQGWRPQDARGHDPTGEKDQRGTGPGRELGTGGNPPVEDRQASNSGTRQMSNSRD

SEQ ID NO: 1009560 - protein, 104 aa, Homo sapiens
MKSFGRHSLAACLIRPKSSHKDVFLGTLHYCTRRTQAAFVINRPTSLETEIEWLNIRYRVTPDGASIFYYLPLTYTSRRGHILADHARLLRNLKHRQLSSCLRL

SEQ ID NO: 1009561 - protein, 89 aa, Homo sapiens
VAPPVRAVCPSSVAELSAQTPVQPLHPFFMHSCLSIIQCLTPFFHCISGPTPMHSGSGIEIVLGRNMATSPYPIGHVGGMTMVPGRFSL

SEQ ID NO: 1009562 - protein, 268 aa, Homo sapiens
MARDVTLKICALIEGLAHMRGRPPPRKSTLETSVVGLLACQDPVIRQWCMTRSPPCQSWTQAERQAPWPRKNPKLRKMAAANWWVSKRGCTLGEGISSSSLSSRWNYSSDEIAAQCRSEGVLSGKAILVSHQRAPAAPYQKGSQKYMARCHRKVCPSWEYWRLNSSKHKGTLGQVTKGVLGLGLSSQRLLNFHPSPPQEQGQAAFFLRPSVQAGGFWLLYPVNPLLFPWVVSLTGWGPLETFKLNVGHLFTRVHFPQRSRNGAGKCRL

SEQ ID NO: 1009563 - protein, 37 aa, Homo sapiens
MGVGEHAHEDFFKGQLGTERRPIESWPLACNVGLMME

SEQ ID NO: 1009564 - protein, 69 aa, Homo sapiens
TVAVGVIRMQWTRRLLESGKVIQGLLGRNAQKAKMNIIPRYLPPHSLNQVVEERISEAWLVSSMAIISV

SEQ ID NO: 1009565 - protein, 252 aa, Homo sapiens
TAAWIERSRYLEKEKDLAENRACVYWRRCDHEFGVSTLAGGGVSGQRRQDLIQCPGPVRGLEPLETCQWDSFRQGESNDSYPHGLMACLQGGGGTCLVKREPGGRRSGKDEHSVELSGKTEAMNYACAYAMERRAVDRNLRRETNRPSCLMPCPELLNYMKALTGKAWPCFPSRLWTRGAGNGLNGPCGEREAGPGSIPGGQSAWRAWQVSKTPGSTGAGAPGVDIPTYVDARREIGQPPKNKPNGEGANEE

SEQ ID NO: 1009566 - protein, 108 aa, Homo sapiens
MLIKSYDEPDMTFSANTLGLVSQSCIGLMFLIFLLEVDSCLTIRSTGMREFALTLRQFAIDCDVVNIPIAVKLFKAATEAAIISVLRCNFSNGCLRSTLYPVEILEYL

SEQ ID NO: 1009567 - protein, 284 aa, Homo sapiens
PTRSDCEAFCHRNCSAAPQSLSPPPVSPRYPELRLFGGLQRLRRSCLEAACEAVAWPAFRQSQRRARGGAGGTYAVPLQPYKFLVSSAYFMANNLPKAYRRLLHDRFYVKASLIDEDDEEELWRYFMRSLPGAEDYRVKRRLECQRRMTSLFDPEPVRGNTSGENWRNNLITRPWSWPFPDFFKAAFDRVSSRACEGSGEIEDFQAFYLSIADHHVEVLECEIQCERESQPSYRRLIRWTTFGGYYVSLTCSKPYDHVNDLNECSPLVQSAICSVISNDQGPAV

SEQ ID NO: 1009568 - protein, 103 aa, Homo sapiens
  misc_feature (14)..(14): Xaa can be any naturally occurring amino acid
FSTTRRRVRAAGTXGGQDGYDDPSCWQGRGQELRVVLKVLDLVTMTIALASTRQQPHEPGLPQHLASCMGLCARPESSSKLLVIGYGVVGHTYIPKCQNEQYA

SEQ ID NO: 1009569 - protein, 183 aa, Homo sapiens
  misc_feature (10)..(10): Xaa can be any naturally occurring amino acid
YQCLVPRQLXHMSTETASRRSDGHLSCDNWHKRRKNGGKRKSYHKKRKYELGAPSCQHQDWCPVAFTQSVCGECNKKYLLTLSVGLLGEFLLVAQKCLYSETQGSSMFVYNCHLNYTKLGFCERNEPLVERTFGHLVAPISTQATPRTSTGVLQMSPNIAVRYCPLLGPGRASGDPSSVAPPM

SEQ ID NO: 1009570 - protein, 124 aa, Homo sapiens
MTPRPVSWGLLPQGAKRSGDMQQRQLGKKKHRRRPSKNDAAPGKRTTMLTWEEKKKFDEQTEPSRLSRIQSRDVRQGPAGRSPYNTRADPQWNDQRPGGAGSQETGLILQGGPAAKIRRDQTID

SEQ ID NO: 1009571 - protein, 162 aa, Homo sapiens
MSTHGRRQMHPVVAASGPSLEVAHSLSSCVSALSKHHRTLPDSNLTCSSHDRHFPALPGHCLEYTPGPKGLFRGKEHALGGASRGKSDRVCSTWESHTELSWTQALGEEAQAPDRWGKAAGVPERRAGPDSRQGLACTHQAGLLTGLRASLPQAPTMLVSQD

SEQ ID NO: 1009572 - protein, 210 aa, Homo sapiens
KCLGVPCPPRSNGYVEPRARDCACRILVYRYLSVVTAHEGSVPPPLSSRPRWGPAPHHLPVTPAIPYCFLWPPPQHSLLKRHIVVIRLSVNADPDIPARSGGHETLHPGYEVEMWLHHYSLDMYHKNADPLYANAGRFCTTRLSVSSALYSTPCHTTMSIQEPLPRRTNESVQRLRDGALVYGCIAAMVVENTMGRHISERGVKAGAGPS

SEQ ID NO: 1009573 - protein, 173 aa, Homo sapiens
MHHPDRGPGAHETRSGSGVRLRCAIQLLGPRAGLELGWDPELGMQRSWAGTTCWCPGGSEPRRRPGHHAERQGRDASHPSGCSLRDTLSRKDSGLEMDDNLRYRAIPDTRKRDYEDGPQNQDMNTTCLEDTVKAPDLKCYQDGCKMAVGTLTSQDQGAPNDTSTWKPQRRDEA

SEQ ID NO: 1009574 - protein, 161 aa, Homo sapiens
MNEQKQRRQTTRESIITKSKQHRKETQAKRALNEKQGTRTCKHGETKETNPHGPDINLSTRKETPKRNGHERKTNPEGIAHIIKETGKAVHERTPGPQWYQPKARKKPQEGEKAPKETTRIRTTEGDTLGRRKRIMTRTSDIHHRLHTPDNETNNEHAPRR

SEQ ID NO: 1009575 - protein, 256 aa, Homo sapiens
  misc_feature (5)..(5): Xaa can be any naturally occurring amino acid
LLSPXLYGYRRPRPLPRVGSRCLLRCSRGATWLLRQALAECLGTLILVMFWLCAPVAQCCAQPGAPTGGFLTINLAFGFAVTLGILIAGQCLWGPPEPCRDLCHVLPGSVSPGSMLPIYTLAQTLGAILGMLEYVHGLYYDAIWHFDDNTDILMYSGPNGTAGIYATYPSGHLDMINGFFEPVHRHSLPYRDVCWTLLSPITNPIPRVPGGTSNSVAWWILVQYGTSHGLQTSGYCRKTLTRRLLAHDLIQDLAAA

SEQ ID NO: 1009576 - protein, 257 aa, Homo sapiens
  misc_feature (1)..(1): Xaa can be any naturally occurring amino acid
XDIVDQASPQRRALLRIQSLEGAPKMGRRSIGPPDLWDSAQIPSFPTSIEDDLGQLSDLEPEPDAQNWRAYSGAMDDAALVLTQREIDRQEVINELLSVTEASQLRNTPGPGPDTSTSECLTGEPDAPGWSWTRLFPKLPELIRDSQFHGCEAMKKLRGGKAHIYPTDDHVKLNAGHRLIMALPEREYPAQWTGTQDTCAHSQSKRPVRRSLNDRKQPPRARGRIPRVIHSPGQAGEAHPQESGAQQLTETSPFSGR

SEQ ID NO: 1009577 - protein, 352 aa, Homo sapiens
MVRSSWTKMWVQGPHPILPLPGTMCLGLRILEVQARAGTRGFPPTLTCLAHRHTTAHAGNHSSGTLTMLCAHRHAALRTLRTTRTTTLRRVARTAPRLPPPHPRPLSTPSHHGAHGPLCSPLCPPLHARRRPPPLAPLCATAASPLCATDCLPSVRPPTPPCYVPPHHSPRASPLATPPGATSPLPRQSPPLNFSLTSPPPPMHTPPQSPPPPSPYSSTTPSRSQNSPPPRHHPHPTHPPTHLALHTPPTTPPTLSSALVPPPTPLHLPPPSPPPPTTLSPPLPPLSFTTPPPLTTTHLLSYLTQTVAISPTTNFSRSFLLTTTTPPFLSDITLPPPFSQPHLLYYLTTLTP

SEQ ID NO: 1009578 - protein, 190 aa, Homo sapiens
WEPRWRKALRGEETKGSVEIMRPGLELTPWVLCSCLGKSQSAAVCDGTRDVTVGMQALTDYKKLRAFFVAEEEHFLPEAEKEEGLPEDELADPTERFRSLLQAVSELEKKHRNLGLSMLLQCMCANPWQSQIWMAGGCDPHLHGKCQRVAAREAWHVRLALGSIYIVACLNNVHLSFTLRRCPGAANTSR

SEQ ID NO: 1009579 - protein, 118 aa, Homo sapiens
RESTSLEFRGFLFVETGAMSTCRPSLVWKLLGSRNISHLCLPNCWGINRAVFTMPSLGSGGVKSGHRWETWEKPVLGGIPCVCSERGLVGLDWLRLGRTKRTLCRNSLGHPAQPARPA

SEQ ID NO: 1009580 - protein, 139 aa, Homo sapiens
AALLSESRSVSLPLPFPGSRLPLSFLSFLPIFFLLPAPGPGPFSWCLVRTKCAAVPLCGPCSMTLPVHAILLRSPCPIVACGGLLCWLLAHYVPWTMYYAVKLERLPCLCLGAWELTLSGPQFGLGSLAFTKWNNDFLL

SEQ ID NO: 1009581 - protein, 277 aa, Homo sapiens
GCRRTDAGLTTVSVDGRTLDWTCVCDGRTLGALSLSRRRWAGPVPVDGRTLGWTCSLCRRTDGWTDHCPCYHAPDVWYWTLWSGPLTGTGLTLVVPLRIGRPVCVPDHPVRPATNGTRRPAYLTRWSFMLPRAAHVLSVPALTLRCSLASPSTRLSPAPYAPYWFPCALAMRLWAYVRPHPPYACARTSALPRVNARVPAPSTYAAATLTSNRRTAKLRRNTTHNVSNLPHPPARRTGRARRSLTVMDTQSTLQDEIPTAFVHLYSPNGNDPQTLHA

SEQ ID NO: 1009582 - protein, 123 aa, Homo sapiens
GERTSLEFYLYFSCKNGGWGSCCAKAGLELLGSGNPSASVSQIAGITGMIHHAWPEQFVLENYPEPFPEAHLHLAIPTVGEYLHVYLPARRKIWGAEITLFQKQAIYDDSKYGCSRSGRSSPP

SEQ ID NO: 1009583 - protein, 128 aa, Homo sapiens
MSHDRTRYLCLLNIYVLLLNPWGLQCRWSDSPPFMPMMTRVETGNNWMVSLNYEILSDAVPGSLKREDTRTQACTQTQNHASPRAWSSCILAPVKCLYSLGGGLRLDPLGAYRALDGDLESFILFHKS

SEQ ID NO: 1009584 - protein, 115 aa, Homo sapiens
HLCYGKTTWKCLGKPCTGPALGSGDVLGEVLVPRSIPTRLLQLGSPYVAGVAVVAFLSSVFLFPSFQNRGSAGLSRALASVVWPRTWCGVGWLETSAKLLYNSWKRARVLPAALQ

SEQ ID NO: 1009585 - protein, 377 aa, Homo sapiens
EPVLRSSAGTAEPGLFLALARLQRRRSAFAIYLVAREEPRPGCLAAPAMTSRGNARSAHRMARGHEVLSIADHLLLSPCSVREGKMSESRLEVHAWPFVCSKARKTDGVLTKTGARWHRSASSEALRVEGPSGSMLLDRWNVHERRHLQKVAEQAKDELLGELEVEKGYMAEDFETVVTCSKVDRHKSYPTTFHGHGNTQGVDEYLYTDNCAQNGIAEKEEGHLRTEMSPRGRARDCTVEGSIAGSAALGFPFQLVNGSHSVHLFSDDIWAPRELGLHGSLIQTVEPPYGHTIEMDIPTRQEQLRSQTLTFGGAQATLCSVWNKTTSPNPPPHHTCLGNKGEESPVGPLAYLGTQIAPTYSQYPCVITMLMRAEQLG

SEQ ID NO: 1009586 - protein, 283 aa, Homo sapiens
MHPDSATVPFGAWKACWVRDAGYSNSPCMRIGQIARCTLAKDQPQSTERTASIALQYSCARECGASCCISQRDGRVSCKYHGDEGFAGPTETDVPCVTAPWTCVRNLAPYGGSSRDASAHETPVVCEVPGRKTILFLPRLYYVYSPTLRHSPGEHQFGRVREVMLQARVNDLGRTTRWGSHDVTHTHGMNPLSSIQSTRHIVPFGAWVIARTRVVPTKWTRHLNESLEGCFGIFTGREQVLAFLTTSLEGVVRTLLASSLGHADLCYPNWFSISTTISNIKGV

SEQ ID NO: 1009587 - protein, 358 aa, Homo sapiens
PIRLGSGPDGAQEIKRYVFYSSMSWNKLYLCVRSSQAFKPVSGSDLMTPVYFETQSSSVPDIPEDAPGNPHLEQLGAHQRVPEASGFGGHRPDVIDDWQAVVPRRHPCSSVRYKRTPMEDRTWFLYLTADVVDRQQNRVWGVLTLHVPSAVSYTGPSQGMEVMLVDRSIDPGCIHCGFLSGRTTVRDLVASKVQGANATFIKHPSSSFERRETWFIDLTGHSSTVVTLGETDACLIAGGSPWAAALWETYRIAWTQYRIPTGRSRGQDPKRSGVHMGTNGKQRAETLCGQGKSWARRHSGRVGRHKGASPATPTNPTTELGTACMKRHTGNIPGSMHMTLYGTNLAGRAKSQTERMTT

SEQ ID NO: 1009588 - protein, 103 aa, Homo sapiens
MLGETGENAGLREHAGCMETVARGAGVDGYSHWTANKESLCAWKELLEHKAEEKKRIDGLGDALVWTCGTHIGAKGVGSHERWNRGGKKIRPKRGNSRRGLCK

SEQ ID NO: 1009589 - protein, 197 aa, Homo sapiens
MSRPIKEQSKGNTKTKTYEARLTQRESASTNNSIRVNNRKVAAQKRVQQKRSVEEYNNIGYVIIAHPQRKQNIYEQPQGKEQMHESNHEKRQNLIKVAQPQLNAEDTPQKSNQTNNRRATKREKRPTGQGTTVETRATAPHTTNKDRGPTTSQQKAYSAQGTKGTEPKQKNTRVDTNNTIGDRRTRDEKQEPPRDNR

SEQ ID NO: 1009590 - protein, 148 aa, Homo sapiens
MLDIHHKYQTDHRADTTRDAEQTQNHTRTEPRTTNMTTTKQPGHTRTEPNATDAAPTQRDRRSRKRPRHQRRKTPPWPSPTARTTALPSRGTAHRRGRQRPAPALHVSGPPGRCRERRRDSSTTADDAARRAHPESTNTRGHTQHQQQ

SEQ ID NO: 1009591 - protein, 272 aa, Homo sapiens
AHSRSRCLACTEGPVSKVLALYYGPATCFLDGALSDRRFDRARTRRAGLSCDDVSLTGVVRVDGRDVTDRLRDPWVVPSVPSNLHTCPKMKLEISYEMDRCCECCYDCVMEGGAQGDMPRLHGRCVSVNVPLKWGLLTGTPYQVGLLVSCIVLAASRSVNRSLGFRAGSTEGGLNFVRHPVFRDVSAMYPFVFHRSAWVLRRELTRTARRPTGRGLLGSPLGVAGTVGLHEGLRGIAHGHNCGFCHSGDISKASGANDGGGPVYCDDFQGLV

SEQ ID NO: 1009592 - protein, 274 aa, Homo sapiens
NSAVVTMPGRPEDLPSPPVADSESEEDERGLIGGSIRTGREQRGTELEEEALNGVSAVALLVGEKVREETTLVDDPFLDEDRWYGGYEEMKEEGQRFRSVDGTEELHLEDICFLQYRPYRKGIDGIADFDDKVDSRLMLIEEDRDRGSMDGAVESYMRRRMQKELSVMKLRRDIMRDTSAQEDRKEMLSKQMLTGMPEVDPGPSNAINLDDHIISTDGMPRTSPAGQKQSRAENDRQARTSVRWLANMAVNHVAAPTTVIHGGRYKAPIAGSRQ

SEQ ID NO: 1009593 - protein, 277 aa, Homo sapiens
GPMPLSADALRAQLTASSLLLARPVALTAAAAAAAGAMAGVCGCLWCALVHHVLAVLCCAVLCVTVPPVADVRGRTGTCTASTCTRTDMFTALGSMELPRNFVMFFDALVWTLPAAAADLELTWETNTTAWQIAKVYVAKVDFTATSDVCSDQGVRGYPDLTLYQARPRSCDSTRVLGDFQTTAKRLDACRHLNEEPVTPAGRKWKRARCPPKLKQGLYELSGKQLWAARLPQGRRKFYQGSSLRGVAPCNSPGLQTWEQLAHGRLNISEDVKIGKG

SEQ ID NO: 1009594 - protein, 250 aa, Homo sapiens
MPKKVPRVRTADSRADGPRHVSAEVDRRLTDAKKQRVSWSDAILWMDDDEHVIEEGARAWDGDREKRRLDQLERKEGDAAPTGRRMDSYSVNVGKVPRVATSTQGSSSGPDRRTRLRLDHQLREAPDTWRESHRASLEVPLEENVNQRVLEEGSVEARTIEDAIAVLSVAEEAAELDPERRMRAAFTAFEEAQMPRVNKRTPTMRSVAAETAAQRRSESVSWKPMNQRACPSMPPSEPRTWGAKFTHGWS

SEQ ID NO: 1009595 - protein, 114 aa, Homo sapiens
MRADNRLAMRLGKASSHTQSVGYAPVGPAACSYEVLASTTRQDERMLRPARVTLQTELLHVDWRTSNRLNRNPWFTSAAGGRSHEVAPPRELPELGTYVSFRQENIGRTTQHMG

SEQ ID NO: 1009596 - protein, 226 aa, Homo sapiens
  misc_feature (68)..(68): Xaa can be any naturally occurring amino acid
AREDKGMTSSMKWGPNGRKARGPRSTSRFMQNDIPRNLAPGSTRTKLTSFEMRWTENAYEGWAHVAEXVHVLLHVSGMLPRGRLMHVDLRKTLVRVHRWEHSVRIRDYTLLEEEDPLAFATSQSRFHQCSLPWVFESGLGLHGEYKGGHGISTEAICVLSSRARSQTRSRCLFSNNTVVSSVKAMEPCPEKTGGVPAHYIEPRKPKAGTVRDTPGDTVIPVVPFRI

SEQ ID NO: 1009597 - protein, 132 aa, Homo sapiens
  misc_feature (71)..(71): Xaa can be any naturally occurring amino acid
MAQARKETPLRQEKDSLGNNPEETEPRIHEPRGRPLCANTGASQKRPRDGASKRREHKGQRKPEDAGRSQXAIETVRKRTDRQRQIDANRRRVSRRERRESTIRKAPRRKGPPASNTAEDTLLPYPRESEAL

SEQ ID NO: 1009598 - protein, 153 aa, Homo sapiens
GGWDLYTYPENWRAFKALIAAQYSGAQVRVLSEPSHIPLWAKANRTPELSPHNFLPARSQHLRVMMDFCVFEMQRQLPYYVSNEELPGKYSRGSEPQVVQWVSLADSDIVPPRQYLGVPPTWASCNQNKQATDAMHKEDSEANFWALLDAYLQ

SEQ ID NO: 1009599 - protein, 193 aa, Homo sapiens
MQHAPEPASDISGISGMYTWRPQYHASGVELRFWCLWVSLRLKCSWEVDKTVDHGTVLSALLARFGCDITMAGLVRLELQSSFTSTVDWSYEACYYYLTNILSRCNTEHTYALSVCPSFSQGMHCAFLSSVVSTPASGKMQGSSDTVRLVTNVTHTRDTRGVSSATFTRTPRRQLLKASDRLDSSRGLSVGPH

SEQ ID NO: 1009600 - protein, 262 aa, Homo sapiens
  misc_feature (109)..(109): Xaa can be any naturally occurring amino acid
MKRLWFFLLRGWRARQYGSVSQACEARVRWGSMDVVCKPSVKNLVIALNLAEIVCTGVVLSQMLTYLVAEIRTSPGGQGARSGLEGYSKSRSRERHQMYESRSRSSSDXRTYTIIQDMTTVAHRPATIIAVRGLRRRVETARWDNGAVRVFACDETHSVNIRGEASMDDKNWVPGYRLMRNESWRGSEPGIPRGWNAIRPIKRAKLGIRLAHVISPFMYPPHRPDPPIGECKNSPGYGSITVSQDWMGARLGPWRSVDQGTI

SEQ ID NO: 1009601 - protein, 148 aa, Homo sapiens
MSRANFLFINYSEIVYRQGLAGVGQVWVSKLLGSSVSVLDLELPPKYWDYRCEPRVPKDFAINRSFRTGLRTGSFAKSWAKGPKAVPEQEGDSEVEIHVRQRQNRQTTSQGGSFYWSVAQREIEHERVDYATQAQHMRAKRPVGLPRE

SEQ ID NO: 1009602 - protein, 315 aa, Homo sapiens
LQRDQERLGKQLKLRAEREEKEKLKEEAKRAKEEAKKKKEEEKELKEKGEAGEAGTKDEETEQGGRQQRLTEERRKERQEALEAKAKSRLNVICCLTGLNLTDTNRTTEEENTVKTNDEKRITHARDRPTITRFFQKPKDSTRPTSTLDGSCGTVMPPLTHSKSTWSWTLGSRTRLFPYQTSAAQHGPSLLQQHERRGHSFLTRPQQAGSPMSDTGTKARNRPGKCRYYQTVNVDKSTEAWERERPGVSPNRSEVKALGKQKYNTAKQNHRYEKPTNTHDLSRRQHRTPKTHTPQNTYTSRHPTTPTRKATHTHT

SEQ ID NO: 1009603 - protein, 208 aa, Homo sapiens
MRAKDQPSPEVAREIEAGAGHDKTHEVPHFSGLEAKESIMDKREIKAECPHGIEAVKIGPRRSRPERRPWKKHRADQTPVRHVDPVKITVLHTLCTGQFRARNRCAAYPNRATCLTTWSRRSNKGFDIRPPGQDDTSATPIPGELLRWLARHRGRAYRRTNEGVEFELHTKQRRDSSGHPNDCLKTTNTLIGAPASIDMWPKFCPRQD

SEQ ID NO: 1009604 - protein, 259 aa, Homo sapiens
MDHVMDVVVKSVNWICSRGLNHSEFTTLLYELDSQYGSLLYYTEIKWLSRGLVLKRFFESLEEIDSFMSSRGKPLPQLSSIDWIRDLAFLVDMTMHLNALNISLQGHSQIVTQMYDLIRAFLAKLCLWETHLTRNNLAHFPTLKLVSRNESDGLNYIPKIAELKTEFQKRLSDFKLYESELTLFSSPFSTKIDSVHEELQMEVIDLQCNTVLKTKYDKVGIPEFYKYLWGSYPKYKHHCAKILSMFGSTYICEQVVLPL

SEQ ID NO: 1009605 - protein, 181 aa, Homo sapiens
ATVRRIFCASPAEPHRCDTMGNGEGRSRRIGCVLGAWSPGDCFQPLVKMDIVAQSRVTPFDMTSKRTWSYNCSKVMDSTQLDEKLSIGRAAPGLEEREALSGRMENAQSPQSYQGAGDPRPRNQMWWTIAGRLDVTSLEVPLVRSLLTEASGKRGLGAYMCAWVESRNTRDQVILVAPVHV

SEQ ID NO: 1009606 - protein, 127 aa, Homo sapiens
MTCSCWHRGLYPYRIQQKTEEDLTTVQGIADDYMKKNYEGVTKVCCNGTVMSIGIWRSISYGDKQNICHLEDDCRTIMKVMVSACGSLKLSEDSLQGVEFPSLLVTGLKLTLYSTIGSVYLICNSSS

SEQ ID NO: 1009607 - protein, 87 aa, Homo sapiens
  misc_feature (34)..(34): Xaa can be any naturally occurring amino acid
MGCGLDRLQSWPHVLCDDRGGMEVRDFKTGLCTXLVNADAPILGMWPAVLVVFISNGGRYRARVKLAFRLVPEGKVTWSRECCVDKT

SEQ ID NO: 1009608 - protein, 121 aa, Homo sapiens
ASARAYLQKPAGRVLSVLKVPKGGVVTSRVRCARGSARVLVCGLLFGTCTCAVLHVRTGARDLRPWTSPPAPSRYRRAARGGLEAAGSGALALSRGDVQLQHWTDETPPLEVGTPRSQGVG

SEQ ID NO: 1009609 - protein, 237 aa, Homo sapiens
MNGHVSSISLGAAKIRKPIKCHQEEINDYVLFFLHLSGATRDRSRASTVHAPVRDSPSAIDPSEDSPARSRTRADPCPVVHEVASMSDRPRRVGRARPFTHPPYGAVPAAAVDASWFCQPSSCERSHRRCWPFIIAAPCRGVASCGRKRPACPASFPPAAPLLSRGRQPCAGWKPSVYHVLLILGLFAVLLSCCASRMYTSVEGWDYVDSLYFCFVTFRTHRLRGTWGAASTAAYRN

SEQ ID NO: 1009610 - protein, 239 aa, Homo sapiens
VDVDLLQCGSAGPEASCCPGWLPRCLHPLSLGQLCFLPLCSGPGWLLACRWNCFFNYGKIHFYFFFHAGVGCLSSRTSSSAHIRLLFLEAVARESSSCGHPVSQQAAEWSCIRGAHLLPDQSLTCPKACRAWLPCSGYWSTSSWQGESTMTLHGHRAMLTVLTLPRGVLRLGQSPGDEHTKTPLTNGLTGARMYVAGFDQLVTIVHAWATRNSHSSDPYAHPHPPPTKIQVPTHIYSYI

SEQ ID NO: 1009611 - protein, 204 aa, Homo sapiens
  misc_feature (154)..(154): Xaa can be any naturally occurring amino acid
ESDEQKKFLKVDVFLVHKIINEKKDPPEKVTIRLHVSTIKVDERGVQEEAISAGVTWDDSPEVLCCFTPQDVRASYTARSLLGVDLAASVFSPCVPSISVSLCGGVSCTLQRRSSMQSPHLVDLQRGPRRSLFRAFHVGLHGAMWGPVSWSRGXNCPIFATLEPTGIWPYENTPSRHATLDFGHTNPQGRTCRTILGFANPDRA

SEQ ID NO: 1009612 - protein, 270 aa, Homo sapiens
HALYQHDAACRVIARLTKEVTSCPKSSGYPETTGWSSIVPPRLLLKFPNRSVSGGGVSLDGIRGCAGGNDPERLFTSFKTIATVLDTSRTHEETVKDCACRELSEARRAQQTTGMVASRTWGCTVPAFLGSWARGPLSLSEDQQDPHWWGAITNVVVLDKSSEQILDYPKGHTKKVTSVVFHPSQDLVSSASPDAIIRIGSVPNASCVQVVRAHESAVTGLQPSCHWRLSPELLLMISTGLFSDIQTGRVLTKVTDETSGCSLTCAQVPP

SEQ ID NO: 1009613 - protein, 327 aa, Homo sapiens
EPQKAVDHTRQLFWEKKLMRAEAAFDIAEELVKTMDLPKGPAGGGTWLHWMRLLLSGTSASCPCTYSTMPINGTALRDAVGEEPLAYGINTTQPLCKAFMVTRRGHSGSRNELVHARCGHPAWQEAAVADMLAHRGGRLARDGERAAWNQGLQLRTTTRKHDAGGGARSPTRHRSMEHVKGTRPSRRRPRAPAWQTRHAEPAEPSEPPTFKPGIKTAEQTNAHEMHKPKDGHVPATHQWHPAPYGHSPPTSPRGCATSVGQQQYSRAPCSHPTPELRIPLPLTSVYLLHHKHTRDTRAKIAPGMITFLAPWPWRLPHSTVSVSTHSD

SEQ ID NO: 1009614 - protein, 96 aa, Homo sapiens
TSFIALACSAWHTKLELHGAGVGRLETLPSLQSPDASSPREPGARHPSPVYLRRHLWPRSRDPGPDGLQKLPYVSVFNGPRWCQNHDVRLSYIRIR

SEQ ID NO: 1009615 - protein, 184 aa, Homo sapiens
VTRGVDGFWRVAGVEGERLVMARCRFCPKNRTESEGTRVACGGAVSLPLYTVVCEERYVRDIFLRNPFRLPFLNASRRAAATRKTRARPANHSPPECAVTTRESAETRGEEGDNREQDEARDQRRQQSAQTPRNQQRPTDEGTNRTQQKEHKDEKPRKKEKERRDKNTKKTTKEQKGSGTHNNK

SEQ ID NO: 1009616 - protein, 179 aa, Homo sapiens
SDEHGIDPTGTYHGDSDLQLDQHLCCTTMKPLGGNTMEPRAILVESRTWDHGLLFASGPLARSLGRMTTLYLVSLGHGNNRGPKATYIKGAELVDSVLDVVRKEAESCDCLLGFQSDCTHWVGGTGSGMGILPESAQIRRRDTLSRTPELPSDVVPSVQSVQTPWSKPYNSHTFSGRIR

SEQ ID NO: 1009617 - protein, 182 aa, Homo sapiens
MSTSVASVAVRHCDDPTSRNYVIAVLNQVCLRGIHALRTTERPADMHAVVLAVCLGVALDGGPEASGCGALAELQKQCRRVRRSPFYQAVRDLLPVWLLEDMRAYVRAFSTGDERVALTVLLLRAFLSDVLVPTTARCHDAYKRCYRAFNLACAHRFPRTGEAAGLRDTSSPWLTRGLFPGF

SEQ ID NO: 1009618 - protein, 69 aa, Homo sapiens
TKVAVMTPVCMLLVGPGWPCVALGWVNLRWLPAEVSAVASGAGVCWPDGLVCLVADGLLELCWSAMAEG

SEQ ID NO: 1009619 - protein, 121 aa, Homo sapiens
AAAAWGSAGALSRGQRAWGAGAGRSEARLDSGLGGAVERDAQLAKCPASKAFGDHSLRGPLCWMPKAGRTSSLRLPFRWLGEEGRRAPKYTPPALLGKLEAERTTRNDKQKCLGRGACRAT

SEQ ID NO: 1009620 - protein, 115 aa, Homo sapiens
MYVVGDFPLPLTERATPPRAAAVSDSHAAGIETDLYPTDSRSYRSDRNHTNSRVTHPVDMIYNCVSLYYIALWTLKHSIYHISYTTHHAIFTAHLLVYSTLTLLIHIANVYDSIR

SEQ ID NO: 1009621 - protein, 348 aa, Homo sapiens
DAWAAFVPLSTGASPLPIPPPVHRLDGQLTTGLSDYLRGGSVCRQRAPCMCKDRALLSWATMRPGPVFPSIWGTLPGHQVVMVGMVVMKDSYVGDEAHDATRGILIPETYPQIEASGYPYTKLGDRIDWDGQDLGYQNLLWMNARVWRSRGCSPYSAGPEAPLGYLIGLNLRMNDDPDLMFEDPSTHCKTMYVMVSKGLCLSLYVLWPVCIGNPWMRRPVTGDQPISVAHLREGNVLRHMLITAVLDVVWPGRLTLSSLMNESVTDPADYMLSNPTQCGPGAGENSVGVKPFIRVDSLNCLPSPPVHFRTATDALRQWPRLSTPRSYGWQYGFDTWPCVAKCHSTLRS

SEQ ID NO: 1009622 - protein, 209 aa, Homo sapiens
MSMPTDKCIVLQRDFSEVMGARDWEEAVKMPVGMQSPCALWATSLACDACEHSYLGDLSQPCGLDLLLNLLTVAVPGMVATSLDLLSVTLASGAPAVSPSCLWPGGFVSDVDIQSERFRALGSARIHTWDTVAGPRHTATPTADGPSPLPSPRNMCETCAHSVPSTWPHERRPFVAKVPGSWPHKPQRHHATPTTRDHTSTPPMQSQQV

SEQ ID NO: 1009623 - protein, 190 aa, Homo sapiens
MSPAIAEQEAIKRGRGGAPVAPDPCQGTGFLPWNTSEAHAQNSVASSEEEEKGAPFSRTGCQYRASEAGTTVGLPTPRNSAVTGPYKAFQGPGARVGETTPYPSPPHTQLNTKLGPLGFPSLYVDGPPISGGPLRMVIHVHLPKGIPQQGPTRGGKRVSGLGGPPKHCPGHHCAHTARVVTQMDTHPGTP

SEQ ID NO: 1009624 - protein, 221 aa, Homo sapiens
LRGYANPLTHLRLPLPCTPTVGPQHRGGPCKVTPAAATAPSLSNSKNQSLGSSPKLPHDRTLTTHLSLSISYPVAHTQPCTGPTHLPSALPGRLFLPSPMAPSNTPPHTSTHTQAYMLTQTHRYTRLCPSLCAQPINRSGPSRAIAPVLLSLRSALPLSDPGREPTPHQSVVCTPWNADRLVDQRGDVARQGYTYCLNDSWRTLTCQPCIPGRQGYLTRSR

SEQ ID NO: 1009625 - protein, 102 aa, Homo sapiens
PTRSATVVRARRYVQQRLRGSGLQMADLNTSCIPRVARRNQGYDVICLSSAIDWPIKCSTSEVSPRDRRHCKALAAKHRCSLRAHRLAWAVRGTEFYLSGHP

SEQ ID NO: 1009626 - protein, 275 aa, Homo sapiens
GNNAPRRRGLKAPGQEKLSRDGEEHHVVLSSPYRLGGISSTEEMDLKDIQFKNRRNWHERLGTSGRLVKMNSEKRIEKLEKRQATDDATFLIVNRYWAQLDDTVEAHSPSAYESHGVMLCFRRPDGTLGPMEGSQHVIVDCLLPEPGTSELERSPVMSAGCRDPSSSETRPYGIERCVALRMQRKAREGGWKHGSMEGRNGKQHKGTNVSRVVDGLRTDYRDRDGLETSDKRRVQHDRAQEPRSEAGQAKTQRMGRENRRMKDWPPTGKNTTNQG

SEQ ID NO: 1009627 - protein, 448 aa, Homo sapiens
MADDAGAAGGPGGLVALWMGNRGGFRGGFGSVHPGAAARGLWHGGPGPEAAELAEARPRIRSGCPLTKLGRLRPKDHCKDSNSPCASDGIYSRIIPMPPLQEIRRSSDFLPLGARPLSKGIDASTGTNSIAQAGTEKLQDTPVDPGTQERPTHGVSPGGNNWYGTNRGGTFTKVRTERLRAATLGGMVNTVGLRTRRGAGFGRPTPGTQFPLVGRGGPEFLITPLWGPNRSFLFPMYRLRRPRNCPAQHERWDIPLWRAGGTSDRGETSEAKTGTALTTTALGTDALHGHTGGMRNENREAHGALRSEDFHSGFSPYEEVHAQPPYAKVTTTLMAKTHPTGASADKPLRRDRAYEVPLHPRDDTAWGSGPPSYSRQRPAVIGTSPTFRTNSGALRAIPLSATAPDQPYRTVNANGHLHDRCPLVRRATMLGTAFVWTTMQHSCCVVAA

SEQ ID NO: 1009628 - protein, 188 aa, Homo sapiens
QRVNAAAVGPARQEADRSPNKQYKGNQWTDIVRTPQWSRAVLSLLDVCAILPIVIRILPHSSTSTLLPFKDKVHSTIFLVGAPGDQGIIASYLRGTICRVHTLAPSGPVVDACDATLPLMPISVPPDLDFLPKKTRPMDHTGPVRHNRSRDNQKTAEVIREEPLRGSNHGPCAWKRIQPQGTTSRANS

SEQ ID NO: 1009629 - protein, 190 aa, Homo sapiens
MPGSHVARISSLAKTDAHGYLDTNSCSSRLSAVASDINWRRDLYSVALFPVVLSPYARRLRRRKGVNGMAEISVEGPQVPGVHVCDVNYTLGHPLLRHVYHGDVMTLHRALCCDSLRRNVTGSKPFAQIISNYALPIVHRVCLDRHFAKVAIDHKYSHASYGDPVIGSTHFAHNLKSFMTRADDNLFTFR

SEQ ID NO: 1009630 - protein, 267 aa, Homo sapiens
MYSSDIYTYCLVSVFMTMERRCHELECHHFYVCKQHAVPQMDDLKSEPEGDQVTDNRPFYDSILVSAVAYPNPSPGVCSLRSSLDALVNAKVLRAILSFESKWSTLQLQLNTVPQRTVMSCVDADITLLEIDMTILCEGGPRERCLIATAGDVTWRAPHSAQAVHRRYYAGADSPFVYLINVIPESSTVCEPCHATDLGPKGFLVCHKIGLMCNVLWEQKDIVRVDDATDGEPVVSRRMTVRWFGVPTPPVRLQGMVLAGHEHARQN

SEQ ID NO: 1009631 - protein, 37 aa, Homo sapiens
MTVPICKPKNAQHDSQGISVTHRGTQGVSRRREDVTK

SEQ ID NO: 1009632 - protein, 71 aa, Homo sapiens
VSRQNTGVVKTTPRSQNGKGEETHINIVDHVDDVDSVQVHTLRGHADHIKCSWASTENEASRENVLVMDGC

SEQ ID NO: 1009633 - protein, 104 aa, Homo sapiens
CADAGAANGRAGSAAMKVKIKVLDGVSTWFWVANDENCGHLQDGIITDAVLTCNVPGRRLPAWLWGQWLPRVFHMLCSPSKWLHAQEVHAALPLCAVRNGSSEE

SEQ ID NO: 1009634 - protein, 137 aa, Homo sapiens
MTLDMDACSVRLMSVPQEQSQGLARDLLDGQDLGCELPPSVILNSVRQSPCWKPTPILIVRGSGWLQDPLKQGLLDRRAYVAPPPSHPSRRQDDNRFKAFRNLQLYTNEDFQTGIHTRETSIEQYMLGCTWEQGQGR

SEQ ID NO: 1009635 - protein, 330 aa, Homo sapiens
MWHSLARQATGSSTRGGNTSIRDEYGLPRDGRLAGELGGRETMGDEKANNSGSHTAETEDGYGTQGAKQDAQRSNTGLRPRVDNALSSGYNVCVPNEVTPRERGTGTAGTTENSVLGGLAEEQNQGQRDKTGGTQQHTMTTEYQWKVGVLERNTDREKPERRQTEMRQHIDDTHRHTIGQPYRWGEKDHTPENGKEKLSDKRNTHEQDDPKQSQPATSTDTDDADTESGSMTADDEDASGTTIEKIARDNEPNDKKETTQKQKLGSHSHRQTTDRDKLAGGEGQTAKDRRDKQSRREEDRKRKGTQQRHTRRHSTTKRGGKESGTEHRTT

SEQ ID NO: 1009636 - protein, 115 aa, Homo sapiens
  misc_feature (65)..(65): Xaa can be any naturally occurring amino acid
MRICIDIDNAGYEVTGGPLADEGTTYLSHLAFLLRKKEPGSDNFSKREAFRIPHKNIPIGTIDRXHVVRTLNQFGPPMGRFSQASIKTTLCKYFRLRLRILPQAWSKLTSSHTYL

SEQ ID NO: 1009637 - protein, 122 aa, Homo sapiens
MAPGMPLGGTILAVEYQGFWVMIEPFERPLCPVLWKKGAHIPYWESSKGKRTERDEGDGKGREAPKSRQISKKQKRPPRKDTPRGPTVTRHTASTKQRNGAPGPGALSTRGTTHRVRTQLAH

SEQ ID NO: 1009638 - protein, 445 aa, Homo sapiens
MSISSPSGYDSQVVACFVSLLHSRAACRLYAEFCCSDFLRMTLASRKASTLRTCLRTTLIQYLTGYVDYTVTAQHFILLLSETAITNLTPTPRTSCLLYYTSDLITHVSERTSGHDLLGYDYKNMAKIATFDFIDIVRPQSIKALGHNPMARNFSLHTKYAETFFTYIGNAIGPNATGCKPTLTDGWHNIVRTCKLALCETNSGAQPPTPNYTSATIHHTPLCAHHTPGDHGPHATAPRQGAVHTARQYKIPRDTGHTEQSNTMANISTPRKQRGSEADAREMHHPTITDGKRCRYNEHQGATDDHDRDNARATLARHEHNTAHTHGPLTHAHTTQSTEQRPTTRLAEHNINREAQQPMGNRNSRSRQHCRAGIQSQTKSPETVDTTKSRNTHTRPPPHRDMTPPTQRETRHRQHMASPTVRRANTTDRTQAPRVTASQQQTTDQ

SEQ ID NO: 1009639 - protein, 114 aa, Homo sapiens
MSSFLPEGGCHELLTVIGKGFEDLMTVNLARYRATGEVRDCTEEQSLEAGAIEMVTFLAGRGCMSPNSVNHPNIVPYRAAFMADNELWVVTSFMAYGSAKDLICAHFMDGMNEL

SEQ ID NO: 1009640 - protein, 94 aa, Homo sapiens
MGFRRDRLGSQERLGTRGVTRGEEGTEKRVPGGPKEVSVGASNLGRTRETQRELTGTKRNEAGNAGAKERPKCRAHRAECQNGGGLAAAVRREK

SEQ ID NO: 1009641 - protein, 339 aa, Homo sapiens
NTKWRDDAGAAGWARGALVALGWGTCGGFLLEVSVQWHPVGLGSAACGLVAWGRMGLRSSLECNGLRIQDVDALSPMLGLLVKDMKDSMSLAQEIYLFLPAQLRNHEIIRVSFLGGALSSKDRRFSKDYAECKESRNPVPAMRNQVQRHNRLLIGGTNQIVHTQVSRHGMIVTRSGIPKRAEVEHKPRQTHKMRGSPNQVPLEPQSLHPEFLMTPPGLDRPQNGGLNLEAAGDTPERNFWVTKLAPPKQSVCDNQHYGQTWFGTNEVCLMGSLGRWHFPFGFGPLGGLNPWPHVYRNINATDLELTPTQEGGGRAQTHLGRRKRFHGDTDFPTETRAPV

SEQ ID NO: 1009642 - protein, 150 aa, Homo sapiens
SWTGPARVLEQQVNCRANAVCGSDEMIDRSYGVTQGRKAITHEGHQSRLAHLTIRCPVIDPSTACCERLACDMWSMRHPCVSVVLSADSATALGRDNGATMSHQTLDDSMIEPTLVQDFGPRVPYPFISDGTGAKALFPDDTTVGLPILN

SEQ ID NO: 1009643 - protein, 147 aa, Homo sapiens
MRASLIEKVPVHVAEMKRMIDEKAIRDALDNKVIRGTTLLVNASRIPKTHVKHASLNPESFGPCITHRRRWSVNIRHHVWDNTLAFRAVLSSEEQPTKNDTMESHVNYDSQALQDDTLESVTARKPDDYEVVQSSVDELRSYGHSGR

SEQ ID NO: 1009644 - protein, 178 aa, Homo sapiens
MFMICEAFAVEANIVLIVPKNPPINAGVTIWMPPTPITHSKNPVYDKNLEEEEDAKSNRAQRLVFKPSPMDLHELFKRKNNTTKTRTDTTKKQTPTRGQPPPKQHNHHHATWRLHQHGPPPHAAAHDTSVEHAMWLVPTMTWDHYTPRYHPTSVTIRAPAHVRSKTTFTIHITPAYPL

SEQ ID NO: 1009645 - protein, 123 aa, Homo sapiens
ITISTSTEYYYIAHTSISSLVCLEGINYQHVHLYATASITLTITQSLLDSDTCSRYLHITVDLCRASERYAAGSSAVLDLEVLQSSIWPSTTYDKPRATPSARINRANDYISTTEMNFQREAR

SEQ ID NO: 1009646 - protein, 130 aa, Homo sapiens
MQITCMDPSLQVQLFIEILNRYIYLYEKENDAVTIHGFKPALSKRFEKTSRILTSSEEPRSRLTNISITHCDAFALAAGITRIRGAKFINGLILYQTEIAHHTPFHVHPARVLLPLRFPFHRSCLPEMLR

SEQ ID NO: 1009647 - protein, 102 aa, Homo sapiens
MAVRNVSLVGVVGVRWWWWVTLRLLWGPSPRLAAERVGWWRSCRDVLARCLTGPNHCRPAQCHRLCAYPRQYAMATTHEIMGPKETMHPGLLNSVAQNEMTC

SEQ ID NO: 1009648 - protein, 57 aa, Homo sapiens
SRICRPRVALYSYKSLMAQIKLYNKNRMYQKSYGGAGEARCKAECDIGRQIRSVSSG

SEQ ID NO: 1009649 - protein, 226 aa, Homo sapiens
SGLCRPGVGSAWARTDFLLLSGALALIQTWDGLPLHESISTPPCAGPAAGSPVFIAVGYVDDIAVRAVRQRTPAMPEDGCLRDAAGYSRRGRTYWDRNTRNVKAQSQTDRVDLGTLRGYNNQSEAGSHTIQRMYGCDVGPDGRFSSGYHQYAYDGKDYIALKRGPALLDRGGHGKLRPPMHQVGGGPCGGRSGEPYLEGTCVEWLRGYLENGKETLQGTDAPKRTM

SEQ ID NO: 1009650 - protein, 122 aa, Homo sapiens
  misc_feature (6)..(6): Xaa can be any naturally occurring amino acid
  misc_feature (9)..(9): Xaa can be any naturally occurring amino acid
SLVGPXDGXAIVDQAPEMIMVYAKAITVITSDACELEDVQCTFTCGKNFVDLSIEEYIRVYNAVWEYIYVMNIQENHYICEKSQECLKVDWRVKDSYMKRIKGTACSRSLLGMENPYLNWYM

SEQ ID NO: 1009651 - protein, 117 aa, Homo sapiens
MGDSASAYIQKPLGSPVPAVQADVQRKEYIQRLKTKGYLAPKVYTQIREHNITPENANQGTTVTTPDKLRLQKLHNYIKGPENPYKKPEIALHEENQCVPRESNRHRYNKEETKHKS

SEQ ID NO: 1009652 - protein, 67 aa, Homo sapiens
VRISSTQRFVVFVRLNHLGKKGADLETVLRRGWARWLTPVIPDFERPRRSRGQEFETSLANMVKPRL

SEQ ID NO: 1009653 - protein, 182 aa, Homo sapiens
MSSALHSARPGCLRELVWAVLILAPDLVKSLVSQHVSLQCKVSWHLTTQIIPGFGAAVTCAEAGRGGGGTLPVFTGGFFLLVLPGMNRFPPCHLLRRVGAHAVFLASFLSSWHDGLHVGARGQLSTLHLGGAEQIGPKLTGRVGADTRLRDQPWTLPRQSAFTKLSLPPWTSLNPLQDKGAC

SEQ ID NO: 1009654 - protein, 104 aa, Homo sapiens
RAPLADGLSADALERLLRQPWAAFVVAVRAGGAAAARTRVLAASPLRLCRAHQGSKAGAACGSGAVHLCRFWSTGLKFPESRRTVGQVQFDKRTQAECAENSWR

SEQ ID NO: 1009655 - protein, 78 aa, Homo sapiens
  misc_feature (8)..(8): Xaa can be any naturally occurring amino acid
TAGRPRSXISSIHALRWDYRHEPPCLANCCSFLVSFEIRKCETFSLSRLFKHVVSLDMDFSISLENVIGILLGIALNL

SEQ ID NO: 1009656 - protein, 309 aa, Homo sapiens
  misc_feature (103)..(103): Xaa can be any naturally occurring amino acid
  misc_feature (146)..(146): Xaa can be any naturally occurring amino acid
  misc_feature (154)..(154): Xaa can be any naturally occurring amino acid
  misc_feature (158)..(158): Xaa can be any naturally occurring amino acid
  misc_feature (160)..(162): Xaa can be any naturally occurring amino acid
  misc_feature (175)..(177): Xaa can be any naturally occurring amino acid
  misc_feature (211)..(211): Xaa can be any naturally occurring amino acid
  misc_feature (219)..(219): Xaa can be any naturally occurring amino acid
  misc_feature (239)..(239): Xaa can be any naturally occurring amino acid
  misc_feature (241)..(241): Xaa can be any naturally occurring amino acid
  misc_feature (263)..(263): Xaa can be any naturally occurring amino acid
  misc_feature (277)..(277): Xaa can be any naturally occurring amino acid
  misc_feature (297)..(297): Xaa can be any naturally occurring amino acid
  misc_feature (304)..(304): Xaa can be any naturally occurring amino acid
MVGACYPVLPWNRAHVDHAAGGRSASRVLWSWDRRACGCRDGTGGHSLMFMPDGARTAEHERAVTDLNTTRHRSWRCVRHRDAVCQVRISSPGVYMCSWTPEXSYPTTDARTVLVPSDLHSRVVRFIEVRCVIAVTSAPEPRYGPXEVELCLPXCSCXRXXXRLRLTRDSDWALXXXILPLRSHVAVSEERWRDIVLTSPLALTVTCVDGXTSQLAMKXSDRYLAVLAWRTGDRQSVRXGXVPWEREQFVLSRQRYTRCGNIXSAQPDRLRTGKAPXYHSTVFHTRKHAPWRPQGGXFRQCAHXNARDP

SEQ ID NO: 1009657 - protein, 150 aa, Homo sapiens
MWPINRYGFHRQSSQRTPTCEYFDPGPMCIDTPPPRRDATKDPRVESQNWSNKAYLGSALPSGLLETALGPLFATLADKTQDVIYHCYVYELQDQRHSLKLLRASIYSLAIYSIYLGRGLFPLLGQLWSRYNHFLHNCFVSLACTHAYVE

SEQ ID NO: 1009658 - protein, 42 aa, Homo sapiens
  misc_feature (6)..(6): Xaa can be any naturally occurring amino acid
  misc_feature (8)..(8): Xaa can be any naturally occurring amino acid
SADTPXSXDIVDPRRSCLKRGGRLVEFRTLSCTINKCTLCST

SEQ ID NO: 1009659 - protein, 175 aa, Homo sapiens
EGWRVLRGLQRGAASFGSSTASAALELSNLVGTVLSRPQLRPVYDILSPVQPPSPCSLQDKLLCLECCAVGQQPADLREGVAKAYDTVREGILDTAQTICDCGIAGAMSMNGADWAPWWGVIRQLPPTCWWSRSSLATDGHVQPARGAWRNQICPLKPTMDHCPQSVRSGHVPKD

SEQ ID NO: 1009660 - protein, 109 aa, Homo sapiens
YSELPAFKKITGSEHPYNNLRKRFVGSALQTSDFDLMNKFLTYFPEEEDQLLRTGLKHEYFLETPPPTSDLLHVPHCVPCKQLSSKRVKLWAPARGPLRDGLVLHASMV

SEQ ID NO: 1009661 - protein, 195 aa, Homo sapiens
MFSESGPPADMVSARLVPHSKEELPDTSRTVCDAAEEGSEDPHGGCCQRGSDRSSPSWSPRLHQACEYALQGAGSSWMEKLPILTRSPRRRSWLDTNGAVSSKVSGAQEMVSSAKDTVATQLSEAVDATRGAVQSGVDKTKSVRDRRRQSVMGSRLGQMVLTWGRHGAGDVGGVSGQPPAPYGCRHDPHRHIHWM

SEQ ID NO: 1009662 - protein, 98 aa, Homo sapiens
PIDKIRARDKNSFPVNDSCDHPSTHLLVSGPSDETDAADALRLLGWLGPGGNVLHAHSVRVNSTARQARLVARKTNPTHTQRGLKTNPTRGLSPPSPR

SEQ ID NO: 1009663 - protein, 297 aa, Homo sapiens
AAANAWFRSQRKTTWERASLSEINVQYHRPLPMTTSANLATYSRSQRCRREVPGLASQLTLMDSPVLQIAATLCGRSRIFVEESENAATTLTEPICAVRGLDPNSGGTNGRTNIATITAEILDRFTSQRMLRRTHLWRGLEAQVVWPSSERSAARTCGCEKGTHSERGSCRDRTLLHNALTSANYNVRFQGPVRRTGDPELQGILNSSETKTEAGRNEGARYSRLELMGADCAGDSSYSTPGILVGSTRIRNIVAKYLLSTVLSSDAAGSSETGNPGPVNVIGGSGQIRNTPRKDLI

SEQ ID NO: 1009664 - protein, 205 aa, Homo sapiens
MRCIAEGRGHNAYWRPSATLGILLATACFGSPYARNTHMTSMARQLLEVGIQVPSRETHSYGPVVRKDRRHEIHSIALFPIAPQSSSDPAMTPEPDSNQWNYGRLYVTALLEVTWSLQSQRPDSSVAWESIFSAAEPVVLSCWNPMVAVGIATAEMEENRSQPQGPRSLPHSPSLKPSLFCTVSRTIYKIHVITRTLGTKGILFA

SEQ ID NO: 1009665 - protein, 218 aa, Homo sapiens
MALPQGLLTFRDVAIEFSQEEWKCLDPVSEDSIQGRDAGAIHSEPWSPVDVVTGHVSIGSTCLPECTPRPSTDQCPGSSRCGMSLEGTPPSTLGPVCVLSWLLPGRISLFSCHVTGKWSNLKITREDRNDSGTTVLTAESPRAPESRLTRTLLPFPDVICLGLMLWGSSSSRYASCDRHKAAGPAPFKDQRVPNPPLEVRSYQNILLEQETDKEVPEV

SEQ ID NO: 1009666 - protein, 221 aa, Homo sapiens
LRELPTDGAPPPGAALLARKAPLAFSKRHKALKLRFPAEDEFPELIRPNNHSGPGGCPPSVYAERARPEHAERDYTLDDVIQTGVDNPGQPYISDRGLRGRCRRGDPYDSGFNGLSSTPTRSRDRQRRRTKTQRTEPARHDPRHPKNLQGGDRPWNQNYVLISRGAHGPDSIPVGFVTSSRDCKPDGEPPSPIEKASREEGPAHDMRPGTLSGDRILQRSG

SEQ ID NO: 1009667 - protein, 106 aa, Homo sapiens
GSQFQAKAEILDACPQVARTSEARQGAAVRASCGDGSLERDILQSQQKEDMVKRLLRNEVLHEGMMNIGRGKPCSRGMGNPRSGCGAGLDRGTRLASCDDGSWYRV

SEQ ID NO: 1009668 - protein, 164 aa, Homo sapiens
  misc_feature (132)..(132): Xaa can be any naturally occurring amino acid
MLIAYFTDDRAVQMVARGTHKQSKRPMTEGILRLVQCQGVDTKRPNKRELTVRNQVPEVVRVTPIRTSTQDFHRSATDGVPTEGGSKGTTSLLVCFACADYGLDRKPSIAGRPDTIVVSTFGLSYQNETRRXELGRSALCVSETPCEREIKGAFEASVETRGPS

SEQ ID NO: 1009669 - protein, 481 aa, Homo sapiens
MRSSMYCGTGAQSFPRRSDPSKPVPPQSLPVDTPAVHDSHSLRSSRQAEYPSVNKKEVDGGLLSSSENTTPWFGIAGHELGVRWTQAHRVPPDAFKNLSLSMQHHQAIEIAGQGRSVYEQWRHQIVPHSTGPSTQGYLQYRTCAGLQPWPLHRQPGIAGTYPAPVIEQPRDCTQVNRVFIGHTTTRSDRLHIPSDARMKGPHLDGKDPAVNQEGPVGPAHTWDWDRAKELRYGRPRHAVTLLRPTRSHATPGMADCTPTQHKSRSCTPAGPKSLTTGGINRETDRPTTHSNSRAHRDRAHQRPGGHGTDLAHMADTVHIPRLPDATTPISTGVLTRRAWWPCKQAIPNPPHATLATTQQPPHLLTIRNWAPTAVALTQPDQSQDRTTHTQQPDPTVTQSHATYRQDDHQTPLRQACPHQQRNRQPRHTTTADHTHATHEATNRPHHPTTTPSAATTPTHGPPNPPTQHNQQATDRPQPAEP

SEQ ID NO: 1009670 - protein, 392 aa, Homo sapiens
  misc_feature (78)..(78): Xaa can be any naturally occurring amino acid
  misc_feature (347)..(347): Xaa can be any naturally occurring amino acid
MSVLRGYRGRTDVGPIVLGQDDQRSFWRKEPAKCWISTPDFRVSSMSKEGTYGWQLGPGLNVNETKRTSKKQGMPAYXVERAEVVDRIRFGPGEWSTTCRGTTTQTRIGSWGTQLAEVAGKTDDEANTGIVGDPLNSSRICEGNGDQGKPFTERKEKLDFARGTPVAYQGTRHLDMGLSREDILESREACPVQKGSRTFVEVGKQFRHSDGIGRLWCEFNEALPENNGFTPRGDCEGKTLKGNMEKEAGKRCGNPMGEQRPRGGQGRNTSSLPTLAARTTGSRNSLLAVDIGREKLGKKPNTAVAQPEVCHQEGGKPRVGEQQPDNSRRRDTTRVTVAPAVEHKRAXPKCKTNTDAANPWGGCCLSNHRLRPAMRAPTETTAPPGEVPSQSG

SEQ ID NO: 1009671 - protein, 159 aa, Homo sapiens
MAELMPGAAGGPGALVALGWGIAVATADVFRHVHPGPNVARPCDGGRGLEAAERRRQATARGITEVDCRVDRRVGPAYESNRNVTPIIPSAGRMIVSSFSLVPHERNQRLMDFFRVGDRRRPRMTVWQGFMHKVLSIISRVSGQAANEVQGRFVAYPGH

SEQ ID NO: 1009672 - protein, 499 aa, Homo sapiens
  misc_feature (359)..(359): Xaa can be any naturally occurring amino acid
KTVPVRGLNTLGPREADSVPVTQTRVDAQSVQVKALGTERTTLEGLFRPRYQAQARAGVEQELDMNLSCLCPGSSRRAADQLQEGLVQELQQEPRWNLPGTATEGDVNVPNEEGRKAEEGVPRAIEEGRRRVSKCEAHTQNRGPLLTVRENLWAPMRQVLQLHLTAAKDIVHFHGGPQEQTGMSSRGEPRQPHSQGLARAATPLLGKPIPEWLVSSPRGDPRCRRPLHRREELATFPNHALWPSLRLLLPPSLGPWVVGSFVGMPVPSSAAHLSLVDPAGVRSYGKPGPVGANPRWLVVLAAPKGCPPRNCPGPSRSVLRRDLRTRAANFAPKAMVEKSCSPGALPNRLLLDTEPHSVXIGICLARASKPAPLEPSALVATRYSATSHRPLSAPQHPAANLAATGVRFPCRLRPGIGSPLARRSLTRRQRQGQATAPAHPPFAGPPTARHHASCPYWCALYGRGLSCVFPRRRAATHRFFCFPHGHVLSSSSPLLRSLS

SEQ ID NO: 1009673 - protein, 285 aa, Homo sapiens
GAQEEVRRAGPVRTDIPEPTGATSVYSLIKVALERANRLLTTSMMRAHGVSMRHQVHLASEEDSFCPQLCPPYLHMRRACHRRPCHSACGTRSMSVRACRGGEPGPVLETPIEDVKVEVFSSQDQFLGFQVAYVVFQKPSGVSVGLGPEGPPWWCPQMSQPVEEWHSQVDQMIYADSVPEPEALRVEVDTFMEAYDQKIAEEEAQATGTEEGVPEEEGWRQGDLTGPGGAVLARTDVSTLRRVAGEGKTEVHGEIVVCSNARTWEHSKRARMEGSIAVGQGVRGW

SEQ ID NO: 1009674 - protein, 174 aa, Homo sapiens
MVASHRYVACTASVIGYGPYRCERVEEEPTIKVLMKSVPRIAEPKADRNCREVVGSSTLDLVCNAYFEGTRDDPHTYSHEKLLYHVVGKVSLSVGVLVQFYTNGLVDIVNHALRANRVEAPKLPPSLRNKGDLEPYGEPSRWRLLGPAIKFEITLGEVNYRFNPCSMGQFPPMK

SEQ ID NO: 1009675 - protein, 117 aa, Homo sapiens
MSSENRERLMDISHKGSPTTPERDHTKGPPPVYTEQPQVGTEMGQTTEEDGPMRTEAKCDKTQRHEPADNHGGTEDQLGTQKGGVTEEKREATTKRNTKGDLLQRGKQNEANTTGDE

SEQ ID NO: 1009676 - protein, 118 aa, Homo sapiens
GIWGLTTDSSPILFCSNLPHWVPAGAMPTKLELALTPTSPTLLEGRDHRGIDVCRKSEPQKSVAADDILVSKLPPTSSIHTNDEPHASEDPETLEEEVPVESHENTILYMSEQTINVP

SEQ ID NO: 1009677 - protein, 259 aa, Homo sapiens
MDRLQVVEKQNLSKEELIAELQDCEGLIVRFCHQGDRCCHLTQTDKRPRWSVHVVGTGLWTMWIWRPVHRKGILVSELNRQMGSASVTAELTLLALIHCAVARSRIPQAERASHCNVTGTPWEADRKVPRGNTKKEVEPANTEPTVGGKIPVRRPEGQWEPLGRRNDRDTEKDHRAITPGPTTLARPVGPKNRVDQARQTDNAHAQMFDYASPAHQEQNLLPEGHVPRYIDRLRIDDNKQNIEGPTEQHDPHCLWRNCD

SEQ ID NO: 1009678 - protein, 113 aa, Homo sapiens
MHPDLHSFVSMSNRHSPRVLNVSITKTRLPHVNVGLLLSLFNLYPITSPGEVEVVTLEPKRRKLRRHNSLSSTPSNVTHHKDELISEFVLYNTLTINHFLNLYTTFIFTPQHK

SEQ ID NO: 1009679 - protein, 82 aa, Homo sapiens
MRQGLPSIHRIHTEQLLDKGTEESSKEAQSRSEQRKKESIGREHYKKERTLRKPGDTKAEASNPITAKTQAQGQQYSKGPET

SEQ ID NO: 1009680 - protein, 312 aa, Homo sapiens
  misc_feature (56)..(56): Xaa can be any naturally occurring amino acid
MNNLPEKTFEKEKHPWVLYEETSIEFLIVSWESARGISKCERHFFELHERKRGLRXIAPTSVCHNYCTLDRKSIIRHIYMCQISRPLSVGPFQARRDKSRVTHFLRGKPVCSGLWTPHGPAYTSACETRLSGAPVKKVYTYLSVSKPPRLLLEAVHNTHFRTLRRALETSPSVKETPQGGSSKRLPRGRGTNTARGELRTVVVDTTQNANILGGKNRRQTSVGVPKEFFPQRVAPPSGGITPFERTQGSPLGAEEALYWAPAAKPPGEGTKKSRAGYQGAPEKRGNPRSLWGHDNTHDTGRGPNSYITNRGP

SEQ ID NO: 1009681 - protein, 113 aa, Homo sapiens
SWLATRKFLWGVNGVREKGFNPLGVEEKTLPPGILAGSMFSRGWGFRVVETSYDLFWVGAPLVLLPGLLPNMAVDLGHVYSLWGRSPTWSQAVRRLRDTPSQAHSRSTLGEMR

SEQ ID NO: 1009682 - protein, 177 aa, Homo sapiens
EALILGAEALTLSHCQLCPRKPRCPCPPSHRPHSITCDFSHSLSFGGREDEGPPGLPRIPMAPVGQCSPFPRPVQEGSGTLMLLDDSLTTRWPLIHVLSSQCPTEDTPKAEQDRRDSQAFHGNGREGRVVADEPVGLAHPGAQRKPGRRHLRELGDEPKGKHHITSRVQRSAMSVKE

SEQ ID NO: 1009683 - protein, 285 aa, Homo sapiens
  misc_feature (192)..(192): Xaa can be any naturally occurring amino acid
DPESPEQSHRRRGLVTHHTPGGAAAAASRPAVTITATMSSEAETQQLVGAARLRPALASSSRPSRPGPTPYWISAQGAGVLVCDSPASRYCALARQAPGLSTNGRVLGDTGFHCCLQWGTREWPLLRPPIHNRVPAAHKAMGFACRRQTIHKGGHDNNETHLESSYLAHHWPSSAWVCSPACRRIASAVPQXLGTVFPSGTCDRPKLAVCGHKVSEQPPVGKITAKDPPVDPGFPDALRGGRELGRDFVPARSKRLLSWFHRFNDRLARFPYTPVPILSRSRTPF

SEQ ID NO: 1009684 - protein, 403 aa, Homo sapiens
QRDLLHRAAAKPETLGWLPLHAPCERAMPPRELSEAELHRIRDLDSPPSVGGVYSATPRAVGSQGCGDWLEQKGRLYGANSYDYIGSTLYAVTMRYTHWMPANTERAALDSLGIIQYRPVRGTQYHLGVRHSDGYRRCGKYDGINEETNHVVEQGREYIRTPEQSQVNRIWGVAHGVNTPNCQYHPMRTGCRNQRQTEHGKDAQRRTPNYHKQARQTNGMTNLGCVGAPEGKYQRHSQQQIEPHQEDAQTHMVASGICAGAPTHQGEPEPPYTKEENTEFSTTTRSPVRFTQAVANRTRGSTRTPVGSTLCPPARDGPPIDEPPTRDRSKGGIVVQHAEHTEYPQDRSHYPMALHTFMEVVGYKKTSIRNSQIDRTHTYQHYGTRYTYTGTPPIGPKSPYHSE

SEQ ID NO: 1009685 - protein, 73 aa, Homo sapiens
MPPTHSRRFGEMGGKFMKSQVLSQVYHNQSQGLLSRAVKDSQKDMPTRLPTKGQLKCQSEIGLRPAQIRSYVK

SEQ ID NO: 1009686 - protein, 118 aa, Homo sapiens
MRSEADYDPYAVSQRPMICTQEIQRRDLAYERCSMNEQNLVSGWSHEVIQEKRCIQILSTKNMFLRIWICTSKSGIELRGLGRCASSGCPLDSSETVVLEESDGLIISEEQVWDQSVT

SEQ ID NO: 1009687 - protein, 231 aa, Homo sapiens
MVGVWCRHVGMLGSITLYRSLLTIINSVFTGGHLNTDSKENCCVPYKEGRHQKQGSRRERGGPAKNMSLANRTRFLVVLPKGWPPTTRRATAYSKAYTNEVPSELQTDPDCFLYVEHDCLTFDETHSAESPSDHLLPTGLRERPIPNGTCRAQPRDNASGGYANYPRSERIITLIKQLENRRLIDGRSTHTYRRKLLIRPGTTNENLENAQRTLVSYLTTFITTAANTLRT

SEQ ID NO: 1009688 - protein, 104 aa, Homo sapiens
LRFPSEAMPRPAWARAWCAHPLTCTHCLALPSEMNPVPQMEMLKSPVFFVAHAGSCRQELFIFGHLGSSPHNRWSLTRLPMLILNSWTPVILLPWLPKVLGLET

SEQ ID NO: 1009689 - protein, 152 aa, Homo sapiens
MRPTALGRRKNYVGTPAPAAAAAAAEEEKGKRKGERREAETEPDRGGTTARAPHSPVSGRAAAKSMADCLPVCHSTPAIDTSLNPTWPRLVLACQERFGPAASALLRVSRFLYLPGTDGIFGPLLNFWEVHFAHEVVTHLRGPLFQHLRPWP

SEQ ID NO: 1009690 - protein, 173 aa, Homo sapiens
HLETFASRNGRPVQMVSAAGCLSRIAYPTSSGFEEMSSDGLGSRSHQCKRWSEKENCHLEQSSRLRLRSLRDHQCAGRTLCLSGHPTLTWPMIQFGINSTERKTHDFERHSIRGIEDHIWPTLSTLPSQAGRTPSGHKLSLRRHVCPGDVLPIGKVSVLGPFHPQVPTATWTL

SEQ ID NO: 1009691 - protein, 153 aa, Homo sapiens
MSRCCGSAALSALSAIYGRAELLQFPDQGGILMTYSELERTELAWPAHSFRILMDVISAQDCGREVIRQARRSKVSLVVIKRRSGPSWNPATSYVRTTINKNARATLSSIRHMIRKNKYRPTAHGSHPQGQRHPAQQKPVMVKRKRTRPNKSS

SEQ ID NO: 1009692 - protein, 347 aa, Homo sapiens
MTSVCMRGVPGGPGGPGMGNRGGFRGGFGCGIRVPGVICGQWYVGRGVLSAAGDSGGARKVQKAEWSGLPVTKLGRLVNGHEDQGPWMEIYRLLPAPLKESEIIDFLPGRPLYKDEVCEDYVQLQNADPCPCHGAPGSRHLVAIVGLQLCHVRVWCVNVHPEEVDHPTESQWCADSSHWTKSRPSFPSAQMATVWEQDRQAPDCPLQGDKAACGVCAWYASIPCTLGGHWHSSSATVPKKLLMMAGIDDCYSIKTRGMHMTTLGNFGKAAFDADSKNYSSADPDLLERRTGIQPRSPVFSEVHWSHLRSRTHKQKSPWQRDLKAPRLVGTNIRRFNTRTNKGDLRRY

SEQ ID NO: 1009693 - protein, 121 aa, Homo sapiens
MLAWQIFRGGNRPNTGPLYTEADRIIQRTNSMQQLEQWIKIQKGRGHEEETRGVIYLPKHDQRKYAKSQSPESWPATPERFIEHIPRNSKDKAVNSICRSNPIPLTDKTIRTRRRRRKRKV

SEQ ID NO: 1009694 - protein, 101 aa, Homo sapiens
MVRYWAVRLSWAHVDAGMLGCVAARELELRATLMGAQVYFWLPDVITLQAGYEDFNMAVPGAPAGLRFGGRPAIAVLTGCLCVAWLTSECPRCSGCCGHWC

SEQ ID NO: 1009695 - protein, 152 aa, Homo sapiens
GSRQPGRAAGPVWGCTRRGVGAGAIANQETCTEAKYKELRDGLEVRTTGTAPGCQSSWDMFKTNLGGICTAKHMAGDPEGLHAVPVLQFRGSLCANHLCVAVQLARLETWECLRSGDGWCVGDVLVSELGVSTVTATVCLGAASIGTWTVIE

SEQ ID NO: 1009696 - protein, 286 aa, Homo sapiens
MREIVHLQAGQLRATKVGRQVYGKVSQRMSDGIDPTGTYHGDSDLQLERINVYYKEATRRAKEQMAPRRDSWDLAARGPWNSVRSGTLAGQNLPDRYNLRVLRCRSGSWDSNCGPMVANYIEDRLREAGWQLVCHWHSFDEVQQVGIEEDLAGTLALSMWAFHNALDSYIHTLGVCVGVNLARYLERTVRLAPCPSMCEGTRDRARGKGQRYHAMNTRGTPTLEKAMRDYDNELVLLELATINSGTRNSKGWVPEERTSMLWEHWRKRPTHYRRRCPPTPHRFISK

SEQ ID NO: 1009697 - protein, 86 aa, Homo sapiens
MREAIESPHSRLTAHELARETRGVTCTQTTHRPMSQNRGQRRLKNGKDLEAEVRREPRSAVSGEPGGDPARHEPSHTRKSAGVGSP

SEQ ID NO: 1009698 - protein, 169 aa, Homo sapiens
LAPLGLNGLCRAADAGLGSAGWGVVKVVKNKAYFTRYQCEIYEDDERVKTRLIMLRETHWWIRRINDKVASERARKSNRSEECTCDEIDEMIHLSGLALCRAVMREAEYRVDLAAEIWRAANLPNNTGSGRVGVVTELMLTGMIVTRAWLTEARSAFIELGFGYWHRGC

SEQ ID NO: 1009699 - protein, 104 aa, Homo sapiens
LGPVTRSNGAGSGSETEFGGSGEIDDSYVRFAASADVSELSYIAMSGFEKLNYTDFYQNKLQHSMISTQQLPMIMEEVEDPDSKQYAGYELFARKARVLYLIRD

SEQ ID NO: 1009700 - protein, 289 aa, Homo sapiens
MGVSLCGPGWSQIPGLNDRPVSASQSAGMTGLEPPRSGPFFWNGASLRSRFNAPCYFFGEPQGCTGLDWTPFFLPFLLNLNLKRATCKAPPCGKHAAGVISKQKTEGGVRGPHPGWVCYGPSRASSHSVGGWVTQFGERMGTRGSPVEAQQRVASVTSASRGAHHKSPSWGRMSLSSSVLAKKPGSVGCLKKRWKQSSPPRRWPGKDKSLEGLKALEGGNPGVPGVVTWRQPPRAAQQDSEHPKTHSGTQVYTSLPGGGEDLGAQALGAGNKDSGLRQTLTPVTKIIWA

SEQ ID NO: 1009701 - protein, 78 aa, Homo sapiens
EVDAAVRNNGGRYEGILDSRKLQFAPFSYDALALLGFRHELTHEERLNEDIASGCNAPIVTLTGYYYKGDSVGAVNSL

SEQ ID NO: 1009702 - protein, 253 aa, Homo sapiens
VADGDKRLPGPDRSCYVAWNSVEHRSGASAALVACVSSLDHACSISLPLGKMELLELAGRRFLRVEPRSYIRYLEDVVRWRSLQNRSEGLNISTLSSGMPSLNARTHVDDAPRCLLVSPSRLFGLLDDRGWYAYLGRLELLEKWTRLGLLMVTWCFRGLRRRSPHRMLRRDVLFYSMPQNLPRDDPSDCMGAFYESSTNARDKEGQEGKGEGRKLAHHVGTSVAAGASSRRLVALQSRHANIRCHHQIVTIAS

SEQ ID NO: 1009703 - protein, 101 aa, Homo sapiens
LVFFPSTGRDVYYCAHSCGFSMHSVSRVRPSLYEVQAGFPSSITSRWINTTPAFGRWITTLLLVSFSSRRSAKPVVLSLAPLGDKPAPRLRGGPWTARAVG

SEQ ID NO: 1009704 - protein, 115 aa, Homo sapiens
MRSRGHHVPKHGKRKEIYKYEAPWTVYAMNWSVRPDKRCRLALGSIVEEYENKVQLVGLDDGEFTSLLCRNTFDHAIRPPESSLGDPVTSNKASIQTYWSSKRLTISVCGRVGET

SEQ ID NO: 1009705 - protein, 244 aa, Homo sapiens
SKKEQKETSETNTEGQHRRNYKKKCQAGSDASSRTQSENCYTLMRVLGTEAVREPSRRVEAHVMSSDGEMRSRERRDEEAIVLSVSLTVEQRNGPEELKSLEKTFHEGVHISVYRVRNLSNPAKKVQDLKPNAGQLYLQGVVVLHKDVNVVYVEGGPNGPDDIEASYAASDELWDEQTSNIKGDDDEESDEEAVKKSNKCCTKLGEVQQPKTEALDELEVIQQVFLAEQQWIQETYQKHLGTRS

SEQ ID NO: 1009706 - protein, 69 aa, Homo sapiens
YPSVWASLRAGERWSGLELNRARCYLQEGTLDLLTLNKWKESDLFKKKYHGFNADFWLVPSILSSESQA

SEQ ID NO: 1009707 - protein, 218 aa, Homo sapiens
LEKGVLQIEFSEHGEVPKAMYAACRTKCVLLVCQAWAHHHHRWHVPGSGQCARHSSAGLTLADLLPRSSWRVRVVCAATQRPPADRKFGNSRRGSESERASRKCHVVVRREEGGLLGVIAGASRHVDVLAATVRTIPPVRVGSFPYHSNTLETRGKGNGQFEPETCMAGVLGEYGLVKALTSRQAKAHLLHERSALEIHPRSCRYAGWMCKCWPVVLF

SEQ ID NO: 1009708 - protein, 106 aa, Homo sapiens
MTFLCRFSILCADRGHRVQGLGGLGVTCSAIKSLERSSPWTGVRKAKAWMHVPRSRSLESHRVIRSLIHLRLKSISHIRALDKIMICCTLRLRISRWNLKTTLVYV

SEQ ID NO: 1009709 - protein, 310 aa, Homo sapiens
MNPHDHGGIATSVVLWPMVIGGRTREYDCQNASPGNALILCSCVYGLFYKNGIANRLLERGHEKMGLLYHAPDTQAVSTRTHTAKQRRDRSTIRQPEMTAGEMRRDAHKNLLPRRWRWWATGHEKGRCVQQLPRERVHSVPSRTRSGWVVIACANNTVGRIGETEQLERTKEDTHRPPQPHNAQPQKGDRDRQQEHETRNIISGGGSMGHIYPRGGKRPKRGDLKIINMVPTIGENSVRRHTGRRSRELQANTQKYEDNNRYVRPTEREHASRYRMEQARTECRITITIEDIGQYTTETINTNTQKRHGN

SEQ ID NO: 1009710 - protein, 112 aa, Homo sapiens
MARKVEDPEQRTVDPGLESTKARRRNPTRFGTTDAGNARINWHSRLGMEPHAEHRTVADEAPQPNRDSYPPRDAAMYLGWAKGLGPGAHGPTTGRRCRLNMGTNMSPITVPP

SEQ ID NO: 1009711 - protein, 252 aa, Homo sapiens
GASVTPDSGPRAFSSASACRRLPEPPRALACQARGVPKSAVHTHVLPRTPAAEGEGTPTQPASEKEPEMPGPREESEEDEDEDDEEEEAGGTNEKSLIVEGTRGNTEKKYETVDNASLFLTERAILQFAQRKTGQKLRDNCEDTFFSTLQNENQMNFEIYTNCFTTGQALCPSLPEECGSVQWLSICTPEVSNITTTADHARTHLYQMPMLQEASVKVLNSAETQVYLVNLLTRILTFLNCSKASWQTIAEI

SEQ ID NO: 1009712 - protein, 217 aa, Homo sapiens
VSELRCLLACARVRGHGLKAIIPNNVTQSYGAYPTQCRAGTIPMQSSQPYGQSRVTRGYSQSTDTSGYGQSSYSSYGQSQNSYGTQSNPQGYGSTWLAYEQVAKMLPSRRYEAASPLYPGLWPAVQCSLTVTSGTLPVASSSVADSYWRSPRMSGAYSRRQLYGYLVVHASESVCDHACRRAYSCPPSRRLLDRVEELKLRITQASGLSATDVTVRR

SEQ ID NO: 1009713 - protein, 344 aa, Homo sapiens
MASLTWLSSDARVSHLFSTVRVWPGGKGEDTGVKQCAPNNSLDGRSSHRSSESDYATADAIHGPAALLTLDGELSRGSTELMVETGRKHGSRALTAGDVKTWVCPPLTLRGRMHATLIGKVCKRNSYTWYITLGTFCIYYFTKISRLWTHNTHYAGKYSRVCCPAIIPGGFTCEYEAGTRDPMRIHFRVPIRHWMRKYQSGRRLDQGRAVHIPKRHCPRAWSEALIFLKVPGSLRGLKAETLQRARLEAWLRGAGDHRGDRASSAHSAFHNVADQRGVKDSPGRFHAAPYDRKPADVTPGVPNIPWGRGGTEDSKRRRLIWKNPHNSCGPRGHNRSGGPGRTDA

SEQ ID NO: 1009714 - protein, 348 aa, Homo sapiens
GTRGYFLFLGNIKGLLFIFTIDIMDTCTAHTVDSVAGGPFPPLTARPPSPAPGPRVAPDSRALEPALAAQHGPGGHPAEPEASRSSVQARGEGVPGSLTDGRQARGSLTHPARQPRGRRQHRAWDPRAHETRVQRLPTTRGHRAQAPCHLQMGVVQGGRKPLRGKAVLPQRPAERMGRRGPGQPVSLSRGGKLPWDTAGDACLRPPNGAWGEPPTGQRESEGMSPELRPARKPQTQWGLREGGNTARETTHAKPPRATPRSRASRAAAPLAIQSKQPGEERAPPLWGSPEEKPLPQVGHGAAGPGGPPLGAGAQQRRGTGSREDTGGVALLKEGRHPSQRGTPPSDAK

SEQ ID NO: 1009715 - protein, 289 aa, Homo sapiens
MARELRGAACLWGLPPVGFAVWRRRWRSCREDKANSVYSGGPYSPVGPPVSKPKTVAALSWSRDDWLQPLRETGYVTTGRTHPCIRLISMTEKLCRVHTCPNSSDDSMGRWTKDRRMVDSLVKPVSHATFKETYEGAELPRETDSSQKCRNVLHALEKKRLEVYKHREVGRWTGSPKRRNLSEATYVGHECTPFDKKLEASLDEYTGQPHDKASPKGNTVDTPVEPEEARGKEALCCLHKTHIGRASPIFGRNKHLEGGSDKRAHIPPRGNCAYHRQRKKPKGGIVEGP

SEQ ID NO: 1009716 - protein, 212 aa, Homo sapiens
MRSGAGAGLRIASLLCESRDSAGRESEGAQRSANYLRDLGADLKVIGKYKVCCQDPENHHNVLGRKTDRGETQKKLEQGAKSEGIFQESSEEEHVDSMRLPDLLTIIWMGCQHYLSWELESSFCFLYLKGAVASISESPINYHIGGLGATVQRAPNLFLTMFATHREYAIIVNDYTLPQLGIEPLDECHIVGPLPHVSAANVGCTRHFVVPF

SEQ ID NO: 1009717 - protein, 307 aa, Homo sapiens
MCDWKTGWRPCVCLGRYRRGTSAIARPTLAGPAVDASLAEYGNLRSGAPVRAWIRRLAFWSTACVWPSEAVLSSPLARWDAVVLTVGSSVLSTDEDYWGIAILMRASVLSDGEQQNRVWTVPWHEEIVDEQWRVSLFLSCLHTSRGDITMTLTNITRPVCRKDSSSDKLVGSSLGDIVLELVMSWKTHEIEEWNRDVILWEMHEKLCIYADVVFNYLHATAFQGTPLAQAVEGPSENVRKLSRADLTEYLSTHYKGPFEWCWQQLEELSTSKCETSPRNTSVGFHGLMQKNAVPTFTPCPFNLALKI

SEQ ID NO: 1009718 - protein, 183 aa, Homo sapiens
MRFGNHSLCTRDGFLDPVARSLLLAIDWDEALVHGALKVVGTPGGSQRGHTRHDTIVKYIAKWHFYVPLTHTAYASETHDSIALTIPGNPTGRKQLQKLITVHKVNTQRGGKPTREIHTCRDRAKQDNTTDNPWSTYNGKENTPGQSTPASPNEQAIHTPKTPCKTQEAIMRGTKQTGWETTP

SEQ ID NO: 1009719 - protein, 241 aa, Homo sapiens
LEPGAFAAKMSSKCGEGSSSRDAAFPGHWQTVPRLRHEPLTTPCSPIVAQDAAWSFAVLVALLGMEATHSGTRAPNSLLALSRKTMTRPVRPSRPDDVSVDVTPHDRHPMGPCGHRTCPAAGNRTPINGLLKIPLSIFRSHIDQSTPHSSNAQEHRSMAPNVLQHPGSREITQSTPFQVISGSLPAGCGILPASVSNNVTPLEAPLGSTPTKSYALRLPSPERWLVALRVPPIQLLTAQPA

SEQ ID NO: 1009720 - protein, 93 aa, Homo sapiens
  misc_feature (24)..(24): Xaa can be any naturally occurring amino acid
MTTGGALTLLDDGESPVSEPRRAXSKIATIPHKGNTLTGGDTKRRPLRYEESDTRSTTNETLGGPPPHTHPMRGNAPTGSGDHTKRGALRGEP

SEQ ID NO: 1009721 - protein, 109 aa, Homo sapiens
ERTSLAFFFLVLEGKTKRIYSRPGLKMHTARSPVVISTSKERTCLKGSPTQSRAAVAAVRLPSESTAVFFLTGCSGVRFSTLTAKGSLTINSRYAEKRTESDLLDGASI

SEQ ID NO: 1009722 - protein, 233 aa, Homo sapiens
ATQVCQLRSRGRSPLEKVDRSQELMGTSLMVTCIAYQHQIPMTGISLQNLGDPRGLGCSPQYLTRCCSSLVGQHMLSVQQFNKDQMSHLFNVGTDTAYDGLQKERSLDILKGKVMAVQCSMKVSTQDQLAPLQQPWSGWEVLCSVFSEATSSVQKGESRGMTPMQTMSCYADVGRAPEPPAWSSGAGRQALPEASDQCWGWGGEQPSQALLDIFTIREELGTVNGMTITMVGD

SEQ ID NO: 1009723 - protein, 82 aa, Homo sapiens
VWMLPQQQAGAVVVADPTEKAPSPITWLDWLAGCTYPTLAWLLSFLQGKVVRTWAHSLLTGGYLNPQCKTSKQSKKRLTQTD

SEQ ID NO: 1009724 - protein, 81 aa, Homo sapiens
RDPVTCASDEVAGCLAHLGDEEVFLAIDAAEDVMLSTKSEESSMTGARRSMDGSTGVVSHTYECCTRGCQSLGCLDDSARK

SEQ ID NO: 1009725 - protein, 137 aa, Homo sapiens
MDNWHSDRDNRQHYRQQRTEDEHYHPRIRIHPHETRGEQGTTQRTTRSLLKHKSEGTTVKRDDHLQQALVTTTTEWTHAATRHTSSAPTPPHERRKRRSCNTTDTSAPNTRVEGTNDKMKDKRSKTDPDPKTSEYTN

SEQ ID NO: 1009726 - protein, 100 aa, Homo sapiens
MGRRIEGELACEGERPGTGAVLKHPLSPPSRMGITLGPPSRRRWQCMAAEADWAVALGRGTSRDMRLDMEGSLVLDSFRRPGLTREAIDYGSVAAKLRWK

SEQ ID NO: 1009727 - protein, 119 aa, Homo sapiens
MWHALRLMDDTRCRQTRSCLCCLVYHSEIDGVEDMLLELLPDDCCLGRLAVSSFQPRGRESLAKTINGDVVFLFTFSCTSACVFSHQRWESGEEVDTTEDELVPRALEDPAVCPYRARL

SEQ ID NO: 1009728 - protein, 141 aa, Homo sapiens
MGPKGQLSRGISRIATTRIMDLDHLSQGSAYFTVVTHYQKSNGTNFAPALIPPVGKPLLTLRLAIAGGPNLRRHFLVSWGSTPWGSQEKKLRALKNIPTTSGMCEWRPQVGKVQGTISHIGLWQSTSSIWIHKGTGGKHSR

SEQ ID NO: 1009729 - protein, 134 aa, Homo sapiens
MDVREMRISRTLARVLRLPRVLLTGAQRECREALQDFPELDVSLGGGVDVACVARAAVAQGWVARVFATPRAHRTRTCGRGDVARLWRLGGSHELLLGTSGSVRVLAPSTRRAFCGQAGHALLVRVLLTLWYGF

SEQ ID NO: 1009730 - protein, 226 aa, Homo sapiens
EWARTPVLRTRRANPEVGLRGQAVTWVNVWNIWGARAADLCQMDGTITEALSVVSDDQSLFDQLYGAAAHLPKADMTASGSPDYVAAHKINPSQQQQEWINQPVRVNVKREYCHMNGSRESPVDCRRKQMQQCWWCGGRVPRPIELQQAIVDREELGTASFPNIDHQREEIISPRENPNNMWTTGACDGNWLDVGHTRSTRVAWETLKPSLDDAEETLGLSTGNLV

SEQ ID NO: 1009731 - protein, 324 aa, Homo sapiens
GRGPACVASLSRLGSLGLPYREAGSGAACGGGRPPLSRLLEPGSFPWPVRLCASSSSASCSRRLGGAAQLVYFVPRPGGGGRIVSGLSDVQPRTWTAGSQARSVGSQPGRTPEQTGGAWARALQGPSSSKVASPGRRSPHWGTLFWSPVSADSLRKPVTSKEPPTRRHTLGKHRGRREGPGGLKWQGLHARKDVQHMEGLRTTKNAPREWGIPIGAMHRDAPRRKSGDLTRRSPWTATHTVGEGKPRRRHRGRVQPKHNPSPTWTRRNPATDRGQPKTQSRRKSNGKDPGKKGKTSEGGQIDRSAQGYRRPPFGTAKSAQGANA

SEQ ID NO: 1009732 - protein, 239 aa, Homo sapiens
MSGHRALPGLVMCGNQIGASFCEVISDEHGISPADTYHGDMRPAAETVSSCVLHLERHRWKNMYLDSQSMVDLEQLGTTGRLIDSGPFIGTESLDPRQNFVSKVTSWVQVTTISGHKGHIQHKGSRTLVALLVLGLSRHGQDGRRACDMPCKGLTRHDPLHMVLVNNRSHGHIGARSTLSFQPQNPAEAEYTPESASQWNYTYPRKASHSDPKDVWTHVDPKPITNRHPICGPYKGTQT

SEQ ID NO: 1009733 - protein, 145 aa, Homo sapiens
MTVDRQLERHCTGRGRNGATVKEGAASMGVCDHPIVYEGTIYIIRMRIMKSGHGLINTNRTSIDFGREFGAQTLRGQQATPSRARPRSTRKRTRTPPTLQRRLQSHNDSKQEAGRTREARHRNNKIVRTGSGRHQSTEQREAKTD

SEQ ID NO: 1009734 - protein, 151 aa, Homo sapiens
MDTPPNSGSSFIGSSLDFTPIKGDTDGGHIIGIVNDPGASNRGHRQFGGQDAGNQEVTPYVFDSPLRVPLNWCMGTPRANREGHPPIGSRQRMGIRCGTNQDVPTYHSYKSRLYPLWSFGTTVTVYRWARSHKTGPKWYGIPRAQYLNRPI

SEQ ID NO: 1009735 - protein, 208 aa, Homo sapiens
MRTGTASREEQEIIKRGSGRHQGVRTNRWRVLQNNINERASAQCKPHRQRTLRKRDKMGAIKPGGSECRHAFPRRRRLAHDDNTHRRDKRQKRRHKKNHPGSHQGNTRRSAGNENPSTCGRHARSQKEDPPYGHAREAANRTCEAEFRERGQNNQHTSALKRKLQSGSRQVIPDTRHKKPDNTGDVRRGPGPVNPENQSKANDTATSD

SEQ ID NO: 1009736 - protein, 148 aa, Homo sapiens
MGLTGPWNFRLVGNGFRNAWVDVRHNPFPNRTADVARCPEAGPRHRANDLKARPPRGVVPPVVSGRGGGARVGLSKPTGTRVGPVERKPLEAVSARVPGVCRRLPRKGCKSPTLFHLVCLWGIPKAEVNQPVILACSKLLRGRSPAPS

SEQ ID NO: 1009737 - protein, 188 aa, Homo sapiens
MSIILYLRGQSTFINLDTFIETIRRRALPIHRTYTRRPRLRSDPVRNHEIVPYFFPILSQSLVCWHSHILLTDRNHANHLSFNPAGAGRPHSYNQTPNSDFYSVTLTVNYAYPTRLRNYSPHIANLLTPENTDVTILGLPYGSALSVRYSIGFPKGYPGLTQPYIIQWAIDVEPGKHSSHSVPEVDGM

SEQ ID NO: 1009738 - protein, 346 aa, Homo sapiens
MDEDDDGAGGSAESDSGDEEEAGAHLCVGRRRKNSFGEEPAVAEFQPVDFCYSLMKGRGRNDGSMVPCADVMSRTPRQQSRAAHSQFSHEQRLQKPFGTRHDGTNQQCIQEQCQRSWPRSAEERDEEKGRPAYQGLRGNPMKEDANVDKEPRLHRTHDLHLERVHGGSTGTMTSKRALLVMQPGILTASDACALHLDRRANFAVQTPQCRGQASYQLVPETRLYHRGALRVTRAAGNKGQGDTPTNGGTPRGTGTHAERGNTPSYAGKNKTSATLPLQETASRQRADTSSEANSNQAIHRHADTTAATNAPRVAPLLGADRTSQYTHRGAKSESTQDSNSTADHST

SEQ ID NO: 1009739 - protein, 140 aa, Homo sapiens
DRETRWVLFGCCSRSPRSAWPACHPSLDRADGDGSQAACGESQICLKLKSPQYHPGGWVLLLASAVCCCLSGQWTQSPHPPKSPRWTASPTPLGSAPGAPPGNQYLLHPSVQSWATGLAPVPPGSKCHHPRQAFPDPARN

SEQ ID NO: 1009740 - protein, 310 aa, Homo sapiens
AVTPTDDYHVGTTDDRRRLRRDTGTALCCLQLDTLTGAQHMRDVTYNNLLTMAQAKPYSKKASSTSPPAAAPPAATAAADTTAIAANGQQASSHNCKACTHGTAQHIFSKTQAAASTFTPTTAVFMVGQHLPSPHDPLQAQHNAGNTHLQHKSWHTGQAPQSVPSTITGIHRHNAYTIPTKRTKRRKPSDGQNKHQQKIETAIGGPQTQPSHDQPHGRAQKAQSNPRKLARPPVIATHSPHVTAGTNYPPYTPQNTPEPTHAMPPYHVLEWARNTQPRQPLDNADKATGTEQRAAEGTNETHHRETEKQA

SEQ ID NO: 1009741 - protein, 111 aa, Homo sapiens
MWFQHEQVIDRHHAGHGGAGIYPIDATTLAELVSALVGIEAKMLVNREAVDSVPRDAYAVSHPCGQQGRLCVVAFALRKRSVEETPQSSVVLGASLNGSLLSVRKISERPC

SEQ ID NO: 1009742 - protein, 178 aa, Homo sapiens
GKMKAIVEKLRIHIQNVTAFENLRAAAALQEPGGPWPWILMEPEQAVDLDIAQGGSNAITRLGSLVDEFKELVYPPDYYPDGQVTIDEDTDNCSASVKQKDPRLDVFRETDADRPTVKKGTMGKLTVPRLIEACRALRAEELSEDSRSYWKPITNIFTGLDQRQRVQLPFAQCGTRLP

SEQ ID NO: 1009743 - protein, 126 aa, Homo sapiens
MRANPSFHCKDSVEPRHLDNDTVGWFHDFKVALTPSVFERGDPEEVLTIDLGHSESYPMKDGALWLRNKSRATNKGKQGEVTLKAESERKRSGARTQDLPVDLFTWENPLGPRVRDVGSCTKMMGH

SEQ ID NO: 1009744 - protein, 83 aa, Homo sapiens
GFSPDAETAPQKCNGSKVSFLPKNHRAIWSTSSLASILISGYSFSRYWYCMLPLRVLTTRSFRGNSSRLHTVRSKSKKLNWLM

SEQ ID NO: 1009745 - protein, 204 aa, Homo sapiens
MLRLQYEARVYCSPCGWKKVWLDPIETNEIANVQVPQQIRKLIKDGLIIRMPVMVYSRARCRRNTLGRRKGRRMGIAVSGRVTAWCPNAIEGHMDEENEDCAPALLEKIRESKKIDRQMYHSLCLKVKGNVFNKEADSHGRYARAEGREGPHRSSWLTRVRPRRSKTKDSKASAVNERLQGPRRRMIIKSYIQGVKRARIKSSH

SEQ ID NO: 1009746 - protein, 123 aa, Homo sapiens
LDPGMLSLPLSHTLYLLDKANLLSTTAFNQISCTAKMILSAFWQCPWLRTGSFMMNRCQGSWSETVVVQTRGARMERVFHLPEMFRTGIPQTWTLTMDVKEFERWRGHHEPDSSYRALWIVSQ

SEQ ID NO: 1009747 - protein, 35 aa, Homo sapiens
MESSKTGENAGLRKMAQLAEPGQAIQVNPETVSED

SEQ ID NO: 1009748 - protein, 126 aa, Homo sapiens
MATGRYGYVWSRVSLGCVLRILSIVHDALVITTRVSSLPHPGWHRAGLSPGEPIVSLPSYISRSHVRRSDIRHVCKCKIVYFKAQVELNLLTPLWSWELPLWKRIVERLGVSRRGGNRCPTLQSAS

SEQ ID NO: 1009749 - protein, 252 aa, Homo sapiens
  misc_feature (199)..(199): Xaa can be any naturally occurring amino acid
MLDQGWVLNVLDGVDPPHLEGSQRCCGIYSGIRAYLVACGPPFSLNYIKRENKCYHPLGIQRLYKSFHYRGSQGRNLRYFTTKRLLCSHEKVGVSREGKCVDSAMKIVCRREIVANITPGGGEVTSEWGEEDITLKIKSFSLKGIFKQRCGAFRGAYTTRIEKGGETTHISYKQLCATTKFVVPHFRKSGTCVRVQQRXIMFVSSPNRCCFGGIVMYAPPHKRESPPPLLTDICGVPTLIMWTHISRAQKDN

SEQ ID NO: 1009750 - protein, 382 aa, Homo sapiens
ASLTLNAINKCLLRESLAALTFSYVTEPCEGHLLLNRAVESRERMENREESADRMAVMSSEALDQTSFFVMSRKVTSPEAGLGRGGCVPTYSSLFQCVVTNDSYLDAECVPESLARKQYIARSQPIAHIPMEGRERTGHRIWRPPMGLGVCRQGGNQFLFTQSVKLMVALVFGGSSLVGTAKRFPVKHFFQDITLIHGLNTPAYDFFDASGTHITMSDLHTFVQPEELTFHDRHVRGAAKALSQNGLSFREPCVTAFAFSDSAAIADELWPVHTLVAVQPLTSTLPDRYPLCLRKRAGGNSSEAEKGLDLMNKVRARSRDCEPESKEAYRPFTRSSLTGSDTPRTKEAAPHRKVKQYNSVSQSQFFPVLTWRIYYNTAYVAC

SEQ ID NO: 1009751 - protein, 162 aa, Homo sapiens
MTDTDNTARRNTTHTGTHTHTKHAAHTTRTHTQNESNANDADPTNYTHRQETETSRPTNDDTQEAKTAETKNTRQTPRRLPNTHTNNPTYKRSRARQNRARHHQERNTRNARPTSNNKTTTEQQTTQRTHNEHQRNVETTEITTEANKDKANEEAENKSDDR

SEQ ID NO: 1009752 - protein, 155 aa, Homo sapiens
STLGDSVLRSAIVWKDDLVTCLPVEMTSVLGPRNYMSREEGEDADCTEASTDFRIDATCIRCFCFPHTCLIFSKRLLCFIMEGPAHTKLTVTPGLWTMSGRSPHKLTVYQLSRPTSVSCAYSTRPSAAVSLAASIEFFAANRQIQHLTNLRAQRP

SEQ ID NO: 1009753 - protein, 223 aa, Homo sapiens
MCSRRLTGPSSPAAGAVVEGPGACMSWVPAVRGSELLRRGVDGPAAVLRQKLYLGSVPCLYALQGLTPALGLLIAAGGGGRRKTGIKNGVHFLAARADYMGCLKLPPCLHSHDTGDTGTTMNLALAGDILAAGQDAHVSASCASRHIKQQGNEGREGRFQRSTGARRRKGASPQQEKEMWSGKARMMGLEVQGRRICGAGGERALGRIRCRKVVCFRRDNTRC

SEQ ID NO: 1009754 - protein, 259 aa, Homo sapiens
PAAPRTVSSWLRSWTEGAWMPPVDAAAPAQQAASAWVDGHALAQLMPSKLYIFESLDEWTLHTLAQVANLYPGFGAGYTRGDELCEYPKILMREMHEPPRPSPGTGKQGLCGAQLAHPSPARHRYRCHSPFVFFNLSSVIFLCLMGWLVFLHGWELIVLPHPLGVPAGKSFALCSRAGGPVGRGPKISAQGGKCRGAFKLTLPEDCLTGGYGVCLVLSSHTHETYFFLENKRLAQSRVLLPDALGQLTLVVVYSKNKKK

SEQ ID NO: 1009755 - protein, 114 aa, Homo sapiens
MTALHGSLLVTSWHWKLGPHRTFRGKLRGSRNYSQTMYLQAKCLHGKSSLLLERNFNGTSSRSLVGLRESEDLCRNSCPSCCISRVPAYVNGENIGMAGYSSIGSRDGVQVGMR

SEQ ID NO: 1009756 - protein, 248 aa, Homo sapiens
FPAQEPAWGVGSHVPAQPEWHGLEAPLPQGLASVLRGHCGSTSLALEDPQTVMCPGNGQLLRLHLLLRPCCLGPILAHLCAAPRFWYHTEVCAACVWLASALEELMWWHGIHRECVCPGPSAFLVDPRRRNKSTDVPCRPTCKRVKEYLSKLILFPRKPSAPRREDILAEELKLATQLTRSGHCPVRNVYVEGEKLGGHRLRKRQDISEAFAEVSCTGPCAQTAPGSYRAITGAKKDAKGKPGRNRDV

SEQ ID NO: 1009757 - protein, 131 aa, Homo sapiens
WGPVTGRRDGRLTDGRHLTTPRTTLTRCDTPLYNTKLYLLYFTLITIYKLILDLTILSDCINYALNGETYLGTRSIRDQHTDEQETVISKTNPRKVTTTRVYQGYIPYGTKRPPAETFQHTDIVVTMRVTL

SEQ ID NO: 1009758 - protein, 219 aa, Homo sapiens
MCLVTHEMKATSDVGPHTQPESDRKVACVQPGHPPVGVEGLQSVGTHLQCTKRESLAIGKITIEHEGPTARGLGTMHSKGYEKTYVVWPTLQRWNHARNDSEQRDEKGTQLERTIEPLKSLVKMLPMESQEEYMGRKVNDEYWHERHVTRGKNSNPMTTPERNEQQKTPKRRIEKEYRQEEKEKRTNKQTQQNTTPKRQENQRKQSRKHEKTYQTEEEK

SEQ ID NO: 1009759 - protein, 150 aa, Homo sapiens
MGPSRRVQMSGTDYGCHHHRNDTKARCISYTQTAIKKNNPRKYLRQMEEMERLWSSIVVVPAQTGAEAAQSLQVLVVFQFTAVNYAVRHVTTYRRFQRRRGPPRNYQQNYQNSESGEKNEGSESAPRRTSTQKTHDPYTKERRVPNLSLH

SEQ ID NO: 1009760 - protein, 236 aa, Homo sapiens
LHTSQLQPHKSSQPSLLTGLSLGALSVDSAQHASRNGVRTRSALRMSEGPPSHALTFLELASAATPIPARYPRYLALLETSNPRPGATTFAGSEGSICQINLATRIVWMPSEPPQELGRVGPRAGRPILILRSEGGMREATSRLQCALPLGRGAQGRFEGDPGLRASRTTILLAEGPQHTNSGVAVPTVQGRESAASLHVVTLMLRGLGHPHVTLGYLSFPILARLTGPKRRELSY

SEQ ID NO: 1009761 - protein, 217 aa, Homo sapiens
ASPLLDYQINRPQTSLSSPTPAQATDGDGPSASPPSSSSSEQQPQVQQPPPPPQPSAPHHTHSSHCDSSSNARDQDSETVKEKAKAHKGKGEALAVSRKKETGEAPTATAATISAPVTTMEYAVDPAQLQALQAAWTSEPNSIAHKPVPSFFVPRLILPDDASHRSLAPLQSGIPCEAMYWHGKALFRLQPCTVAGLMEACPQAPYCSSTSHSSRKT

SEQ ID NO: 1009762 - protein, 149 aa, Homo sapiens
MVSMRLACFDTSTHLHLLWSQDHCDLPIRSPCDPGLEVEKGRDLYFPERYRDMWEEDKTDGRSARGQRAKGMNSCHCDIACMLEGNSNYTLRTTLPYPSAEGERSGKVVRAGGPSYEIGNDQRSLEPKENYQAKAARSTFVYTGDGALG

SEQ ID NO: 1009763 - protein, 296 aa, Homo sapiens
EDLASVNKLLKKHQLLEADISAHEESRVKDLKQPGRLACMTEHAAFDTSKYKDKQGHPIRLVRVPENQELGGPLAGEPMLNESRSSVTSVFRDMDDEESWIEEKKLSWVGLHEDYVLVDPKPLQVQNLRKEGTSGWKYETWTDVMSRSYCRVYLDTLAMKLSDDETTDKLVIEDDPSRRDWPHVGVSTRKELRAGWQLPGVQLLEDVLGISCSLYANCGKRKEALDSGESTDPVLAMRMIYGLDDVCVRPSRGLLKESVKAYEDRLSTVQKDSVLNDVLHQMGRDLIKKQPITMRR

SEQ ID NO: 1009764 - protein, 472 aa, Homo sapiens
GLALQPTREWMGPFLLRRQRSAAARCSRLLACDWPSLEGSGLDVPGGVVLRARGPGLSLAPLSSDAQGREAAMAPSRPGMVLKPTVPQGLAACAWHVDSTRPARKIRQTKDPARPQAQPKYDTDATEIREIPHHGRQIDDGMAPLQGSRDNGNDATRAWTRTRGTERGHNHSTLVKEARHFQEGNGCPGYHNLPTPDGQQRGIEENPHEGKQPESTGEQNTLTYTQSGLGGGTVIRPEQRGAQRDGHCRTTQTTTTVFSRHDSVRGNGEYTSTHIWGHQCEAPPKKNGESVDQQRGQSSRQPHLGKSNELGEQGDYYDDPAMGKRQFVTTNKRTRCTPKISGAHSRNIERDTTSPQTVAGKDSGPHQQLAAETPTTHTTHSREKQRRGGVATKASKPQAEPAREQHTRYHRRRLGDEPHDERTTTDRGETNDAAVCGTLACTTNHATGACVTRPQQTHQSQYETAKYYEHGR

SEQ ID NO: 1009765 - protein, 83 aa, Homo sapiens
SVGMESLWMYFKEHHQLQRIGGVRGSVQESCPVLCSPDASYVNRGSNNGRCVSAISISASESVVGVWLRSLWSQAQEPEGVSR

SEQ ID NO: 1009766 - protein, 167 aa, Homo sapiens
MFLYRWCLLNGALFHKVLPCAVGYLGARNGATERPSGGFRFPIVPHVPRAFHVHDSDCVVTLFPAAIWTEPSSARKLLATCSGEANLGVKDMSRRYRGPTNLCAQKFGLRNTSSLDPGDSRLYRCKTGTPQKINPGHTSRFTRSTRIIASHKVLYTSLPFVPECGVV

SEQ ID NO: 1009767 - protein, 78 aa, Homo sapiens
DVTILYKPRKTIGTTITYIRRMTLESKHSSKPPYTSRAGPKPGNLLGNDHIYNVIVTAHALVIIFFIVLPIIIGGFGN

SEQ ID NO: 1009768 - protein, 197 aa, Homo sapiens
LRKEAWVPPGFCEEMLADSRLSGTIGEDDEVPVEPESDSGDEEEEGPIVLVQTTKSFGENRSADFNPDFVFTDEGWGRYDGSWALADVMSQLKKKRAATTLDENDGESSKEKENRGINEAKSGNLETRRKKQTDGSDTTRSSERPSRELLRKAQNDERLGALTTHQADAEHPHPKPDDTHNVKDRTHDEHDRTGSRR

SEQ ID NO: 1009769 - protein, 112 aa, Homo sapiens
SLLSASLRRWDGPRCICRGGRYYSRYFWCVCVLDHGTARLFRAHCGTFSAPLYVVWVPACSMILSKILPGSILPSSVNERECLVLMPGTIQFCVCFWSGASRPIAACSRFPI

SEQ ID NO: 1009770 - protein, 153 aa, Homo sapiens
IPAQMRKARHGAVPRVESRSHLSSGSYPLLCYISYRGSGKIVRSCDLILPSPWTSPMLVAFSFLRPILKLLLPLTLIAQAQACTTGCSDFPISEKGWRRVTKLSRSSSPDSLWISDPSQEASCLMETIIITSMVCIEHLHQEAFHTPTIPWSS

SEQ ID NO: 1009771 - protein, 201 aa, Homo sapiens
PSRSGVECSAGAIPHPGFPGIRGGGGCALSGCGTVEPGMVLLGVTASAGNCARFHSGALGRATPCFSAVLLPPLPKTLRGHSTADPPETTCAGARSPRNNTWSSDSRSVSVDKIISHFGGRRNLVQKAQIVVDSRLSPDVGQPGAGPPSDLASRHLVADWAEAFPEWTSSPGQRRRQYPCERGCRRSVKPGSRTRVPWNPV

SEQ ID NO: 1009772 - protein, 113 aa, Homo sapiens
TRYTFATALPDTVHIRRVEERLLSLGQKSPPASDYVALVHPELDRETEEMSGRSCSSMEVVRQTVAEPGASEEAYLMSVTQYREEHGRIPRHSIEDQDELSSRLQVPLVAGDM

SEQ ID NO: 1009773 - protein, 150 aa, Homo sapiens
  misc_feature (5)..(7): Xaa can be any naturally occurring amino acid
SIHSXXXTRRGGLWRGGRANRGVGRGRFPGWRPAAHTELFRAGEPALWQWRRSEAAWCGARSGRPGPRARQGRQQPLSATVCSVLDSKSPAGEARHHALCRTHVPASTHLPCLTGLLALPCRQLLTWLPNCHQPCALAVGPTVLTTILGA

SEQ ID NO: 1009774 - protein, 185 aa, Homo sapiens
MNCYPRTVWSCTEPRAGHAQVYLIGGRSRHGDGAGTYSLHSDCTMCLTPRGILAGEADSRHTATDTGPASVHEDCYILDQGGLKIDVWKGKKANEQEKKGAMSHALNFINSQRSTHQAHRPERAEGLGAESADRLQQLLPERWTSSPSADSQALGKTHTVGSVGEGQDGGSEGARIQELGTGEHT

SEQ ID NO: 1009775 - protein, 270 aa, Homo sapiens
MVGSTLVPVARGRGGSVPGICNVLVSGRTGIPAAAAVKRRSSAGPLDTDLCLELILALQSLPAESLCVPCGGLLEPLSLSGSQPAARTPCGTCSRGMAAAGFKHCHSCMALDNHSQTPWARDAHITTVTECIGRLENDVDTGLGVDSTPFHQKVCAQSLRFTTSKSDREKHSRRKGPYGGMPSNGLTQMAFGHKTAKQANWLSAVNTFTGKFVNTQQLLETSRRKGPRSLAWGELWPAQIDYYLTPDHIEPTKEGPKEGHKRSDATYTHS

SEQ ID NO: 1009776 - protein, 159 aa, Homo sapiens
PRTPAYYEAGCGGCAPGSQFPSARGPASGVGPALAEPIAPRRDARGESHSRHVPFRPSRRSPRGRSNHELPLLSPPPGGYPPAAPGGGPWEVLLPSSASMPPSGWITWTLCGAVQRKTISREWGQHVWDIWRSNMPSCTLGPWSGNHSDTGREAPTGCY

SEQ ID NO: 1009777 - protein, 100 aa, Homo sapiens
GVEAGFVSGHLGGYRFCLRLQASIIAFRTLGQRDQQFRPGTVKGCLCCHWGRGNPPFMSLDWHASVLVKDGFLRYTSGLNMLVTDPEDKRRTLALAFKTH

SEQ ID NO: 1009778 - protein, 76 aa, Homo sapiens
MMPQPFGLWPACTPEETRSTEPIVVDFEPGSSCRTFSSTALGNLLGLALLRKSRIPDPALVLTLQGPRHRAKDLIN

SEQ ID NO: 1009779 - protein, 179 aa, Homo sapiens
MGADDGEPDPDCYLRRLKQELMSMKEVGDGLQDQMNCMMGALQELKLLQVQTALEQLEISGGGPVPGSPEGPRTQCEHPCWEGGRGPARHHKSCYTHSDSKHLFGQQAPSFHPIGVSVEGYSPLDQDTVTSTAVLSRGQSEWNRMLDSTVMSRGRNPTALVSGDNVLHDLVGHWLDLDR

SEQ ID NO: 1009780 - protein, 187 aa, Homo sapiens
FLLAMLIYCTGGILWRIINANLLIFTVSFNAYVKHVTLLDILEVPKAIGTVGVQPPLEEMNVFLVWGVLHRYITINGFMYNPERLVGNLKSELFTELTLRNGCSLGFHWSKFHLLFVVSGDVWVRLSPPLNARTSMISPSTGQRDDASRSKSVLRGARPGHGPYARAASAGHLRRSPRPPHEQAKNE

SEQ ID NO: 1009781 - protein, 127 aa, Homo sapiens
YRGGGPRARGGRVSGLTWLRPRRETSASPRCMLPPTEPVGPQSVGEMLAAAAAATHVLGREVKRPRGVSLTNITLRESKPHLPGRSANHPILIRSKMTNCDCKDCSDRARHGCLSNWQTSTAPTTGL

SEQ ID NO: 1009782 - protein, 281 aa, Homo sapiens
VALDTHVWFSSCRNWPVRLRPSIGTSTESLSAIPVVVSVTTHMSWTDGSTTVTFRCEVYGSVSFNLFTGSTVGTSPLRSLVAKPFIGLVLAAIDVCMMVLLLFVVALTKESGGFPTSLALPVSSSDLSMARLFGLKEVSCVPSILGVWRCSDRTVGSQWVVSTTKRLCGPMRVPIYDNLIQRQSFASCQEMPSMLAVIIECVACRAAGARGSFKQSSFKYRGPSQSEAAAAAWTLLLVTCQECCFGTTTGNTAFKSTYLYGICCDCGTYTPARTDACDPEA

SEQ ID NO: 1009783 - protein, 102 aa, Homo sapiens
CFILPFTHCSIFKNKAISFTTFFIEGQPCFLYYIAYEIVYKRNTNSYFSLLGCKWHAGTEGEWGAGGGGETFCVFVPVKCCFAEPGYLSKDTARPVGIRTRD

SEQ ID NO: 1009784 - protein, 282 aa, Homo sapiens
MRDKQGHNRENRRHHTQSSQRQRPTNRQHRNKTTGSGRHTRHRRQNREQKTQQTQEDNKAEDKTRKSHKQRKEQRRTEEEATRKDTRRNKQHRGQEQQATQRDAPPEAQTEQQSRTTHDTKAKTNQTRKPQRDKEKAAKKKQPRQRQKANTNNTERTTKEENTQHNKNKRKQNTKHDEEARENSKGHREEEETQTKKKKKREEEKRKKEKRKERKQRMKKRREKNEKTARGRRKIKMRERREKEKQEGKKERKRGEVKREKEKEKGKKRRRHQEEREQEDTD

SEQ ID NO: 1009785 - protein, 310 aa, Homo sapiens
  misc_feature (83)..(83): Xaa can be any naturally occurring amino acid
YRAPPSGSRPRRRRENTLVAGWVASPLVWGTTFEPLLMLLQWRDMPIAAICFFGVDVTVPPLIGKAQRTSILFRIVHEPCAGXALSFLGGHQVQLVQPRGVTTLNVPESEARVRSPHGSLGTPVVRPLQAYSAPHRYPWRCNPWEFPIELLPGAHTPVMSTRTARKVPPDAREAPERRVSVHYAGVRAKRKRSRNRARQAYPALHNVRHFSSASWAWRKELGIRGTATYGLPQAPLTCPLGTCLLVQLAGPPRTQTHTRPIVQVSLVNYMVKLHSIPQSLLCATTELSAISMLYMDEYDKVVLNNYQGEW

SEQ ID NO: 1009786 - protein, 105 aa, Homo sapiens
MLVFLWCNFKGNVFCPHLTLVLASWGGSAHSWGWHQAAMLSLPAPLRVNRGLWQLCTGAGLWLLQGALAVTRFWAGYTMVSNPNLTEASVWEYQAESCSICYVSV

SEQ ID NO: 1009787 - protein, 256 aa, Homo sapiens
IYTADYVEVSGAKLGSAAEIAYRWRSLQAGGIRVVDPWKREEPGGTPSSSLPCTLIALGSDTNKEANELMEDLFETFQLMTMGFSNMEDDGPEEDGSVWLSLQANFNTTVKLYGLRNYCAQPLPTLNNITTSEGTLTLNSADSLTETLQAQTGTDTEATHTVENARKPAPGRSPSRKPWFPGIPSTATQGTGSNSQATVRHGHKSAHALRRSRGHQYAARTVGPARRTREVLKRTRMAQVNPPTEVMPCNRHLRTR

SEQ ID NO: 1009788 - protein, 143 aa, Homo sapiens
MPSSVFPVRPLSASWVSLSHAHCSVWYLKESKAPVPQTYKRTYKQDLVIMNVLTSALAKQIPLNNINVIITQLTVKLFLQFYTSPFQYDILAHSKDNVLTERKRVEPSPAKPDDKFSSPVRNGLQVLIFSAISMAEGGRAVCC

SEQ ID NO: 1009789 - protein, 209 aa, Homo sapiens
SRSVHPRLMYEAWVAPTLETVEKGCQTEASSERPFSCEVCGRSYKLAGSLINHLAEPPDRPLWLSGLLQGLLKPRCPSKNHRRIHADPRRFRCSECGKAFRLRETAGQPPCGSTLEQAVGCGEHPKRQSSEVTIEAFRCEACAELDRIRPRRAASCTMRSTVTETGHVQRAQLPKNKSNRMALKDHQRLHSENRWRRAGRSRRTGVRCA

SEQ ID NO: 1009790 - protein, 118 aa, Homo sapiens
LFFQLLLESRGFLVGPSPCWASYLYGEPGLLGYYTGLNVVLVETFPELFLGGSLYVQGPSILRFGDLPEKKGQPGQGHTVAPSKAQKLSVFHRSAVCLSRRRPWMPRCPSRASSSGCS

SEQ ID NO: 1009791 - protein, 107 aa, Homo sapiens
MPTNYELVPFGRARGTLSSHEKLYDRAVRATPPSLDDCDAGCCPPRGGLCCYSAVMCGVDAALLYAKNMAKYMKDLISYLEKDELEMELPRPKDVTCKRQRTNGRIT

SEQ ID NO: 1009792 - protein, 158 aa, Homo sapiens
MDTERSGSPQSIGIVTYCETQGWCIVDVLYIVAFRTSGDIIPKQGNMIIHNPVGATPLLRGFFLPTKTPAGTRQQETPVTIPFSWNHNCWAFVERTCCTNLWGPLLPGQEVLSSTPTNHKGVYLLDVGLETSGFLKPRGGHTLLYRNQFPPTCFQSAQ

SEQ ID NO: 1009793 - protein, 124 aa, Homo sapiens
FGARTSLYTHTCTHARTHTHDTHAHTLSCKVEIWGQYLPTHTHTHTHTHTHTAHVCSLYHPIHTRHTAVVSPSHTHTTHTHTHTLNLYRWLLSPHIHTHTHDTTHTTHDTLDYISLYTTHTQPL

SEQ ID NO: 1009794 - protein, 80 aa, Homo sapiens
ETTHDINNAFGPGSANEHTVPWWLKKFCKGDYSLEDEECSGQSSEIDNDHIEKIIEADPLTTIRELPKNSMLTILWSFGI

SEQ ID NO: 1009795 - protein, 104 aa, Homo sapiens
VQYPGYGAKLGCACPPSAEQRPMLSEVQNLDITKKKLATSATDVAGDYGQAVECMCCAGRLLLCSRPDERCVKSIAERRPPDETCGRRSLADGVHAAPPPPAPL

SEQ ID NO: 1009796 - protein, 169 aa, Homo sapiens
STLPGMVARLGGAIISPYPACSKGEKTPGSPATDCPATPSPLAAALLEQKVPLSQPSADCSADAGTGWNEGGVFISLPSPSHATPAPPELHVLLMRWDLIEDKKEGEMTPTPHPPVLKRSKQVSLVEELREGAMVRCQKEGWRGHVWSRGALWLVSSGVSCLAPCSCRK

SEQ ID NO: 1009797 - protein, 65 aa, Homo sapiens
MKATRTLSCLFPKRTVTASHYSQLATRDRSSEWILRTQSINESTHFDPGTPFSGPTPRHSRVNSL

SEQ ID NO: 1009798 - protein, 89 aa, Homo sapiens
MSIAVMGVRPPNRVAASVAPSNGRRARTHPACHSASEPAGDHVLLASCLRASSVWQACPYRASRNAIIRLAFSSTTRSVLRDNDSRKNA

SEQ ID NO: 1009799 - protein, 278 aa, Homo sapiens
RSPGREQAPPATVRAMGERCWTASLACPAVAATAACAGPRGAAATSCPRRTGFTAAAAGSADLRAPCTSTESKFWNGPPGLQPASASWVPPEGWGLRAACPNPGTFEECHRKCNGSCIPITDWRGVNAHKSTKGVELTHYFRSRHTSSQSCTIRGVQATKYRGITICWGTQGTLEFPQKAFPCTGGGDHRNKQVGKVLKTAHGHFNPSLEPPGISRIPKDGPIQDTRKIESLRTCAGMHRQTYSEGSGTFDKGSQVEHLGGNPNDRTIRWGYTGKFRS

SEQ ID NO: 1009800 - protein, 142 aa, Homo sapiens
MGYRRHSQHLEQRKDRCIPSMLPGTRNSVDAAPSASAKHTTAPTKHKVPKARPTNGTRQAGKHPCDLRNPTRTQQHTHGHSSTAKTKRDPVAHLERQESRLDALRGGKFPNQVNPEPMTGTPDPHASAEGGTPRSEPPRQTT

SEQ ID NO: 1009801 - protein, 32 aa, Homo sapiens
FSMEEAVERLQPRNARISHWDGDEGGGRASAG

SEQ ID NO: 1009802 - protein, 162 aa, Homo sapiens
MLLLTWIRGATPSVPIPDGRVQSIPWFPTVFLSIRFLPVCCQAVAYFGRGQTKEIWGQIVTPEDVGSPCANRVGPGALTLSGHPCSLGVPARSIPRVNPHGGAYLGADFGSSWQPLVPLRANGLAPIELEARDNSDWNWRNKASRPPVEALQLGPNPLGAKH

SEQ ID NO: 1009803 - protein, 111 aa, Homo sapiens
SEILNHHPGSHLHQVPGGRWTDSPKDMLAQNFIVSDMHGRYATIIGIEMVIIRRVYVLRSNKVSMIYLVHLLVSIVRLHSCHASILLVHQTIDLSSPKKRNSYICTGNSRS

SEQ ID NO: 1009804 - protein, 106 aa, Homo sapiens
MGDSALIYTFTQEGNQQIDLRSYDMPECHSRQSAVLHTAQEGARKLLVVGSYDCTISVRDARQWHVLLITLEGHSKTILCMKVVNDLSVQMAPVISQIHASQHSHW

SEQ ID NO: 1009805 - protein, 422 aa, Homo sapiens
  misc_feature (147)..(147): Xaa can be any naturally occurring amino acid
MTFCWGLMSHLHSKNPKFVVISSKNRKLAYKKTPSYNLRMISLFPGRNMQTVSNSKQVHSPRCTWPSDYRAKKGNLGALPVLDSYPPLDKTRKDQNNLGLLGQPLKKKSPRTLQPLDTVNSPGETPVNLTNTEGANKSLRTTQCFLXTLPRLAEDNPKITQAFSEGQTIIPIMQKAAKLPEVSVRRLRIDVCSRNLRHRGDTEFFTNFFTKYKRPQSARGKECGYKQPFWWSCEDSRFIRQGRFMCRGWTPDIATVGPPPTLWIVSSPPDGIMTTTPDTSVGVTTLASCAPQCSSAPVVNEIPHPRSELQNHDEEEYTYDPPLMDRRVRHEQSDNGSRTDHQRRSDLSSAPHTGQGEHTARVVSKLPEFDNKSPAGANQTGQECPPPHNSDPRGWSRHTAVINDAEDDSHTADRHYRIHNER

SEQ ID NO: 1009806 - protein, 195 aa, Homo sapiens
GNAVRSIGTDNVCRDRLEKTIMLETKSALGLLGSASFDIDSSNFRGSLGIFLESVVFLQKIGEGVYIMNDVSSPMYELFIEDDGQRIMLYKPRKNFEDSSPVNSVKPISIKMAFVSHIATLREICRRLVLCIIVPIQLTEELSNCGKKTQEGCTGDETGRRFLETIVRGHAAEVSWDEIYSMNISQTLSSCTSRT

SEQ ID NO: 1009807 - protein, 150 aa, Homo sapiens
PLSLVSIARLTALSDRIILMHYDDLFFVIVRSLCKAMGYKVGESPLWPVDSGVRVRTCPAMSTDSHRHPANALGLFTHVLPRYQFAALLQLVTVVNDHTVICVTRALGTSAQLLSHLVTAYSSNAPDGNVAEIRVDTFLAVAQSVDASRR

SEQ ID NO: 1009808 - protein, 209 aa, Homo sapiens
RGPVSVADYSDADSRSVKDKSTVRGNCEALCCLQSKLRVQKCRRNKTLSLDEARTSTPRKHHQAVTTSQQHHQRAQQQPPSPPIPANGQQASSQNEGLTIDLNQFLENQWDEDLQPNEAVYLCGNIFPPDHHLRTKCRKLFEDNTGKAGDSLSLPYTDSQDYRLLSRIGKTTNRYAGQTLRTTCAGLDQYCPHTDATQQAAMCAFGHAQ

SEQ ID NO: 1009809 - protein, 254 aa, Homo sapiens
PRVRLIATLGFPLKQGPGLQVSLVESQGMRKTAKDGMLAGEACEDPIPFEDPSLQMTGLSDKRHASVASALLPARLASPPHKRVVPHQGSDIILHCREQMERPTVLLLERGLVGGEEATRACVATMPVAYRHLCDKGHASGVARPCMCPGRTGRDLPWVVDAAVLVAGEMRYQPFLDGITEIVIRPHDALQCTLPLSSPSHQVHMKPLSCPVEVKAITQTVTLLSVRVTLPFTLPDGACAKPVDACLDAYEKLQ

SEQ ID NO: 1009810 - protein, 207 aa, Homo sapiens
WETDSHFVAQAGLQGPNLGSLKPQSLGFRQFSRLTLPRLAGHYSVVHHHAQIISGIYLSKTMGVNTNVSPRLALELLKIHSEILHRSMTSYKRCPEYTGASMPTGSPRPQTSIRTQDNKQGRLTHHNQRGKKRHNVDSTSTGPYNPQLKQNSRATTKATPYSTARNPIRTIKKHKHDKRKKEKRQKTRGKPKNPEPIHQTSAIHTDH

SEQ ID NO: 1009811 - protein, 70 aa, Homo sapiens
FQSQLCTVSETLLETCMVVDLVVLGKTTFAEKAVILTGDNYETECYVADRLAVFEVFIALTGSTTQLVGP

SEQ ID NO: 1009812 - protein, 138 aa, Homo sapiens
MRAPKVWGHFGTPFQGLNPFDWYTMAHAGLSSRNSRDQILDVRITPWHKGPILKPTKVREGWAQRGKTDTLYNQLEAEQHRQTRGGLRPPRVGHHKTPREITESVPLGGQPMEQGGSSDTRTDTEKNRKLQATPDGRS

SEQ ID NO: 1009813 - protein, 203 aa, Homo sapiens
RVLFDLGVLLSPLTLPVIVTRYDGHHWTYSVGSMCAGSMDCAFAAGAGATGSEVGSSSGLGQWCFHGRYSRHRLLVTDKRHLRIKHSSSIPGKASASMIEMSFLSREVLVGDLMSPFRAVGLGELNESLGLLDDYLEEANALQTIMGSPCDEAKAGSSEWLAVDGLDQSLQASSKEDAFSGTDWTVDENGFEGVRLGCPVGYR

SEQ ID NO: 1009814 - protein, 254 aa, Homo sapiens
AAPMWRCSRIMHMQRELQPTLLSSLEGIVYQMVWFKKIGMKRFSGSSNRVLAKCYSVALENYVERCPMLKITSLHSHHFVKKLCEQFGVGLETLCPIVSDHVRPERMPLSLWPVRESLAICDKRPVLVMIDSNKCQFTTDVDFRRYPGIHDDFYYFLCLSRKHVDSQHRWRPRSSQLPKRSSSYRGNNVPVSLSNFSAQTVEVELPGGVSDAIVELHYYIKIGRFMPRGRRFVQKTEHRSPADCHPGDSHGKIY

SEQ ID NO: 1009815 - protein, 149 aa, Homo sapiens
MPMENDNENPSFADRQLHHTDHLAQMSFSGTTNEELNALNLMLATAALRNISERRKVTSFVVVRQEAKLTTLLWHINTAYASTPAGSEGEAAIRSHAVASRDGSPRIEASTRTSWRFEWQGIQQLHADERRFIMRDTRPYLSRAVVVAR

SEQ ID NO: 1009816 - protein, 372 aa, Homo sapiens
ARSHVLPGAPAGLPLYSPPGEGSLRPGRHGRGSGTSGAERYKGRRVRDTGRRHGREAERARESKRRRATGTQRKEPRQEREDRRRGEDNNEESATQSQERATNNSERKGAEREQPTQQEENTKKRGGEPATNAADTQRRTRTRQRGEATEKRHRRQKKTTARAPAHTQVRAATRTAGDTARATDDTHREEEKETTPIESGEGRDNTEEWEQNHQREHRAEHTKTRDRQQQEDARPHKQKEKHRRGIQRRRGSQQAKQGRITHETKRRKNSRQQRAADEGRRRKPGDTQRTPHEGDKQHITHQRGKKAERRQEKRQGNNELTKHNTEGNTHSDSEEKDPKRQHQRATRRRRQHRRSRDKPPEQQDRTTPSTGR

SEQ ID NO: 1009817 - protein, 96 aa, Homo sapiens
NKVEKTQTPISSGMRSTNVCRNSSPIWSFIDCAGASVEASGLFTMQELRHAHIIHHCIPTAICAAGRLVVVQAHLQTSLQLCTLSGETISKAREEQ

SEQ ID NO: 1009818 - protein, 390 aa, Homo sapiens
  misc_feature (195)..(195): Xaa can be any naturally occurring amino acid
GPEQGAGGRARYLTRAAVLINVPMAGPRSEPASSATVTFSLRDGGGGPSPGGCPGPGPDPGCSASSARPCASLRFPLQEGCVPPRCHRDWIPVPPLSPSGCLGERRLHHWCCHLPVSPPRAWASRGWGLPGDGDPEVQGRHIHGLGATGQVPGTHLVGCLTKSVPFPPDGLDGITWGSLGVEGGQITAEEHGGPXEEEKLRQRASAHASKGPPLSRQHAGAQSQAGVPNIWRGWGQGAPTLGTTNTRRQFTTYRGVANNPPIVREFGQGIGSSKLARNALVVYVDAHSDCSGTGCTGEQHNAASRTAGEVGRARGAEGPGRRTFGQRGWAGTRDQTRREARDEGTPQKKVRGRKWETRPQIHKDETHVVNTTWSTRSLEINDGAICRENR

SEQ ID NO: 1009819 - protein, 285 aa, Homo sapiens
TDTFEAAPPAPAPAPASSGQHHDFLSDLFSDDYGGKNCKKPAEYGYVSLGRLGAAKGALRPRLLRAPCNRTRHRAARRLPNELKAGARASEHRCDYEAGKDGGRGRLGGRALGIGGRASLNRRCDDCTSGIPRAGDRSGRGEAEEARTTQRSVPTGPSRRPRDSGAEAPGGNGPREGATKTAHGDRQRRPGSQGQTPYDRGPMKATGASKDPGRRHGNEAAAEVTTGIPGRRSGNKGFGPVAREKARREKGPNDGPHAQEARRNPRVPWEGVTGPEQPSGLGGKK

SEQ ID NO: 1009820 - protein, 255 aa, Homo sapiens
RRLQALLAMFANRTVVARSRGVEPGDGRQDPGSTAASRALVTRTSVPGCSGRAAAPRSAGRGSADSREGGSWECPGRLWTAWGGWCRCSTGAGRSGSWAGRWSLSFLAPWGHCRGRLGVAWAVWVTLLPAVLVGLGSRLALHFPVGPFPLGEFALCRELSLSYGPPARLGPPCGNPSFSCGRWKTPFKPRAPVSNRVSLSVLPVGQFEERKPPGTMGPPRKRRRRFLLSNPLGHAFGSSFGGPCEGSQRVANPKA

SEQ ID NO: 1009821 - protein, 451 aa, Homo sapiens
  misc_feature (77)..(77): Xaa can be any naturally occurring amino acid
MCNHDLRESILAVPQLPTPRSRKYFKGYVRGLTTDQWINQPMPSHDRSTGPRRSEVPVGDTKWFDAREWARLMTESXAEESRSHPDHSDGTQWTVRVTGLDTSYMEATIVPGEVTSTSEAFEHVGVGRHVVGCRKPLKSETDLYIEGREPARGRIKIHKPRFHMVGEYGLPKRLMLLALQSHREARVANWLTLVQPVGPLWPAYTDSKQAPLTRYVDRNDTHLGRVKRSTRRGKPYKGDCGYVEYGSIVVTGRTGKYNAPTLMGLKPRHRAVKHPTSGNYQWGPPNGIVYRFGPAADRLYGGGLVGVPINPIGCRINVRCLLFTPGLRQLMGTPTVKRAGPTVGCQLPIAKRRWRREYRCATVPAVGEPDTTAARFDICGDVGTNTGDQLAYKEWDQGTTGALKQPTLGANRSPPMGNSPRLGTTLDPTVVYQHSGGGKPGTLVPPVLVMP

SEQ ID NO: 1009822 - protein, 147 aa, Homo sapiens
SVVVRSIPWRMSLTRCFPQGLSRLVPSIARQDLAYFGDSSVGPSDGLDHHRPCSIIQPFSGRMYRLSAPSRCGGAALKKKILELFACPTVASHSRLPTFARREGRGQAAGLHTVIHVRVHTPVGGWVCVCVLVCAHVSALTHTMLAH

SEQ ID NO: 1009823 - protein, 126 aa, Homo sapiens
MASDRAAVAVAAERAVGGKRAVTREREEASEERAEALLFASRLTEPECTAHVHPSTGSRLACSENKCLRCLGGLDEANCRVVNVRQASATYVPKTKKPGHIPPSLATLLGLFELNSPCGNALSPFS

SEQ ID NO: 1009824 - protein, 287 aa, Homo sapiens
GVGPAPTQLGCPPRPRVRPGAGDASVISHALGLRSLRCELVPQLAGLSRGCSVLPLCSSGPLRGGEAQAGWTGALLVACKLHHDCMVALAHGQPPTCVTVTCLPSARGREERAVRQGLHARRPDARSPRPVPRAPDPGTRQPVSPEAGVHPTTPRGPEPYLRGRIVCRKPERKAPKPGADWVAGHGHNTKTRLPGGARDRTHLGRARAVPRPLGTMTRHKGGGEDERPGGGDRGRERHRDAIARRAGAAGGQERGTRGRGEVDEGSTERAKGTRGRKARGQKHRRGG

SEQ ID NO: 1009825 - protein, 367 aa, Homo sapiens
GFVMSSPRHPADSEGHEKATLWATLLSLSGDSVPPFLRQAIKIMASARGPEIYRIPRPKWPAEIRVSITIHVLRPSKRSPALRGQQLYTVFAAACGSLLKPNPSVDRHGPLERACDYACTGGPCPSMCMPRKGDDITKAMATTREAYVREVPMGGKACGTQQVPNVNINLVRVEFALESSRNTKWYATYGRPNSPLGRSPTSNWFHRSEGTFQGLKTPPVKLMGPMALGGAQLFGNGPQLRRRTKRRPRECGPQKRGSSTHTDTPPQDAGCHPHERAQNSRAHRMHKNAEPIGDAAGVGNAGANTPRTTTKEIAPRRQKKGTQAQRVTTPRPESTRRRIQATERGSFPTGVPKAATHQRGKAHNTVR

SEQ ID NO: 1009826 - protein, 158 aa, Homo sapiens
MAEQVVTRARGLEGRTKPTLEATAQLDTAARVWAQLYQDDRWGLPRAIPQFRRDERHTRRLELDNTEHTLRIASAHHRQIGASPEVWRSDRSGTDPNEGGRPLWEQIDLYHDTGESKRAFDHTLSRRKQRPHTNHNSSVELIGEISADAEERTSYGGV

SEQ ID NO: 1009827 - protein, 142 aa, Homo sapiens
MNWGRGKVDFEKSTHDCVYLYNRLQRRERDNTTERQQPHTNQAHIQTHRHTDKDTHSKQTHTTQTQHEDTKARQHTYTITYTHRERDTERGEEKRERGARSGEQTKREEANNCGTREGAQHGTPRAARGARRQRPSGTEEKG

SEQ ID NO: 1009828 - protein, 111 aa, Homo sapiens
SCRQKTGCRENLPRKTSILMLTRTKTHINIVVYLESVDTRAKVHQYVGHLIYKCGCAIVPTERIEKNLDETEREREVDGYTVASFSQDNAREVREAIERRKPEACNVVLTT

SEQ ID NO: 1009829 - protein, 297 aa, Homo sapiens
MDSHFGLASRTKARGQEGTLLCHGIVVPLGLVDIAQVGFGAHILRVALRKLSYDGTILSRKCEVVPRVWPMRHAKGWYGAAIFTKAYVEPGDGANVPHGYQRFLDGTGAQANNEGLLRLTQRASVPTSPVSKAKVAQGLTITTFVWRKPRAIQRLAILTPNSCGRQRARRRPWHSRMRVAPMRSTPTNVWWRRTWETPHGGASRRSTKLLPIRQRENTPGVGTLKRDARGLRKIDPNPPQEVEGVHRHKRGEPEWVEEHGSDGYHKKDVRERQHHNVEGDTTGVNRDYTADVGVYKR

SEQ ID NO: 1009830 - protein, 211 aa, Homo sapiens
MVSWLCVGGNTILLPEFEQMQRQPIPRITHAENPLSSNPLSTLCFTVQSPWDTVNATIGDSGDSIDTQHTEDYLRVRQGTLASETLRALTRVCRIGTVHEGVRACTLRCCSLTRVDNAQIHIAERSPERGGENQFTRGQLDATGEQAIGKVLNVPKNTGIRSNADSSLTLNTQTRTGHRSFADKSQCHGHDQVNWVPCYVLIRALSQAIPQ

SEQ ID NO: 1009831 - protein, 94 aa, Homo sapiens
  misc_feature (30)..(30): Xaa can be any naturally occurring amino acid
MVIYQSAKDISSEALLITSGDYNYDATMTXSLGGLRDKTRDSCTPIFECGQPIAMQCADIFVLRIVTGATYKYTCPTDNLGRAVLESGTRRADV

SEQ ID NO: 1009832 - protein, 134 aa, Homo sapiens
MGVAPSCKQRVPQIRSVRTEEKFVALSTKSRRQIKVLGCGISIEHRPRYTIVRHNSEFGGWKIPRWKSQSLLRAAFWHTHDWRTRGAGAQDTLSGLYRIFDLPTSGTRKSFLYTPYWRHTISFETPVTGIETPF

SEQ ID NO: 1009833 - protein, 229 aa, Homo sapiens
MVGSSFACTVLSSCGLLTGPLLSPSAPILSSVRLSVVFSLRGSVLPWSSLDFVFPVVVLLMSDLCSLRVQMQTLCSFGPRLVIFLCVIFSVSLGIFLSLYCPSSLRRVWIVSKRGILIRWSLISLKLTLVDPTISSHGAILLGPQTPRRLRDRPTARTTRTRLTCCLPSCGPSTSRCWLCGRVGNGANAADTPSVIHFHVQPPLWVAGCDVCVPCVCARVGAHTHMLAH

SEQ ID NO: 1009834 - protein, 111 aa, Homo sapiens
ISCQHRYNKAGRRRWKEQNLLSLSGLRLPFVLELPALEHQTPSSSGFELLDLHQRLATWSQAFNYRLKDTLLASLLLRFWDSELASLLLSLQLAYRGTSPCDHDISKNFVH

SEQ ID NO: 1009835 - protein, 109 aa, Homo sapiens
MAKNLHLSSGVCRRRRRGGTPKYERMSLTTCELSAKRLLVALPNPFFPKGSIGGRLACTRVSLSRKWESRAPCRCRALQRGVRTICRGSPNPEGLSDHQGVKRSTQLVA

SEQ ID NO: 1009836 - protein, 112 aa, Homo sapiens
GVFALSLKGSCSCVKWNLEGSCLLITLPFLSLLHPPFSLIPCGNQMPSFCLKGPHIECPRQVQSNSCPYANWLFSPIVYFSCLSKVFYSMLNLPYCFPTEFLCGLFHVQHMN

SEQ ID NO: 1009837 - protein, 217 aa, Homo sapiens
MRRSLARSLGSLTRRSALWRVGVQVGRESGLCGRGRWLCRGGSPGLAGRAGSNGTSPAELLPPDTCAARAECRGCLPPILKSPRCAGALTPTCARNLTRSDQPSLDPGLARPDLTQPGRQYLAPSGARSSFPNRHEAIGELELLKPSTSTADCGDLEMPNIIGRIEKLLIVQHGRRRQNTVSKQVLPGRARPELLEGTITSRPDDVQDVEPQADFSK

SEQ ID NO: 1009838 - protein, 110 aa, Homo sapiens
  misc_feature (24)..(24): Xaa can be any naturally occurring amino acid
MAQWYHVGTLIEGTLHQSIDSLGXLPNVKWPSNVGRSNIPSKGNFHGVRHYEGGDMQTSCKARTILNQGGLSPIIVSTLLHFEQTLGWEDTYKVYITQPHRWRNLHNDTS

SEQ ID NO: 1009839 - protein, 210 aa, Homo sapiens
MHEDPTHDPQSTTDAPEQKIYIAGKNVTAKMWYHNQGITRTESNSSESNQHVNVCRFQMTTRATNDPRHTSAKHRCHDHKENHLTRFDTMLSRQNYCQRTNKPLKGATGTRKDPPYMQTVQTTRRSANNQKAEEPRELRVATKGNNRADKRSTRHTEGDETTRDHRSRDIQTRRNSQGHHTGSTRNRQKQKETRRRRTADSEMQSNNTHT

SEQ ID NO: 1009840 - protein, 86 aa, Homo sapiens
PEQHRKRKIDAGTMAEPSASPSKRRDSGDNSAPSGQEREDHGLETGDPPLPPPPVLPGAWGRSSRAPGSRWGWVATTGRGAQDPRG

SEQ ID NO: 1009841 - protein, 160 aa, Homo sapiens
MVFLIPLYFFFPVSCSLFSIVSLFVVSTRRFLIDDCVVLSSLLSCRRSSLLLFFPSLLSIDPLWLADRILRPYRSCACRSWTLCARCRPFCRLDGLRVRGVLHWTRTARYHTVHELSARECALRVTPTLTRPARRQLPPPRRHTLARPRERLGKPRARQA

SEQ ID NO: 1009842 - protein, 157 aa, Homo sapiens
PTSLTQCRAMMYSGELHCLSKRTSSDPAWQGGVHSLHSYEKPALLKKGSSHTSSVFFFAIKRLETKRTINGEAIEAREPGRPYRMFPAPRGRTPRQLAIPRRSCLVPQWSPLSMRLRISRRRCQETILVTNTFLQVWRHARRPAGTMYAARKDGTHA

SEQ ID NO: 1009843 - protein, 96 aa, Homo sapiens
VSTHSTRLLERDPPSFKSIQYRDIRYDELSSDACATLPRLDHDQFVIYTQDCLRIVRTIMPCVVKQPLLDLKAAPEAITGLLVIAQYIAHGLSSPH

SEQ ID NO: 1009844 - protein, 310 aa, Homo sapiens
MVKIVTVKTQAYQEQKPGTSGLRKRVKVFQEQRPSVRGERSSESIIIHRGAGCSAQGGHAGRWAGTCGSTMKEAITDSSTRIAAAQRDRIADGISDRMESSSSPADIRASLEQNQKAKAGMGTHVLEQAHVTQNRGGAHKWANCEDTRKVQRVPEVGGDLAPRDGQAKRDNESRRQQSRGQQHRSNAEEPSLARAEARGSRGTTVRTMGEREPEARTRAQGKRQYWRGKYHARRGACPTRAGTSEAEMRGNGNPHGQANCDDDRKRRKGQGARCTGRNRRRTQSARATNPETGAPMGMRHSRRRRRRDGH

SEQ ID NO: 1009845 - protein, 107 aa, Homo sapiens
MCCRKFFPLRRGREPFRGCPLAGYPYLLAPYREWTCDHYHGLVQAKCNISEGRRVIRSRGTLGRDRTDTAKTGNVEGAVKVQVATEEVCFFAIDCFNAWSSPDGVVA

SEQ ID NO: 1009846 - protein, 109 aa, Homo sapiens
VIKPCPIRGESITLLGRDGKSPLGRYTRLHLKPLGINFLQSRLQAWAFTPVIQTNRHKGLQNVNNSVIDVKVLSFLVHGANYRLYNSTILEHLLCDDARHGGSLDDQES

SEQ ID NO: 1009847 - protein, 91 aa, Homo sapiens
MGQRKRTIHRYSEGKHTRRARQENDKQKRTKTNPYHRPGSKATQEEGERKREGEERKAETKSNRKGRRTNGGQRDNEEEERAQRNGKKTQE

SEQ ID NO: 1009848 - protein, 81 aa, Homo sapiens
VSVSQRLELESRSNTGCRLDEESSQHHPGLPFAVNAWERQSVEPGTLSVLELGMSNMHANALAVRLCSKIRSSAGVLPFML

SEQ ID NO: 1009849 - protein, 190 aa, Homo sapiens
MAPSRKFFVGGNWKMNGRKQSLVGAHRHSERGQWCRSTPSVGLCSPILPISTSPWQKLDPKIAVACAEHAHEVTNGALLGRSALGMIKDCWSHVMWSWVHLMREGSVLWGSQMKLIVAGKCAHALARGTRSNRHALGEKAQMNMGNAGITAEGWFSMQTKVIADKREGLEQGSSWPMNLCGPYGTGQGLQ

SEQ ID NO: 1009850 - protein, 110 aa, Homo sapiens
MMPLQDLGERRGKNKSLHGYAGHGEDREDYIHVELDLATRECEFILTRCNNLHLADCRMMGQLVALEVENLMVESYYVRCIVASRLILRIDSSMRIGESYAVGDYCLAEQ

SEQ ID NO: 1009851 - protein, 239 aa, Homo sapiens
MISAALVVDNGSGMCKAWLRWATMPPVAVFPSICGAPHGTMGCDCVVHGSRTDSYVGLTRPMINEMASSTLKYPNLMHWSYVTNLVTDMLQKPLGTHTFYNDVCVWLPEVSTPLLPGPDVTLPEIPKWPNLRRNDDSITSLFERILSNHTSCHCTVGYSTGLLLSPVPALLGPGNHHGHSVTCASSLAGTWGFYPNLSLDCPLFLTQARLTGPFSPLLSHFSGGSWAPLRLGPVSTFDL

SEQ ID NO: 1009852 - protein, 170 aa, Homo sapiens
IAISSSTPRADLVAGRVTGVLGAPSWFHSHHSGLGWWHYRDEGGPLWVAQGYGQASLAVFLWPQLCTYRLPCRGLRSRRRLIPEVFPCCGWCFQAEWVGAHRAPPFFLVLLTLRALGVSTSADKGYILQGRVLSLFSVVQLVQLLGIGPAFCLPYVICVSSDTLLVSVEC

SEQ ID NO: 1009853 - protein, 103 aa, Homo sapiens
MPGLIEYFKVRRQGFLQVGSGWVSSSGTSGGSGPPPKVLGITGVSHHGPVKTFNKVSLRAVKLAWVTYSVLCPWVEYSLLRRQEQVAEARLDSTGTKSPYKRI

SEQ ID NO: 1009854 - protein, 161 aa, Homo sapiens
MSTVIRSHKTLPRAQGGFTADPQAIDSTSSQSTCANILRITLMPCHMIAVAGPTGVEGHCWVDVRLGFMPVSAAAAKRWSRSIVTIKKHQVLKDSGNRSVVLRVFNNIQTSRFSEQKPSTGSSPSFTPQATCEGEQHLSADFQTKPVVFGCEGFGGMLVML

SEQ ID NO: 1009855 - protein, 70 aa, Homo sapiens
MRGTSVIRITQYTIQSTIKKSKIHRKPQHGINIQNPVPTKQHAADSVETSTYLHSHTQPQELKQRTRKYT

SEQ ID NO: 1009856 - protein, 329 aa, Homo sapiens
  misc_feature (5)..(6): Xaa can be any naturally occurring amino acid
  misc_feature (9)..(9): Xaa can be any naturally occurring amino acid
QAGTXXGYXYRRPTRSAEFLVSTQINIMVLTLASVDFQHASEDARKTINQWVKGQTEGKIPELLASGMVDNMTKLVLVNAIYLQGKLEGIQFMKEATTNAPFSIATNDQTAKTCEHMMYSRRTNICTMATSTDLNVPLLLELPYQRRGAQHGHPAAGLTLRTESTGLKETLTEQLTFGTVALSGLNLRLSILIRTYMSALPRFHTAPTRLHLSTSDPRPPTVCPRSLQQTPRLHLAANLRKPRRHIVTIDHTHHKAHQRERAHTTTTTPPLRLTRSASRTPDMPRRKPDLHKTATAPNDVALISIPADKSSRYHSNAREEIEHPQRARC

SEQ ID NO: 1009857 - protein, 107 aa, Homo sapiens
MRSVVRCSVASHKAEPDAWCGTWIMDLAYKSSYVPPNTESRVGSYIIIVLVNSPMLEGKVEAETLTQDYIMLPAQALPMFREPAPNWSTRNTELDDRYMYWYPLIVA

SEQ ID NO: 1009858 - protein, 552 aa, Homo sapiens
  misc_feature (528)..(528): Xaa can be any naturally occurring amino acid
MSNHASCLSVRPSVTELQAGVVYKQWHKSKKKAFTKYCKKWQRCTMARSQLARKDYQQHATSTAKLIRGHRPSSQMRLQFLCRQNEGPPDWRLQVNGRTAGPRSVDMAPAEQAGSSTVRVSKPKDAYARKRTTRREYDRDRHGGRTNTRAKSANTTRRETNQRSEADSRKNTSRNCTNPQRTDRYPHKREDTPQKLTDGGNRGNIAMSYELGKRGKSGDMGGGNSARRGRTHEHTGTDNETPTDRTDQTTPKRNKNQTHKEHQVTRRDTKTRKVKPGTRNRKGTDVTTRTQTNADTTDDNHMNERTQPPTCTTPDQAHTTRPPNHEPDGATTRTPPPPTLATCTHHRHPQEQQRRRNRPRTKTHAALANTHAEPPENANTTATHTTLSTTQRRSTNNEDPGTPDRTHTNNLDTRSTRTVTAHTRQHTTDHHTHHPTEPARTTRTQTHVEERDREPPTQHAGTQTRRRSEHTKPTPREARVRTHPQETRGSENTPYEKEDCREESPDQPTLRHNSHQTRTSPSETRSQXQETTAESDRTKTMIEQASKRTSAK

SEQ ID NO: 1009859 - protein, 69 aa, Homo sapiens
LGEEARIRQCVDFGTQFRGFITVFAAVADGVRRLANFVMNEPPFQWLPTTAAIRCSPGECRIHVSLTKW

SEQ ID NO: 1009860 - protein, 121 aa, Homo sapiens
MRAQAQPARRVRRSLDASLLNRHHLAQQIDEGRVPTESSCVRVHYLSGPLDSLWNNYLSWVRSLHLDLERKVTITDTKAASFSEAASLATRAPVGIGATKNSPYAWKAVGLRTATLSGIEL

SEQ ID NO: 1009861 - protein, 258 aa, Homo sapiens
MPAPALLRGIQTPSWVLLAGGIVRAAADNGRHLRGICATSTSRDETLRVALQQDSTAFGKVLYGEVYTGIEETRQKEVVCHSETHSDLCEVMGRRIDALRTIPELGMSHRVSSCHVADQALGFDARYVGAPSPKRKHQEATRSQSIGKVPVRQSGTRGTLGTLRYKHEGSALGKETDQYNLADRNSLCREKELLGNGRHWGQFTTASFTEIGQMEFTGRTGTNFHNGFWAKDGLAVNFSAVKGLRGMDRGWKTALGVW

SEQ ID NO: 1009862 - protein, 128 aa, Homo sapiens
MSMCQDKIFGPALNRGNRGELRHKGTCNRAPPYLSQKIQGYDGAVGKGEFPGVHRRNFVPGRLECFGEDVGAHKSARVITEEQGVDARPLVLRGHGTCAQRWLSLGLASTVSIHILAPRVSPPWVGEK

SEQ ID NO: 1009863 - protein, 109 aa, Homo sapiens
MNARLRTLTNEEGVYGPLAELVLLNASVDEVTGKGYCGSAYQWMRKSHENNGFPLTASHGVDLRAMVRVLALPTEIEGGIASLYETTREETVQNPNREHSSCSVGIRSV

SEQ ID NO: 1009864 - protein, 280 aa, Homo sapiens
GEQRQASSKQARAASAVSRSLRLGRKRTRAPQLFAAQRLERRAEAARPRRAGFVMMASYPEPEDAAGALLAPETGRTVKEPEGPPPSPGKGGGGGGGRAPEKPDPAQKPPYSYVALIAMAIRESAEKRLTLSGIYQYIIAKFPFYEKNKKGWQNSIRHNLSLNECFIKVPREGGGERKGNYWTLDPACEDMFEKGNYRRRRRHEEALPAAALEHFQPGKGLFGAGGAAGGCGVAGRRGRRVTGYLAPPKVTWQSWLPQQLVAATASLLNHCPIALPDGGD

SEQ ID NO: 1009865 - protein, 84 aa, Homo sapiens
QVKLYIFDILTDPDSPTKKRSTRYREWHLLSMSVIYSIELRVQMTTEIHVLRRYFFANLWSRASMAFRKVVTRAIRAGVVILVM

SEQ ID NO: 1009866 - protein, 151 aa, Homo sapiens
MLEVSAVYIRGGFGKRHPFPKGCRLGDKKKRAKYTLAHAGAKGAGLQGTAVPPCAGHTESLGATGKLRWARAQVQGAGLYPEVCATGMSVWYRVSHARTHRTPIWGSGERAAVIPRERQLGMTNWPRTRSETRKAAKRGEHESQEVGTEMK

SEQ ID NO: 1009867 - protein, 96 aa, Homo sapiens
GISRIADGFNGIFSDHCYSVCSMRQPDLKYFDNKDDDSDTETSNDLPKFADGIKARNRNQNYLVPSPVLRILDHTAFSTEKSADIVICDEEVVNSP

SEQ ID NO: 1009868 - protein, 461 aa, Homo sapiens
MAPIQATFFDKAGNSDRCTGRKQSSWGQPHQDTPENRRAKGCLVPEDLSVELCCYHPSLDPYLLEHIDPRAQQSHTNHPKQIAMRRPCRPTYTLAYTYTDRHLNLAVTHYFYTIWVRNAHHTPTLRPLRIQKKENHGPEEETHNRIAKNEESPMKEEAQNIPNKTQPQHGAPLGFPILIGEEKTEFPSTNSNTPTWAHTGGGPNTTQTDWRTPHKMPPSHGRPTAHRQAGNPFQKEQPLTTIRDTPPGPETYGEQRPSHHRPLKATQCNPHTVGGTQGNHWGAPKIHTPRGQPPKQEGNNGITANPGTRPNGHPNKTARHTQQSGTPTRTRFNNPDMPNNTGQHPLDEKGTQHTRGTSPGLPTTLAQPPPHKTVAKKTPAALAPTPNEHKGSTQNHSCEEHNPPLGRRHPHPRNNPNQAPQHTPTPPPPPKHTQQGRDTHPERTPTNQRHTPQPPGHTTKQ

SEQ ID NO: 1009869 - protein, 111 aa, Homo sapiens
LCVASRATSLRHHGEGEGRSQRTFGPLNLGARPCGFQPQGGPIGPFFLKTLPIGALQPRAIGGQLLTFSGAFYMWGGPPPQKVFPPKKFWVKRPPLCPNFFGKTPLSEKGL

SEQ ID NO: 1009870 - protein, 181 aa, Homo sapiens
YFYVFGENPLYGAPLVVRHYDTQAFPVAPRGKRSPPFQGKAKPPTQLWAGSLSPRLTGSAPSGDKERGLTHKTKAPQIYRLQGHNGGQHGKERARVQGKMVSESKVHIPGVLPGPKLSSRPEPNNERTKQDTQKDEEEKEEKQTDHKNKRKKKQAKEEKDTGHTDMPKTNNNKQTKDPADT

SEQ ID NO: 1009871 - protein, 171 aa, Homo sapiens
AAKVLGSSEEPLRLRWGEALTSSGDSTRSAVPSHYTLHRCDWPLLSVARPDIILRGTSSSERLKRVMVTKYNGMDNDSECPRFNSSRVLNVCMPVFVRLWLVLAKRSLDAKRTIDLASSTICLLLRGPGCEPCFSMQAELSVSHDRDGTWPAPSQLACLTTSSDGRIEDGK

SEQ ID NO: 1009872 - protein, 105 aa, Homo sapiens
EGGRSRLAESSGLRLPFVLELPALEHQTPSSSGFELLDLHQRLATWSQAFNYRLKDTLLASLLLRFWDSDWLPCSSVCSWPIVGLHLVIMTSPRTSFTEVLNPSQ

SEQ ID NO: 1009873 - protein, 283 aa, Homo sapiens
MTPNWRGWDPQWELIYVCASPMQLAVDPGVSQLVVSSHDRAGQQGPPHQAAHPGYLVVLGVLTVPGDGCCPGPHPASKRDGKRRGSGKPFDSVMARGEPAVSLPGRPGPSSRERSERIEATLDSLGIRDELKDNILEDVLIPEQQFTLGPACWARGELGISAGGPDCKQEDGSFVSTWLWRCCTQRDIDCLEADIEEFLREAACMKEETIHTLAKLVGGKPPEQGLKAVFPSPWVILPFMKHGDLHASCSLPDGENPFNQPSDLIGHGGHCLRDGGTELSELS

SEQ ID NO: 1009874 - protein, 30 aa, Homo sapiens
VNAELPRWATIVHVTELATKLSRLVADGVA

SEQ ID NO: 1009875 - protein, 156 aa, Homo sapiens
MNDLKHSADQSQLCHLIADTCEQRCEVTNVQKCATVNAKLHTYDCAPLSMYQELGISPGTVSCGVMGPKPIDNAASAHLVNQFDLHASQDKPGINFVIHASPFLIERSRKGTESGIPGNVVPKGVFRGGPLLHKPWRVGQGCQTNQRESCGGATLT

SEQ ID NO: 1009876 - protein, 345 aa, Homo sapiens
WKLREDGSSRELTGLDLAGHLDRWIRSVADPVLTRTLNPSPPQRCGGALLCFPPPLAVLPACLRLQISRVSPTSLVNMASEDIANAGRDTVPRLSVAGGQLSFKGKSLKLNTAQIAKDVITRHCRTLTAWQALRLEGNTVGVEAARVNRQGLSTNKLRHVDSAATGSDMSTRHGLRTPEDPTRPLTHHLAPQRPHPHACGATTHACAAWDLNADTQPYEAPTGRCNGLPHDHRSQTPSRPCPHHPMATERSKPSTQTVRQLAPPRVRAAPQNPPAMQRTPRPAHRANPGENPTAVPHRAQAPPGPVKPGTHGGQGRQSPDQAPLAPRRPAPSRHARPPPGPLRPP

SEQ ID NO: 1009877 - protein, 263 aa, Homo sapiens
MPSTNETQNNTDQKYLVISTSWVGTSRPSRRSDDGGKVVAWSPGKFGEPSPRQELVWRKTPYSLNRLYCINDAKGRRGGRSTALVISPRQLPRVRVRCDRGWDSIARGARDGIPKERELRLERVRTNAVEENLSLVDVRQPSHSQKLAQIQDESSGPRETAGGVRALCRLSPSRVKGSSRWPYKHYLVVESVAFGTGGKGGIAYVVRRWLGKNGPRGVHTVGASAYYRPNCVWQGPHGSEILCQPQTIGPRIRRLKESTETFG

SEQ ID NO: 1009878 - protein, 238 aa, Homo sapiens
MACNFARFVADGGPHGCLAEYGKRTDDPTEALYCSPAYLVDEYLRFLTADTNIGNGNEDVCIRGIIPFLMVYRPYGGLAQIKAIPMSPFAPELLISLPWAKDPLVPQSLAHRRSNIRFDPTTAGKQAAYFTARGYNSIHYPGSGNINPVINGPGSTSFPLGQNARISFGEPPYVPRRHQQCASARLFVVSIVGSPWLWCICRETVRTGFEHSVGAKLFLASEALGAARGQQTRPYSPH

SEQ ID NO: 1009879 - protein, 235 aa, Homo sapiens
LTISRSEAATGLEVGGSVDLPDCVGPRLKVLPGGCQPVSEGPIPEVLKNYIDAQYYGEIGIEDAPHQCFTVVVRHGAPSNLWVPYHPLQTAWTSACLDRTQVQQAKKSMRPTVKNGTSFDIHYGSWQTTPGYLSQDSVSGALPSSRVRSGLLAPWAGCSNVEDGHGTYWKNVPPKASPRAHHTYHPASLKYRMGTPWGHWGVSPRGAVVTVETTSAAVSPAAFRTNHVHCTGGKA

SEQ ID NO: 1009880 - protein, 93 aa, Homo sapiens
MQFPGKLQNLEFVLFVKLYSMGIASNISILVLCVLMRASVAPPSLSGVSCLKKQQFKSPLRYSVCHQICVSTIFWSCGAILLSVFEVSIVVEQ

SEQ ID NO: 1009881 - protein, 102 aa, Homo sapiens
SLIPPRSIGYRRPGPSLISGVFATVKNLNRAGPCEVEDPIMEKWEHGLQSGLLQTEPCDGYVMSSPEGMKHPHPFKVTPWEFNTDTHIPSKTFYFVSTVPSS

SEQ ID NO: 1009882 - protein, 245 aa, Homo sapiens
  misc_feature (6)..(6): Xaa can be any naturally occurring amino acid
  misc_feature (8)..(8): Xaa can be any naturally occurring amino acid
PFGPPXSXWISVDPRPRVTRGRHSGLKDQGGGGPSHCTMLSTVHTWCCSMLLPVKLTQGAQQGSDPGTPVASACPPPGVPYSQQTPGTHLVALCLLSETSLLHDSMGAISCWPNGHGALGSASRAQPQLAYKDPWNDIQYMVTLTRATVCHTGGNAWVLPMVQNSFIHYDTGPGSTNDPWRQRSHRRVSPPPFYNVRCPVRMTIHGITKGPQKCARRAAGLGGHPRLGLLGDCPTKTWLRAVPEA

SEQ ID NO: 1009883 - protein, 175 aa, Homo sapiens
  misc_feature (28)..(28): Xaa can be any naturally occurring amino acid
  misc_feature (69)..(69): Xaa can be any naturally occurring amino acid
PSDDMHSSCDSPPETWPRWDGARRRSKXSREKESTGMNVTLIYSGSFSGIYAYGLRKRPLVAIQAGEPXLPCIKGYDVIAQAQSGTGKTATVWPPKNLIKILASTIDITIYKSRPQCPFFGDPYAPKKTPSKNLRSRAQGYQKCGSLARRRLTIGGRPFLVPKPPGAPGYSRVCP

SEQ ID NO: 1009884 - protein, 211 aa, Homo sapiens
YGNATRAGPAAVRRRGDDGGGWGTSGSESGCGPPAHSRLRLGLPGLGSYREPAALRTSPPYELAAELPRQNQEERSSHPRSSQDELNEINQFLGPVEKFFTEEVDSRKIDQEGKIPDETLEKLKSLGLFGLQVPEEYGGLGFSSKQPMVLTTGEIISMDWVHHCDPGQRTRAIGLKGGSFFVPWQPELSRKAKYLPKLASGEHIAAFCLTG

SEQ ID NO: 1009885 - protein, 98 aa, Homo sapiens
KGWTSAGQAGVWQLLSSSGLRSPSDSCLVLYRELLNPNGHPLLNQGGAAAEVCSEVPQVAPGSARPGQPPLPPSQEPGPQGHTSQQVLIDPRVPGAGP

SEQ ID NO: 1009886 - protein, 131 aa, Homo sapiens
MDIATQASAAGAARRQFESQRASDASRAEPPAVDMGQNDLMGTAEDFADQFLLITKQYLPHVALPLSDQHRSWSDGIRMMVPDGDEQRDYIDTTWNCGYLLDLDPSYFLNIAWDSCLDDVTGCRDRNYTCR

SEQ ID NO: 1009887 - protein, 72 aa, Homo sapiens
NQVEESTLPLAGNWSHRCEPPWILDQYFSLHLAGISSIYRGHQFRSTSELVKYNNLPCPYTQSTKNAPVVSF

SEQ ID NO: 1009888 - protein, 242 aa, Homo sapiens
MFDQRSPRVRREDDPDQCVRTSTPQPCTVAIQDCAIPVRLWAYHWHREWTPVTGSPTTVPIYEGYALPHAILRLDLTGRELTDYLMKILTERGYRFTTTAETGNAVRVTYKEKPVLRASLERFETRDDGHGCISQLRPLREETTRLYCTARVHHPLASGVGSVALRHSSQSFLPGHGVLWDPLKASFNSVMKLDVDIRQQTYYAHTQDGLCWRTTDACTRGHCRGGMQQGDHVSLCTPCLNV

SEQ ID NO: 1009889 - protein, 110 aa, Homo sapiens
  misc_feature (1)..(1): Xaa can be any naturally occurring amino acid
XDIVDPRLASETEPTCPFCNQRGILDVKMDRARNTGDHLLYRVPRGIPDAHNVSVRTLWMCTVIWIDCLRMRAISSDTERTLPLSSPDVLWIQLFGSGPETFQGIQDVGT

SEQ ID NO: 1009890 - protein, 207 aa, Homo sapiens
MAVILAPKRPADAVRRLHEALDMNKLSGGGCGAGLWCVNVCVPCLGGEWMWTLPLGAYVNKPMRGWLHPNCQSHGDPLVSYLVRYMGCVEVLQSMRALDFNSRTQDHQEAISLVCEAVPGAKGATKDGESPCSLAAQLYPGEEKLKYAGMPNHSHRVHQTGLNVMGGEVPDQNHRQASSMQIYTHSAIRTGDPEQRASMSAYVGKRP

SEQ ID NO: 1009891 - protein, 111 aa, Homo sapiens
  misc_feature (7)..(7): Xaa can be any naturally occurring amino acid
ECTPRVXDTSTTPAISTDHKDLEHYAIIRRMSWSPRHSSKPPYSEPSWASQANYLGNDHIYNVYRHSPCIVIIFVHSNTHHNRRLMATDKSPNNLCAPDIVLFPRINNISF

SEQ ID NO: 1009892 - protein, 248 aa, Homo sapiens
MRLPIYSIIQPHYSTPYEVNHPSCLHFTLPRIHCTLFDAPRYTYLRTQRPFRQHRYAHGHDPIFRKTPPRYMTRHVVPEQGLEWRPTERDFNGIDPQGPFFQTPGPGTLTRCPDKRVPSPFFQAPRYAYPFTTHKTPGLNIHTYKHHNLQLPTYTLQNTQPHHSHPPLIAETLLTTPFSETQPQRYTLRSHTLTHTLPSTHPLTTTHTAIHTLHNATSTLYYHGLYTLPTNRNAPINRLGLYNIHTSD

SEQ ID NO: 1009893 - protein, 76 aa, Homo sapiens
  misc_feature (5)..(5): Xaa can be any naturally occurring amino acid
  misc_feature (7)..(7): Xaa can be any naturally occurring amino acid
  misc_feature (9)..(9): Xaa can be any naturally occurring amino acid
HVYRXIXPXRVIGIVDQVSGLSGSRSRKIWPVGFYSLAVHLVYPYPCLRRLRTSRLETKRASLAGWPSMPQSSLSR

SEQ ID NO: 1009894 - protein, 261 aa, Homo sapiens
LRLPAFGCVIPGEVSQGGLPGVPLSAHRSPVWPLGLEKLPLRQPGPEKGALDLLRSRPYPSLGPEKLGPCDLGLLSQEGECVHTCSGLWGASGWVRVPLLVQQLTYQTPALCSLRALSGLLLHKKALEHKGTSLVGWGAEAERPCGGTASLNLGAGAGGQLQDNPGYLLFAMRVFLAALHPSLSDSLGTPVAHKGVPNHASQVPSEGWALRSRGLKTVLELKLGGVAGPGTGQPGVHGKATCRIQAAPTLEIVCFSCRFSS

SEQ ID NO: 1009895 - protein, 165 aa, Homo sapiens
IVDPRRRIQMADDAVCSGVGPGVPCVALWMGNRGGFRGGFGSGIRWAGVAAVYGAGADGLWSSRRQGPRIRSGCPVTKLGRLVKDHEDQVPGGRSISSTLPIKESRDHLIFFLGGLSQGGGVLEELCQLQKPDPVPDEEQPGVQGHMVAIRGNYKGATVGTLGDG

SEQ ID NO: 1009896 - protein, 35 aa, Homo sapiens
MISSTTRSPTRRPAPAPSPGTRSPPLTERSRPVAL

SEQ ID NO: 1009897 - protein, 264 aa, Homo sapiens
KAIVDHGVGGPHECGSRNCSRSAWRSSSSEQLQKHAPCTLSTRNSDDHLTRQHEVQLQKHLKHAAGDAGMPMQLAGDAGSQMLCSMELEHQRHLGACYAVWKSWRKQRLEQQLAHSCGKQGEEQMRVAIAQQLRVQPEGSRKFLLSKVNRRPQTQGGPQPILFPEYPKLPGEPHHGFFGARVPHPARACTPWDRHPLRYKLAFCPGALRQVGRRLFPSSVNNMPYETPDFETEPYKRLIQQKGGLMRKEASPTPCARRELRPVS

SEQ ID NO: 1009898 - protein, 114 aa, Homo sapiens
NKFTGTLVVNAGGARNLEASRKPSSFLIWEVGPDAGPPPPPCAPSLSCLSFSWGSRGSGEACIPRGARPESRTRECNQRASEQGPGAQVATSHADLPPGIPWPQYPKDLGTLLY

SEQ ID NO: 1009899 - protein, 88 aa, Homo sapiens
LAFVFLSCLELPALEHQTPSSSGFELLDLHQRLATWSQAFNYRLKDTLLASLLLRFWDSDWLPCLLSLQLAYRGTSPCDHDISKNFVH

SEQ ID NO: 1009900 - protein, 108 aa, Homo sapiens
MSSPKSPYKPATYTHQRLDPPAPHLESLTNRRLSTMNPPSPMICNPVGAYLEYVKPSYCIAYYTVNADTANTVISGHGFQRCGAFSEYHSEKLYGSCVISAVNCPHHS

SEQ ID NO: 1009901 - protein, 97 aa, Homo sapiens
GYVTSVGSSVRDTWLGGSSLPSAAQDVRRLRRTNLPRPSLRKPGASPPSASPGKLSLKRGEEGHMDIDRGGSPGAEEPEPGVSETCLDNGKSYDGKN

SEQ ID NO: 1009902 - protein, 108 aa, Homo sapiens
MGVVHVPCGLRTEEECRRTLQGLRTRERVLMLIRRGALSPAVMLGVSECEWLDAGYGEPEAFMGLCIPFVAGPSSALTSRARTGPHMVSALVPCRALVVGDGAGRKWV

SEQ ID NO: 1009903 - protein, 296 aa, Homo sapiens
  misc_feature (6)..(6): Xaa can be any naturally occurring amino acid
  misc_feature (9)..(9): Xaa can be any naturally occurring amino acid
FGYLPXRVXDIVDPGARLVRSWLGAVRCNPWRNAPTETTIILGTYSEGFGMRGSPTCFDQLFDDGIGPLRGAEWQQRTMKKRSRTGGGVGGPGANERSSGLWPRPNSNRWTWQTCLRNGVPEKTAQNPHGPQAYGGGLTRNEETQAARGRLQKEGNTDELEEGPDQQLQGEGTNTSLARPERRPPRERRFRTAHLKAHGLTGRRHVTVDDPHYFDPNLITSARVLVLEKQSEVWPDARGNGAAATHGSFEYLGGQTRALRIGPLVDTWLASFLMPPLPRDHSAHHAHTVGGSGSTT

SEQ ID NO: 1009904 - protein, 106 aa, Homo sapiens
MRQPAQERPERRHILPILQPSKAPFTLLIANKLHSTTNLGSLNILLPHLTAQRTNQTPAAQPLNVVAYHKELYIAKDTVLPDSIMNSLTHTVEARIGWVSSYCGSL

SEQ ID NO: 1009905 - protein, 41 aa, Homo sapiens
ALVPAEGMMGSILPGKVNSRVYPTRANNKFLMCNTIITENM

SEQ ID NO: 1009906 - protein, 249 aa, Homo sapiens
  misc_feature (5)..(6): Xaa can be any naturally occurring amino acid
LEDYXXPGVIDIVEPALRTFPRAAGCVIAILGKQMFSLLWRTWRGRTPFNTPHLTAGARWSRGTSDKQHPQGTHRNQPPTATRQNVADRRPMEEYSCRIRLRRSINALMMDKREGLQKEAETDHTPDCRYRLDTQAHNADKTRRDTTNTYKGNTTTDTSDTAHTEAGERKPLAPNHGEREDHPERYTPYDAKRTTCHRDPSPTAAIMQPSIHSKPPNNKAPYASRPHILTTAEKKKLTQYNRRSNPTPT

SEQ ID NO: 1009907 - protein, 99 aa, Homo sapiens
TRREKKECCGTRQENGRDAPANGNANEENMGSSECVTTEVDEEEEEGGEEEEEEEEGDGEEEDGDEDEEAESSYGQSGQLNDDEDDDVDTKKQNTDEDD

SEQ ID NO: 1009908 - protein, 150 aa, Homo sapiens
MNIPHTERRGGHEHMSVESVDVVAMTMVDRGDGTRQQQNTKTSTEALAQDESGDGWDRSVAYPKHWWYNRENSRFIHAPGCAYIMDATQQAKWDRDLIKGTGPLTGMDLPKNDPILQYTREGCDYPGLAGLNKTGNQNSIPKNGWINHWR

SEQ ID NO: 1009909 - protein, 115 aa, Homo sapiens
GDRASLGRPGWECRGVVSAHCKAPPSGFTPFSCLGLPSGWDYRLLPPRLADFWYLGGDGVSPCGPGGSGSPDLVIHCASVSRGCWDCRLEPPCPATAIVQIDSSRGKFNTPIRNR

SEQ ID NO: 1009910 - protein, 220 aa, Homo sapiens
MGARASGGPLARAGLLLLLLLLLLLGLLAPGAQGARGRGGAEKNSYRRTVNTFSQSVSSLFGEDNVRAAQKFLARLTEETSCWELDYCRARPPDGQRHRTRNLHGIVPTRTSNQSYQTLTPRINNTHRNIQRLQTSTGPRARHTGLEQGRKKHTPETITRQTEDTKNTHENNKKTKTTTREKDGKNRTQPKHTENTKDDKTPEQRTETQKEYTSSIEKLQ

SEQ ID NO: 1009911 - protein, 104 aa, Homo sapiens
EPTHLLKGTPTNDTHTYGWQGGPQEPPKYHSVCGRRPKERDELGPSHLSSPVLLDGSLIACMSLVTCSALTMDQTQSDPVPDQALAATSDRCWLAPSLLIAVTK

SEQ ID NO: 1009912 - protein, 247 aa, Homo sapiens
EEEEWGAVTNPQNATRQQTAGVGGLHPQLLTRAPVPPRFLLSKTLLHIAFSQSQGIHDVQRSLSGQKVVQTHSTAHDQIACDLVVEDPRHNKKQKLVDMRSTASIKITTEEKTEPRSLLRGTRTVAGIRRQGETVTKENKKRHKKIMKEWKVEPAQERKKRNKTETPIAKHHNTREDPTHQAQGNLQKEKTTRSQKQQKDNQNKTRRKQKKKNTTQTNKTKNTKPQKQEPTRTRPKHKTTRKRHTKA

SEQ ID NO: 1009913 - protein, 139 aa, Homo sapiens
KKSKDTVSEDTIRLIEKQISQRPMTQGRTDRHLAGRPENSWMKVHGASNTPEPSFCWIPWGGTLGLLSLPHLQQKTVHQADRSLCLVRPRPSRGNTQTCIILYHCLLTLGPVGWLLRKYLLLAEGLYSGISIDLMLPRD

SEQ ID NO: 1009914 - protein, 446 aa, Homo sapiens
DTGDEQYGDGSRTWIYSIAMETEMRLVLSGAANTQTNDLWTTKGTSDIARIVTRLEAVKEAIMDSCLLSARYKKAISEFRLRHSGVSDDHGCVASSAFPIAGGDITYYRHQRPPEAARKAMASSPLVRIRRSLIGPERTSSSSPLWRTAIRDDGDGKVRFLALRARGGPITPRRINEVERGERCDYSKGGNPSRTDTGCQSSREIHPLKGNADKKKQLCRLDRRGKRLCAKFPYEKRCNFYFAFYALKTIKPVDCVPADVRAKGSRIPAGNRTLYQGNLPSRLRGIDLRGFLIGPNNGGSNNGWENLITPRESGLTKRIGSGRNPTTGTYHGRFGQRKEKHFFPPENNRCVQIYRAQTFVATRGLPLPRRRIPPWKSPNIGRTEPNGVPRALLAKLTLWNPPGCGAGPWQRKLGGTLRGIAPSSCCQGRRNIVAQPQSLPQVGPPN

SEQ ID NO: 1009915 - protein, 109 aa, Homo sapiens
  misc_feature (7)..(7): Xaa can be any naturally occurring amino acid
MSKSTSXVMAAEVWPPFARLKDADSPNFRPSPMRLAGHRLKHHMELLLFLPSPSKANNINDEHVSALRLTYNYPMERGPNSPKIFTNTNQKTMSFTNLGGITIKGTHPL

SEQ ID NO: 1009916 - protein, 197 aa, Homo sapiens
ALDITTERLTAAGALDSDRVQRRCESVDAKGLRSQERSFGGWQAKGVIRPCPDPGCILQHPAMPSPDVVYGALPPPGCDPSGLGEALPPRAAHLPSDQQTTKPGPQDWCTTRLLTKHKLTSKTTSPPVPDRRKGGGQTCLSGHGWDPRGDQNTSKGSYSWPCRRPLLPLQTPREPTAGELHTYADKEEKQKTTGRGA

SEQ ID NO: 1009917 - protein, 128 aa, Homo sapiens
MSKSRLMYRTKGVHTIEQTCVALRSSTCTKNAEPLEVCTVTTRYKRLNKGHQVAGSDFQGFPLWTLATVTAHGSGDESVGTWGVTPWNRRDRHALCTGQGRGHTRRHNVALTGSAKTNAIGLSHQSNT

SEQ ID NO: 1009918 - protein, 195 aa, Homo sapiens
WQSLKRALKNIVFSLKSCGCPTRGRAGAIKRSTGSPAARARPGAALRGPPSAAGGGHGLQKALGAVAAASERLSVALEPGRGGAGPNAAEDNKAENRGGPGGVQQGEARRDRAAEKEAVDERMVPRAEDKSIAPTQGTGGTAEPAAKEHGRCERQANPKEGGNTRGPANNKTETKAVKTNKPNPTQQPTDEQTEK

SEQ ID NO: 1009919 - protein, 167 aa, Homo sapiens
GVRQAEEARRPPFTRPCPFSLAVLHCSADPPVVADDENEAISFCHIDFCVTMEGLGVASHLTKTGRSAPSRAWSMLHACRSSTPALQYRRTTSCSQGTRGTAVVLSVPPSVCTGQLPCALFVAGGTKPYAQNVSIIDLYIPTSSYSPSNRYDSYTGTKRYPTQDSCT

SEQ ID NO: 1009920 - protein, 313 aa, Homo sapiens
PNDLDLIIGSKLMGTLTIEKIITCQGPLGKLTGDRRGLGGWPPNLDPSEQRLSTVVPGHSGSGKGETLLGPGAIECMPCLAPHSRASIRSPALARSLGHRLFYLWGRLKQMVIQFRSKQKSGRSPIWPGLNKSGSLHRPMGLPYGPVPSWSTKCTLSHHLHPRCLTGSPGVVLGPEGEGNVTTDGSLGPQKVPGNQRVTEGMDLIGPGQQALYGAIGPTPCHGPGDISLVQRLGAHTPIFGGTTPWRHKLEVSRENLWGHTLWPLGNPGKGWESNSEKKSIGIAPPEDNGAPGMGSGISDDSKDFLQILDSTG

SEQ ID NO: 1009921 - protein, 351 aa, Homo sapiens
MLVRPNLTLVSLVVSRSGFESRIDNEHGYECTVTIHSCEDYLLRIVLGSYCACWLEIRPHKDVRKYIEWTNSDGRIEDMRTEWFHIPCMLYVWGIFGASARSDLNELSLIVRLIVHKFESNIMRYTGHLSIMCLHYSDNVWYPSEYINWYVIYPFQIYHKTMEAQDASIGHQTIVCIDIRTLYVLLARDMIIAMEIESSPYLYKLQFTEGKCGDHVTARDGSARIDAFAILLCLCDQAKGCGAWIGIIPKSVYHIRTQFDFFYHHTTCLESPPNYDVRKPAIKRIKGDGKVTMYEGGVPLCVYKQDGATRVIIVGGQMIPCKNEFGGHLDILAMLETTRGIRKFVCLDAEV

SEQ ID NO: 1009922 - protein, 157 aa, Homo sapiens
LSKLLWKKKPSRGVLDPFYKKAVSHTIGVLWTPLTTGAERDCSLSTNLKLPRVHQGSELGSKLWATNGPGHDVVGSQQSAYRRQICEISTLVPWAEENTKKLRGAPNMEIGHKHYSVKITVSEACRKRRIAPAACEEKPHNQENSPRNRGIHMEKRS

SEQ ID NO: 1009923 - protein, 121 aa, Homo sapiens
LVNRTVAMGRVIPCDSRKGAGSVFRTQSDMQPYKGVCVAVRAPRDFGVENGTRGTFTGGIIEVYIIQRSPEPGKESRAIAEGWDLPWKSDIGSKQAVQRRLVQLPARRDNSQRGQVNDVLD

SEQ ID NO: 1009924 - protein, 100 aa, Homo sapiens
GRAPGRVAPARPGLRIARGALRAPLAALPPRGDPWRAEEDMARRPCRVSLAAGPCIEQLGLAWEQTWRTTGVQQQLELERERLQAGNPQKELKLKEGDEN

SEQ ID NO: 1009925 - protein, 220 aa, Homo sapiens
AASGARDGKSRFARFRLVWKNSKKAGKGVGDGTTLYAGVYEDRRETSDDVSERVGHGTDYSVAASEETSCNENSTGIYRTYKSKDMWNVKYAREANPAYCKDFVTKFHSMQTGSIDTVRRVGRWIGNTEREAHILAGLGTQMGDESSQLVSRSNRELFSCISKAIRGGLKSDGRKRQLNNRSRRYSFIAINVHRVPKRGTKSGFSKGQVIKVETHEEEKG

SEQ ID NO: 1009926 - protein, 119 aa, Homo sapiens
WLYGPFIFHVFRYIGIYEITPFTIGNYFTRTLDQTLHRVIRMVIPREFNASNPAKNFGHNLFQLGYLMVLRSFHQPWICGPNKGLGWLGWTDYGRQRTAILQIFGQSWLGLQFIKRYPS

SEQ ID NO: 1009927 - protein, 256 aa, Homo sapiens
GASGCYRPDPQEQENVQYAGLDFDSNPAADWQPSKYKTQVPMVVMPHGGPHSSFESHAWMLFPGHAFAKMVLCRYVRSEAIVASTGFGLDSILSLPGNVGHQDVTDVQSRSGNRLLQEEHCCCKPCGPYGVVPMVAIISVPLDGSGPRDLQGLRGPEARDQKIGSMLGSTDIPELVRGGGWRCLVSSDVPAMTVSVWAEMLDKIAHQIHPSGEDDHVLLMQGQEDRRVPFKAGAMEYYRALKTRNVPVRLLLYSKS

SEQ ID NO: 1009928 - protein, 103 aa, Homo sapiens
MTSQGSRQILPPQPPDVRWGPPVLFATIAQLIGCIGFAQETRASAMCFAPGCGLLNSPWNSQGQLHAVPWGPPKKVRGDLTGCSTHVVSYSLFFTYSLAWVVP

SEQ ID NO: 1009929 - protein, 417 aa, Homo sapiens
  misc_feature (407)..(407): Xaa can be any naturally occurring amino acid
GRVGILDDGGRGTPCAYLSGFLDPTSTDMQLSGRQSTPPDRDGIPCLTNVFARRYCAWVGPPVSGIVLLESSSSRDHRLAKDMVGTINTVGRAPVEQHAGAGDSTKDTIACEGGGSLRVVTSRARTPLRSGSSREASQEHLGPNIGVERQGIRVHRILLEAATHHLVPQKEAAITFLDPMGDAGLWKRHVRQLGARTGTEHRSVMVVKYTVKVGHGEVGVPMKVLARPQGTLQRGPLPVDYGAQNGQDHMRRGGYSDVEGRHQRQGGHGDGSVPRSKGVLHTRWANPRARASVAGRGRKNPLAEPKARPRGFRKRGSRKRQTLGAQMALVAPFVYTVAYEWGALAWMEKYWFLLAAGYCVRWGFNSIGRRKRTTPLPKSAGCVPWGDYGFVGPETRRTPYLGAPHHXTPSMQAGEPS

SEQ ID NO: 1009930 - protein, 146 aa, Homo sapiens
MSRSAVFFILPGTQMYILNVAILLSTSRDSHVNNRFLETGGPLQDESIFCTLDCASIDRLVVEEIKEGTMTAKYGGYNSSEEKLGPSMKRHVRPRNGSEGTAEAALGRNPDFKMALSELIPLKVASKSHNEPKWGRVKSQSEEEGR

SEQ ID NO: 1009931 - protein, 245 aa, Homo sapiens
KYIPFYYKAGLPNLFTGYTSRVENIQATVDGGWDPLRGYPDEEALGVEIQDAVFRAEGWSHVPCLPLTNVLLTLSKPLNFLVLLLVGKRGQRGGSADKGPNYTLTELSTKPWHTDRLSPGCHSQHKCLVDAYVVAVGRCGAPRGCGPQETRCSKEAVTTEAGDKKPISLTGHSCLTPGKSGEDHESTQTKADPNDGGTHYRATQREDVNIGKWGTPWGYPKMGQKPGKLITTQGEHQANTPKSGH

SEQ ID NO: 1009932 - protein, 104 aa, Homo sapiens
MIYYKHFNERGIIDGKETELYKRNSNQKILKAKKVQYSKNSTDTQKTNKVKPTARRDDYSDKEPDHKGSPHRTQTRTNRASTNRQETSKRPPSISARSVDINRT

SEQ ID NO: 1009933 - protein, 451 aa, Homo sapiens
MRTRRSVKSSLCSVARQLVWTQGKSVMVVRLIGIALDKADPEGPRHLSLILRTTNRSPSNATNLLAAGGARRWRTERSTINDYEPHIRVIGKKRLTISSGSDAPTIHAAWSRCEDAEGVSRVNIPGAHRDRGHMVVRRLRQVGASCIRHIVVVAHMRRLLQAAQVHGWLASGRGALLSRGPMCAIADGRSRSRGGGQGSGRREGHKAVGPPRAPHFGKVKVFNCDRKNDRRLGSLRNGLDTVDAAGYSDTLTEGQPIWNSCSNTPWLYGGNLVRVRDEIGICGITCEERAEGGEKIFGRALVDVNRYIWICSDLGAIMGSNTKEIAQITGGQRYEATRNRGVKGGTYLVEDRQGPLGGPLVGRARSWEWGEEKHRSHREAHHPRQFGLAMATEEGSNQRVAEAFARTRKKGESKDSIGHPEPDEDNLHQKYKTDSLSKASLKNHNEPRSEG

SEQ ID NO: 1009934 - protein, 214 aa, Homo sapiens
MLLFLVMQVQRYRCQCTAVEMYCNGCWDFSRRLLIVGLKSQCSYGQHQVMCTPVTGNKGHWKHYPENALPTPKDYACPHSRMRRSVVCRENGRGCLKLWTWRQHFPHCDVGGEKHVSETERHFPRQVTPCVIVQKGSVYTFGELLCAGPKEVDLSTVKKHVPKAQETTVRSGWIVQETQIETNQGEREITSDGKTRRNLLTSERHFWRHHGTYT

SEQ ID NO: 1009935 - protein, 70 aa, Homo sapiens
KDVGMPIAMLACTTDGAHETSPRGDGRLFSNYLIDYTTQRAVEEDIEFVCYDICHIILHAGIPKSDRQQI

SEQ ID NO: 1009936 - protein, 281 aa, Homo sapiens
MDLEEKKSRVGQKALRVQSRRAILPYSRWGSRGKVGESPERGVTYVQVIQEHTSATRLHLLPSTVVPEVSTAQYTEGPTCVTEHHPEGCPLSGAPPCVGWDIRVLADSAQLVQHNKRPQGRHHSAAQQQTTKYSQQKNTTGQQTKETSGATQTAPRGHITTKKQLQQQSEEAADKNNNRHTHQNIAAPQAHSNNYTNTKATTLLATPAHTHNNTRRHAPTTEHHPKRETEQHHHQTKQHNTHHTIETKTTSKNNNNTHTLRNKAIETRERADNTQEKRQAP

SEQ ID NO: 1009937 - protein, 274 aa, Homo sapiens
MVLLCEQLWKKRIETETPMGPQYNARLELVHMRMEASGVKWHENAWFHSHQPRGGDRQEIDLMLPFDDAHLGGYVLVSQGGTRFDLQARWAEFVGPGYHSKAVTRTNWDNILNPQFRPYVLQGMSRCYVSALFMRDSLDENGVTYAGPQALMRTDSLAPVGNRKGISRNGADVLAFVLDIWGQQISNMKPCGISTKIDGGFLEDSGFSYPIGGYPVVRTVRSKGIGTLQCTTRDLTERIEGKKGEVTRELEKKGGVERRLGGGGANARELDPKN

SEQ ID NO: 1009938 - protein, 123 aa, Homo sapiens
MQSSWSEKLRSTRMLAAHVLRGYYTFAFRVVFNKEWFPWILGFFIKNKKLKTEEGGGATGFSKGILSYLEGVATREVHGGRHELLMRPQGVGPIKEEIDHKDRIREAERRTVAKNVRGARGNT

SEQ ID NO: 1009939 - protein, 162 aa, Homo sapiens
MERSVRRAECVNVLDTYRTGMRTLVEAGMPLTPNCDTTGALSVEQLTSSSAGLRDCRATRSFWQTRNRPTPRKLFKRILRAAHGTCSRRKAFKSLRHTAATGDRTEMEFTEAESNMNDLVSEYQQYQDATARRIKGSCEEEEGEDEALKTSRDQIVHPLVNF

SEQ ID NO: 1009940 - protein, 71 aa, Homo sapiens
  misc_feature (1)..(1): Xaa can be any naturally occurring amino acid
  misc_feature (58)..(58): Xaa can be any naturally occurring amino acid
XSDVGHTVITYIKLLNRESLTGVANFFRALMSGRTENPFAYTEESNSGVNRVHPVKFXIYNISNQGFGINL

SEQ ID NO: 1009941 - protein, 149 aa, Homo sapiens
VTYLPCVTWLPRVTRVCKYCVGPRRYTGCCGGRVTAPDKSTRCHMRCAIAHTMCWVLDTITFSRRGPLDTWSTRVATVLGSDAYCEDRDDLTSAASYLASSNSGLMCMDKVTSMLTRAKDGGHNQRICVTRMMREFLSIGDRAIAARES

SEQ ID NO: 1009942 - protein, 111 aa, Homo sapiens
VFPFLPVPSFLSPSSFVFSSIFFSSHLLLFLSLDSHVFHYLFFLNKLLGVLRLLFLYLLISYMRILSLRRFALRALSSLVSRCVWLPVEILPFPVAYLCFYCIIWSVYQLS

SEQ ID NO: 1009943 - protein, 128 aa, Homo sapiens
MSRAYVLPFWSEPDMLHLAVVWGPLLAITISLYIMILVSFDIELQSSVAAHTPWGISDYMGLSGSVKRDGTPNTSSISSEGNSDVQTNFNERIRGLFGYMARSGFAQKGKDTRVDDSSSRITPGHHGH

SEQ ID NO: 1009944 - protein, 104 aa, Homo sapiens
LEDDDITHVEGSVDPIRDDRINTVKSFSVKDEEMIGPIIDETRRGGCEEEEIKNYEPEICYNVLSIILGYDLKKPVRFYHDWNDEEIEVLNKQLFLTCKDQVVY

SEQ ID NO: 1009945 - protein, 372 aa, Homo sapiens
FFCFFVFSLLFFALCLLVFLACLFAFVRLSVLCRGVLCPFFFLPLLFSSSALFFFLVIRLSPSVSSLLSSSSMSVPPVVVLVPFLVVLLFPSLCFLAPLSPFFCLSLSALRSSRLPLAPSCPLWFLLPPAVAPAVLFPLLSWFPLWLILFFLWLASVFFAPLCPCLLAVSLFLPLYFSLRPLSIVGLVSSLVSLDVLLLPVSLVFSYSQSPLLLLCILFLFLFCCPCSWHAFVYSWTFLCVDMSLGHDLYVVLSDEYFWVYLCMLLYRVLSGMVPGSSLSVRRSFVCFSLPAGIHQCLCFSVSPRPATLVWREGSRLCAVGVALCILSQWSDHPVPPLLPLFAPVWLVRRDVREIGPPDLPSCLSLHYTGSS

SEQ ID NO: 1009946 - protein, 362 aa, Homo sapiens
  misc_feature (146)..(146): Xaa can be any naturally occurring amino acid
  misc_feature (154)..(154): Xaa can be any naturally occurring amino acid
  misc_feature (164)..(164): Xaa can be any naturally occurring amino acid
  misc_feature (166)..(167): Xaa can be any naturally occurring amino acid
  misc_feature (188)..(188): Xaa can be any naturally occurring amino acid
  misc_feature (192)..(192): Xaa can be any naturally occurring amino acid
  misc_feature (200)..(201): Xaa can be any naturally occurring amino acid
  misc_feature (245)..(245): Xaa can be any naturally occurring amino acid
  misc_feature (248)..(248): Xaa can be any naturally occurring amino acid
MAEVQVLVLDGRRSSPGARLDETISGLKQCTCWSRECVDEYVQLMNWRSEQLFWRNLSQHDKHTFDTLPCDLVTSAVMRYDTSHSARYSDGPPYSRFLVLHASTANRYCERDPDDRRAIACLATKKSHSADVPRDADIVRTQYLEXVCFIELGXFATSSNSVTXAXXHNTSAGHLRCAMPLVLTRLLXVTPXWRVHRRRXXNQTDDVFGTYILGGGPSVFDGKGFGPGQRLRTCTVDLRARPCGXRTXNGNTEGRGANEVQGNAENRKNGVRSLKRLREHYWATSNETVWRSKDLDQYHMECRSSNPMGTPWFVEAQIRELSDSVMAIGLALLAFVAPGKWYGDPGGSKASTGCHKAGLGDS

SEQ ID NO: 1009947 - protein, 131 aa, Homo sapiens
MYSGRYSSGVFFGMYGFHDSSASFISVRCLSGFRLFFLPRLIHWFPDSITPVLIVPRSTRMKFLIQVELPELFYLDELSQSHKVPLARSPYVYLIGHGRYAMQAESVTEGVRSPNMHLYIPQGIAFLFYVF

SEQ ID NO: 1009948 - protein, 286 aa, Homo sapiens
RTSPEHSACNSDLGVKLWRCARDVGPHRYLEVEIHPLKNEEQKHRRKIVGTSSQRQMRISAEEARFHSPGISRLPSGGVLLLLHCYLLTNSGVSSSHSIMPCSRPVGVTVNVEGIDYSDDVYLMSIIWTVDDINGDQDRKDVIVALNMNTRRGSKQIVRPNPVVDGYAIKHHTCDTVYGRSADVEGHKRGSESLMGRKTLDGTIRTVDIRWKVDDYGTQHAPKKGQMKSKALCRPCNDLGWVKNEQGNIGVAGTTDRVQREEKKCDGIRKDRKAIQAGKLRIHTVE

SEQ ID NO: 1009949 - protein, 105 aa, Homo sapiens
WFSFSQYPCSSAVFLACFCWALCSRLNQCLGLLCLCGLYIGVLVFLLQFIRPLYLSVSIHNSSDFHMSYEILFLLMPWAIFLVLDFGCHSSKLYCCYLNLYSLLL

SEQ ID NO: 1009950 - protein, 101 aa, Homo sapiens
LYVLALNDAYLTEGQRETIYCYYKLDSPSSISDDITEVIAIRLVRHTSISSLESSQRHTILPSLYACVVDARSYATTNDHYDLQMRISGTADDDMSIHTLV

SEQ ID NO: 1009951 - protein, 112 aa, Homo sapiens
MTILDAPSTPTTHSNESRYSIKSRQEKDGIEPPSKSRYSKPRTPDGPPWTCLQENKNKTRRGADIVEVFALLEGLTMVFTAVPQVFSVVLRNVVVVPYISMVGHCALCIHMR

SEQ ID NO: 1009952 - protein, 67 aa, Homo sapiens
LNTVLNCHLMSGIKNMCGICVYVYELYSTVINRYFSKRQSQYTVLDYLARMVLYTVCMLIFSSLNPN

SEQ ID NO: 1009953 - protein, 164 aa, Homo sapiens
ARCPLSVPSLSSLSRVGSVSGSRVAVTAVCRCSCLLLVVRLSSVCLHLLCLSYSCALVCCLTHSHPFLRCFVFSSLSSFYLCVASALSRVSLSCCARLLSLSITCSLFSASLLGFAGLCSCGVCSCVCAVPASCRAPVAHASDSCSVCVVIVVVSPSLVASVLS

SEQ ID NO: 1009954 - protein, 113 aa, Homo sapiens
MFFLEHNFITPIPEGYTFYQTNKQLPQHLQIILTNKTHSGGRVPNCAGAPRFDNQSIYNYSSIFVLLSTHVKQENKTKLWCWRHNVLVRHVLINNDKIHTRYLIGPYRTVRSY

SEQ ID NO: 1009955 - protein, 76 aa, Homo sapiens
TLLGGLFSASSRSCDLTMRGFSCVPKCVSDTRGEDTMDMVHEPPVRTAEAQSVFGLVKRKGRAKEYSQLVTAGVSE

SEQ ID NO: 1009956 - protein, 347 aa, Homo sapiens
  misc_feature (164)..(164): Xaa can be any naturally occurring amino acid
  misc_feature (248)..(248): Xaa can be any naturally occurring amino acid
DKTIGGGDDSFKRPSSDETGAGKHVPRAEYVDLVPKQSTCWNDIVTGRPYRQPASTHECIFITETKRKMLTKYTYDPEGTYTRYGEARSLNPLLVGIRDSSKACVMTKVTTGSYTAVIRMEEAQQNVSEMRSADVEFSRDSTPSWREQCTAGNRDLCGSSISEXSYECERHQTAPKSLVKDIYGNCLAHRCKHHPGDVVPFQRALDKAFWKEAARIGLQSIRNLPPFPWRHVTPNKAAIARRWWHRPXRCRGKVRGLGGGVHVWGYIDGRKWYTQAYNCGYGEQSRIFVSGSRVFTENDEATDIRRGYKSSRKRDLGLATKKAHTLKRIGHLKKAPIPGRRAYLDNL

SEQ ID NO: 1009957 - protein, 102 aa, Homo sapiens
MAEGDAKGDKAQVKDETTEKIREVVCYNLLRPKPEPKPKKGPVLKKGEKVTQRAKRDKLMLAKEGNNPAEQWRCQKRPGYRKLKVRGDAKEVCAFLIIVYFW

SEQ ID NO: 1009958 - protein, 246 aa, Homo sapiens
GIGCYSDSKQENVRMLGLTLTHSWCRLAVLQIRPHVPIGGHAPRGAPFILSHCLDAVPSGMLCKMGLSRYVRRGSYRVLQRAFGQDSILSLPGNVGHQDVQGCPALAMGTRCSEAWNTLMQSHVARYGKVPDGALHFRATMIGQYARDTTGPCGGTGTPVIKIGLHVGLHLTSLTGACVEAGLSFQQVYWLTRTSALWADDAGANRPSDTFPQVEDTTVTDVGPGGSACALQARAWSISRALKIRN

SEQ ID NO: 1009959 - protein, 192 aa, Homo sapiens
PTRPIDTPVFELKEALMGKYGEDSKSLIYDLSGPGGELLIPSDYDLTVSLLLGIWQVNKLTKIKRYHIAKVYRRDNPAMTQRSDPGECLTRCDFDIAGNCDPYDALMQSAVKIMCEILEFTFEKATFLVQGKRSTALLDGMFADRDGVYLTASCRYHLLLSRQAGQGVLGKRWKTEIGGRDGPVLPEVARLA

SEQ ID NO: 1009960 - protein, 133 aa, Homo sapiens
MKRKKKLKRKTGVANDTLQLLSVASGLKSQSKRCCVSYTNSPTIQEGAGQVPDKTRKYFRQQRLATNILTGPTCFTCFTNVLGRPADCQLKDTLPELLTLLYDRKLPQGYRSDRSDVLNWDPRVHKHDPSLSK

SEQ ID NO: 1009961 - protein, 196 aa, Homo sapiens
AVGRSDMPLTAGRSMPRHAGPARAAGPCRWHDLAVPPCVYSSSWSCSWELAACVEIRKELKLRELVLRTCVRATTDLGLHALAPEMLAAAVGSSAACLDLLHHAAACELHAHCMCFPDPGWPPTMAPSPLCCGLPHLLGHQPEPLLAGLEKQLAIELKVKQGAENIDPDLQQWQHQGPEAAADSPADVAGPVRPRL

SEQ ID NO: 1009962 - protein, 204 aa, Homo sapiens
ICYPGVRISSTQASHPGARHQTSGGDRRSRKSPSQRATTRLHYHGYHMLPQCTGDPTVATVPATDGHRHPQHPMQHPRFTAYTLLIIRTTWRTEASASPTDHSGYGTGHYPRGRPPPPKHGRNVLGHRGHQQPELVKTQTNITDKEQLTQERTTNPGDHDNHMKREHRCHLGDQLDPWNPQEGGHTTPNSRDLPEHKPDEPESP

SEQ ID NO: 1009963 - protein, 219 aa, Homo sapiens
MAACCVAVYHEGACEGYWPELRQERVMLVSVGQKLWCCGITSSRASCYIWIETQQAFYQVSLLDHGRSCDDCLGWSRPMASASRSKMVMECAIYWCPTVDQRYLVNVLYASELAGVRWPLNPYYGFQAVQGSLLVDLADHLLLGMPFCDSYLISLTSPVCPVQLYDDQEQAKAQTSNGNHGSQLSIARCAVCRPDVATEALGLDHQLRLCARKTSMVVT

SEQ ID NO: 1009964 - protein, 144 aa, Homo sapiens
RHATHGRPREPRGEEHGPGRAGPSCGGWRTTQRTDERRRQEEQQRHRPHPEGLTIHHGDSCPYPVCHRAPEMEPNYGACTLPWWTSVDSCGGIAPAHLLTPWPAAGCDFLCTMQHTGLPALPVPVLLVPGQPLQTQPSLVCALT

SEQ ID NO: 1009965 - protein, 195 aa, Homo sapiens
QAEYRLLGGVYGVSVETHGCSCLLVSRLNAEPKLDYTAAISAHCNLPACFSCLSLRSACNCRRAPPRLTGFRIFVVETGFRVCWPGWSPAPNLRVIRQPRPPEVPGLQSGVVVQLRFAQIGCPMAWTLAVAVESSRGSAVTKPCPQRLPSPALPLWPVPQYVPEICEAPSLVAPGSITPGLGNVSEAGFISLGPM

SEQ ID NO: 1009966 - protein, 155 aa, Homo sapiens
ADLWEHLVRYVQALFQDSYGHVKPHHGSVEGWMHDGHINTVAVSPPWYEHRDGITTTYIPQTVLSDLNACLVLDLLRAGILSLTFGGYAIYIVDCTSVVHYGVGVRRMQQDPARTTLCVEATLNDTVRTQEAGGSQNYRGRRGTVPYYACPLMTC

SEQ ID NO: 1009967 - protein, 106 aa, Homo sapiens
RAGPAAAPAVAAVNDDEVMRNRLIVEEDGAEDDRIIMSDYMQVAFIRVADILSGYPEKKEYIGQLAEKCMDEAALDSRCAVIMSKWAKTFTSIVLMYEFVRRCIWK

SEQ ID NO: 1009968 - protein, 197 aa, Homo sapiens
RAGAGRWAPGGAARSPITRPPEPGARLRASFRPLGEGSGHVPFQSPATLRQVPRAPLEEPELPEEAARVLLRQLWLLRAWLPRGEAGPYKKLEHENPEEHGKKWNDRTDITERPGRKKSSAGTGNPASAQRHDVAQQKGGRKGGAHGRNGAAQPPETTSGQRSPPAPKRKTQEDKKQTAEQPEIRKKKIQGGKDNRT

SEQ ID NO: 1009969 - protein, 79 aa, Homo sapiens
AEWMTRGGGGGDTISKMPDVKGECAPEHSPGDSEGRSCKPETSGPPAGRRRAAYRGAPVPVVFAVTESDREAVNESFQV

SEQ ID NO: 1009970 - protein, 296 aa, Homo sapiens
MRYRSSKVLLLRTEVASCPSGAAHNKHMGEVLTPELYAELRAKSTPSGFTHGQTSSTTGVDKPEATQYNHDQKGCSEAGRPTEYHTEAVAKDSSIRNTSPQTDTDTDRANKAQPDEHRERNVNHRQTVQGRAEQTMEPKLQMLTLAGCARGHSSNPRLNMPSPHDKCKPAGKRTSRSRTHTTEGKHHVTSLGRETQDTEPNTKGRHKGAVQRKSRETQHRQESNDEQKRNCSYKRSKDHRESDHTGLAMETIRGNKEDPDEAGPRNAKEGDFLAATRRNPVKRNRSTGGSRAQTHE

SEQ ID NO: 1009971 - protein, 83 aa, Homo sapiens
MRILGGVIRAIREGGCPVQPGSPGPQAHITPPIGATEHVRRSREVPENSWPQLGLENDLEGQCHKNSMKLLNQGCARNPGSAD

SEQ ID NO: 1009972 - protein, 89 aa, Homo sapiens
MAGRKKRAPGTGRWAVAPIGSPGYFRRRVCRQGPYLSRCKYGSRGGERPWLRGQLSRQQRDMGSHAWLSYYGRGSLVPCSLFGDSAIYA

SEQ ID NO: 1009973 - protein, 289 aa, Homo sapiens
RAHGGGRVYGLGGPDVELHSCVNVHSGAILVDLPRGPRVCDPRRAVCCCFQMADVICLVAQVVQELRHSPVSSSVKGPASRQNDHVAPGLSTCLTCISPSGLYVAGRSCMNAFTCGRSRTGNLLVILSRHYQVLSPAFSSQGTAVHFISAGQWTACGAGLEPLQQCCDGQILSRIPAAPGQSGSHHTLPIRDLLCGFGGPEPGGTSSLDQTVKLWEVSSGGAAASPSSLTCPSWQVTMDLAEHHMFCARAVQGSIFQVGALQRGPDRGERGFHQEQDAVKIFNRAQESR

SEQ ID NO: 1009974 - protein, 35 aa, Homo sapiens
MFALALLTARPSGPYQKYTTRVMLRGYRQAPGSHP

SEQ ID NO: 1009975 - protein, 148 aa, Homo sapiens
MPGVMTAHDKMEYVTHNIVKEERENERRKTILVDYKGLLTKGCSPCDVKQQWVLIAFDPEVVPVTFAVIYKESGGWPSMKHSDQSWLLLPRRYLITGCIGLDIKLNLTSGKAVQRLLDSDNPAPILLTCLMGLEIRLIHANMFRSHPR

SEQ ID NO: 1009976 - protein, 141 aa, Homo sapiens
AGTGASAQQRGKMATAGGGSGADPGSRGRPSAILVFRGVRNSRFVRGETQWRRKIYIPLNKTAPCVRLLNSQVIRLAAESSISGDTGVIHVRRETRRTYSGYRLMAQPPYMVLLESKHFTRDLMEKLNGENQPNCWSCTCP

SEQ ID NO: 1009977 - protein, 45 aa, Homo sapiens
MAQFDAKKSAETQLKKDTPRNREGFTGKRSRKPQAERKEEKQAAA

SEQ ID NO: 1009978 - protein, 142 aa, Homo sapiens
SNVQFPLMTPISLKGQVQAAGDGKKCSLEDLALIEGFAHLLEGPPSQEKYSRTSVWVSSLPGLQFPPVCMTRSPPCQFCGPQRKGKPPVALGRPRLPEMWSCIWWVPKRMTLATGISFPHALFQFAWNTFQVNEELQLSERS

SEQ ID NO: 1009979 - protein, 152 aa, Homo sapiens
MVDRFGPYSHVSQQCCNTGNPRGGPHSTGCTDTKTGIWLKVSRHFPLSWLKEIPGSWHSLTFECQWMGKAHARGAGFCRGLAKLRARYSGTCNDMFVENPRAVVGLPQQAVDSTITKGITPPDVYHQMQVLQKQTVWPPKWLRPPHTGGRES

SEQ ID NO: 1009980 - protein, 118 aa, Homo sapiens
MPVSVFVIDRQRVTLSEEPQFHTMENQARTIGPDRVSYLGLKAVVRNDTAATTEHQQIDLAETRTKKTSRAVHALQRNAIALHMAENTQSCPGVLKASRKSLSSPGAITLRFGLTTCM

SEQ ID NO: 1009981 - protein, 50 aa, Homo sapiens
ELVSVVRLSSREVFVATPRRGGKHEYEGTLETRSRVAPRLVVTSEPRMRR

SEQ ID NO: 1009982 - protein, 147 aa, Homo sapiens
SGVRTAWWPEGSLSAVAGCSVRARTFQSVCPCLLSADGCGPAGRSLGTAPSPLLVPAGHLVPWLIPRLGAFWSPSSSGTLDFWFILRPSSLHSPMSPGSKHVVRVFVIVPFYFFDLKKRGGLGSAGRAQLWVKRIVTSCAGNSQVMQ

SEQ ID NO: 1009983 - protein, 120 aa, Homo sapiens
RVLTWLQILSTSIEMISHREAYSLPTFYGYNIHGVLFSWGSAHRTKSIKSKVPVLDQCVINPRTQFSHIDQSSIDNRGHGFLNVVLVRRESLIRGPQAGKAKIGLTETRGYLEKRQLCVF

SEQ ID NO: 1009984 - protein, 107 aa, Homo sapiens
MILTSTCEITSANRCLRTVVTINSCRDSVRPSERVSGLLTVCCAPGDYTIVASAKCTPCITQKAEGPSSAVRGLAHRLSRGHVSDPEVHWVDVLLEPLVDGSLSLGR

SEQ ID NO: 1009985 - protein, 156 aa, Homo sapiens
SGLSPPAVRGHAQKPLGGDGFPSHARTPAWADCVRSARACAEPEARLPSKRGGAKAGRGPSRAGAGGLSVDSQSRGAGLQCGCGENPKVGGGRRAGPLVGARAAGSLGPEDAGNRGRGPPRGTEGKRCLDRAHPGSKDAGQACLDTSPINNSRGSL

SEQ ID NO: 1009986 - protein, 312 aa, Homo sapiens
  misc_feature (63)..(63): Xaa can be any naturally occurring amino acid
  misc_feature (152)..(152): Xaa can be any naturally occurring amino acid
MNGHPIVFQSIAIDVREQKSDVITSRRELCIAEFSKTRENNLSTEVIVATMFKDKAGDAEQLXRKAIVAIAQKTPRMCPHASIYRAPRLWPNSRTVSTNRRRSLYAWGLRVKRGTGGPGRRGQMVKWKQNPMTGSVRKSEENDRRREKGLAXEETRTPQRLGGAVGRGVRRKRSAHRANLCGLGEGSRKEYARWRGGNVARERAPCIAKGGPFNKSVAGNGSTDIAGWEHDKVLWSLEGPRETPGVLSPMEGAPRRVFQGRRGKAHLAMFKTLFIKGILLLAYRENDKGPRNQGQGRMAQRWSSYVNTNLRP

SEQ ID NO: 1009987 - protein, 198 aa, Homo sapiens
MCTAEGDIEPLSEAVTVRNTPERLEAVMKPGPTLTCELQGHYMACRGQESPSLPFYICDVTVRKSPWDLKLTIGGSMTHMVSLGSIAEDQTSCDGHFASWVHNGSKALPVNAEAPTKGSNKSHPCARTSPLRTRRRLTPSVGPNLTCYFFGASIPFKGPFPRWRRSPGIQPPFRHTCQKKVLRQNCLENVKKDYSKGT

SEQ ID NO: 1009988 - protein, 195 aa, Homo sapiens
SGRSRPGGPASGRQWMTRGGGGGDTISQNARRLDGECAPVEYPGGLHEGYGRCHALKCSRSLPMERGNERASDDPPLAVILDRQPVEMKVLPKLRQHTDLRIELADVLTVDTKNGFTVQSTSAKGNRSDGETVALHCLFWDHLQLKQPNHSNSALTFSVVRSLKLRETNALLRGLFANHLRIDHAENRRMMNLSI

SEQ ID NO: 1009989 - protein, 419 aa, Homo sapiens
GTLLAVAVCSSVVSLMASSSCVILKALVTPVSAPGERKMRLSRSSQSSVVGALSSSIGCLENHDAMGCHKLQRIFCLTRMCTCALPGGLMVTTDASAVAIKANMDDVREARCPDAARQYLTSSGPCVFCTRASVTCVGDVSAVVTTTPIPLSVPYLVVSRYPCYIRRETSTHSDWVPLLESRPTERTADTERKSPWAPLYSLVDALPRHVETNSLRGIGTGYLSPRYAPVPSPRGLRQLTGDRGTPKRDFLVSPLVPRALDVLGPLELIALGSGPCEPLWYAFPLNRQFASLARNPQTPKGAHRTSPTTKRNGSPRGFNRKEHSQIRRGFDCGYFVANIVGAKGGLSNAMGARATGMGSLCSRVQQRGTAGPRVLETLSRRGQRGNAVARLHSTLSPFHICRRTQLANRCLQERCLVMS

SEQ ID NO: 1009990 - protein, 107 aa, Homo sapiens
MDPGTDMLPMRIHLGKLLVLCSLTCCTKALSLHCIVGVVTHPSRGATTNHLQGQSLYAQPVPEGATITGPMSHGRATTSCVRTHSHPGIHLLSGETHTPVIQITRRR

SEQ ID NO: 1009991 - protein, 109 aa, Homo sapiens
MSELVSKASHISRGISSRGLGDRGLLTVRDVPPKELQAVVGGAGWANPTLQDDHRNITRKVLSREAGTVHKQEHHPLWLIKERVNGAAFYTVSYCGPAFGSPLFSVLQR

SEQ ID NO: 1009992 - protein, 126 aa, Homo sapiens
MLYLFYHSGFPKVNLHVHTNHYLDMQHFLDRLEISLWMFQGHLKHNMSNRHIDLATEPCSMHLTNGTLGYEHPIHVLNMGKLRGHAGEQLFPNPGHLSSTGLTSKPISSASQLSLPILHCSSNTSM

SEQ ID NO: 1009993 - protein, 302 aa, Homo sapiens
AGRGWRLAAAGGCGAWAVSRPRRRKEPAGCAVVMGLGPVLPVLVWSMLGDGLGQCCVGHVSALGLLGARWVVTGRGLVLLAERRVCACVHWLREDHRWLGLRLAFVNVATVDDHTTLSSETNSLYTNAMGPLNIRRTDLLPSNNSVTLLTPVCTDTWWRFDSEDLSLRLGWQFDADRPWQLQCGIDVRVTLCPQGLATINLLSFQLRFLLSTLAQAFNHKGQAPGVLREFQVSSENTLGTRHANVSHVPHVSPAVRESCHFEKFCLHNYEIFATPSNLGRITAAMDIVWFNTFTSHGRKSLH

SEQ ID NO: 1009994 - protein, 94 aa, Homo sapiens
RDGAAGRRVWSGRDDQAGERSAAPLRCAAAEMGASWSDERSYSDICGGAWRCSAAYYSRVLPGILPQLPSALLLLFAQRLVTCTVWLAAYGSFF

SEQ ID NO: 1009995 - protein, 75 aa, Homo sapiens
NKKNKKKKKKKMAVAQWLMCVIPALWEAEARVLLEARISRLAWATWGDPISPNFIVVLEQPLTVGKGAGCGASCL

SEQ ID NO: 1009996 - protein, 35 aa, Homo sapiens
GIGDSRPPSFHPRVSSSHENLEPETETESVVSLRR

SEQ ID NO: 1009997 - protein, 277 aa, Homo sapiens
MVTVPAMILDGGDGKPVSLGWPGAVVLGYEWSQGQSSGIRAQHDLDDPDMAHGPRFTPSVYPRCQVLETGASESPCMAELLSSTIDLPFYRQRASEFLRTHDAMTAGGCHSEHRQWMFYGGDHCGTLYHSHSGQGPSASSKVRRGHPTVHRSRHRMPTRRVHPKPQRPPMRQSHSTANPHVDRGRAALRLYPGCNRPGKAQRHEAMNQQREETDKHRPLGNSYPNTVTTDTRRETRTHPAAGQCTTRNAAASIHVPPLRSRRTAPATNTRITAKAST

SEQ ID NO: 1009998 - protein, 31 aa, Homo sapiens
MGGYRYTLWIYRSGESTRTEQPPTAQTMVTD

SEQ ID NO: 1009999 - protein, 195 aa, Homo sapiens
MAVWTRATKAGLVELLLRERWVRVVAVLSGESLSLTGDACAAELEPALGPAAAAFNVLPNGGVRGRLCCPGAQATAWGPRSRRRRSGPRGLRPGGVAARCAGCGVGESQEAGRLGAFSAFHGVGRENPDADPQSPKIFPGLAADPSRALRLGRSPFLVGERDRTWPGQPRTRPCRRLKRTGKRPVLEGTSSYPGS

SEQ ID NO: 1010000 - protein, 117 aa, Homo sapiens
  misc_feature (100)..(101): Xaa can be any naturally occurring amino acid
  misc_feature (108)..(108): Xaa can be any naturally occurring amino acid
  misc_feature (111)..(111): Xaa can be any naturally occurring amino acid
  misc_feature (117)..(117): Xaa can be any naturally occurring amino acid
MGWKKIWKSAPGTAKCTLALFWWANPNDRKDETLVGRSGALVVSPCYERQVALGGVAVETVYKYTIFPAVVTGDKRAPAIQEKRLGREFRQETQGEKAFXXKYFLWEXTSXGGDLIX

SEQ ID NO: 1010001 - protein, 184 aa, Homo sapiens
MGQPQRDAVQRAKLRVETVTKGMRDMLNSVEAGLYTQGKVLGAVTEQSSQAIHLADTASVATGRAIARPFDSSTPGRTANGPTMGTHPWTAARTKELGNAPVVAKQTGVRQRTDDPKLAGAQKQQYGPQRDSREGVAQAKPKASRGQEKDPVKGDQHAEKDPMREEEGYIMTQKANGPQGPSTH

SEQ ID NO: 1010002 - protein, 163 aa, Homo sapiens
MNTPSSTSKSAQRQGRRVGATRGTRAGSTSTGADKSQSTASKATRPQPTRQERRQSPRRMTQRRKHHQKARPREDKHRDRRERLGRKPPERRAGREKEGTTEAKQTENKTHTTPQQKARRSERNRTKENQQPRAQAREDTIDTARAERRRHRRGQATDKPRQE

SEQ ID NO: 1010003 - protein, 188 aa, Homo sapiens
SGGEACPRVEPPPPPPPPQLQPPRQGLSTLATSVDYQLTVSRYKQSVTARDSLHPVLGAQTLLTALHCWVTLTARCPVAGNVTSPMRAKRRWLALPGGPYLYSLWLHACSMQQLAYHVRCCTPETWRAFPFLTVSARAGVRRTGIGEPVDPSSGPPITRRHNIVGQRPGLPGCNSGRRNSPSCDFPLV

SEQ ID NO: 1010004 - protein, 260 aa, Homo sapiens
RPPWAVDPAFAERYAPDKTSTVLTRHSQPVTPTPLQSRSSIVQAAAGGVPGGGSNNGKTPVCHPVPSKVIRWLATWWRWCHAYQPEEFVCSQCGKVLEEGGFLEEKGAIFCPPCYDVRYAPSCAKCIRRTITARDHCTALNDDPVHVHMLYLCCLQDAHPEQGLLDGGGRARIASETMRTMFRPDNAMGCDFNDRSLVDRFLEALWLQTVHDTCFVCAIVSGSTWNGKTYSAPEKDRPSLQEPCLTLMCEPLLATDCLGG

SEQ ID NO: 1010005 - protein, 145 aa, Homo sapiens
RSGADAPVLAQSPASAGNGRPSTPRVPGSRRHPSAPREPLERSRPHPPGMAEAEEDGAVLILSEQMMSEEKKVLLKQIRRHKLQMCRAQWMFELAPGVNALAILRKSHLAEPATEASRPRGTTRQNTKQDKQEPGKRRKRLENSS

SEQ ID NO: 1010006 - protein, 137 aa, Homo sapiens
MMKNNKKNKNEKDKRETNSKRTTRKKKQKAVRGHPEIRGQDNEYENTSERHEQKEKHEAATSKNNTTTTPNMETKRHENTRRKTKSKAEQKKTPTNKEGKERRKKYIQSDGQDGIKDNHEDKTPEPDDDTTTHKDDT

SEQ ID NO: 1010007 - protein, 360 aa, Homo sapiens
SGRFLGPEENVGRSVVVNVASVSENLAPVFDYRYREKVPPELRHLTSTCYQPMFAHSVVRHHQRCCGRRCASGHGTIIVPRQDQTRAQRKLDQHLAVRVNLTCNWPWHMVVAHVLIAPALSQCNLNGRRHLVFVTRSTNIRIITSLGVESTGGLDVWRCKKTSQETAVQRFLPLTIPRGSTVLPLARHDIVQECTGNDTASGRLRSRTSETSCPAFRKKELKTMRGKALADAPFLPLDRAGEANVQAIDSRQLWEGTGSVESPRPKIRGRHIDLGSGASGGTSQGCFERPVFRLRSLPTGLQEAFAITGSTDPLTLGRVESVRLVPWQDAPIKADFKLPYQWAVKENAIYGQWGFEFRSK

SEQ ID NO: 1010008 - protein, 69 aa, Homo sapiens
  misc_feature (53)..(53): Xaa can be any naturally occurring amino acid
RVAGLQGAQESRRDCRAQGGCPRVGGGHERSPRYASLFAAYSVKCSPDPDKYXGVLCVPGSVYKKCPGM

SEQ ID NO: 1010009 - protein, 67 aa, Homo sapiens
SGEAFRQSQVSPKPLSLHIAQVPWKIHHELGPRLTPKLQSAQRGPRVIHGAVTLCARKRTSLYVERE

SEQ ID NO: 1010010 - protein, 314 aa, Homo sapiens
MDGRGVGSGRQVWPSESSGSRGIDTGLVWRRTQPLPRLSPIYRSALYPMGHSCVRPSLAKWRGPPIVAAPEPRAARNQGARWHRLWPAKAWQLPPQAHVPTAFQKHPEAVGSQRAQHSRTPRRCEQRYELPAYHIGVIPPIMRAPYHAVTPPTFCDRASRDGPRTSFPERRSPVHRTRTPPCSIRRSHCGHTPLAHTPLEHPQNTRAATHHSLGATTRSPNYYADAPPTPMTPPSLPTATTRGSTNPPRPLTKRAAITPQHHKSHPHHHLAYRHSDSCCFEPTHCDDIGLRDGDKNPSLPYRLSPLHHHDLAHL

SEQ ID NO: 1010011 - protein, 169 aa, Homo sapiens
  misc_feature (93)..(93): Xaa can be any naturally occurring amino acid
RALASAPAAGREDWCGLAMDGLQASAGPLRRGRSRRRAKPTATQRVGPGPAPWRSSEDTKKPAAEGVCNPRMCSRLRNARQPVAEQPREGHRXRVDVRKRPERTLGVEPAALTPVEGLARRCDRARFPGDGTRPGAEDAHYLGHTPVVCLVTHKVLALVKVPFGTTSHG

SEQ ID NO: 1010012 - protein, 106 aa, Homo sapiens
ASRAASHQNRKKAAGGTIEKDYTRLGNELHTNKRVAEESAIIPSETSVRNKIAGYVTHLMKLNFSRGPVRGISINAAGGGERTERQLCSMTVSACGSGRSVDTLDP

SEQ ID NO: 1010013 - protein, 127 aa, Homo sapiens
MVLGDIRNISCGLDVGQGCKGVGKGYNGSGSAKGGRVSNSVSRHNSTEHKRTEHTYSRRRRPRHARTTGRTGCIATGKRQRAHTLTGEDWDPRIAGTNIRTVNRAAKAGATTRTGTVAPTRAQNNAH

SEQ ID NO: 1010014 - protein, 260 aa, Homo sapiens
PTRQPDPYPGQALMERITGAVAIRCGGTFALGGINAMQLCATSVSERRPTIQGLSPGSTGIAATRILPSRRERRHDARSFMTVLTDFLATHQLLTILIVLASGALLGQIKFGPLRFGAAGALFMGLVVGALDPRFGQNLGMIKGLGVVLFCYTVGLAAGSTFLSDLKRQWGLMLAGVVGLAVMAAAGLGLGRLFGLTPAHVAGLYAGVLTSPAIDAASMATHGAADTLVGYALSYPVGVVVGLIMVAIIAKRCWAAHKDK

SEQ ID NO: 1010015 - protein, 262 aa, Homo sapiens
VRTSHTCISCCFTEVMCSQWAMIMWNEVRNDEGKVIRFHCKLCECSFNDPNAKEMHLKGRRHRLQYKQKSKSRFASRSNSLVFEQERFNEEKMRKQMQKEAVRGARREGKRQRSRRTGPLAARSTDTRTCTWQDDTGREEQHHWRLHRRRMPDGALSSWSSRPIRPSGSPTRHASLSLRGLHPYVVLTHLMTVMNDKNMPPFIQTEEELQAVQKIVLLLNVLYTLAFRTVRLNMRRTRTKKGDDHEQTRGNDRTPSKSEFCR

SEQ ID NO: 1010016 - protein, 245 aa, Homo sapiens
MSGAGHGVGGDLAVIPGEGGQEMCRDRGDEGEGRDGPIGPRATGTRAEVSPGGAISLHGTPWSSRGSPRHPCTAQTYPAHESCWAMASHARNGLHATWPMPMSIRRSTPPNFVRWHRPSQFRRSLLPGNARITGILPFNGGPRGWIQPEMIVRGCAAPACRKGQALTSIQASLLSSSCSDHQVRGHQACKARGAGWSLPGVRRTVQKTACKATWDMTPQAGQKSLLCSRASRRVRRLGPRLRRER

SEQ ID NO: 1010017 - protein, 74 aa, Homo sapiens
GSSSHSSGSICAKEETDEIKELNKKEAVGDLLDAFNGGEPWQYAEVERSSILQVSNPGPESEGSGVPPRPEERR

SEQ ID NO: 1010018 - protein, 280 aa, Homo sapiens
SGGRARRGARRFSAAACRRGAECCGREWRGGEMGCADCGTWVVWLRASSRAGLISCCGCAWCWVGCGPVATAEGLGTGSLGTPQVASDQVCGRTPSHGIEVEIDKRDSILVSARCRKVIMKSDDGRISGEKIGRIGRDWKLLEPIIINDNGSYLEKAMGDSRSLIGSSRMEGLCILLLAIHECRCHMLSSIGAHKGFGMPGEGNLKWSGLYFSEDSRCRVTAVWPEIIQRRGGCGHGKNVNRGPAIESEELQELERVGYKGGRQPVTMGGCGTSATGRMF

SEQ ID NO: 1010019 - protein, 104 aa, Homo sapiens
MVLRFIWRRWFSAWRINVDYRTYFEAYFAYSPSPKGAFMDTAITDETAKRLALSYPFDRALLAFGPEFDVADMEGRLLCCRSELRGVPYQSEVRSTRYLIIQSI

SEQ ID NO: 1010020 - protein, 216 aa, Homo sapiens
  misc_feature (189)..(189): Xaa can be any naturally occurring amino acid
  misc_feature (192)..(192): Xaa can be any naturally occurring amino acid
RGFRADQEIASILAWMTSGSVPSGPLKPESGPRKRSVRIREQVWAGRPADVDDRDVKTRGNRRIRNVLLHASPEEQVRQGVRLHRVAPDNLGSGVDTCEQVNEDVYHEIRAVVRALMRYTSMASLTYTALIEYEAAWSSQRSEYEAVIVCGSSRGMTRMAFRGTQQSRHGLEDLQTAESSKTRNIGRVXLKXPTGTPSVALQGASQGLGEHVGRFT

SEQ ID NO: 1010021 - protein, 174 aa, Homo sapiens
SGSPVSEWLPGLHGGIRLASVPGCLSSRRPETPPARSQGHASLARGARSRGGALRGRSLGSGNCGRVSGRDLDGPCVPSVPLHALGCTGRTLEACRPALSWACVIAPGYPCSSWRNPRCIRGLPGGKGLGFPCAQVGAGSRVLHGLSGKPPSGRGQVVRPPVEKVRPPTRTFVI

SEQ ID NO: 1010022 - protein, 218 aa, Homo sapiens
ERRQLRQPKGPGAKGRHGNPKRNRVWRDPRDEPVFVTAIRRSDPMRDIGKDALETARRSEILQSRKSQREEQTGSTHRNQRPKMKNENGRQRKQQTSRKTERQETQEWTQRERGQEDANGTAANGDKRRQEPRKQRCKISKAKRSRTENNHTTEPERARKEKTKRPRDRQREKEDNNNNEKEGKLARTKKRQIKTVPRASTEAPNTEVKRRKTQQHQP

SEQ ID NO: 1010023 - protein, 109 aa, Homo sapiens
SGATGPERLEFSRCPVRALPSGQFGLRSESGPEPRMMTDVSEALSDRLYLVINRERVKWALNLYHSSSFRQSKIMGLRTRQHATGARDTTVNKDMKKLYLLELTFIIRS

SEQ ID NO: 1010024 - protein, 104 aa, Homo sapiens
KPEVSGGLQFRLSRPSHTFACTTTGLEGPGSASRARDKREGKQRNTDRDHIRRKDSNSNERKYTRIPRTWLPTNKKRQAPKKPKNHKESKATQKTHKTHHRRRQ

SEQ ID NO: 1010025 - protein, 102 aa, Homo sapiens
MIEHESYLVAYTRVGIDKQFVEKAGILRGTASERAHLVRGTLADSQLSCGRRHSLVWRYQRVGSKPVWLPKIFAMPLHNRYLGNAKAWKEQRWLKFEGGPQY

SEQ ID NO: 1010026 - protein, 67 aa, Homo sapiens
GDRASSVAQAGVQGCGSVMKLRSGSAILLGSQLVGYRLLPPRGLIFGIWGGTGSHRVGQDGLDLLTS

SEQ ID NO: 1010027 - protein, 158 aa, Homo sapiens
MGRYLAIAWKQIAPSVTSKWVHRGAIEALDRQVAQDGLNKAQLMRDFCRRWRLADWAGEQSIVRSGPVTNAVEIVPITDRHQSLDNGSIASLTIVSNARLEDTPFSATPLTRHVRQATNSTRRIVLYNTSIVWHWHWHWTPRSPTGSNMTADVGHAIL

SEQ ID NO: 1010028 - protein, 249 aa, Homo sapiens
MDDSCIKEADMLKDRNFVAVMPESCIYIMTRPNEHFPPWVGEDSRLMTQCGVTYIKNDVGRYPNPVEVVGTVINKTAKHVYSKRNAHSYISLHSTQTGTIYHTIITTQHPALSAFTNPAGIDYYQSSQKTTHDVSSHGEPLRSRTADATNTGSETTVGPFENDKSNFSATRTHGEEVQLTNKHSVSGKANNPQTPHKKAQRNTPHPHQETQRSHSAVTTGGKTKEPAQTHTLTHDTGDRTPATQSQPPH

SEQ ID NO: 1010029 - protein, 336 aa, Homo sapiens
  misc_feature (152)..(152): Xaa can be any naturally occurring amino acid
SGGSAAAQGPRRQGRRGTPNATGSGGIPAPSQPAVTCLRCLPLRGLCMAPWRARTCALARRLPCGPTRELAGPSPASAIATSLSGLRGAEAASPVRAYALPLASARLLPLARLLFASALPGLVPACLCARRDVLPRWLIPYGGVGPFASWPXQGSKLPGSSSGRGNSEAPSFGLPRSVAFCLRALRCPCYSPWVASSPRKFGPRVAPRQLYGALSPGACCLVPGLLPLVCANAPVSGRCCALWLCVLGYLALGSALFFRLRLAHYPGVLARLLFVWLLPLGCPPAVRAVDAPIFFPSIWRFCARSNRPVFNPVGPLSQLMPGCRRMCSSTPDGRGS

SEQ ID NO: 1010030 - protein, 39 aa, Homo sapiens
  misc_feature (24)..(24): Xaa can be any naturally occurring amino acid
AELGAKQEAFPYPHTSPSPRHQSXRVLAVVVLVPGGGVF

SEQ ID NO: 1010031 - protein, 235 aa, Homo sapiens
RHVYKDLRQIELACDPWKTWTAGRPRSSESLRLPREGPGRKLRMGPRRTSFSMDPQLERQVESIRNLVDSYLAHHHTSPSVDLMPKTIMRLDDQQYEGLHPPSELRGLPIAPRKTESSLMEESADQAQRRDDMLRMYHALKEALNESSVTSGSQLTVSTPVAPPVDDTWVQSGQEAQSQSRDAGGGVQAIATTTVCRVPEGRRWGANVHEVHSMIALASRCRARVPQTRTHTNTH

SEQ ID NO: 1010032 - protein, 78 aa, Homo sapiens
MIVYTTLTTLPPQQISGQAQTRTVIHVNATIHKIKPLTLRLYYISPIKISLNLYTITQYSMTLTHSTDIVLSQTQIIS

SEQ ID NO: 1010033 - protein, 135 aa, Homo sapiens
MMRKTSDVHYIEDLTVGSHANVAIPSSYACPRAMPRPCCRTVDDRLMFEDETQKIWLLGELVSYGLHLVNRSIYHGQLSASKVALALPLGIPKKHSAAHYVLVLSKGGDCAGNIQALQTASQLSQQADLRSIVEE

SEQ ID NO: 1010034 - protein, 135 aa, Homo sapiens
MVPAYSQEPLICSDYINMMVSGGTEVTIGAKHAGLRRSPLNDPFLKAWLREYPECEGVNKRDLARWPIMSEWMRKRPLEWQDYVFTTEGSEVTDSEKNDVLPGWGLTNRPKSSAKVLLSPRWNAVGQISGLCNLH

SEQ ID NO: 1010035 - protein, 210 aa, Homo sapiens
RAGRTREERGAAVLSWLRVPASARPARLLRCERPYVQLAAALGGEKRWGTWGACVPAWASQAPEAPSERELSPACLTWSMAKLECSRLPLVRLPSPSPRFRVPLEEPPLSPDVEEELTMTWAMTLGLLSMASGDLDQQASRPGYTRDKPMPAKHTVGSGEALRFSTGQLQFAIENPTQILQFVRERPCTTQTATDAYSTAECQHRDILNP

SEQ ID NO: 1010036 - protein, 69 aa, Homo sapiens
RDRDRIAGQVAAAIQEALEQTMLVLVNSLIRESWIWVVFFFEVSCVCLARLECGGAISAHVQSPPSGFE

SEQ ID NO: 1010037 - protein, 69 aa, Homo sapiens
RNGKIPCELLEKIAPSVTSYIEYIERDMRPWITRSVKRSELKRSYMRDFVADGGSLIGLVKKHSEIWAR

SEQ ID NO: 1010038 - protein, 71 aa, Homo sapiens
SGGDIQRHQPRSSLTELPEFPSPSRNPNTKEIDCHGPQGALGTQCCRYIEVCGRINSHDPGGLPRRGRNTS

SEQ ID NO: 1010039 - protein, 130 aa, Homo sapiens
MLCEAVKRPIRAFDDPGKRRGELLNCYRLTHRLDWKGREPIAQTLDPCGCLVPTGGLCLCPGRKGKLAAAPFPALLLLLAAPWLFRETWWAQAVRRADLGALAAHAEKTTKGLRAFGLTHKEDVSWGVRA

SEQ ID NO: 1010040 - protein, 154 aa, Homo sapiens
GFVEKRPAPWRRRPMLVSVRALVRMVKLFIVKSAPEATEQEIRSLFEQYGKVLELDIIQNYGFVAHIMTETAAEDAILQADAITMLHGVNINVEATHEKSKIVCESCMLGNIESHLQPMKELRAKFEEYGPVIECDIVHRIMPSYTWSGAEDAV

SEQ ID NO: 1010041 - protein, 131 aa, Homo sapiens
ADKRLARWKMILPADQSVHTLTMVISDALVLSGWCSSWLSSAIQVIVCNVTTVLSQLPDVPKQPLEVCSQSGVPMNALSSVTEKLRVTTMYNRRVGHFEALRNFYDRQQTRVEATMSLTYYCCETRTWCNL

SEQ ID NO: 1010042 - protein, 141 aa, Homo sapiens
MYAHATGYKRNYGPKIAARLVAPNCRAFSRSFPQYYAQERLPIVHRLKRNFFHHPVRDLLGRHPFSPPRFVGYRAKNGATAFLRGLPTPRKTPLTRLVAEPSPASFVVKEAFTPFKAMGFKPELRKQSAVCPVVSREFWWE

SEQ ID NO: 1010043 - protein, 122 aa, Homo sapiens
MSVPGENSSTKPSQSYVVKTLSGAEGTMLDDDFLEMEEDNGMLPIKLCGKFFQKGTEVSSAKSRAKLGMLNIVSKILRAGEGPQDTRMTGRLAGGLYAEIRAGELGEDSTFGNALIEAGESM

SEQ ID NO: 1010044 - protein, 316 aa, Homo sapiens
RRTTIAGGGGTPNEAGLRASPSSPLALRTPIAGRGGTPHEAATESQPSSPSGSYDHHRTGARARAHPPLTAPPCHPAPLPPSWPLYAHPPIARPRHAAAGPPPPSAPAPHPARPFLPPPRPSFPPPPSSRPATAHPPYRRARAPRPPPTRPTPPQPPLSLPYATTPTPPPGGNSSTPPVTPTTPDSAPGHAPPPPPPTRALHAKHPTPPPAPAHDNPPNPRPPAPPHPHAPPPPPPGPPHTAPLNSHAPPNRTTPPANDRPPQPTTQHTPRPPHTPPTPTQPQRDPLTAAPPPPPTTTPPTPPPHHGPTTTPSQHR

SEQ ID NO: 1010045 - protein, 329 aa, Homo sapiens
QIPGWQELQEEAARLEEPFPGLSYSEVNDEMTALAEDQLLSSYLRYQEQTGGSPAMNHQYPDGALSVLGPVRRKPSGEDQSVAFMKLQWSCILPAVILGVTRTDIWHLVSLPGDGPLFRTGQWYTESRSGMFIRAPEEDYTTGRSLKESMRAEVAGPRKEPCVDPVECCEDPLVLDLDHYCLSLVRLLTGDNGNGARLITEQGAGNSRETKAVWSKAYIRVTQVPKGEDPSSMRREFPQEYQAHPVGANGEHAESRPQGSRRYGQTARHGAPRIISPMQSVFPEAGEATGSERIDPRHVNAPACTWATPPEGMGHPGLEVKSTTRGGER

SEQ ID NO: 1010046 - protein, 303 aa, Homo sapiens
SGVAGCGADAEPGAAGARMVMAYFVENPGGNTNSGFDVLYHNMKPLDRYQPKELSRFCKGTSYHSRRHTPVSMTKTSKHLQGKLIHQLGEPFLQPVMGTVFQQPFNRGPLRNIGHLGSCSDQFTKTSLNRTVQESNARRNQVHRLINTTRRRTFARNSGTLSKAIQKHNLRPLPETSTAHTYQWPKVVEATMEAVLNKRDRQLYDKRTQLTTNTRAGRFNSFVTGKMAHQELALIKARSLIGWAHNITFAISRHNRRGTFADDQAQHLAPGKHQGLQQSLLPTELFGTDTLPAPSMSTFNARH

SEQ ID NO: 1010047 - protein, 90 aa, Homo sapiens
RGLGAETDLAVEIAVARLQLNGPVKPGKLYSKSHTEGSCAHSRNTIERGYSHASMKVCRVTPKRATRGRVAVTWRSMQRLVVEPYGREAA

SEQ ID NO: 1010048 - protein, 164 aa, Homo sapiens
MECMGGKVNLDTEGGTDIFKGCSRIKSTDGQVVCKIPRRDSWAPEAAYWDVVQWLDEWEYKFGRNKSLRRTYLVRVAFGTRGLAGVRNASLLHSQTQCSRLGSLNACGNGCKFTQTSNTHGSGAFDLGVVGGLVEFSRGSLSRERIDLGVQWVPYTARGTLRRR

SEQ ID NO: 1010049 - protein, 113 aa, Homo sapiens
TTYASRKPLTSGPRRTSWGAGGEGVMEAKPEAYLEILPWGSQDPLSTPLTWNELGTRASTVVAMPDVVRWPLWPHSSLHVHGRRVGFRGLGDWCSWVEHSEGPSSALAAPGRD

SEQ ID NO: 1010050 - protein, 42 aa, Homo sapiens
  misc_feature (42)..(42): Xaa can be any naturally occurring amino acid
MVGQFGRTLNVFATHTLEAPFEKFRGTTYVVGELTLRIFWDX

SEQ ID NO: 1010051 - protein, 109 aa, Homo sapiens
  misc_feature (50)..(50): Xaa can be any naturally occurring amino acid
MRSKTCSRSSSSACPLRQAELHAPRGSSPGSVPVSLSMLSRARTGRVLGXLYSCETFYCKDHSFCYMDGLPWARRGPTLSAASLMLVTLFKSKRTLYCRNLKGAKKAYK

SEQ ID NO: 1010052 - protein, 187 aa, Homo sapiens
MPSFLVLGRPRRAEPDGVPRGPPRKPHFRVARRRRDFGHRFLPSELVITKTDASSTRGKTTACDRERHDPHPGADSERPAAHDPETHTPAALGPSDACHYSQTADRSSTRLHTTNANATHPAKREEPGTRPKEASTHSMGRQAQQMNWPYQRYTGKHRDSRDDNHKGTWKWMVGRQTERGEKNTKGK

SEQ ID NO: 1010053 - protein, 268 aa, Homo sapiens
RGRCLPCSLPSRDRAAPSLSGLRALFSAARALASLASRRACPTPALASSSASLACLPHALRRALPPMVSRPEPEGEAMDAELAVAPPGCSHLGTLQGGQLEAETCWAIYQCFVWSGTAEARKRKANVLYLPCLWRPPQPGCIPALYCVSYRAVSTTERIFTEHAEGERGHNLAHRLLDCTASASNRNTRAHGPPSTDQTTCHNNRPKHRPSEQPRHTQPTRTNATTKPQQTLRDTRPTTERAPATRQQRHKHPETRQQHAPPSQRRTQ

SEQ ID NO: 1010054 - protein, 71 aa, Homo sapiens
RFVEYVVDRSVEHDKASKDAKYELVKALANSRDNCRNLWEPKLLEASDTYLSEGPYVCETLFPRLAVEGAE

SEQ ID NO: 1010055 - protein, 171 aa, Homo sapiens
SGAGLGERTEVARWAAEGRGSWREGGPSQVQPRRPRHAASRDFPAALPSTGMLSAHRLTRKPPSCQAAETCRWDNMTGHVHRSERSAAQREKGSTAMHQLERWCTGISRQRPSTTESGVPQEQRRKGRYQTEPRPDGQQNNGDHQDQGQIAVQAPHEGDRQHRAGKPGRRR

SEQ ID NO: 1010056 - protein, 120 aa, Homo sapiens
MRANTSVDSASSTNRAVSVLIASRAAGNAPRARTRAKSEMHIAHEYPKRFSWHTVKFGAPDIDSSPSKWDWWTKRNTVRDVVREYVTVEGANHVDYQQCRTRDLPVLRDHLEYTFTCEER

SEQ ID NO: 1010057 - protein, 217 aa, Homo sapiens
MIFPPDPLCLSSCLPSSCMSKDQDEHEELDFLFDEEMEHAGWAEEHLQLPGPDEESDYEIDDRDVNKILIVTQTATLHVAWARQGGTCYRQPQPRRAKYERRTGHRLDYMMASFYYEHGPVELKQFETCSIPMIKLNEVVELHDHGQSDQPGARFDALTPEPPVDPNQEDSYLGHLGSSIVPTDALDNKLYGAPEPSTIARSLPTTVPESPNYRTPG

SEQ ID NO: 1010058 - protein, 108 aa, Homo sapiens
ARVNADLAASWMPNEIAGRLRLEAADPTVERMANSPDAQGREPPPFIRSGRSVSRRFPFDGCTAERTRLGLGAERGVPAVVVVLVLPVADDDLCVQQRVEAVDVEALV

SEQ ID NO: 1010059 - protein, 210 aa, Homo sapiens
MDTQPAEEEMKLPNAAEHQKEQTPIHAAFKNCKHPGGSGGFMKSQRPWNPPIPDTICTHCTPSLGDRVKPCLRNLASIDDQLWLFQSHSQALKDPCSSLDCLVPAARFHAWEGEYRVSEQFISYWNSSNALRDYKKVNENNEFRHSVGKSDSEQVMEVGLDLVNISLRYSSEMQLRAKGGQQSGNARHGESTFGHHGKTKLTSVWQETQI

SEQ ID NO: 1010060 - protein, 142 aa, Homo sapiens
  misc_feature (142)..(142): Xaa can be any naturally occurring amino acid
MSDRDQKFVTISEVSLSAPDWELTIDFASSCTYRCYRPRDWTWKQSLDFEGLRDDMCNSLDLGVATFSPGRPFVGQTANNGRGPLTALGDKGAICHTALRGVRIGQRFTLIEAFKRHTFADLRAKKARNPHAGKKGAKRPMX

SEQ ID NO: 1010061 - protein, 142 aa, Homo sapiens
MASRVVADVQLLLEENSLSSEQRLSVLWRTNDLMTELAEGFASSVDDDSEKESSDNDVGSYGKIKPGEVHELSCANVYGPFEVSNSDKEYQCRRQLVDTLWDKDAFLIRTKREFQVLGLKKVMGELPPSLPVGSAFRWLIVC

SEQ ID NO: 1010062 - protein, 105 aa, Homo sapiens
MHYSPEIAFIPAYFIKSPTFTRDVHIMAESVLLTFTANVLPLSILDLPLPYIIWARSYITGSFLYFSETWKPSAIHPSLLDEPDQPYSRVSQGVVSFPLRPRYRF

SEQ ID NO: 1010063 - protein, 185 aa, Homo sapiens
MVAVPRETVTRKLRRQEHADAAFTHGQTSIRDTALDKHTGTHQYINDQWACVGGATERDPYTKLFKASPYEPTSSRTGNGGIQDTSDEHKDRPHNPTKLRGEENELEPKHTMPEHSGVQQGPTESVSFMHSPPGTCNPGGKRPETIRESSEEERPIVNLGAEKLEERYYALKSMTEGGAAAVHET

SEQ ID NO: 1010064 - protein, 132 aa, Homo sapiens
RGRDRTSGWSVGLRGSGLSWLARQGQGNRVAGRYGPGNAASVEKRACEILSESRTTEEPGPDCSRSWSASSLSCQHQIEMVCHLLRMWRVLCYSWNWICLCAILCAGLYNAFSAGVLYASAILLACSQYMLL

SEQ ID NO: 1010065 - protein, 305 aa, Homo sapiens
  misc_feature (53)..(53): Xaa can be any naturally occurring amino acid
  misc_feature (297)..(297): Xaa can be any naturally occurring amino acid
MCLRNTCGVVRPDSTLVVTPGNFHHIKRGYSPQSKNIYGHMGVLSTDVCICVXRTLYLNCQFYYRHILRDSMAVPEYTIFYIRWGDKCKAVLVYYSPFISSCVAQSPNYTPRNEDILPAMCNNKQHQQHNEGGGDAAHIDKKSITPTQERGRPTKVLYTARSNPRKYISKRCGPHKTRVGAPPETNKRDKPNEYITTQDRSNEAPQCDATRCEVLNTNTRGYNWDEHVWVQQQHTRRNTTDRGEQPSCGGTENEENHPRNTYTVRGDEVSVNTQQTGGTTTQQPPTDSREKDSNRQXCQQAGRPP

SEQ ID NO: 1010066 - protein, 73 aa, Homo sapiens
RRGPARCALTHAHGLACALTRPLAARAGEEHGEKEEEESQDEHQKKNTSDEDEHSILTKAKEKHKRKREKSNT

SEQ ID NO: 1010067 - protein, 123 aa, Homo sapiens
  misc_feature (7)..(7): Xaa can be any naturally occurring amino acid
  misc_feature (106)..(106): Xaa can be any naturally occurring amino acid
MVRAIHXMWDICKTLKGNVSSKGILDNRFNAFSRKGLGYEYVFHFERIKFHCLRKIKRPSNLGWNFPLYPLKCISDHLVLVVRSRNRQKPFFPERKYLRGYGEAIXYRIPGLNGFPDEAPFPN

SEQ ID NO: 1010068 - protein, 76 aa, Homo sapiens
SGIEMQHRDTAMIIAVKRFIRGLAALRMTEAAASDSRLTRKRSSLPDRKTKIYTSDRTLSYHSYVVKTNKHDCFLL

SEQ ID NO: 1010069 - protein, 142 aa, Homo sapiens
MGRGAIRNPSPFSTLSVARRGHRVCLPGGNTLKGGGHTYVVCGAPFVVAHKKQQGGKKFCAARAIEGDTNVAAFPWPVKVCAPSRVPSRNAHSLHIPWPVPEAAPCGPHAVGLLVRRRQIVGPPGDDGRWEGNSPWLGGANT

SEQ ID NO: 1010070 - protein, 70 aa, Homo sapiens
YIIAGGLCGFGLVLAAVADTCVGVQKLVLTSRSGIRTGYQANAVSAVCDVQAMWLYTCACVSTKQHSAHM

SEQ ID NO: 1010071 - protein, 444 aa, Homo sapiens
ERRWALSANERRPHAAGGGETWEAAGLINAIEQPPAGACPRRHLLFLLPQFPPPACRACGAEGPGLSAPATPAPTWLRLPSCCCSGPSVGLACVCPTPSCALWRVAFLICLNDELVDGGPPGGPQGNLHHITGQGPGMKGAEEEGPQSRFMGRTGRTWKRMRIPGRPHEKPRAPSDETALGGTRQPERGSRRIIGIQWEAAERGERPGPERRMPHYTRPAHRGLERRREQRRVHRHNRKRETAHGGRKKGPTTTRPAPLVGRTYTTVVICDKQNKAPTTRATWNRCRRKVYAEKSSQKRTSGTLADEEDTDWGKVDQNMGTAVPRGGTPPIDEKKAQRGVEDKHRGRRHDQHQQGNTWVEDNRQSAMPWGGPNIFQGQLLTNTERARNPGDGLVKAHCGGKPTGVPQAKNGLIKLGRHNTWGWEHPPSRNVIHPRVWPPKKQTT

SEQ ID NO: 1010072 - protein, 348 aa, Homo sapiens
AGCVRRGAAAQAATGSADNAAAANPPPGRLRPSRPCFLGPPPPVAVVRRSFHHRTPRGRPGPVPVAPMPFPELHPIVIHQHSAFSGHWASRRARHSAMGTLRSHVPGGGKTVSIRRLHDKRPASSIPTNEHDMPAALTTRRANGSTGLHIHYTSGAQFPVPVTPYTMVFTRFGVNSRPLAPLPGARTGDDATSVPTYTKAQSNWAQDPGTAAAETGKTGAGKDKRRPQPTKKTPADEHKPEWAKRYRDRAQECDAHNHLCSKGAQTETNSQRPQRNMGSGIYRALRQSGNSDCDQDTRYQGLDDGNQTQGALEPVLGDTTAMQKDELAHPRNGFTAAHWPRQARFERH

SEQ ID NO: 1010073 - protein, 33 aa, Homo sapiens
MFPLKIALWGEQKYYCWRIVWRGPCVRCEKEKY

SEQ ID NO: 1010074 - protein, 102 aa, Homo sapiens
MPQGSPTREKSLVAITGPPSRIGAGAPTGAWPSNRRPGGRQLSNKFLVVTTTGARRPNIGRQGLVATKAAGNTRRGPSGYKAPPQRVGENAEAPTERARYPT

SEQ ID NO: 1010075 - protein, 306 aa, Homo sapiens
RLFPFAAASRRHEYAQASEEGYASSVLPLWHEEGLGETPNETKKKSLNARLAVSQIRKSHHEMELIIRKPVTVHSRARCRKNMLGSACDMGMVIMGIGKRKGISAKCPECPEKGHMDLRRIDVISAVRLAQEDTVNLTKIDRHHVVTGLYLKVELGDMCSKNKRILMEHIHKLKDMTMPCNEVSWLTRLRSRRSKTKEVTQVAVKSASRSRRRMTHQDFIRGGKTIKNYSLHFCLFILSFCDYVDEALNENKLNLGMQRCCVFHAWIAGKGAYMLQGGPRFNLVCLKGGQFQLGTHGKRFRFPWYR

SEQ ID NO: 1010076 - protein, 342 aa, Homo sapiens
  misc_feature (115)..(115): Xaa can be any naturally occurring amino acid
RACVWEGGKMAAVDGRRGWWEMGRDISLTALTSATRSPYINPSIRGLLGQAGGSVQPSDHTGPSKWEDKSDVEVNLIRVIQSLDFISKGPLGFHTLSLRIRGLMPLEHIHGNYEXPTFTLGRTYWHSLPNFPRTTPVSLRSYRGTYRRDALSFPVRIVKSMWCYVYSDYDGKVNLGQIGGKIKATERLIGHRDPVQIREYLETRLLDTGHDVPIGEKITRANDATRKPYFSPPQMVLRVRKISTGTEQRANRGKRLDNHLFLPGKLAIQFEGGGSPYGEAEKMSDQNQGWAYTEPPGVHSWTAPETVNDRKLRPPRVRYHHTLGAQLPFEMQPISPENESRA

SEQ ID NO: 1010077 - protein, 119 aa, Homo sapiens
RVGARALALTVPLRSPVGLLAAAGGEERAPCPSCARWTPGQPPSCARRDASSLRPETFCQLDGPIGLICRRRARLEPTHYPHDRAFHSSAQKTEGLGTRGMEGTSGSLGFNFIASPDGQ

SEQ ID NO: 1010078 - protein, 130 aa, Homo sapiens
AGGRCGTPAPSRHRFCGQTALWRAVCLACGLVSAVLGRRRCMGGHAGSIYARFGNRGPGMCDHWPAHPVSLVLSPGTLWCYDVSLGPGRKRERCATWRGLRTEAAGRLRCVRTPGNALLPPCHRPSVTSR

SEQ ID NO: 1010079 - protein, 204 aa, Homo sapiens
RRVRRERRTYTEPTRGFPRSRQLPGPKIPIDLTPGAMPRVQRVSWLTLRSIPQQYICSFCPELDRQTHFQWTPCPRGGSDVVYLVGHGDPRSMQGAPNRQRESEATAPTTTLCLTHPDINPADMDEEEDPLQRDYKWIQTLRQDTTDQKLGSRQSATGEKSGIKPPRGVTALQAILSRRILEMHGWIQNRRVRVFPGHYKRSGT

SEQ ID NO: 1010080 - protein, 242 aa, Homo sapiens
  misc_feature (31)..(31): Xaa can be any naturally occurring amino acid
MGFHHVGQAGLNSCPCDLLVLASQSAGVSGXGYFWCVLRLTDFKNEATDPRVPGQISEVEQEKSSLLHLLQGGIKVPKRILRRLMENAPDPPYCRGEVPGKGVKKYRIWVMPPPRPAPDRAQLLAQVPRRHRSPQRLLPRGLQSHFGLAPRAHSLSSVSPAGRTGRRSANRNLSGKPRQRLSSGYGGAGRARSKPLLSASGHRPSGPSSVPRMLGRRLQWDLHLLLQAEAEEPVRPPIQAAH

SEQ ID NO: 1010081 - protein, 84 aa, Homo sapiens
SGIRELAGSTLIELQRVKVSQHGLECAVTRSGFRSQDLLRNVGDGLNWLTGVCTIEMKAWTYCRRKLLPGDASGMWPESVIRAS

SEQ ID NO: 1010082 - protein, 237 aa, Homo sapiens
MANSLGDLRSLLTVDINLGPSIAHWKLPFTGIRRKPYGQPTSTVLRTKHKGPPGDATWALGPSKGQEKTRLAVVTKRLCRLNKVYNVRTGWLAHPGERWESPESRLQFEEGHNGVGATRQHNFALHQYMTGLTEGNERDKTQSGEYQHFTRPVKRSPWGTPMHRGQRHWWGLDRWIRKRFSNGQEEGHYRVDVMATCPGEWESAKPWERGQGVAVVEDCRVGTAVAKRRHDKPAHVK

SEQ ID NO: 1010083 - protein, 140 aa, Homo sapiens
RVEGPATARRVSRPSRARYSPGDRPSARLAADGSAGWVRVDPGVSSRRGWGAARLWCATVLPTSRTVALGCCVNFALPLCSSVWFAFECSRVTDAQVISPLRERQRQRIHSYQRRDVCSTSATPRPESATIAETTAGAET

SEQ ID NO: 1010084 - protein, 262 aa, Homo sapiens
VQRVAGVMSSSKVTTGPEADLRGAKCMDTVSVQQQRTSFTNQSRSRPTVTNSNDHPSWLWIATVVRPPELSAPDQSHTISGRMLLYSMHISRPTLVYPGSSICSESVFSVLPRSRDVHNKNRDSISPCIRERRKQQFQYNGSENSIVQYWARQWSAAHSSDRILATKTSSFRRPQLDLCHNTTSVRTSTIVTMTVPSHSSHATACDHLKYPSRCDLQWSDGHSCYHLRKTSPAASQGAGWGIKVAKVVPSRSRTFFSDPAEY

SEQ ID NO: 1010085 - protein, 154 aa, Homo sapiens
  misc_feature (37)..(37): Xaa can be any naturally occurring amino acid
  misc_feature (46)..(46): Xaa can be any naturally occurring amino acid
MKRVEDSRGSALCLLLETSQASDRCYGQRRLLYPVKXLILGPVHMXPPCDGDPTEALCAKHTVGPAGDWLGTHLESPIVDRKGCGGGVSRGLVTTLREGTRSWGQRLVEMQAGEMHVGLEVRVRGKQSGETPVSKNSVETPQCHLPRLILTPEA

SEQ ID NO: 1010086 - protein, 257 aa, Homo sapiens
MFSGLDQKFLAGPVATSRLVSSFPSGSEEAISRHIRTASLCHGHPTSFNSEDGAQAPVSLDNVGGGDGAHWRVARPETSAPGASASGHRAPSRAEPKAQAVSVRHSMSPHDAEVDVRQAVTVTLLSPPDGRSRSTRRTAEPFFVDQNRRTITWNGPERCPLMAPKGDSILCQWPFPGELKAAACYGRHPVYPLGLNQCYIAPFLVLPMTAAEEAAQCATLFPGFIPKPGDCIRFRKCPAGNSGSLRKSQSTPAGGFH

SEQ ID NO: 1010087 - protein, 324 aa, Homo sapiens
MPQDISDSSASLQRASVEEEVPDGAVKTFTHSSSSHSQELLAKAKYAATTDSDIPADTHYFVSRTKQSSGPHKVRNYEACSDFLSHQTCQAKPPGLDAPTELLLRHTPALTAYPLTPAPQLPSITGKLTASDTRPPSYHTLNTPATTNYVDVTPSPRQRPRHQKLPRRGPPPVRPRNALPSTTFDRNHSRTISLDNVDHPQNGPNRTPHRRSHDTALGHTHHPPITKTLGTHSTDEDPTEYGEGLSTTTQASTHTDLTHGTEQETQQHQPTRGTPTRTTYTPEPTSRHAKAAHTHAHPPHRQNTRTTTTPRRHHTTRPPTEHHT

SEQ ID NO: 1010088 - protein, 351 aa, Homo sapiens
AGWGVGGGGVGADHKDSAECCCPGAGWLRPHWSHSLAAAVAIASLPGSGIRHRGSQLHELCFIRGLCRRAPVWDSANLATILRTREKLAVVAVAPPKASQCSHHHPNRTEQPIVSGSGGIVVALLTAQLNGSRKRKRSKTLAHRGNGNAQGAQRGAPGWTTYFTVLVSPQGPFPKGERTLLWAVDRTTAGTLRSNRCAVKRAATISLQGLESGGANALEDLCHDNIIVPKTVCSLPSRYKFLPTLNTSGIHTTQVPSPLRPLMRKKAVLPPEDGDNPQREGKTPLTALRRARLSKEWLPTNDPLERSPQGRDSNLGAATEAEPDINGQPDKRAICTAGRHPPAQNNPRARP

SEQ ID NO: 1010089 - protein, 122 aa, Homo sapiens
SVGGRGRRAYAYEKNDTACTYLSSNKMTPDDNPDVLDFEEIESVHTAVVAVEPEPSMITKGMRIPAALAAHECSYTHSSETDMRHYLDGVLDTPKMILVMPDVDSYWVQRTPRGQQQSDDRP

SEQ ID NO: 1010090 - protein, 366 aa, Homo sapiens
SGRGGAPGRLTEGNPRPLQAGLCQRWRRGCSDVIPPNSQLRRERAAAGRCAQSPSEGPEKGEGKRSRLETRPFCLSFFLVSLFHPSSQAPVPSALSPSSILFSPSISLAPFRESFLPFPPFTYLPISFTMLTIPFNPRTIPSRYRQMAPFNPSGNKKWRGTHRARTRWARTLTPPFVCGTDLPGVDSSASCRTHRRRYPTAKQAYGHRVEAPPPNFTPLAHRVNQLFAPKETHPQGDATIRRVVTTASSMPSPLRSTFAVPQLVGSYGNHPVVCSFITPHTGSGSTGPKHWAELHRGLVHHDDGYRASLEITHRRCSWTPPFLTMTIGTIVVDRQLFSKTLCSSLQPRPHMLPSVLATTETDAIPA

SEQ ID NO: 1010091 - protein, 108 aa, Homo sapiens
MELFSSALSCSGKVWKRPTKVSDVSVVTPPELETKMNHNQKVVWCRTQHNSNPSCMDAIKRKLHERVGVAMGHSARLYQEPNRETQSTNSRVCEGTHRMSIIQDVRRT

SEQ ID NO: 1010092 - protein, 252 aa, Homo sapiens
SGVRGRPGPWRHSCFVFLLLGGSVLCLRLLPPARSSGPDNRWLEYSVGARLPARRYLLYYVNPAVKASMLLQGCLYPNRPLSVKTLLKTEEWVLVHASSGVRLVPLAVVLTSPSRSGFPGLSFNDLPSSHSKNIPVIEYEQFIAESGGPFIDQDLRPAKLRMRGGNEGTWEEKVDERPCIDQLLYSQDKHEYYRGWLGWYEETRGLNVLLSCPSRAQTSIVAPLGAEKHISRVLIVRQSRRTYVHDHYGGKR

SEQ ID NO: 1010093 - protein, 82 aa, Homo sapiens
AENVFVLQCPALVCVMSRLRYLGPDGPSLCGKYCGYYVKEAQTLEWVKEPLELTSNPLGPLIPGLPSPPIAHGNLPMRLFSQ

SEQ ID NO: 1010094 - protein, 282 aa, Homo sapiens
MLLNVDKWLEKNFPNEFAKITCSKPFAPNNDAGQLSEGPGKQAGGTETRDAQQKQDRPSVRTAAYTHYTPHITQQRPVPTKTRVYLNKAKTFPPRSQTETNISRCKPRRTWWGAFGTVFRDQLGPPFTAAQGIKRNYCGAPTHNYFPWLGGSFPGKHQGRDVVHLTTILTSILQVGRDFIETQGTLDAITLSGHWSQLATGGNTEWVPKPGGTEVGRLDHSVLFERRNLLWGRGEFNKEEVEPLWDNNMWCVDDYTCGALRHWRKDWTSVGAKVVTVKQGYL

SEQ ID NO: 1010095 - protein, 99 aa, Homo sapiens
RIQFLSPAGSGPDQAPGLSPRPQVSATAPSPGPGTRVRPLSVRALAPTPTPVPQISFSGVPRRPVPNEAPVLGPSSAGLRTYSLDVDAASCCSCCFFRI

SEQ ID NO: 1010096 - protein, 104 aa, Homo sapiens
SGLSWSAGYDAISGGQDAPDIAFGGSCGVELLSVYLDVDDSRSSMLVGGGRCDGRESAAWLSWLRMGLRGCPDAGGFAVDGPWLGLVWAPKKIVGMVTQGCGGE

SEQ ID NO: 1010097 - protein, 174 aa, Homo sapiens
MLGAACSAAPPWMTGAVGGQRGEGVRGDSTWRPRGPVYKGLGELQSFAAAEPLSRRSGATGVPPTCTRSRGGLLSKRLTEKKRARMVSRECQEYVTLVLRRVRLNDARSAEERRVAVMRRSEQCVWEHERAQNVTEGDMTLSIASDGSKRQDMREVYKQRCVNSFLCDVLALRA

SEQ ID NO: 1010098 - protein, 307 aa, Homo sapiens
MDGRKRCAARTADDNVGQTGAQVVRRGSQAGLATVGCRQPCWVSQPVPVGERAGRVRVGVGQGRAIIAPHSHLTLSPGNTIQNTTSNAPCVCGCCARQLNPSSHVLHASHYERHRPQNLLRDTQGARELPCPSGGTARLGIAEKPTHHIFPKSKPMCDILQTDTDQQPPNVNTYQTVCLGNGEGTTAERIAWKRECLGRSRTRTNRKAPRRRRNAGKHTQVKSRATAPAGHAHSKRGVPMEDTRHDLTRENAHTHHTPEQANEETRTAAPHHRARSTRRHTSTTQDQAHPTRGPIPSYSDHAVAPQN

SEQ ID NO: 1010099 - protein, 67 aa, Homo sapiens
RGPAVPCSIVPSHRADEWPPSSDLWDLDAALIQMIQNDIRDAIDIHQQDVCNGIIIKIKNHRTIYIP

SEQ ID NO: 1010100 - protein, 234 aa, Homo sapiens
SGVDFLFPGRAGSRHRGARCCFGGPGGGPGCRGPRCGLASGRGSGSHRPGESSQGQKRGRRMLFLERPTSGAARVGGLHVQLLALIHGNLTHVENGGIFVQLMGKEVGGGASALTSGIASSPDYMNSTCGPDQTVLKRNCDEWEQVMVLRSASGEECQENSIKINIMNMNEQSKLYSQGHGALFVRTRCRTPATLVKLYESGPSFEMTETQLCYPLFIVFGGGPWGHHRSSLLI

SEQ ID NO: 1010101 - protein, 235 aa, Homo sapiens
RRCGGAMLASAASRPSSWGSLRAASLGGRSVILWADRQADARSDDRPMSRRRGLGVKGRRAERGTHAPRREEEADKVSATWGYGREAGLGASGGTGHRGSPGMGEGRGAWETQRPEGQKDQRWRKHDQRHRHRQQDYTPATVTHSNGRTSGGQEMYKERVLRALPSPGFIQHRAGPPGKKQKTGKHSGGFKGQEFGDVVTWYHSMINQPSLSLFHNKRYWVFWKSYKLEYVKRRQ

SEQ ID NO: 1010102 - protein, 111 aa, Homo sapiens
MRCGDMVVRMRCGGYAVRAGAQQRDAWTLLRLVSPECWYLDLLVVAVKDRRCRNRGPLVAEPCGDWLVAHFGYRFLAADSWGKLLLVWSWVTARLPGSLGGEQARCANGWK

SEQ ID NO: 1010103 - protein, 141 aa, Homo sapiens
MYTEILTPLRAAGKLACWHLSVLEGTRPFAHGHVWQLTASETRSKHHLLPQTPGNKSERRRDGARKTRSHRKIKAHYHSPFLQRHGVLDLPFDPPRYLYRTPSTVLANTLFEGAPAEEKKENRDEAKLLAHIKSRGEKQNR

SEQ ID NO: 1010104 - protein, 98 aa, Homo sapiens
  misc_feature (92)..(92): Xaa can be any naturally occurring amino acid
AALAAAGAPRLVFTALRPVLIKARRCDPVTCKNLEVHSYDARTPGSLEMGPLTFRDDEKEYIYRGMAMTWTHAQRNLYRDDDVETLQTTWLXPGTAEL

SEQ ID NO: 1010105 - protein, 33 aa, Homo sapiens
MRGKTHITIEQRYVPSVTAEEHSRRQTRPLTKL

SEQ ID NO: 1010106 - protein, 102 aa, Homo sapiens
SGDVSAASVEGAACVLREDGSRARDRQATTAASAMDASLEKIADPTVSCHGNKLEVIAVNDAGRTVRDRTEEENGKNAHILEDIPGPLPWAGGARYGEPSSS

SEQ ID NO: 1010107 - protein, 145 aa, Homo sapiens
RGLRARGSARAYFCVVAPPPQPCLRRRWGWKFPPGSRAGRERCCPCRLGFEAREVSQTHFALMTAYRAWPDIVHRVLLRVRDLWAPARWPTGRDQHRRRLLLRNRERLATPSVGLNMGNLWTVLQAPGNYIWSFKWVLGTGLFGL

SEQ ID NO: 1010108 - protein, 72 aa, Homo sapiens
AGGAYATEVTWTRARPGEITDYMAIRAGALLKVRGRPFDGHMTNTSYEDDINKIDTHKNDNQQKRNGTHGRW

SEQ ID NO: 1010109 - protein, 199 aa, Homo sapiens
AGAEHGVRSKRRPWKVGSAAADPPVQRDEEEEKEVENEMKTMMTVTRKRMRGRGLTGVNMNELITYQIMIMTEFKKLLQQLFLKAPVNTAELTDLLIQQNHIGSVIQRQRHVSEDSNDDLDDKMRSGFHKPLKFNWEQGYQCVDQNFKSWFYAFCEKNWEKSMVEQLGQVLNDTTKPGGLSYSERFTMSSTDSLPMYQS

SEQ ID NO: 1010110 - protein, 255 aa, Homo sapiens
AGAGVPGPLTQRRHPGPGGQRRRRAAPQSTMVAAAGMQLCVCRLAGRFGVLFGLHGTVDAEIRVLGSTILARAGVSHHLPCIPCARIAQIALPHVPLVRACTVVSARCVKHVQHLCSSVGSVYAGWDRPSRIRSVEHCSPKSAMLRPEGLLVPRVDATEDADRILCGTVNTAGGTRGLFYITVGHMCCLLTYVPVDPDAVRGSALSGPCVPLVCRRCHHRIVTRGAYRMLLMSVAVGPIPRYADLRRCFSPESPS

SEQ ID NO: 1010111 - protein, 83 aa, Homo sapiens
RVGSSLERPNQRGGRGDLSLPTESMDSSTERIKFCCRGPGETNYVIVLNGSGKTYFPCIPSSINEHENSNEGRKNQNNAQQMT

SEQ ID NO: 1010112 - protein, 201 aa, Homo sapiens
RATRGSSHGQATRVNAPGSAKSAGSDSFQVTGLGGEVAHVIVGAEINRDSASGVTYPEVPKQHYPSLKPRAPRQASRPRESSHGQKAVGTNSTGYSRGPRQDSHKFTRTGPRGIAQGCTQKGNTVDLASRGRGWRPSPGAKEYPGSGPSPERAEPTSLFLTDRSAQPAAEATEPVLLHPVLLAPGVLKAARGTVKPLQGEP

SEQ ID NO: 1010113 - protein, 178 aa, Homo sapiens
MALFLTMLLYEERENYESSPMPRPVLGPCAVVRILEVTVNRGTEQLDVNAVEPGGQERAAEVRPSRIELLVGPVGLVSVDARDMVAQAEVHNNRKDDPSAAARTREGERQNKQKGCLTQTNPGQKAAQQTSPGNTDTLHRVVEDPQLTNLGRHADGKKRRGHLRPRKSSASAGQPGHP

SEQ ID NO: 1010114 - protein, 114 aa, Homo sapiens
MLFTHNIYLQDVQMVHPKFYGIGENMWVGLKMNYLPGIAIRSWHAEKTMSNILKMAVALETCLIIFQLCGTTSYKVGCAVLHWSKNWTLLYMQEFSYAILRQEEHEEKDLMNQE

SEQ ID NO: 1010115 - protein, 94 aa, Homo sapiens
MRHRIHKTVCSDRDTNNNGKIESNNERNPDITQIERGADRQKTKAVRGTDQPHQNLEANKSMCGVTTQQLQNETATRRMIDTADKGHNETQRNA

SEQ ID NO: 1010116 - protein, 104 aa, Homo sapiens
MALWRQEMVGFVQRIFPKRKSQEKQEHKSTTMAGAHDSVDVQRMWPIEILPGGRLANGLDLAQPEICTGDVTVAQNYPATLFLHESLTGLVKAKDWIHLHLEGK

SEQ ID NO: 1010117 - protein, 46 aa, Homo sapiens
MLFAINEDAFFALSREATLNCCSLAWCRGYRVATLGNFAKRSLCPT

SEQ ID NO: 1010118 - protein, 78 aa, Homo sapiens
MRVRGGRTREQRGATWAPLTQRAQHHPPPEGGLTQNTDKATYNSENQERVVTNDPGSTDNPTCSAEKKGSKKRNQIKE

SEQ ID NO: 1010119 - protein, 94 aa, Homo sapiens
RVLPFSVPLACLASRPPLPQRYPLRTLTRCSSVLAESAQNVAGPKGLFTTLAGVSICCATTFISGEINPIYLLASPWRTVSSDKSTLNWNLELD

SEQ ID NO: 1010120 - protein, 120 aa, Homo sapiens
AGWSRHACMYISEPFVNVKAVHVLGSSESLWFPFFLQAYFAVSFFFIYYANKVRIQNTKRYVKVLFTQKITTSDYALGHQYHVKIARLHNSRKRTKVRQRAPILESVHVNMIPCWHARAI

SEQ ID NO: 1010121 - protein, 136 aa, Homo sapiens
MLNQAPAICCSQSPLDCLCLIKGADPAEPRSRALMATSNASASISGPTRHFQHPSTWQSQAGNSAHVCSTPPFRHFLKGARDLLAHPILALQADWCACAPQCLFAPYGAHVLLGRWPLHNVPLGGPIRALPPSRGL

SEQ ID NO: 1010122 - protein, 142 aa, Homo sapiens
SGVPNEWRGLLSWWSLHPPWRQGVSRLAHGEPEPWVSATPREDFRVPLHRSKRVVTEMLELCGRFVQKLGDALPEDDSGECPRSAEMLQWTFEVSCATSNIKDYMVQSQWQEGFQTNCVLNWHSDRSKVTFETIKFVIDTFE

SEQ ID NO: 1010123 - protein, 297 aa, Homo sapiens
RRGLRRPAGPKTPEPAAGEDAGGGWGGGWARCVCACASILPVRLLDCLLGLAQLSLSRVCRLLLPPSGRSAGWAGRLGPVWAWLLRAVAQMDPRLVICCAGRELAPIGRERAEKRRVLLPQVPPKRTSKRAKVQLRYRAVQKGIHLDLQAYRIHSPHVVEHFQPQTQLSPKEGLGGTQPSPAGQPHGSGGHHNLSQACNPENEARSERYGTRPNGARNPGSSTDCAGTGTTKGAVVTGENNLQIVPRATRHQKRTLHRFGTHRSRVEVERPRHAPTAPEGPQNEGFARQEGLPHSTG

SEQ ID NO: 1010124 - protein, 129 aa, Homo sapiens
AGLAPKQEGGGGGESARGGERARERPRRAARKERTVKQPRKERHRSKRPGEAQTRTPHKEEIYQVEVGSRELEQREETPQKSRDDNKRRETPPPGRSVKIADTRQQQPDKHEARRTGTKSSSSKQNREQ

SEQ ID NO: 1010125 - protein, 295 aa, Homo sapiens
RVRLHRSLSRTRACAWAGMRRRTELPGGASTLSDAPGFCRRIRHGHLGHGRRMTRVETSITEGAGMARGSWQDAGGAGRTETTVPSSGRTNSHPPNRYLPIPPRSANPEYAHPPTVPRTPRTALHEPYTRDTTRQTTEQQHTPHRHHTNSPQHEATHKHHLNTRRQTLATHRRHNVATGHTHTGSEQTLDSVANPHALETQDQQSRATTPHEKTAHSAKGTHQNGKKPSSEQDNRARRPQPRTSRQRKRTAVNTPDNGTPSDRHTRQADDPRNRRATHTTRDKRPAAHSKPEPHE

SEQ ID NO: 1010126 - protein, 241 aa, Homo sapiens
PGLSLKQSLVPGEASGLGFKGRGVEKFQKCSRDLPAETRRIHSRKHREQHRGVLGPSSWGPAAQPFLPPAVSWWVYVPILGGGAHGQVPVGGAVGHFVQHRGYVKNAHQYTTSFSRGDPRTSGFLPWEGPVEVIVTMGRNIPFLVRARGRQLQEGPLGDRVLRLTSSAITTGHVWNALKWAILKHPVHGGPNLGKHPGGRGPTENPAGIRPGGLPTGDTYTHGPNTPRIRRRLKVPSTFPQ

SEQ ID NO: 1010127 - protein, 71 aa, Homo sapiens
SGTAWESKPRRELEATMADEDWEAEINHSYVFLCTHISRRIGIHGENGDNSNRTRASSISKWMMDLLEEII

SEQ ID NO: 1010128 - protein, 129 aa, Homo sapiens
MAGATQQERRDGNIAAGRECSETKAERCNTHEGRADHRHTNGYCSHPDDKQKLHRASRAQKKAGDGAERIKRDETDTGRAASATRNDEDQPGQNGSHTELQMTGPHDARQAQQQHRDTRDQTDGLAKVA

SEQ ID NO: 1010129 - protein, 227 aa, Homo sapiens
ERSGGSTGSSGRRRSAVLSAGLTGGGRCAAAVAAGKDGGSSLEQKLSRLEAKLKQENREARRRIDLKLDISPQRPSPALQLPLANDGGSPLAILRELPAESPEPTDAEPAKCWGSQSKPCAHPAAWRAWRCDQKRQEIMKQRDYLNIGGQGYQAEIDDLENLGRDGAAATCGQVWTDAPTEKNRATVIGRRSHMPEASGNQGRSTKVQSSMAPGMWCLKEATTGHRK

SEQ ID NO: 1010130 - protein, 345 aa, Homo sapiens
SGVRCNTGPAQKREVASRGPGRRRCNGLGSMWQQPLVTKPTWYRAWKLESRRGRWQAAPGSWARERPSALQRAPRSRGADDPADMADRATPRPRTYIWGLYLERTCMDQPYMTCPVRSTGVRGHDSFAQINHAFDLSWARTHYRVCDPWVIHMPRVTLDEVQLLHSHGARPLSDCAQDHPRAGSKTTKLHGLREPPTRGTEPHLGTSKLLPQPTAGTVGAPNRRLQQRLSERTPEARHTDRCFANNSNGELGGPTHNNQGVATPNNWETWGSNMIHGTGDEDSDWKNPSNNTRPTQLAHYTGHPLVMRKGDTPSITLRKHARWLGTYTTGSSVAQYRAHHTLETA

SEQ ID NO: 1010131 - protein, 83 aa, Homo sapiens
RGSECGAAVMAGVCGAYFPSCCCLLLSGDVQSSEVPGAAAEGSRKGRAGRHRDDRFEIEGPCSCFQGVNVSMDLDLERRRCAW

SEQ ID NO: 1010132 - protein, 136 aa, Homo sapiens
SGVARLLRSWGRGGTGGGASAERRPGGRGVSWSCRQCWACSTSPGLSSASELLLEPLWLRCTLGAPAVGLAVPQLDACLVRTSSLSCMRRGAHALGPRATHRECDDYRRDSTRLGPYETRKLPGGCILCENHLEAG

SEQ ID NO: 1010133 - protein, 175 aa, Homo sapiens
MESNLSGLVPAAGLVPAAATAVTLVADSMPTHTLYALHLLLRHMPRLWLVHSVWAQASQHIRQDVSLCPLSASGADLCEYTTVFSVHTFRRYSPEDKSDMEALCHFLGLLITCMHPILAIARFLSTLAPPSCNLVHFDPGWVIHKDKRCTQIEDRGAMNTTRAIGIQRGPDKGAH

SEQ ID NO: 1010134 - protein, 56 aa, Homo sapiens
MAANPTTVPAKNKSHVENNMGPRDATGDPEMLQCLVSLLAVPTGSGPVLTLVTLGE

SEQ ID NO: 1010135 - protein, 70 aa, Homo sapiens
RGRSVRLWCVRDPNASVMREVEELSSCRIGQGWTLEDLQPGRMRPLMGPDVVTGSLAAVTAEPFGVGSCS

SEQ ID NO: 1010136 - protein, 224 aa, Homo sapiens
AECSASDMAEAMDLGKDPNGPTHSSTLFVRDDGSSMSFYVRSSPAKRRLSEQLILHGGGTVCRVQEPGAVLHGSSPGEALAEASGDFISTQVHPGLRVSSRTRGLELEALSGVGPVLGRGTPCSEAKVPSGRLGSEVRRRSRSRYDENDQVRISAFDGMTDRRSASITATVKDKCHARLSSGHQVTPCVTAMDEELLTQYSWLVPEGPLLKHLRGQEHKYLLGD

SEQ ID NO: 1010137 - protein, 308 aa, Homo sapiens
SGVTAGRPVRSDAPGSPGPRLGGSRRRGGGAPGPGPARVGARPRGCVGPDSARPSRALGQRQGRALFSALDRPQQAPAMTSGQLETLPSEQSPAVPTHKKLVATASCPDWMGETLTDKKDTAPQGRSLGPDEHFPTAIGFTNQPPPGPPGPQWAGNAPKCGHQKIRTHERTLVHPRYTTHTCQSTPVAPEPWELLPLVKVSHGGYTKRRFHGYTKGALATASGQQTGTTTHRKRRLGKTTQPGALERTTTTHTHQRKPGNAHNDLPTTPPQQTTQAPTTRTNAPGTGTDRHQAKQDTHRTWHNPPDKT

SEQ ID NO: 1010138 - protein, 298 aa, Homo sapiens
RKSREGEHRSGRELWLRNARQAQRRSEMVPEREEGVDESARGLESNAVTRPPVHAAEETADSPGNSLIRRFFLLHIHRHRSLSRPQSEMKAITGGLQNLWFKFHRGITVDPSDYLLQCELLPAVLPLEEASGSSFDVAAKCALREWRLRHLLVIGERTSIKHIFWEYWAFISLKFSLLSFNTTTDLYYTSAAVSEETVMEEARGAHSAKMARGLVDNTVGGSSCLYWDTFEHWLAMDNSFRTNCLKLMDQELAGLSDNLACRYPKRIPTTQHKNQTSQEKGSRRQTRRHRRGPDLATE

SEQ ID NO: 1010139 - protein, 118 aa, Homo sapiens
MNEHQYNKGDLASKVVSCKFEASAYEDTNRSPGEALSQLTCVESIQGRKSTEESVRPEVNEAPPKKGRAEPQAGQSLRAVSPTPANWDRVSKKQNLTSGQALAAGHVTSGPKWSDLEK

SEQ ID NO: 1010140 - protein, 199 aa, Homo sapiens
RASSKITIVGRRALVCLPPRIRRAAWDRRDSGSRHGGAVLAGMTSSPTRAEEVHGGRTQIVVEPERRLKKSPRRGVAVSAVASAAVAAPFPGRSLGERPSGGSREVGTLYRTPGLDVHLRPLMTTHVPPMALFRRVPMGTAGGRRHRFDREATLEYPSQNADGFPLSHEPAKVCRCHPQKASSIVTLATVERHLGDCAR

SEQ ID NO: 1010141 - protein, 98 aa, Homo sapiens
RDHPLWLPSVTVQLVEWLGVIGELYECTGTLTQDLRYAEEESRLPLMTRSEGLKSPSRKASSDLGAIDESPGSHGKEELQGKRLENSTELTLEAEQGG

SEQ ID NO: 1010142 - protein, 118 aa, Homo sapiens
AGGARGGARACSVAAVCSSVLAVCWRDWLGIAVDERHVGCLHSLHQSRECDQTKSCACPVPCFHPSVACCPVIQLLGAWLLLPSSVHRAGQPAENYGGALTPGLSDYTTVPHVVSPVH

SEQ ID NO: 1010143 - protein, 187 aa, Homo sapiens
  misc_feature (47)..(47): Xaa can be any naturally occurring amino acid
  misc_feature (159)..(159): Xaa can be any naturally occurring amino acid
SGAELAGSARWCLGSLMGVLVDGGLRRRFISQSVYPSYQSASPSAVXDVIGRGPAYLAIRPWSDQNYSVRSRGRFHCDWSRLRDRSAERTKELVRDRAPPSRTWSLRRSEPDARITRGERAGKEADGGQLNARIQTAIHIDSAKVGVSWTGNFEVMPTXAGLVSDDKHMERWRWMDELRGWARPLKV

SEQ ID NO: 1010144 - protein, 246 aa, Homo sapiens
  misc_feature (64)..(64): Xaa can be any naturally occurring amino acid
MTYHGGESYTGVLLDRAGIRRARVPVCCRANLERRRARAFFQPTFVDRTKACVPALMASWKKWXWNWAPDRGARTRTTRTGWAALNGTALQSANIELHGKFVTRNGLTYKQVAGVACSTILVRGLFTSKNTLEQLTGGKPEFGFSEKAGEVGRYAEERVFRIEPKRLVLDSSNQISAGNDFGEWAGDPRKGSRTVEAGGGLVGRAFVFIETSGKSGALDFFDSKRFSKQGNWPPLYKVFFATKKRN

SEQ ID NO: 1010145 - protein, 79 aa, Homo sapiens
RERTGQTLRFRSSCLLAGRAPSRVPASLSAPERLTAGPGAACSTRAGNYDEESNAPVGDTKPRIRCLRQMVPLVLGITL

SEQ ID NO: 1010146 - protein, 189 aa, Homo sapiens
MAVVRANVLVDVGHARAVIRDPELCEESTEEGDQAGRGGYGLQEVDLPRGTSLIPFCCLKLTVSLLGQIRDMPALGGMSGLYRTGNAGYIDRPVIVLRSTTGPASSIGSLEMIGAWVHTRREIKATEGPSESMEVTRGSLRLEAEGQDGTARLAYRDRFQNHIEADSCGPSERRVKLRTVRKANDIRDP

SEQ ID NO: 1010147 - protein, 227 aa, Homo sapiens
AERPGRISAAARAERGSCLRAGAPALGPARAAPPYPRPASCRLLARLRPVPLSRAQSSTLRAHRQTIGTRSPAPGGLRAEPLGPVAKRRAARAGDVSTMTLEAASMLCDIAETDARHRHLWIRHDTGIDSMLGSILGRPRDSTRKRNNRRQGPWTETLRHIRPDKTPIDSAGQPAAPEAAQGAVSEPRGLGAQAESERLTADSTRYWPGPGGASTTRPTTASPNREQ

SEQ ID NO: 1010148 - protein, 193 aa, Homo sapiens
RTCASGRAEVDPVDLPCSAGGAQARSQESSRRAQSVGWGQAGSGAEQGEACCGPGLLAAVPPGVLGDVACPPQETVPLPRGPKTKGGQWGLRVGGSLRFSTDTTPSHSYPRSTPCRGPCPGDHQHWAPKLRTCFCLGQRGLSPPGVPSCHVLIPRTSGSATHVGNLHHMPGPPGPCRSAAPLPAWARLAPVDQ

SEQ ID NO: 1010149 - protein, 45 aa, Homo sapiens
MYYQSTDDKYCERSYCPSCRQMRELLFGKCNYMTHYGTRKRVYKI

SEQ ID NO: 1010150 - protein, 151 aa, Homo sapiens
MIICITGYTVEGEEDSVMCITFVVTNESSRIEKCLWWWFKSRRRLCEALCGRATNFRFTRAKMPSPFELMNIFGHFNQVVGVDTPFADKKTCFLKGWNIQGVRSAPGLSPFQVGLEKLRHLKNRGLIEFLCGLNPQGTMTFETKGRLTYFY

SEQ ID NO: 1010151 - protein, 136 aa, Homo sapiens
SGGGGQRSRVKPPPGRRLKEQLPPLVGPEQFCCCYGCCHEARLGRTSLPRGVIMLTEARSIHMEDGEAWAMVLFLITLWTLCNYFSWTFNILGVCEVEGYTMSYVILVWEKQTSEKYLRTRGEHVNFFLQASTGGP

SEQ ID NO: 1010152 - protein, 236 aa, Homo sapiens
RGVRRRAEDAGQSEPGGGAWAVTPSPRVASFESSYPSKFQFQQQQAAGSKAEQGQQGQEQSRAEHARPEQERLRVSESTRRDNRLGTFSGQLSPGIAVRESSSPNSDVSYKKLELNAVLASDGQLVCMLLWKNIPELKKCNYVLCVLNAQKKPEPVGKRDDNVERMTKDKSVNKYSGVANLDSRSKHFTRRKHYAASDLIRKDGGTDAWLTMCRNNMHSYTGQHSGQRGRGERIKR

SEQ ID NO: 1010153 - protein, 250 aa, Homo sapiens
MLKYLQKWRGSVCIEVDVKTGTSNKMVNLEVRPNMNRDKCYEQMAFLYVDVSGFGKTVASYYTRMEILRRFQKGEVKWTYSALREVNFSLEDGKIRACNNPQIQKWRGKNTKNGSRLMLKGSKIIAKNLWKAKMTYDLNVCMLEVKLDGKSVIEDSRGTGIIQAVCKITLQDDLTSQGYAKVGNLIGNIIIPSGVEPSSFNRNTRRKNNKCNAEMTEECTAGENYGETSELEEQSEKNEKQRTRNKQNTN

SEQ ID NO: 1010154 - protein, 91 aa, Homo sapiens
SGLEVPSTPCVYGVLEVELLGPQAWGKVPVGEIDSHPSTILSNRDLPGRLGPTAREEQAGGRMPIAYKTQSKLAEHGGADFVYYTDKLVST

SEQ ID NO: 1010155 - protein, 82 aa, Homo sapiens
AEYGPGTAVESERAFPAGTSRALALAGQVTHYKQYAPTQAKLFYFECREKKTENSKLRKVNYEETVFMGCSTILNKVLKQVQ

SEQ ID NO: 1010156 - protein, 105 aa, Homo sapiens
RSRPLGFRASRRSWTIIMVDMMDLPRFIPPEKCLFFQSGRHGNTEWNHRVVMETPVMNDISGNCGKWLEMSNRQGATHLVYSLMSTFTMKIAHRFGLLELYHVKL

SEQ ID NO: 1010157 - protein, 391 aa, Homo sapiens
  misc_feature (197)..(197): Xaa can be any naturally occurring amino acid
TGFDECGSNKRTLGAERHLLVQGPRGGPQREHRRDDAFQMNSIPNGAALSTTDFLALLHPSLFSPFYYSTLVALCASSKLSPSGRHATSNSQEEECRHIAPLVGPGPTERLPPWALSAFYGAEPGGIVVGLPYFDLRRGALLRSPIVPPVLLGASGPKPLPLTCLLGFAQAIRCSTSTPGLWSVPCAKKVALEKPAXHFSHARGAALWNSLHLGMKRGAELKDKRAGESHRKRPREEFSRSLGRPPASEKAGPRTLPHEAKTPRRLREKRRDERLGNTERGLLNYGAQEGLSRRPFRLRHPTVSNHFGPPTTPKGEDLGGYEGKDRPQDRGHYVCPRGFASPPPPRPTKEKSPEKDNADGEGAPPIRKHTNDHEDRSRVRAYHKHLGGYTL

SEQ ID NO: 1010158 - protein, 90 aa, Homo sapiens
SGVGSSKILRTAMHYRGALSVWARFETDRVMLAIEVVWKRLSLDGHCLVRHELINWSARHDLSKPVRSRRRRSPRDTVLDKKTSYRPSQR

SEQ ID NO: 1010159 - protein, 214 aa, Homo sapiens
MGEDLMRHCSLGGLTPGGLWCTGTPTVTSLWFPNTWFPSVDWILPLGPEHFRVLPGPGQGQVAARFVGPLGVCHGPTRGVPTFAGGLTVFSPCFSLILERDFPSFSAHSIPLRVSIRHLACLLRRYTAPKYGNTPKTSFNDAFALKGLIARYSPETAAPMDTCIEKAVSTGDTHEATLFRVTCYLRLCRVTPTRLSTLCEAGLMSPLIGERDIT

SEQ ID NO: 1010160 - protein, 130 aa, Homo sapiens
  misc_feature (93)..(94): Xaa can be any naturally occurring amino acid
  misc_feature (101)..(101): Xaa can be any naturally occurring amino acid
MQVSCSLVLLSTEQGLGPSPQLQGWILHCLSPVPVTSNPMDLRPCPWTIGETRCWNRLLSSGNRHGLTLLVTPYFPPQNLHHRGQNPGLSLQXXTGQTALXLYEHLFSLLAPPTRRTAGTLCTLLKAPLY

SEQ ID NO: 1010161 - protein, 280 aa, Homo sapiens
AEKGGGRPPYVVWRVCRALCVCAVSELLVSGVFPELLVSGRFPTVWCLAVFRPLRVWSTLLSLSCFGCAMPMYQTTKTENNDSEDTPSDLQAVNERKQLQTTTEQQRRWHTTISTDATGSHSRVTYLHKPESSAEPPANCILIQVLRTAARTSDTAAPQKSALTCVDPALHNGLLRLARDLTRRAWQPLPLARFTGTGLRFPLGTPVRPPKQYHVVWATLARPCSSNFTFALTYYSLTMVERYTECDRKARDEAQAWFLQGTPLCAPFPRGLHYFTLRIT

SEQ ID NO: 1010162 - protein, 310 aa, Homo sapiens
AARGRAASPGGSGGWARLRQSVRSEMAEQPRTRPVAPESREAVAAPRETAAEPQGDKRGTPGRGPPGYEAKMQAAKKTAALLANPVDLRGPGRFGIAPKATSQNHIARIHLVRWIPLGSHKGNNACNTQRTVPTPISAWGPLMAKPDQQQGQATPTAPQRRTPHTGRASRNPPSAAQTPNFVAHGPTGKATPHQSTNTTGTCHNMSDREHQRGPHESDLDGTQYTMTIPLETVRDTPTHLCTILTASRYTHFTADSTDATNSPNCCPHNRMEDSENYIQVRVRCHLNHLLDRLKSEVADNQPSSHTALRQ

SEQ ID NO: 1010163 - protein, 151 aa, Homo sapiens
MAWSAGRHENVVLHVLFSEELALFAVTQAEGRSQCFWLPNSLLNRYAGAGTRPDLAVQSSTHVGVKCQQLDVELSDDSFPPEDLGIVSGMLNVNMVTGLPLIANVCHYCGPVPSQMLVISTCSSAINYLPGPMSDGPGCDWSLPDAAWTVE

SEQ ID NO: 1010164 - protein, 117 aa, Homo sapiens
  misc_feature (70)..(70): Xaa can be any naturally occurring amino acid
MRRPYVLMYLVYWVACCYPECWAQQRSNELCVCANRVLVMSSMTIVFAMNPVNVTDAVPRASMASLQSPXFAAATRGRPSAPHGLVTGDAKTLDERRQQGKTPEAFGHEGNDDNENH

SEQ ID NO: 1010165 - protein, 159 aa, Homo sapiens
MSRVVQSVDEDMQSFVGKGNAQFIFCSDHYTIGKLTPGSAKIQTITFLISPPDSLRQWDGNKWNDAISSHKSMISYMPSPKLGPGEKYELHADDRHQLPAWWSMYVRVIKRRRNEEEMAKNDGDLSQKLSRPGGRSTRRSTSAELARDEDAFQIILTGG

SEQ ID NO: 1010166 - protein, 186 aa, Homo sapiens
AEEEVAAGLKAAVSWQLGQALVSGYSSAAARSIPRRVYARFCAHPRIPVPVFPLTHRPRYLPAARALRPGPAGGSDPARSPFWNLLGTIPFTLTAANPRWPSRIRSAPGSAAGRGVKGVSRSGNGGAPNELWSQGEGRNEEAPLNGAERADQDPRACKGPERGAPDAARDCPMVQGGSDVKTRTNK

SEQ ID NO: 1010167 - protein, 323 aa, Homo sapiens
  misc_feature (122)..(122): Xaa can be any naturally occurring amino acid
  misc_feature (154)..(154): Xaa can be any naturally occurring amino acid
  misc_feature (157)..(157): Xaa can be any naturally occurring amino acid
ADYRHISGWGMACLTPPRLIHIGVLVCYHTSGCMGLAHSHIVYPMNHLSHTAGCCHAFFTSGSVPRLCHVLRRACTAQMQAQSVRTVNKPAAAESAYIDVVSAHGVPIIVLIDPLIVTGKVXIFPVEHAYSGTSVYIFVYFSMVLAFALYRPQXREXTTRSTWIWVARLSALVVTRSVCAIEPIVFHYLESKTSEDDTGKSKSHRNAFALESPIGMRASLVAHVYSWSRAPKYVHAWHMSQVRSFYRFSSQGLLCWRKKPIHVRTPWNTLSMCRHADVNQGDRVHGHRIYLCCTEYFYPTVHRFPLSKHSSQSRVNLFTPPPL

SEQ ID NO: 1010168 - protein, 56 aa, Homo sapiens
MTEVVGLRNLGTLGQSMSSVRGFQEDSPFDRMNGSEFSMQEEPLVHWFMSLLKLGS

SEQ ID NO: 1010169 - protein, 301 aa, Homo sapiens
AGFRRRPKCAVERARTDAQAAEPVWARLGPCGAVTDEHRALEPGSEDFKMGDQDPAGHKSPLQQMVASGNRGLWLPLLLHDTLWTVVKGSAMRVSAARPWPSESDAIPSRTCGASPIRKIARPLSNPTGEVPSCIAHGVLEPLYLCPNGARCCHSGFKTLTRFTGTMDAFVKIVEARGDPGPSGSELHRTPCVMTVPVTAIYFTAYDQLKAFLCGRALTSDLYAPMVAGAAGSPGHRDCDQLPGAYAGQRLQAQHVSYPGLGCLCPNCSGSGVVALTVVGWGPLPLDVPYSSPVLVNYKLV

SEQ ID NO: 1010170 - protein, 109 aa, Homo sapiens
MVEIRKVAHDCVEARPSRLQLGVAKILHLARYQPRVLTRREASDEVTVCLRMLRSRLPRDGTESPLASILPLNWYKSTFGLLFDLDPMYRDAKFDHNKDIIRYPYRPYF

SEQ ID NO: 1010171 - protein, 194 aa, Homo sapiens
  misc_feature (147)..(147): Xaa can be any naturally occurring amino acid
AERGRVCITPYARLLAGLRDRHRWARETPPWVRGVVGRAYEVTTRYERSIALMSVERVAKRRCERSLSPHGQRCSSLGDIDDLIADRLGASEHARDAECAKALWSPTEVEAIDCSLARFPLATIVEICVRVITCRPSHNARLLYYTXVYRWLKGIEHYAILTSWRSFGWRSYIGPYPLVESCSEPSEIFVPKTI

SEQ ID NO: 1010172 - protein, 248 aa, Homo sapiens
MGSAKPRCGNPGANSTRTVTCAMGTLVSKALYLGTGNGGRRGSDQDDNAYSNWEGCVLAQGPHEGKGIHMKPSIGARRDPLGKFRFVPVGPPEVTPLGHAPRFPLVMPEGTSGESRVGLAVGIRSPMIAAQQLGEDGALKRTLNSSGRPLGKHKKGEPTFEGAHQRAYPQQTAQGAITGDRAWCTGKDCSIYSISKVGPNTIYRHYYEKEQLWARRRNYRQRSALVRSAKVAPGGALCIGGGGSLREK

SEQ ID NO: 1010173 - protein, 169 aa, Homo sapiens
RTSPLRLPGESGLSGPRLLGWAVPEIDPAPPYSLIMRKQGVSSKRLQSSGRSQSKGRRGASLAREPEVEEEMEKSALRRRENLPRGLLGASSPGEGFQSSETSEEGFGAKRWLAKDLFFLRPLPSYVLYFHWRSSGEQGARNLQAAEVLQTEPLSASLVFVAHFTFGYI

SEQ ID NO: 1010174 - protein, 102 aa, Homo sapiens
ADYNGSSHGEADMRTLNSRCDEGEVVGSHRGSDYPNSLALLCLYAIIETLLRMGCYVIRALEDRDSRKKGSRANGRYITGSARIRPGYDEFAQGGTGIRSNN

SEQ ID NO: 1010175 - protein, 72 aa, Homo sapiens
SVVVFGVTGRPGRGHGKDAAVRARGRYGAGSAFAAGAGGCEVKRGAGSFSCPNFQIAKSGRENLKNNRSIQI

SEQ ID NO: 1010176 - protein, 110 aa, Homo sapiens
MDRSARPEAEAAALEVLAEVAGILEPASACPKQERENCTGARSWLEVLVVMELSRRTDKLLCMPASGSGFPAEHPGSGETLVCPSRLLVYKLLEMSICHDFLGRTDSMDE

SEQ ID NO: 1010177 - protein, 255 aa, Homo sapiens
MSTKPVYTISVNLCGLHTITKGSPLAEVQQSVGHLWGKPIMGQGGLEEKVNCTHYGEKIALTTRPSVQHNLNVRKLVKAPKRIGKEYTKQNVEGDMTSIDKTNSISNTRFNAAKTRETEQGMASTETSKRRHLLGHNKGYAKTKAHPPGKTWPGNNTLKPEKTGQQKMIVAAKRDLRPQVKQHVTIEHRAQKRTYSESDDKPTRRNKPTEQDTNHKHERGHRRNNEREKTSRQQRTQKFDQHVNITNKRRGHNNR

SEQ ID NO: 1010178 - protein, 113 aa, Homo sapiens
RRYGPGDPQWRVSGAFPDGPARRARPWLGQVTHYKQYPAQHKQSLFHTLNAVNRRLDKSKLRKVKYEENSILWVADTFLIKYLKGQSSKQTSNTLQGTATECRYPKETIFPTD

SEQ ID NO: 1010179 - protein, 113 aa, Homo sapiens
MADEAPRKGSFSALVGRTNGLSKPACLAGVPGKPGGRGGSKKLVIKNFLRQTVWHDRRLHAGHVAEAATRRCRAVQSRHLPSGTSSTELYQAVENLVFSQSVPNVLQATASGL

SEQ ID NO: 1010180 - protein, 218 aa, Homo sapiens
  misc_feature (165)..(165): Xaa can be any naturally occurring amino acid
RRGLVRSVAGPLPRPGSLAVPIPRVSTLHFWMKMQTTGDPEDTVTAELGDLGQLLPQISRHNLDCGGARRSVIGSGPQLLTHYYDDARTMYQVFRLGLVISGNGPCLGFRKPKQAYQWLSYQEVGEQAEFLGVRTICSTMVKHALISLLVLLGENRPEWIIVELXWYHIFHGAWSRSMTPWDPGANPVHRSIQLDISTVIVDKAQKAVLLLEHVEEDG

SEQ ID NO: 1010181 - protein, 270 aa, Homo sapiens
RTRVGQGALRIHRDAPSAATVTASGHQGRPGALRIHRDAPYSRDSNGLRPPEGGQVALRIHRDAPSAATVTASGHQGAAHGPQTVNGSGLRNPGGERRAVRKSQLVARMPGICPRESAATSGRTTDHAQTVRSFLCMKAICIYVTDYPNLETVFFSSASRGAGGGDPPSRFPGGGDPHPGFPGGAVNPDITGFPGFLLHQTGFLGFPFRGLNSSFGVHTQGPRPGGPWLYQTLPSSLMLKTGFSTEKNLGHSEVLPASGRNSYMHFFSSS

SEQ ID NO: 1010182 - protein, 290 aa, Homo sapiens
RSVASVKSACGNLPHAAVAAVTHTRFQTGTGGGVLHGSRLVGRSWAASKNRDYCLVRRRETYLSPFATNGAEQRHSLGPEPVPRTVVSAVCSASDLEDLVESLRLVACRCFAEVMVTGERAGSDIYLCFGTYKTTEQTKVAEVDIAQVAGFDMDRLHDRGTGQSMGKVVYPSIVVEWVDGGQRDRIVGDSALLPFRIPSFSTSCLIPHKAGLVDSEASVAPVTWSDRVCWEALSGEHKPDVSRCAPARDVCCARMLGLALRGPYMPDCFLLRSALVMACPLRRVGPPVEN

SEQ ID NO: 1010183 - protein, 89 aa, Homo sapiens
RVRRLYRGGLEAAFVLVACCRWVRFCCQCLSRSSRRRTRSTFAVVNTMNEIQTCSTETMVRDYVITMTVCAHPMSVYSGTYFHGERLEV

SEQ ID NO: 1010184 - protein, 107 aa, Homo sapiens
RGVSSFPPEASLGLMLPCSPATAHLQGTLRAAASDRGHALLIGREQSTCVLHRTITYHPSLPQTLLQRFRYSLRLPSHSSVQDSRPVMLMREKNGESTQGAVRYGQG

SEQ ID NO: 1010185 - protein, 130 aa, Homo sapiens
MFIRIIKHSAGIVGVTMPVIVVVTDCRTMVTKVRSNPGLSLLAGYIDMITLAMATTMPVCISVRFAMKEIHFYDLAIMDEDQNIHNHVVETGVHWEQRLDGVVKFATEIASKKPNIRIKQRCSEAPCRIR

SEQ ID NO: 1010186 - protein, 150 aa, Homo sapiens
ERSGNGAQRRTRPSQSGVWPGLPLQPTGAGSLEPEPEPEPEPYAESSEDVYLAQSSRSGDVGPASLWRVAAQCRGASLYALRVLRLRAAPGGRGGKAMALTARKPFLTGNRSEDVAQYIGHRIGPAGIACKTGIIRRIEAKDILNLERNS

SEQ ID NO: 1010187 - protein, 110 aa, Homo sapiens
MDFSQNSLFGYMEDLLELTIIERPAASESSYDYRQEIMKRFDSPMNDLSDYGNGLVYLSQCCVKMSKGTSSHCNISAFCDATRIPLETLRRVLPKGHEHHAMFQMELGPR

SEQ ID NO: 1010188 - protein, 338 aa, Homo sapiens
ERGRRAGREGAGSRTMAACGVAPRGGARPWRRLCGGRFLSWGGGSLRAVLRRPGGHWCLGRMQNTRCAYLLASTKDAGCSASSRYCARVPRRSCCQGWSLGTKLPAFCQRSPSTSCSIEHDTLISTLAGLAHRVYRICTGRLACKQPRLPRGLPQRACHPFQAVIPGTLGAGTICRDGSHTVTRSFPRLGPIACALPSNSFSKHFFQPLVTPRKVASPPRPKGPLGPGTFGICQGLNHPNDRVRHPCGDKHRRPCDGFAGFNRRTPKPWEPPTAFDGLGFERHSLTARLKPARSLVRHSFFRCTTVTGVGTREAVLGNHEQRSGPTPCCSECTFPRGD

SEQ ID NO: 1010189 - protein, 125 aa, Homo sapiens
AGARSGRRHHRLWAVRGLAPGPAAAVLNFSPGLSCLPAGQSLGPAATMPEPPPPPWAPVPPEPPRLVSPPAPRRPVPSTAQGLRSAGARRGTVRQLHLQPRCGIHWVKPAGLLSLVGTWRTFMSS

SEQ ID NO: 1010190 - protein, 354 aa, Homo sapiens
MRGPCIVETWLLPDLARGTKSSSTSLIHQRKASAAAVPKVTGEHWARRGEKAASRRVCLYLCRCCESMRSMKLCKGGGSYVGADNGMWVNKTAMNKRRCNTRKTRQDFCRKSVTDESCRKHTGSHLGTSAVALLKQGTASQGALRHHTRQLTTLEDSPVSKKRATRVGRRYPVKDWSLSPLGALFPGKATTEPIFGGNDLPIWDSYCLVPATGLTERKPLPQCFTQASGDHIEKGARTWGDRAHSGAHHYSTFTSKHFHRFIGHRPPRYMKALTFPANPGISTSFLAATPLPTWPTLRTQKPQDLVHADREQPPSGWIQILLLNTSSAAKSSPDTQEIITNSTVLTRDAWDPNG

SEQ ID NO: 1010191 - protein, 176 aa, Homo sapiens
  misc_feature (19)..(19): Xaa can be any naturally occurring amino acid
  misc_feature (21)..(21): Xaa can be any naturally occurring amino acid
  misc_feature (25)..(25): Xaa can be any naturally occurring amino acid
  misc_feature (30)..(30): Xaa can be any naturally occurring amino acid
  misc_feature (60)..(60): Xaa can be any naturally occurring amino acid
  misc_feature (75)..(75): Xaa can be any naturally occurring amino acid
RAEPLGGHPAAGPAGRTGXAXGGQXSLRPXVPAPRPGLPRGGCAAQLGHPGLKGPPPGLXGKRPEPPGAFSGPSXGLSPQAGPGPFFGPSLGLLGASLTLPRPSPRPPGPSLGLSRLSSPRHGQWASGTRGRANRLHLHSQRLLTSSQEHRPVENPGNSLRLEKKSLARHSVCQKR

SEQ ID NO: 1010192 - protein, 95 aa, Homo sapiens
RGGCVIEGGGDEGWRRRSAPPRGRCAVPAGGGRVLSGDRRGTGGAVGTWGWGGVETASGWSQRSRGKVLVAMGEAMFVHEKSEVVEFAMLYGLYE

SEQ ID NO: 1010193 - protein, 113 aa, Homo sapiens
MGDRYHRKILDHCKRRYRCAGRTSVQHVQVTSRKFGKAIQIKGDYSGYSQLETRVHFDKGENDQKLGVNLGQQQAKGNNTRKGVVGEQHFGKWPLYSQGMETVYLRMNCGEET

SEQ ID NO: 1010194 - protein, 141 aa, Homo sapiens
SGLPGALSRGSGAGVSGACWKMASGGMSGGLAARAVLWLMCLHAAGELGTQGGSHQEGGRRLPRITSAGAEVVEGQFDRYFTSEEEWESALRDGGGLRVVLRSWSRLCEASARSGVNGRAAVGVLSTSPPDLGSHNSLRAT

SEQ ID NO: 1010195 - protein, 101 aa, Homo sapiens
AESSPQRRWERWGRGGVRRQEGEQVLAQEQRLVGSLAACSNSMQQPPPPPPVNADWYPRGLPSLAVPGSRARVPPQSAVGDGQAVGWSRLPRVNRPSGSRS

SEQ ID NO: 1010196 - protein, 152 aa, Homo sapiens
MLSVKAAPQSRKAWSSESRRPAFLALCWPACPCRSSALLGVVLGLCHMPHLRCPSASGLADGARERHSPICSPSTENLQEKPPVIVNACLQALGTVAVALGALGGCYYITESVVNKPLVPHSLAELHQPQELIGDGAGRTMFRISQRQGPEV

SEQ ID NO: 1010197 - protein, 122 aa, Homo sapiens
RVPRLWASSCRVSARAPPGAAHFRFPRTTGAARVWESPQSPGTDMGFRARPQLRIRLPRTEGHTCEPARGRPELRAAPVPLIGTPHSEFDNDSIGHAREKSYREVIAFSSTRQSHDDVAGLR

SEQ ID NO: 1010198 - protein, 96 aa, Homo sapiens
  misc_feature (90)..(90): Xaa can be any naturally occurring amino acid
  misc_feature (93)..(93): Xaa can be any naturally occurring amino acid
RIESRTGRRRRGGCPKAPRHVPVIAGTIELVPKIEAVKDSRLDIILLGGHCSSEHCRNKRIQNDAYTVERKRMMETEVTRCSRRGLASRXFSXIAQ

SEQ ID NO: 1010199 - protein, 138 aa, Homo sapiens
AGLVVAQPVAPGRRCEVSGPLPAACGLPGHLPLGPLLPDPVQAAPELACSGRSADGFGFLVPKVRFLDAEQGQACARGRAESWEGKACSVRSTKRLCANRQLNSRGNGLERWDFHHILHLKANAANKLCIAVHQSVGL

SEQ ID NO: 1010200 - protein, 243 aa, Homo sapiens
  misc_feature (167)..(167): Xaa can be any naturally occurring amino acid
MNLWEQICKEYEAEQAPFPEGYKVKEEPVITGCASRGRCFFTGVQWQSTYSSRFPIVTIDLTVHPDPRDKLGKRIKPKSMFCQENILEDFHLLLLLLPGSGVACVHRERRTNKCCWEENEADSLPVIFWLSGYTSKIQRGQGSQFTEFVSIPFVEERLKQQATVANXTTRSLGQNEGSKPLHSILLESLCGSLGSLRFKNLVSGRRNFGGEHGLQGRSKFLGKEEQKVKWALGDEWELVGQMT

SEQ ID NO: 1010201 - protein, 68 aa, Homo sapiens
AEGAGRSELDGGRSLVGGAWRSRNLRIPWLLAGLRCWLGVRCVCVWVWGCVCVCVCVCVDVDFNKCWV

SEQ ID NO: 1010202 - protein, 315 aa, Homo sapiens
MHKRSHHGLQGKVPQDVRIPQLQMNTERIEEEVDCVIKFMVVSGKKLKWLVFRRYAELDKLYKNLKTNRLSCYGPCKTILATDDNTLRCYILIQMSIYTKDSQRLKTEIAFQQATVRYHRNVCINPIPELLTRHYPVNKWAQGRTESSPRYRNTSPERIARHWSTRNWYPQATGVTTSLKHLDSKHFEPLGGTLFLANSSSSGPNTPPNQSPRRMDIPRNKNDQIREQHRARPSRRKGTPSPLGQTTGHHRRHGTARQTSQGPKKGNAGKHNKIPTNHTRHATNHTITRATERQSGAPTHTNNHNPLPQKVRRPT

SEQ ID NO: 1010203 - protein, 218 aa, Homo sapiens
MSSEYTGGTEPVGPVRELAIDALIIRETLASPLNTRQRHYIPQFALVNPAPGCEHPWGHLGPCGWFPTLSRFTLATGPRTTPNFHVHTISGTASGGLCNPWPSEYCAHIAGVPQPRAPQPSHFVCDPSSPNVRFPRSNKSVQSGTRNYPPLSGANSYKTTIVGTPPTMCVMVFTPSYPPPRWWLVPQFTAPPLSPLVRAHAELNDRQITRARQQTITK

SEQ ID NO: 1010204 - protein, 174 aa, Homo sapiens
RVLAAPPERIGGPVPSPSMGVVVGTDRVPSSRVPADSRMLRRHRSSLYALTDGKHQWTGPGAPAQTVRSSRPSVSSAGRRDAAWARGPARDKGAWGARLCRRRRNRTSLGEGPRVTELTAEGIRRQGHTTAEGRVCGPVTSDRIVDRLVRLKAYWAPIRTTHSTKNDVARAEFQ

SEQ ID NO: 1010205 - protein, 400 aa, Homo sapiens
  misc_feature (135)..(135): Xaa can be any naturally occurring amino acid
ADLTARLPWRRHLKPRDALAVVVLTAMPAEHVRRAGPGPDAKTRACEDPARTAQDLNSPAYPNGGLCCWRQPRLTFELTVLAFRGLGCLEGGLLGESAFDEVPRLPGCQLKVHSPAGGPAWRVAPTFEITEHSVXLVAQPVRNRSLVVFPPSKKAFGTVLLCFLWNETFTVTPKNFDVIGASLPKGSNTLGGGLTRNYQFRGFNLTRPKWGIKNTLGPGAFKASCFNGSDILSVQWEPRDYEYTTMTKETPKNRFYNNKPGWIRVKLSAHSLEGSHPLDGHEKFSQGKNVHIKEGLLGPLTFWETSQEETERNLPRRHTFMKVPFWKFERGLRESLEGSYVNRTPRQQGGPRAFPNDEKRQNIYNICGRQFDQYDIFPPLWPMLVPQVNKVHSDLCLWRT

SEQ ID NO: 1010206 - protein, 114 aa, Homo sapiens
MLPGKVVLQVCHGSLPRSAADRPRLGVERSRPGMGRECPSWEPSRTLFSRLALAWVQLAVWYSPILLFFISGFSLSRKKNAILPSQEGECPVCLRKSPGPDEDNIRHWQTVSFA

SEQ ID NO: 1010207 - protein, 134 aa, Homo sapiens
RVYTPDQRRQQEEDRESREDGPPLGSHSGQRLAVRRVGAPGLQLSAGAARPGGGDRLRARQPQPPVQRAYRRGAGPKPTRPPKVSRGRAEREKTPKFLSSKKFLFASDNWMSNSTQGLGKGPPVPSSFQATEGF

SEQ ID NO: 1010208 - protein, 170 aa, Homo sapiens
  misc_feature (60)..(60): Xaa can be any naturally occurring amino acid
  misc_feature (65)..(65): Xaa can be any naturally occurring amino acid
MRAALRSLILVCRVSMTVESAPSNLHAVGRTLANRGVLYSPRTASQPGAIRLSERGRGPXDQLAXVLVYLAASHYHRCVATPTGARRQTAVCQNFAIVTGLELETHRSYGGRYKCKGPRCAKKDLPYWVREKVNGQNQSVDYYPGFRTSQIKLLRAVSQTGDCEDHGVCT

SEQ ID NO: 1010209 - protein, 140 aa, Homo sapiens
RACQALRRRGRSGGGGAIAKRSASSRTYSRCSARPAVSGWTWAAICAEAPSARPPVRTGAVLETPGSGQRWERGGGKRVRGKAWKAKAEENPTDGDPLQPLKDVRLVYQRLSRQRQRLDFDQDSNQEVIYPVPQPVLEGN

SEQ ID NO: 1010210 - protein, 210 aa, Homo sapiens
MAEAGAHSRSSWLLDCKLENEEDERLGCNYIAPGPRMSIQEIQELDKNDVVAVRIGIKEATDWDRRWPVYPLDPNRSSNARGDWADSWLCMLGSTEPPGDWYYGRAGKLQEAMSFVLKEGVEYRIKISFRSYREIVYGYEVHPAILYQDKASRLTRRDYMESSYGPRAEEYEFLTARGGGNPRVCWPGAATVIKSRFTDDDKTDTCPGSG

SEQ ID NO: 1010211 - protein, 111 aa, Homo sapiens
RSSDSSGVKASAMLTLSIPFSHLFATPSRYIHQCSKRRTKRKYPSVSIVSLIDKPHYGCHKFLSEHLDFNYQQAMQHHALASGVRNCKIQHALRPSFLALRTKIEPTQASL

SEQ ID NO: 1010212 - protein, 140 aa, Homo sapiens
AGGTARGVRRGGARVSAPRRVTRFQIFNRRSPLVCALRLPPPRLGARIRPRKPDLQTRYLYCVEAVSWRKERGVRPVNRPGEAVLTRVPWCDTFLRTQHVGAGRLAMNSGANEDPTSKGHFQGGNPSQKSEKNRPYSENL

SEQ ID NO: 1010213 - protein, 108 aa, Homo sapiens
AEAGADVPCMPLPRASIGPGSFTLAFIWWLLGYFRRALGPARYCEHIAILEAAGRRHRWHAFRTARLRVWSIIEKNRSVCQNEIGNYSVSNAELEITGESSADQTTTT

SEQ ID NO: 1010214 - protein, 314 aa, Homo sapiens
  misc_feature (160)..(160): Xaa can be any naturally occurring amino acid
SGFFSPGRLTLRQRRELPTPYTLRNHQWLRVGSRVTSVVQNNLVECLQWSLSTLLRYKTGAQGPDLLFRYPKRQFPFYVSKTQIRNPPGELYSQIKEFFLGSGTGSPGNFAGCECMGIVLLTAFGRGQAAHWALTYLLEGPTAGESLCVAVQKDKSCPEXAGPGPKSAPAIWRSAPAGGLARPLFRPGCLPRPIHLMAVTPPTRCPKIDTPRGVSLYPSKRLLWDPIFQLWSIVKPKNGETANGGPQLFGKNTFGRIHGGTERQNRLEMGGTANKLYPRGGSASGRSGKFGVFYTLFDKREPEVWNPYYTALGA

SEQ ID NO: 1010215 - protein, 107 aa, Homo sapiens
MAGRKEVEESAGRGLYEHVKEKQLRPKRLFEGSWESGPGPHRHLGRCVVANRLFPHPPPMAEGPSLRHVYTEDDFYCPVCQEVLKMPVADHGLSATFFCTTMFPDLQ

SEQ ID NO: 1010216 - protein, 66 aa, Homo sapiens
AVLAVGLEKRGACCLRAWACEVGLPRGQCVGRGPKELNHVRSVTGRRGRLSLTGVDVGYYYHDVPP

SEQ ID NO: 1010217 - protein, 104 aa, Homo sapiens
MARQVARRYEQRRSLHARFRRRWRLAAWAGEKCIVRYWAGDYAGNGLTRRHYRLTDGKKEVYIEATVYRKQPLIEPGLTVSTAIWVDVLCTTRETCCCHGPRTG

SEQ ID NO: 1010218 - protein, 245 aa, Homo sapiens
MAGHGNNKCLMGQACNNTAKWSNHHKQQLFVTSVTLENTEDSKTKLIVNYLPQNMTQEELKSLFGSIGELESCKACTETKLSRAELGIWLCELYIDPKDAEKAIKTVKAGGLQSKTIKVSYARPKSSSIRDANLYVRDFQKELTQKEWEQVWHEYGALLFSDPGRPGSVRISRGCQRITRTLRNAQIGGHQQTLIHKPLQGARNPPRVSTADQASGKDWEIEPNDSKAPHAPTRCTECHVCTSNR

SEQ ID NO: 1010219 - protein, 154 aa, Homo sapiens
RTRALAVPTEPVMERPSLRALLLGAGGLLFLLVPLSSSSSSDTVRPCELGSVPGCASPAGTGCLGESRDACGVLRLCAPAAEGEPWGGGGGRVGGIHATPGMECVTDAAKEGGRGKTPGAGQPWGHAVVKARRVAVSPLRPDTQGCRLKTRKQD

SEQ ID NO: 1010220 - protein, 151 aa, Homo sapiens
MGASKGQKRKRYGGPLGTTFNTRETRHTGALYTAKSTEPPPWQHILLRRVTTCGGTLTHFIHLYSHFPGYLLEDRTSGDPFGIYSKLWPFKSNSLKNWYLEFCTRELVVFFDRVKPVLIARVPRVIFLRWDPQSFRKLVLTHGLKAFQGLE

SEQ ID NO: 1010221 - protein, 84 aa, Homo sapiens
SGAGEETVVYSRRNCLLVDSTNGAGLMPSSSFMPCSRRFIDALDVGKHIGKFNTSCNCRKAAKFYRQDRIARIFVKGTGKEKKN

SEQ ID NO: 1010222 - protein, 294 aa, Homo sapiens
RTSDSRREEAGVDLVSPTPLTPPDPGACSATAISPCTLHAARRGEAMAKVSGAERGGPGEPEPFSTAPFRFDDHASSAVKPWLDDLDVEDHLLFGSADTDAPLIRSKTRLLVGPVPDRETHCLIFQADAPKRSLIPETCAVGVTVVLITLHLRMDQEFIRVGYIRQEAEYLNPELRENPPMKPDLLPASSGNIIGLGTPRVTPIRYSTLADIPTNETRDSTRPIRRLQRQPPPLRPDGTSQKFQNSSNIPQMQTGRSDVCITRWSTRTHHLEASRVTRMSNHLAHGDTLRILRT

SEQ ID NO: 1010223 - protein, 300 aa, Homo sapiens
MPRNYQPLKCTCMSVLVPDDTNRHSLSRRIRAEEEEERGRRQFQGSTLREGLGIDQEHWYTTRLESQRTEPPIIEAPKFGPMHPLTAPAYAHRTMVPGHDWTLSRSTQAPVAKFWTRNSKRNNLVQTLVWKFAILSKAATHVSTRNKLATMGWCQPKGSSTYRSEGPFTAYASSQGGWIDAHICQLRPRQHTTEVLPRPPNVIPFHSRYAKQGSYRQCASSILVCRGWRIHNTITQGTMMRKDEGEADALCTNGKTPCVVTTVPLCSNADRGEKTPKRGTSHTKTTRAKGAHTAHHVTRT

SEQ ID NO: 1010224 - protein, 209 aa, Homo sapiens
RVGHVRDLAESDGPAGASCAGLGTVCCRARSGATEGLGCVEALVPRAISALERLLVAVSSSRVSGPDLQAHPCYEDRPCCWQLRLLAAAPQRETCMVCVQSSVRAVGQSGYAGLCQSHCGVSAGSTGHSLDGRRRGTSRRQGIAPNCWWRQAPWALGGFPNSSKGVYKVSRRGFTFLGPLPDQVGGTPELERRNGGRKPILVCNREQAN

SEQ ID NO: 1010225 - protein, 224 aa, Homo sapiens
  misc_feature (72)..(72): Xaa can be any naturally occurring amino acid
AERLNAANAPGQLHGRVCASCETMGNQWFSRKLLHQWPLRKGQRLERKPVVLPCILQTNLQRNEQQNFEHVXKAEIISFRPQKRPRFPAMAFDVTLRCRLVGYDLVAWSSRSFYLGNEMGTHEITSVEFTWPSRGNRPQYAKVAIHGDELVNHTYHTPENYRNKQVLLRTVAQLNNGVNTKWELGVHVAGYRHRKMVPTKVGGRKQVGTIYRSQYEYYHEGEPA

SEQ ID NO: 1010226 - protein, 256 aa, Homo sapiens
RSSIGSGSGERTPVEPCSSPTGERPGASQHINSPGEEPVSCRRPAPSATIDRQTMSMRGPRLQTGRKPVEMHRRSILTRDKQAQNDDSHGLTPSPRSPSVALAGFVFASSCVYLAIPMASHSASESRSSENEVPPRSEPEYRLLQPTAYPLAQRFSPPTDGTPGNEARSTLSPHLLLALHLAVDLLVNRFELVRRQFCLACMAAASMTVLPPVSTGAGPVLPNYCNERLLTRTAEHSEPVLAKLATSWLREPFDAG

SEQ ID NO: 1010227 - protein, 180 aa, Homo sapiens
RAAAAPQLLGLGPRQPVHGRPVPRALSARAVAPDADVVLMPRSRFARTLVADSPHPSHLRPCAPERQVAGCRSDGRWRGPRGPVLVDASRASRADLGVPRAASLVLKGLPACRDRLERVETAMACLRRNLGMGSQRCRDLGCRGCGPDSYSTLASVCLRALLFDKALYLSWRIPLCPRRP

SEQ ID NO: 1010228 - protein, 107 aa, Homo sapiens
MAAINGRQAPRLKVAAGPVHALSCTDILRRPEGCTDVLLDQLGSKRHHENACYWVQVTSNSPKMRNDACSDRDANSTSNQHSLICKSSNQLMDDCHMESGTTSTCSN

SEQ ID NO: 1010229 - protein, 115 aa, Homo sapiens
SGGARRSVLNAATSPGQLQEGLCSGARVNGYKIIHHGPPKRHSQENHVILILKQRCKEESYTYLSPVDCPRPIGFTYQCSLVYLGFTRCVAYHFYLPRHETGIRDPRFLDLACMV

SEQ ID NO: 1010230 - protein, 93 aa, Homo sapiens
RVYLPMLCRRADAAGTSVSFWSYFTLHFSLSVLFLIVLRFRPTPPPMSRQLSTLLRRKMSLQGLGRPKDTRWCKHARGALGRLLQPLACNTRT

SEQ ID NO: 1010231 - protein, 120 aa, Homo sapiens
RRGGCRKPLCMLYLYPSGSPEGRWSPSVGVEEELRWEPPDEETKMMPNKLCISVTCYALTGVILMRVPVTIASVIATVVIVLASPELLGGDKDDIGAPTRLDRRGVKRLGIAITSVPSWT

SEQ ID NO: 1010232 - protein, 103 aa, Homo sapiens
SGSPSPVLCRERTRLDLCFVLVLFYPPLFAFPVSFANGFRFSSLILATFERILHFCSDGCPQCRGSQQRVERREAGRIVRWNVTVGTLPIKSKCSRNQPMSTD

SEQ ID NO: 1010233 - protein, 146 aa, Homo sapiens
AEKRTDGDGDGREQIQLLLRRRVAAAAAVTDGEICLQDEELPGLDSQWRQIEQRREMGEERTTARPGEELVPCGEALSISSGRHTCREGDQDSSDLSLACDQAMPLLFQDEINWALSREGLVEGEDYVQLPSSCIWHYRGRSCVLV

SEQ ID NO: 1010234 - protein, 80 aa, Homo sapiens
MADDSGRSITHTNPWTAANFSGLKPEVSSRPGMRTSSLSPSFPSGIRGGYVQDISHARVLNGPTVTHLTFNSSRCRRSSR

SEQ ID NO: 1010235 - protein, 86 aa, Homo sapiens
MCFYVGDEMAQEVLYQKVGGQGGTLKVISWRTPVKLWVTSRFTIIGKNQSRGLQAPTYWQVQVLWDFRPRLPCAKMVRVAKSDRMT

SEQ ID NO: 1010236 - protein, 136 aa, Homo sapiens
MRSQCPNSSMSKIIFVQQVYRQRYYKNVVFVLTYQSNVVMNADELEEISEIEKRLLALQVVGLSWASAALEETPWVALAALNRYTGGNVGAQELTNTKKVAPNCRFIRSFYLEDSATKAANPGVPNSQYQVEKHLG

SEQ ID NO: 1010237 - protein, 84 aa, Homo sapiens
MDTGARAESPIQGIPVGGFAPHYGVWPGALPVSVQLADPYALTVCQTNSPERLTPSLPGRTRPFGDPRKPSEECSMFRRTERHI

SEQ ID NO: 1010238 - protein, 112 aa, Homo sapiens
SGGSFSGPASAQRSSAPNVGRPSVRSECNALRLLWRARDDSTAVLVPGTHGGPEHPSHMTSAYSETVRLRVPCVVDCVPAVSLRDCGEFRAYSTRCVQTVSLPRDQGCYFSL

SEQ ID NO: 1010239 - protein, 125 aa, Homo sapiens
AGGCVWEGQNMAADPNKTEIQTLARGFVQANQLGLVRLRRQESELGQHHVTVFSCALTVPGCTDPWCVHLSFIRSTELDSKWNWFQREVYAVSAVNANADGVFVANMDAQPMMTNYRNIIDRVCP

SEQ ID NO: 1010240 - protein, 105 aa, Homo sapiens
MRGRQAAGEEAMGAAGLLLLALLLARAGLSEAGSRKRRQPFQDHAGLTGVITVADIVVWRGTAETRCVWPVGSGEPATCGDSHDMLCVSLLRPPHGTHHRAAHCI

SEQ ID NO: 1010241 - protein, 126 aa, Homo sapiens
SGVRGDSAEGRGQTDLGSVPGEPREESPAPEWRQACAEIRKPSAAQADVPVIPRTIAEDQACGKPCSHQSRGEGAGNADGWVGQIEDIGSASSGKRVTLWIHGEKRACNRSMWNSGLILHGTRKSV

SEQ ID NO: 1010242 - protein, 102 aa, Homo sapiens
  misc_feature (40)..(40): Xaa can be any naturally occurring amino acid
AGVRDAVVTGPVADVRLCAGIWYSGGYERCVMRTVAGLLXVSPVGRTGSPAYELRMWCGTQCGEYLDGPSVASPAYKVEQRQGGLGTDPPRSPLTADTFQYA

SEQ ID NO: 1010243 - protein, 85 aa, Homo sapiens
SGAGSLKPVNMAVTDSLSRAATVLATVLLLSFGSVARIVHIEESSSRQFFRSGPYETTGAVLVVYIPYSAFRLIGHVCNIPSSVI

SEQ ID NO: 1010244 - protein, 148 aa, Homo sapiens
MFDQAELEEYDGVDAGKYTIGLLARPLMGFCTDREGYYSSLCMTVVQNLMETQIILSYDCIGRLEVGTETIIEQHHESVKTNLMQAVEESGNTDIEGIDTTNACYGGTAAVFELLLTGLSPALGMDGMPWSVAGDIAVYCHRTMLDLQ

SEQ ID NO: 1010245 - protein, 249 aa, Homo sapiens
RNGGHLEAFTALEGLVAPAASTRVPRAPRLSLLPATVTNPRSAYAFLRVLKPRAAARPPPRRLRVLKPRTAARPRPGQASVWDTDWTSLPHFLGGFGQVSQSFACVLLVTGGPSPAGSPRERAVASPLSSEAGGLLRPPMTEPSLSRCCLLSPRASPPRTLGGFSCRAAGDSTEHLHVSVAPLRPSGFCSTACFTRSSSQLHAGPLPASLPSPDQLLRPGHRDPWPCLQTQMPRPLLTFRRGVLGADKD

SEQ ID NO: 1010246 - protein, 97 aa, Homo sapiens
RGEAMAAIKAVNSKAECGAGPGSLCPVNYMRRPRAAGLCLRTNLGPNMAPVKKCLFVVQHDIQDSPKDGNCAARMRCKTSTVQQRSLHSKKYATASG

SEQ ID NO: 1010247 - protein, 168 aa, Homo sapiens
  misc_feature (1)..(1): Xaa can be any naturally occurring amino acid
XSFARARCTKERRNERCLAHEQQSAMISHSIMLLIAEDQEPRVYGNSQHIAPTALLSSSANRCVSTIEKPQFPRGIPTVSIPQAGRSLSELLSFSSCLRPGDSSSHEKSEEAGTPLPLALVPQSVMYCLPDTEQLGEEELLRTESDLLGQSVTQATSSMEEINGFAKP

SEQ ID NO: 1010248 - protein, 111 aa, Homo sapiens
RGVTGCRLLSAWFFFSCRVKAPVCCFLVNVCECLLSCPRCRRPGSCAKWVRAACLCSHLLPSPVPARPVVRVECNVAVRFSCLLSMAIRVPLPLALGMVRISNARGLNRCT

SEQ ID NO: 1010249 - protein, 136 aa, Homo sapiens
AGCGCAGLRHCSVYAGGPGQGGVDGSHTFVPSHWARRCARIPGRGAGVNALGLSQAWRAEARRTRNPGYGLTQGAYLQSTSTPTMSPDTESLWERLGTQLVTFATLRSCCSCVNHLSLLIEERFSLKSVILLLSTL

SEQ ID NO: 1010250 - protein, 409 aa, Homo sapiens
AGHGWSQTPDLNVIHPPRPPKVLRDYSVEPHAPGHGYALSLSPLSRTASALLNFPPTFLYHINLLYPLTSQLSSSPHTALTYSISSNDSSSYRHTAPTRYTYTLLTYYSSAYNREPRLSTHSTHTHCPPPFAPPVLQHTSYPFLYHRSLLLRPRPILTFKAQLLQALHSSHGLYPYFSFHLRHLHLTPPVAPFPRNLFHTAYCLLTLLPPPTKIDDYSSDNLPLRALTTIPAPTNLISTPTTLYGDTHLSSALIYNHLGHPTVLSPCLTYPLPYQTPPRLLTPRHSHLYLFLATFINIISLRSTFSNHLAALPTPPEFCSIATAPTVSQGVIRPGSYLFPHSPSSSGTSTKRIVNKLIPNIRHDCINHTSDGSGPVGTNAWYPTTAQQETKFESPAAAYAQHVQDTSEC

SEQ ID NO: 1010251 - protein, 241 aa, Homo sapiens
SGGVCAFALCSASGGCSLCLLRSSMEPAALRPASSRGIAGDLHPGLAVVVRSALESSAWWHPVWKWDAPGSHSGTSREDLLHEGHQLVNRTMSLGACVSLPGGLTATALPCWLGVRQGQEAADCREENLDNGIPAHWRDLGEFLQRHLAGTSPEVRTATVLNELAGLSLVRDHFVRTGHAVTGIAEAQYVTGERDLCNVRSRRLSVRGPETKLGEKRMTIFQGMLAIAGLRRSIRGFMYRQ

SEQ ID NO: 1010252 - protein, 418 aa, Homo sapiens
  misc_feature (68)..(68): Xaa can be any naturally occurring amino acid
RSRVHANRAGLGADCRVREERWGVFAEVFLSFASHPFVACWFCCFVGPYGGIRQQCRPEDVVKVELVXPEISIALQDGVAMSQVSLTSLSEALHRTSPVCTADFLLGRTAGMLEGLRRLGVWTCDSAILRQYDDPLETFQLSLLGKGTCTQVRHGRNALMERNYLILSGLGSIDPRGHAALSLGRATGAPYESCGMMVGKTGAEEHVPIAWCLTYEITDDPDYSFFHRLLLPNTPMGFNLWGQSWLATTCWAWRVHVPFHCTRKRIGHALPFPIRESQDNGDRGPRFVKINVAIAFWDATRALFLGPRRTLLWVPLVDILPWESKPWRVVFPLALGTSRRLFQSPNALLGERQMGIGYGVPNGCLTQGWALRGQPRIVRHSFSVGKTCRGAPLEQGGLFELTYTGKSSFWETKAGHTY

SEQ ID NO: 1010253 - protein, 217 aa, Homo sapiens
  misc_feature (63)..(63): Xaa can be any naturally occurring amino acid
MKRPKPGEMGTLWRQPEYPGHGHALEDNLITNLRAVVGLEGTPHEVVACEGSTHWMDGLAGRXHWVVAWETAVMVDEARVSSESEYLQRSRWKRKPDVSRINRTMNAIMVMELQSSLGLLVWGAIERATVLGSAHEQALHTFSAVTMRTVTIGERHAPCTPKQVVLQALVVSDTANQEQTCCARIGVNYHKCRGSHTVHHKATRGGRPFTREPSVPA

SEQ ID NO: 1010254 - protein, 114 aa, Homo sapiens
  misc_feature (108)..(108): Xaa can be any naturally occurring amino acid
RDVGQAPCHSVGNRAVGDPRGASEHAWREEQVLLVVRASAGQAMHGLTLRSLSGLSLCYHVGAMFVLLHEDDRKQERHAKNVENRQLCIGPMKDWLLDDYAQNRRTVXQDRRIE

SEQ ID NO: 1010255 - protein, 338 aa, Homo sapiens
  misc_feature (105)..(105): Xaa can be any naturally occurring amino acid
RNRPATVLCHDLWHRRGPSSPQCDSNPSPRLLTRIRRTPASIWETLEHAWLPGKAERAGAGICSSFRDLRRDGLLKVSLRLVEELTRSGDVEAGRCPLVVLAGWXDFKAATNILPTMVTMGECLPRGSFAFMQASCGDECFVPPRQVVLSSRQKDAVLWHIAQYYCHTAKTVALLVSPRRGLAVGTPEGQRIPKQKQALARTRSQNARAKRLEWRQFVQTSRRERDTTFMYNRLSIRSITVCGDRWPYLFRRRLLLCDGSRWSPYKGKTRRGSCRLEPSPGLFGNLGMGTLYNASPCEGAERLRNMRGRATACHRLVALLRGKSRLVGHFTLVWDPPL

SEQ ID NO: 1010256 - protein, 56 aa, Homo sapiens
MTPTYEYQSETWDRTRHFRLLTIDRLTVNACVGYYSWTCPKSLENRDVFQPSRPGS

SEQ ID NO: 1010257 - protein, 209 aa, Homo sapiens
SGCPLPRPEPPKRLGALHLPGGWACSAAAARQLDPTRAGAGQPRPWICAVAPPDHCTGLSLRPPIATWACGDWAGGLAPSRLSDHLVPFGLAFWLARGLPKAQYSPPRTFATGVGCAFPPCWKPGLVTVGRPKVGPGGTRQNCEAQRKTHPEAGNRTGPNRRTIRETHTRRPIVLNTIRRTSPDGPRRGQKEKPQTIQPGREPPHTSTE

SEQ ID NO: 1010258 - protein, 262 aa, Homo sapiens
AGGRSQWPQQRAVALCGPSRAQRGSRPDLSLRSTAAWDRSMARHRWPSWRRTGRRLRGCGFPREGHQVPQQDYEALRKRVPGGPGTLFQDPSFPASPSALRLQGVWGPNSSKNLGHLSGKRPTEDLALTPQFIIGGASRTDILPEEALGDWLGGWASHWPSLTFELRKLLGSSRPPLNQELPGKNLCRDLSLPVTGKYGEWGGRWVVDDRLAPPKAGGSLLFGAFQPDGSEVWEPPWLAKASTKNHGCYEAHTGGATIEVRR

SEQ ID NO: 1010259 - protein, 146 aa, Homo sapiens
AGYQKRPLSAARDQAVQRFSHPATVPAADRSQPRSRAQRRGRRPPPRRGRLLSLPHCVALTSCRRLRARPRPGSGPSPARQRAKVNTGNASGTRPEAKGPKTEGKQRNESDADGEIKRNEEDKKNKVIETVMGKEKEKEKNTREKD

SEQ ID NO: 1010260 - protein, 71 aa, Homo sapiens
SGGWGHMAATAAKREPRRRRCRQHIRHIGADTGGSPGDPELSDESEKSRCIRVRWTVAYDCDCGELEPTDH

SEQ ID NO: 1010261 - protein, 214 aa, Homo sapiens
MACSIPCQGRGGPARRCAKSNFRGFRPFTHLVGVVPILPMLVPAVRSSAIACHHWLGPRLVGRPIVVTVPSFNHILPRAPLYLSTLGPGSNPPLFPLGPPLVVPTPFFSSPFAGLILRRQRGTYTPGFENFAMLGSSGERLNPWWRRSRLWDTRGWAPLGHLGLWVPTTNFRKREKPQRQIGTKPPPGRLELSNCAHNGDTTRIPPERANLFPR

SEQ ID NO: 1010262 - protein, 87 aa, Homo sapiens
MALHFKFLVVTHCGELPITPVFPRGDPSERPFTIIHFALVEKPPCGDTGIPKQWHAERSRKPAPEKPTVGTAWRPRLRYSRVDSAAA

SEQ ID NO: 1010263 - protein, 115 aa, Homo sapiens
MQLETSGHLVVQPHIPTAIWYLLCAYLYQSGQSPVYTMPSSGPGGMRSMYHSPLDCTPLMRYCQVRSEDRAPLEFDTPQTLDLNQDLTMAPRSNQYRLGQHAIQIRYQLLRIKCL

SEQ ID NO: 1010264 - protein, 279 aa, Homo sapiens
RRGAPHLPDGECWPGGGADPARVSAPGRWRLAGRGWLITPSSPPGLGRAGRAEWAPHLPCYGASWADGAPSPPGRGAGPAPSTTKQGIELPPPSSQPHDLIHLTRSRPQLGFRTHPRRSPPNRSHTPRRLEHPPPSGQDTSVTSTIEGPRTAPLCTTKAINGLQHDQAGATQSTGARTREKQQSNVGTVDTTRRRPKTSRQHNKTFAAGQARRRARTEAADERVSTTRSGDVDKHMTPPDKYTPDLSLNHSTTRYHFAAVTYSPLMWQPLTKVTIKSNI

SEQ ID NO: 1010265 - protein, 72 aa, Homo sapiens
MGSRFFNNLLPLFGIHGLAPFYIPWGLFHSSVWFVVGMTKGPPSSSLIQLVLLGTILLIPWNESWGKSNGRR

SEQ ID NO: 1010266 - protein, 67 aa, Homo sapiens
RNALPQMLNDRHEDNTFLVKMTFISRTILSCAPTFCHDILSKENLGPSPDVATSIHVTLYPILSRDV

SEQ ID NO: 1010267 - protein, 297 aa, Homo sapiens
AGMQPPPPLPPLPPSLRALLPFPAYYIPKLTDYSATHARILTFITNSPQSTYTLQLLTHERQHKFTLHINIATNTHPTRTNATQQPPQYLENTISDHSQYLRRGMKPHPKHIIIHQRENTQTTSNENRGPHMCGEPTHFSAKHSRKGVSRALNTNEPTYTQPAHRRTSPTVRSRDNAPPTATLLSHTTPQRTSPLTTPPSFTFTTKPTSTRQQRLTLSQHTKRTTTPTDTPPPKHNPHLSNHHYSKHIMTIKLQLSDKKSHTSQTLATYTHQYQFILNHIINNQTSIPTLNYMRTIT

SEQ ID NO: 1010268 - protein, 149 aa, Homo sapiens
RGVCCGASWAGGRGSRARRVQTGGRAREADRSVPGLSSPHSEPHVRANPPGGWLSTRGQPSEASLAVCGERASGSGEARKGGFARLVWGAGRASLWDCLGHFGCGVGPKTFIERKLTHLDGKDTGQVKVFARKRVAHAYSPGCRGGRIA

SEQ ID NO: 1010269 - protein, 74 aa, Homo sapiens
SGLVSRLPGPRLPCARRAGIRSGGKRTIPFCKSEEAKCPGRRTSLRRESVRRMRLQGEAHVSNGVQNDQHEHDR

SEQ ID NO: 1010270 - protein, 216 aa, Homo sapiens
  misc_feature (4)..(4): Xaa can be any naturally occurring amino acid
NGGXVQSCLRDPQWGASSEARRVRHSAWLGGVAALGESPRAEGAKQRGGEALAAASSLRACLAVRAQGDGNERRAKRGDPARRSVREPRRCPGVREANRRGWARGGEEVLRGLAEASAGFVSEAAAAAGGGGAGGGCGKALLRDARFRPAVGPLVASGEQAPRGSVCGGGLAWAGEADAGRRKPGGGVRAFVDSGPGLSPQLLRGWVTQSKEENRG

SEQ ID NO: 1010271 - protein, 261 aa, Homo sapiens
MLTLPANPPTDASDGLTLLRLPCARTDTLPTLRQTYLPLTHFTNRARKRTEHICTRNSWDSNSTRSNRVLTIFSSKCSPLTPLGPCSALHPAQKTRFTTHLQKLASHLLLYPNAPPVPLNSASTCATELLHPQPNPSRTPFFYHATNPQGNYLLPTSAHHLLPTQANSAAQPTSNLHTTPSGKPPNRHLSRLLRTPPPSPSTPLFKPTQTRFRQTSPLITTPYPRQPPHHWPFSTAGTFSSKLRATLSQSELCQTLTTAKK

SEQ ID NO: 1010272 - protein, 108 aa, Homo sapiens
MCTMAQDGNTAVKFHLYGVSLVHWSYDGSFHDAFVYLHLKTKSLSKDIDYLLVSNEKGEIGAAFMMLYNVYEWTEMSTKDMLKTSRERPMTKDQVDEGSMSDTTKEQC

SEQ ID NO: 1010273 - protein, 125 aa, Homo sapiens
MTRSVGMLHSTCARSLCCTRVHSRLYQTFTEQDPAGVAFGRNKLSDSRSMQKRGLPGARNLGPVTGLMYSRELCMYFWSLECSTVEASGRQFAWSCVSRYFTAWELVLTMLSICRYRSGKVQSYE

SEQ ID NO: 1010274 - protein, 151 aa, Homo sapiens
MNGDKWCPRQHSGAFLLLFLLVLTVTEPLRPELECNPGQFACRSGTIQCIPSPGSVTAGRLARMKSEDCQLSRKLTGEGASSSWERTLWIRGRAGTEATIRTSRGERAHPYVQKFLGKVPRRVAPHYEGTRRLLTGLPDRGELLGCGRLPP

SEQ ID NO: 1010275 - protein, 47 aa, Homo sapiens
MEPQEVIRSNNVIVKILNIMMIQSRDKERENKDVQQESELKVYTKPK

SEQ ID NO: 1010276 - protein, 110 aa, Homo sapiens
RGGAPPGGDDTAPRRPEAPGGQFADRIAATRQRVPRRPRSMGCAPSIQGADAWWPRTRLAPRHRVSSGGPASRRARRRPLAPDPRRRLWESELRDGSGKKVAVADVQFGP

SEQ ID NO: 1010277 - protein, 134 aa, Homo sapiens
MAEEMDRVTLDCRHKKPGTDRILAEENGHGCSSRQQKRNTEKQMAVTPGDGQLLDGLPSSEGWLTNTLTHEQQRPSFAMAQAEDPNRQAKITTEPTSLNEYAATEKHENAEYTGYNTEITETYGPAAHIQLHRI

SEQ ID NO: 1010278 - protein, 68 aa, Homo sapiens
APHPIDSSDHIAISARLDSQTEISSHIMTSGYEYNMSVAVRHIRRKLLLTTDNTSDMSDSKISDRLDS

SEQ ID NO: 1010279 - protein, 181 aa, Homo sapiens
RGVLSDRRNLAGGPGTGWVWSFVPGDDARVQALVRGFASVVVAGLAAGLCEPLSWMYACRGVATLHAGQRDLRSADGASIYLDDLMSRSVEEGNRDKTHYTLRFWNLPIRRASNHRLESHRRELNYYKLIYMIDRSQYLVCVMGNPFRRVSRQSIGDDSREYGILDSDDGYPYPHTRDTIL

SEQ ID NO: 1010280 - protein, 142 aa, Homo sapiens
MAVAAGTAVSACRLLVGVTRCGCCDCVLSVVFIFFVEHILHEGNLISLQHERVGSGTVATDVVALADRRRSENSVAALAKSIVLCSVYSLANSSWQRNGYSSKTGYSYLTVMLATDLSPTMQRCKPYTMALRPAIRVGFQAN

SEQ ID NO: 1010281 - protein, 335 aa, Homo sapiens
RIAVCAPGRAVPSAPRPWTRTIPGPQGLLAGSFLEHLSVGRQGIGVLTSGGACSRYERLRPCPWCALGIYVGAKVSLHLRGLTTGHWVGPERSKHSEDGTRRRKTSGSPSIPCKVEAEDRTHLGQCASEVCQSPFPARREQGPACKGAWVLAHNHGQWQNAAGDNQPNNAVWPHDIPRRRGHQGPRPFHNGGGPKNPIYSRGTSRTSCEHVGSNGLGTADSTAATKRKNGSPEHIPENRDRGPGCTETDHRTTTPNKHERDDGTPIAEGAPTQRRTTIGTYPMAGEHHRNILKPTIGPAGPAHGTHANKEIQSEEPDEQATDTNPNGPQQATPTK

SEQ ID NO: 1010282 - protein, 282 aa, Homo sapiens
VLPSAACGVWREKELDTHRPPYRPSRSEKLVRPALGRGHGRPAPARVMTTEAVGSRCRRSSPGHFVQLPVPVIPSALPLGLWPGLLQDGAAGTCASWTTVSLRESLHDELQLTRSIWTIDLAYADVHRCLGVHGTAFVYPEYPWCCRHEGYKNQSFYMEALCTHDRDPGDITLFAHSKGLQGAGGMNSAQLSCARTSRRTWLSGHVAIVLVNSGVLRCDLCSMPCQCTAASTPVATTASARTPDYQGHVHRAAWLQPGHWLASSTMIPGYCRTQEVVSTRHQ

SEQ ID NO: 1010283 - protein, 334 aa, Homo sapiens
SGLRRGRPGPRHGGRCLEGPSRRPPDPAVGAFFLLREPQHGALGLGSGNWDWALAARLVPAAAFWSMRVALPFILQLPRAFGAPGLKTVDSFCLVCEHEKPRLLPSDEYMFILMNHLVVRVKDTTEVFMGIYVDTFNHLIPTEHLDDALISRIQPGRNEVWGGFQCKSHNGLRGLVEEHCFSDKDPIAEDLAVTSSGLPGWDSNDPNFQDALFNQLLGLDDIMDERTWSQQNTWPMNTHLIAGSNWTIDLKQRTLKDHSYATTPSAEDFSKKKLTLVYRGDHAHPVTKRFGNTSALLGPRFQNAGTIEDTPKKALAKPGSNGKRTVTTTQGSVK

SEQ ID NO: 1010284 - protein, 263 aa, Homo sapiens
RELVSAGAGTRVSASGPALLYSALLCPRLPPASASALRCGALAVLPWPGRPRSPARHQSRCDGDAQPGRPPAAMEPGNRKRRRPTGKALGRPEERRGRQQHRGRQKPARPGRALTNSLEGPLKTRVPKNGCDVGKGGRVEQKRLWTLRGTQQGLPHRGQLAPRALIHNGDKLPFNYHLNIVGTPPRRKHFNSIQGTVSLDFPHREQLLHGSTPWLVPGGCVGTFLGTDTHGFGHMLVPLNPCEGGRNTVAHSQDISTHKCGGH

SEQ ID NO: 1010285 - protein, 246 aa, Homo sapiens
MAEEQEFTQLCKLPVQASHPHCVNNTYRSAQHSQALLRGLLALRRQRIVLFDVGAGGGGQTSIEDPSLSAGLRPVNYFRGMFAGGLKEMEQEEVLIHGVSYNAMLRNILHFIYTSVVLVAQPECNVATTTPGGCLPASDSQKLSISACDFLMSWVDEENILDVYRLAELFDLSPSDYSSCDTYILKNFCGLLSGPDTRTASFQLVRKVYVPPQQATRLEVSCETEVYEGALLYHYELEQVQADQIS

SEQ ID NO: 1010286 - protein, 214 aa, Homo sapiens
MGRGGGAAARDAAPHRFQEDECGAPGEGREQVEAGAGGGAASCISHALKGTARELKKEAAGRATQENGLDEAAREMRSPAGSHVIQDTGFAVKISPLDRALLPEVSPQEMVQEIPGVMDRRTRVTAPVLTDLDWNVLDHFSELLQVEGLQEGSVLRVVQEPYTVREARIHVRHVPRPVQELDHPMPQRGDATPCLLSVFTTGLETRGSGTKVAH

SEQ ID NO: 1010287 - protein, 198 aa, Homo sapiens
HSLRFSVSLPPSLPPAPQSFTTTILIHLVSYLFRKSLVGAKAPTTVYAHGNIHVSTIVTEEETLDCIVPGFPGGLYMGDSILTYIACDARILEIQRGTLEMEMPRLSNTCLTDIIYQREDSTCDIPENAIFGPCVLSHTALYDGIACIALKSTDKRTVPGYTFGYDNLETSKWFLRRSHVAACRSNRAEITEEQNLEA

SEQ ID NO: 1010288 - protein, 119 aa, Homo sapiens
RVAVAMAMRWKNGPLGMSAAGRLVSPPADVDLWTVRADPFRGVDPGGPKVDGVTAVFRPVCPGYFEVWVDLICAPGFYLPQPSSNISMRTIIVERLKTVGEKVDEGDTCDLLWLPHCVT

SEQ ID NO: 1010289 - protein, 245 aa, Homo sapiens
MVAAFDYKPQESSPNMVRGRHELPFRGRGDVIYCDLGPMDDDGFYYGELKWTKGPGSIQLPESGPGPEEQCEPVQGTHGHPRLMMSGLGACNHTKVPRAPMVGHCTPARLWQQHLQDLNVGTPHGPRKRRRSWRLRSPKGNAAPQEAGALGNEETVNAVCHPAGTTEALERPTQITGLLLAAGEGSIAGAQSPRTFSALALVGIPDGHIDQEPLVKGHRLNWLLRLELSRALTLTPKGGEHVSAE

SEQ ID NO: 1010290 - protein, 116 aa, Homo sapiens
SGAEFAPPVVLHARGGIVERLGEAHESNKQEPSLRSRNRTDVGGESRNISAAVLVNTIEQGSEANIIRWLDSDTSRSSLGSKVLLSGFSPGLPKNDGLRWANLGVRQYPTKVTFGP

SEQ ID NO: 1010291 - protein, 371 aa, Homo sapiens
MVLPHGTGAGGLLTPEAMARAEAGVELMAIHRSSSGVSQPGRDYLSRHAISFDLKKQYQLYRCSSAQPLLTRNHQCRLRARARQGVYPVPVSVDVSSPWEPPRYQTPIAALTTPIASRSLQQTQRTASDSPNGNHATPLHSARQHAQGSSEQPQHGSSLASHSPQQSKPFRGNQTGLPPLVHSTPTMHVGKLGLSRRGSFQMGGTCGSARKRGSRRLLDPPFGVRSLLFPKWGPSPGRATKGFPRHTHFAADSYPYHPWRHREQEASGTNVYQGSSYPILRNSQFGMEPHRRNSAPNHTRARSPSSQTTAGLPRSGTRSPNQHRTTTWGPRPTTFEQPYTKPLSIGNLRGPTHSSNPHTASPRGNPSGPLG

SEQ ID NO: 1010292 - protein, 204 aa, Homo sapiens
AGGARGGQLGGEGAVGAARRNQPRLGSSGDAVGPGPGLSGASCEACRGPQSFRRSPEFVVIVAAACNAPCAISSSWACASSSFLLLRGPGLIPFPRCRLLLGLGPGVSQSPRGAVLAGAAAASFIILVHHRRQQAPRCSNRVVCEESQFTREAVHSLRHRQLNASYKGWVSQSTVYKKTLLEPFIGHQCRDIRYVWGLVRANVF

SEQ ID NO: 1010293 - protein, 313 aa, Homo sapiens
AAGAARCASGRRACAGPGAHRLLLVSLLRAWAWCAVAGCCCCGGAASDWAEPLVSRLAPCLTPLDPWPMRCLRGGHRLSILAHSSADAEQRDDDWEACPWSEFQALLMHDWRSLTEKELAGSRFTRLTLTTAKPCGHQGAVLITSGGPHGLTMRHVLASPWRTLNISLSLNGHGAYYPSKRYYERMGGTQWTQVCCPRLRSLNGRTSPNQDSKFGSLEAPGVNEVAAATGHSEEHKSQAMLLNSNPHSKAHATRRRGDQNPWVVGKGPQIHRTISAPKNHNASLGLIAEANGQRSRFNLAHAEGRHNERRVWN

SEQ ID NO: 1010294 - protein, 100 aa, Homo sapiens
PGGLSRPSLRLISKSGPRSASPLGLGPNLGSSSALRWDNPHRKKLSAQDIGQQWFPKRRLSKSEDKRAWKKMPPKQEATLSKKTTEISYCNEVEENDSIL

SEQ ID NO: 1010295 - protein, 86 aa, Homo sapiens
GRRAPSSSALAPAQMFRVLAEHKGDRVIAVSGLGYDVVCSVVAAKRTPVGAYGGLLKDFICVLTCLNGLPRLPVCWQSLTMKQLTV

SEQ ID NO: 1010296 - protein, 305 aa, Homo sapiens
GFHAPFGVALPCLRFSRLSLRGFLSFSPLALCFVPCPAPSSAVCLHGFLFRLLGTLCLLSLAVSCTPVLLYCLSNGPSFSGGSLFAGISTRLLTVSALSVFASLGLCYVIPQLRFPSPWDQVYRINNTLEPFPKVIVSFASIQCLWVQRLNFGPYVLLRSMRYISIWVQGGTFARTLYILSADLRPLFSLRVLAGDPDLDIGLYRPLEDRLAERTHLRTSDLLMRVLGMGRLACISRTLESSLVLNSRLLLRSRRDWGMDLDMRAPLVLTEGCVLLEINRKPLLPQNSDVFDVVIKGPLSMFMLV

SEQ ID NO: 1010297 - protein, 371 aa, Homo sapiens
ASRSTHSPHRFSAPSSSAGVSLEERGPSGRLRDSLLSYGGGSEIAKTFAPHMGQLFQCAVGHPGSRHRSQLGSSWAGPDYQSWGLYRYAKESTSGWSLEECDLRISRNLTSASSHVAFLLGSFAYGGWNVSEFTVTEERCDPYCCSSLEAREGHLPKCVGQCSDVKRLQSQSQPCSSHASPPVLMLVTSRHVQHSSNVRGLHQSTVFYGVTVAGQDSPSHGRSLIIPPCPFQAPVLPGGECGTSRARREAASLWPCERWWSSCGVKKDAMEWPQSPMSWGATVARTRFQRSMALGPTEVPARAGPPLNLTLRWPGAFQAGPFTLGGRSRGRVVGWGLGHHAGHEQATATYHGWLQGHQTTASGSMTSCERA

SEQ ID NO: 1010298 - protein, 358 aa, Homo sapiens
VGVPHNSWGLSAVRGDTCSALLGGARLSCFGLPPGLSASPWGTRVPEAVRLPGVLIVSFRCGSRPAWSGLQLVGAHLVPLIVWPVFSVLARHVQGVPLPWSSAHICRVVACPWGSPFLGVGFRLLPLVPRVSARFPRGSILSRVFLFAIRVASVLALSVACLLVSLDTSLGCAPFRGDLASDVIDDLVTAACAGWVAGAFWVSAVRRTVSPPPLSHARRSASGPGRHPARAGVSLLRPRGSVRGAALGGLVTVSRGILRCDYPRTLAQRIMGVVTLVKGFLGCFHAVGPSSLPWQALSSTDLHSTLWGSVVMQQRREFLWLKNLLHLRSLPGGGLSGPGLEPRTNTLYPGEWIAKGPR

SEQ ID NO: 1010299 - protein, 221 aa, Homo sapiens
RRRGFPRPQAPDPGVAATSPCHAPGGTGRRDGDVSGGRPPRVHHCFLRNFPSASSHAYSVCPRAGPGLGSSASARERVPSAFQRDSSRTRNARAAGPGGGLLTEKLRKEKTRGDGASEELAEAGPQQDAAEAQKGNETGTEGGKAKIARFGQLEQRPGGSNQGNGPCNEHSCPLGEARGPGDTEAPGGGRTGGQESPDNANTRAHMLGEATAKSSDIWDTA

SEQ ID NO: 1010300 - protein, 102 aa, Homo sapiens
STLSLLLPFRVLFCRVTLPTALCSLCSRLSLGRTKLVCSYSLAGSGSVVHPLHRVLCLILRVPVLVPVSGFVSPPCSSRFVWCALLCSPVSHLARFRRHGSK

SEQ ID NO: 1010301 - protein, 233 aa, Homo sapiens
MTGASRRATDAGASSCQAVRRGSEPVRAQTARREGRPVAAGLALDASRFDGGSRVSRTSMLEPRITLLVCPVVLRDQDRGDYDKEEVAATSPRKLRLAMRLPILEVEETFGAQTQGPLLQNSRVAGNMTAGQSGLEGEPRKVCFSVGPFASARVERDTWWRDPFRGLGVNSLDSYSVVGHKPLGTFCDVVQFDTPLVVGGGAFFPMLATGGNMWQAVTTRLAPSPSLLLAAIP

SEQ ID NO: 1010302 - protein, 132 aa, Homo sapiens
ASWKFTRVAPYPPFRDSVPSIYGPTWSNHFLPLIPPLPTSPGQFSTSSTRLSFLQIFSQSTIGENTLRPRLSYRCQLLPHTALNSRMSLMILLLRIISLPGVSITLGIHYLGSLYCSPRTRELCVCVKRVKQ

SEQ ID NO: 1010303 - protein, 195 aa, Homo sapiens
MQQKLPEKQQETMEKQKGPEEEEPNPNYTEVEDPQQESQRRHNSMERVSGGGDGKRARRHRGTEEGAQQEAGAQEDKKIVMEETEEQGWRSPRDRRLQELQERKHSRAPRSHSVHDPSGDNQITDSSQSHQEFSQKAKEVAKSKLSLQLERCRKQMSFHRHLSTQTDFLTSDQIQSEEHADLGPETAASGEVEEK

SEQ ID NO: 1010304 - protein, 320 aa, Homo sapiens
MVKLGCSYLLVEARKNDPWGPGWWHPKYENEPLVMNPLWTTAMAINQHDPDHYMDNYMITNTIYTILKPAPGPYIDSPRAHEIGEMRSQRLTLNDKLLGELSTHHKRDACERHKLQNMNDANEMQETDTQQDSTMKHRGPDIWAKVIFAKTNAPRTQREGRIQRKRAPKHDQTYLRMLQNLTHDNHGAGTYGSGNIQGKEAAFTTNLNDIKGITTQILAMKGESMLTPSRSPTGHMVIKIKHVVTFRGPRIPRFCTFRVGIHSPHNSYLGFATTRTYKTTLGRPVGTPFVEQVLEIHLHRRIPLLPGEQQNYNSVDLLLL

SEQ ID NO: 1010305 - protein, 95 aa, Homo sapiens
LTPRVSLLLLLVSSVQLFYHFSPYGAPCSCLGAFYAVLFGFSLIAHRSFVNTVLLEPVYFSTDACFIGYQSPGATLYTILLPALTWGTCSLLNAV

SEQ ID NO: 1010306 - protein, 213 aa, Homo sapiens
RGDLAGRRDGRSPGGRLGLCSHKSCLGGGGAGSSSRLERPSHRRRGSRAPQNGGTRGSASRQRNMAPWTLWLLLADSVVGWVPVLFITFVVVWSYYAYVVELCVFTICWTMKTTWKDRCCTCVALPSVLGDVCMVLMDDNFHISRFPLQRVLLCPILKRNVMNQNSGKKDNKNIGTKSSKSFTYLYHISFEKPHAVYKIERSSNELDRGSRLA

SEQ ID NO: 1010307 - protein, 81 aa, Homo sapiens
  misc_feature (2)..(2): Xaa can be any naturally occurring amino acid
  misc_feature (9)..(9): Xaa can be any naturally occurring amino acid
  misc_feature (37)..(37): Xaa can be any naturally occurring amino acid
YXSAVSEKXSRQRSDVYYTHLSRASAYLTYDMRYVWXVAVHYAVATSELIVSCCSSVVSYSEPQSPLVLVANDTIVHYTVD

SEQ ID NO: 1010308 - protein, 186 aa, Homo sapiens
ERGLRPVQQQQQQPPQQPPPQPPQQQPPQQQPPPPPQRSSSSSSLRRCTPPPPLPQERNNVGERDDDVPADMVAEESRSWCTTIVHTNVRRKTLFAENNSVSHKEQYGGRLNFNYRKLLGHRGKTCNEVVWATPITKIFSSNLLNRYLQRENWPDDTWFLKNLSLTCLDTRDLARKASWRYVNTLQ

SEQ ID NO: 1010309 - protein, 293 aa, Homo sapiens
CCVWAPAWFSLVFSTWLCPLLWWFSLDPLVFIWLVSLPCSCDRGHFPCLCAHAVTSLDWSLSPRRVTLACQISGPLRDTLDGWAFPTCPLGGGLPWVIVLTLKSPSQLLRVVLGVPYPRARWAQFDGKPFVFLRLCALEPRFPSPFGHWTCTVLDLRNPMGLTLTKVNDLGLHVKHLWASGGSPAMGTRPPVCLEDCALAQLPAPALPTPPKLEATRRNILRADQTALYLRRPTSRSRAPSTTAQRPAQPRKTGRRLHPCPCRPTDPPIYGSKAKGGPPARPGCLGTGGCLYM

SEQ ID NO: 1010310 - protein, 284 aa, Homo sapiens
ASAGISDGSPTRDIGNYSGAGGGARNEEAEVREVGEGNEGKHTMSIDTGRDEIRIRTDERNRQTTDEHKEKDGIIQYRLVLIKIIHSTAESTCTGGDVDELPKQKVAGRNSNKIRLYDLDIGDHGDEMMLYVPMAYGKKRSTCNVRTIMLRKKICRRCKLRAVSKEYSENAETKIDSMEALGAITRLKTARKATAKAGRFGGEGIRRNTEVRKGATKGLKEAEEGTRQTGARARKCERTAWEQMEEGCEPEPESRAEAQPKRQAAQEEDPKPSVKVKSGRLKAV

SEQ ID NO: 1010311 - protein, 88 aa, Homo sapiens
MVMFTHCAELLSLMIFPVNGFPLSTYMLNVWLYRVAGAWSPSQSNGVEIASKKRIIRPFFLKHESHDGSRVDKDLKDQGKLDTARCIK

SEQ ID NO: 1010312 - protein, 76 aa, Homo sapiens
SYEADCLGLQTGQLFPWRGYCSQKAKGELCRNYRRGSEKAVVGGTHMTTSQQERDQKASTGREKTESTKSKADQMH

SEQ ID NO: 1010313 - protein, 141 aa, Homo sapiens
MILCSRDCACIASRKSLDCDCDMASVHHAVVTRSLRTCPYETLISRAWRPFCSVSPICTVLGRHAAQQQAESDGSSLLVKDFELASAQQRPDMVLRHTVIGDFCRPKDRTKDVLTKPRTLTLCEIVSDGADSGTWIRLHWL

SEQ ID NO: 1010314 - protein, 88 aa, Homo sapiens
MVWAVLDNITMACGAGYSVAMRGAAPTIPCHTGSNYTKAPGPYPATDGARRHHSTNGRDKRGYGPRMGRSKPTKTQGARKLPQRISPD

SEQ ID NO: 1010315 - protein, 96 aa, Homo sapiens
QEGGGLTCGLETIAAAPSAVLDPLKASGILGQTCCEAMSLEHLAHNVPMIYGARILELFMSCHGSHARNIDAEAVLHCQRAHMYLGPRPEGLREIA

SEQ ID NO: 1010316 - protein, 77 aa, Homo sapiens
MLKFSAQFLSRCPVTPASHSMFASLEIQAREWNVRCKIQHPARLIKRRSVHKEVRTQPKSSAFDSSSWGDMITLDKA

SEQ ID NO: 1010317 - protein, 148 aa, Homo sapiens
MSAIPRAFLLVIGKSNCWCAPPCVAITPRAGVVESFHNEHNSSGNNAPGVKPSGARAVTDERTCFLSGPCLGTRDPTSTGTGPEFTEGRPTERICCANPCRESGGGVRIIDRPRRRLGSRLGFYTSFFFFARCNPQIRTVCKTKYCWW

SEQ ID NO: 1010318 - protein, 236 aa, Homo sapiens
VHTVCPARVSTSSTLCTQGFLALFFRRHMGSIKSEVREQDQCQGALTRVEEVQGVDHPGSAVHRLTVHMLDIESFSFLNPALESYMAPVLIMATYLVASRVIRGTSYQSLSLAIPIDLLDRLLIVSTYPLLARKTTKQILRNPVRGSEDFEMSEDAYTVLTRIRAGRRQLRYAILLITAASLVCRKRKGTRSAVCDRHQAGLLTLPGSSPAPRKYMKEYQDAFLFNELKGENHDTS

SEQ ID NO: 1010319 - protein, 131 aa, Homo sapiens
MQNSQNYLLAQHGTCGKVHSTPPNCRLGHDTVRKTLVALGEDPLRKSRHTHGQESVERTIPLGHSDTDRQTGDTSTRKYRGDSTAHDTALRTPTATGEKLAPRESGHATRPTRQPSNTGPPKHTPVKRRHH

SEQ ID NO: 1010320 - protein, 221 aa, Homo sapiens
MTKTVSRIVLYFCCLSSFTYVDTPAAEASIGVFLTTTSPTCCRFRGLRLMDPSCARSPLGPQCLLPLSPRASGALIGIQTHAMSLTACITAVRGPGYVILDQCPLNANHCVIGVPNWSGSDPSSTLMREICPDIRCLPCACWSLHPSLQQLLSASLSLGRSCVPIYCCWRDQKVIPRRTLATGYQYSFPELGDASKGNCSLRRSRQGPEACSCTGFQVRHT

SEQ ID NO: 1010321 - protein, 337 aa, Homo sapiens
PNHYNAAETRTPLSDSGSVTATYRSAVLRSPGNICMLTLESTRPVASDAYTIGLVSWRIRLSSLVGSDPSVVRPLGPIGTRRSSPTRTTNQSTARRLDALRESGRSRDGGVCIALVIPGRASETCGDVTHCDMQVRNELCAFSGRARGGQTSTGLNHAHERESSVTVPTLPRVRILRLDPRWKGWDIPYVLLTQSLEVTGPRASTTRTHGSCARTKSAGPSRASLLHLPPLEAAAWLGNAYVMLTICVEKAHAVGGLPIYSISMGLPIGSPLPEVVSPGSARWLPLSAEGCPCRCFCGNRFHMAALGRSERAGRGSAWPHMGVLRCAATGLGGQTVR

SEQ ID NO: 1010322 - protein, 116 aa, Homo sapiens
MLDGLPAKAWMAMDGLMESPSHDSLVFNARPLELIVITYPLGLRCMQASARVLPRANRLLTGPSGAVLSCLRQCSMGPLETVRMVGAMWPVPHPTSVDRGPPTSPPRGPCPPPPSR

SEQ ID NO: 1010323 - protein, 219 aa, Homo sapiens
MQATKESDSELLEDEEDEVPPEPQIIVGICAMSKKSKSNAKDVNIQSDSCRFDYLTVVIRGRTMYSLMNRVEQAGQSCHCLISFQSKGFPLDKAVAYSKLRNPFLINDLAMQYYIQEGAEVYRILQEEGIDLPRYAVLNVDPARAEECNLIDRRRPSRRSMELSFQAFVETPVSAEDTKFTSNNPVQLDGGSQRLYRKIGSETDVTPSENQSEHRGLVL

SEQ ID NO: 1010324 - protein, 227 aa, Homo sapiens
FLAAGRAELSVWESKEIEMATAYAPPMASQVMKSGLVCSKPRGLSGASLTRRPRFVVKAVKSDKGTYQVVQPINGDPFIGSLETPVTSSPLVAWYLSNLPAYRTAVSPLLRGIEVGLAHGYLLVGPFALTGPLRNTPIHGQAGTLGAIGLVSILSVCLTMYGVASFNEGAPSTAPALTLTGRKKEADKLQTAEGWSQFTGGFFFGGVSGAIWAYFLLYVLDLPYFFK

SEQ ID NO: 1010325 - protein, 128 aa, Homo sapiens
MIQLSLDGKRLYITTSLYSAWDKQFYPDLIREGSVMLQVDVDTVKGGLKLNPNFLVDFGIGAHLAQPLHHELRYPGGGLVAFDIWIRTPPLSHPHVPIFGPSLPWGPGFILLSTWHHDHWQHRPHSQS

SEQ ID NO: 1010326 - protein, 205 aa, Homo sapiens
SGSVRPRVPSWRTRPVQVLLGSGLTIRVPAAHVRESAHPAWDMRPLPPTIGRKYFWAASVSASWSLKLCVSTWPVYDGKARVCSQDLTPRLCSGVLGSCGPWVRVLHASYQESDAGGGVRTWKCTEQNVRHLPCDQVYQGDELDEMTARLLLLPCITHPFHVITRRSMVQFIGRESKYCGLRDSIITIYREEGHLGLFAGLVLAF

SEQ ID NO: 1010327 - protein, 268 aa, Homo sapiens
TPARGAMVRPDPAAAAAGAQPPTRPVGTRTSEGPCPGKRLWTTWAPDPEFIPASTPDRPVPNLVSRSGSPYPCPSVSRPGSLSTKSLGSWLVDHCLQRHWLPGGLERSQLHCMRALLIPLCAIPREGPVHRLPDILKEVPILKAEPLVEPYREHIIPCSLGSNTCFQMNGRAKLATRLGPLSSQARTRGNAKLIALGSTTGQTHPGQHVSAPLETGGSYCCAQLAYTAEGKFPSAPRRQRCFHLSRDGHITGARLVDDALALCALGVW

SEQ ID NO: 1010328 - protein, 343 aa, Homo sapiens
GAEVAVGDMCRRGWERCGLGGEAGAARAQELELLAASSLQRYPACACQLPWPLLVGYLTRFCCCLSVLLDPDGLPRNADALAILGALGCWWDKFNACVIGGHTLGQDRTFWSCGETRPLGRAHNERCPNVITEFQGEEFALLVMILALRRLVCWIARQDLYVDCQIRGICLARCGHADWTSTLGQMRPFGMCIVWLRMRNVVTLHSSMDSYNLSRTVARTMLVESHSTLEHRVDTLGFFPMPNHITCVPLDHLGRFGQQMCWNRDLFPRVRRRNRGRLSPGGTPFDPPKHQARENYRSACVAVLLDKGWDDRLVLVVLWCYARNVVVSPLGWIWHMWMAKRSI

SEQ ID NO: 1010329 - protein, 201 aa, Homo sapiens
MRHYKNLENLVAAGGRLKSLGKLSVVALVSDGGLLRLTHDATLLMRIEFMRACAEIVFRLRPFCQSSQCNGSLTAVGKPGGVNSGRIRMPWGGHRHLYWPARRIGGDPLSRKRKRSKWVGGGNLIGPKANRKVCQASLPFRSTAPQGIYQVVTLTKRVRTTPEEPTDPRIPEGQIAATGAQWTTPMMVVNRSRIIRPKDKK

SEQ ID NO: 1010330 - protein, 286 aa, Homo sapiens
MAQKSECCSERTAREAASSEETLTRGRGRGLVRLKGLEALNDAAGDSGTGAIPSQTPMSSESNVSLGPRQIEAHAAGAQLGRRTAVRLLWTVSAPDSQDAGKRSQRQGRDGWEEPVGPERRESAEEPRGHRRGDLHGDLSDGQPERSRREVPGGKDLAASCAAPGDRLTRRGARDWKGGYTVMRTYTCQGARGDRCLGPAVYSRCGKAPPGKRHKGLSDTGSAMRNACPTWRTPRGAPSPGCMVSREVGPVTEVNDGERVVVRHLRLRGPKAKVCMEGAHHGVEWK

SEQ ID NO: 1010331 - protein, 96 aa, Homo sapiens
  misc_feature (96)..(96): Xaa can be any naturally occurring amino acid
MYTLGTTTWWPPYSTHPSNPSGTFAVSNMRRSWFPWLGARLLRWNPFHRGNMGTLSCERGAPQGDSQLCALAGRERCVLYGHVRLFDTTITVTADX

SEQ ID NO: 1010332 - protein, 292 aa, Homo sapiens
RLGSHPCVPGPNHSPERAAGGVWLGGPRRVKHLSPPYLKACPLSTSFTLIKTSRMQQDGLGVGTRNGSGKGRSVHPSWPWCAPRPLRYFGRDARARRAQTAAMALLAGGLSRGLGSQPAGRRPGTRAGLPVVGSWLRTWVAQVSGKGQSRVTGVQPYEQVVGSSSSVVTVPVYLYQMTSSPRTNHRHSGSTSLCCRDRIADAFSPGQLDKQLKAQLGQPGTRGTTPYVECQDSVRTVGVVATKTGKAETVGRLLPGPEESQSAGNADLTFGPRGGKDSGVEYGDGVTAKNLR

SEQ ID NO: 1010333 - protein, 86 aa, Homo sapiens
RRRVAVVALGRHVRTKGKEEKRLKRREQAAGRGVEPRGRRGRPSPSRRSLEVASMPQGGKMASGCSGGASDCGGARQLGTRCLLCE

SEQ ID NO: 1010334 - protein, 292 aa, Homo sapiens
RKDKVEREEMEQVSYVDHSDLSSANVSANTWFNCNVLSSVVTVDSEHAALYALNLSQNIMVLKINENFMLLSTACLEGSSSRPGELIPNFTKRFSGASRLEESLSQVANEESKDPHVIVPRGSTHAVLLLEAEGNLDANMRIYEAVWPKSWFTRIETRSRTIEESRQRACRVMTYLYSRSRRSVDDMTVSAFQPMWLNRVGRTVTSEPVYWVARNRGLVRRLMALMDRPRGTIDRKTETLIYQAQWGGQNSREFVGFASMPPTGRRRQDGVCRMAMCPIFFLICAHQNRYDR

SEQ ID NO: 1010335 - protein, 254 aa, Homo sapiens
MTKWKLGVRRPSRKINQLGTSRGHCELARVDDERNADAEGTSSSRPHTMDSHEYEEMLVLPSRCSTKRSQAREVLRLCEEQICLWASSVCSRISSPDRGPTTFGTMTEMCSDANCGRYRAGSQYKAVKPPGDLEKGMRAKDLREDDLVRTGYTDTGGNVKQKGSLPVTNKKVPGPLKLSTDLEEAGAKGIPGEGTTIPVLTIGGPGDRAKQLRRNHPGCKSPKKVRAMEDIDRQQDVKDLRQGLATLNRHPENG

SEQ ID NO: 1010336 - protein, 144 aa, Homo sapiens
RGGPSKERQAVVLFHVVVACFFVLAMYVLLLLVLWVPATFMSCNAHPEGVQLHFSSQQRLLNQGNSGRATFMNCNTHCEDLQLYSCSQRDQEHTWRKKLQTYVKNNSGGAALKNCSTHCEGPWGFFLEVSEAKNPPILDEGGLN

SEQ ID NO: 1010337 - protein, 151 aa, Homo sapiens
SGGCGSAGPGAMRRLPAGWRRFPGEVPSGPPCGGGRESGRSRGRGALFVSWLLTCASASCPAGIHPQLHACARFDSSNPPRRGRNSKSAQGLGWVFETLGTRASMNSNSAVALRQHSGKLTRLLAPEALHAGTLHHGSNAHNSLVEEVCKK

SEQ ID NO: 1010338 - protein, 261 aa, Homo sapiens
MIGNELDNGPVYLKGRLLKDPYIAYLERETSDPDEGYKRIPNCHRKDGLLSEPFFLLLSREISAKEINTENITGPVHMVMVGKENWEQNDGIRLIGGIDKGGVIDDEVKALRRLEGERHYRGQRHLIRVSNNPEDLKGGKKDLEVAMSHKRQAGSSGPPGLVDQREATANNNNGDTKGKGNGSEREKALHKKRHVKAPEADTDKKCGQRIARQVTRTDKQRLSARDNKGGIVHASTLMQARHKQTIKTPDNNTESHSTKQK

SEQ ID NO: 1010339 - protein, 121 aa, Homo sapiens
MATFPKGGATVELAIENGHTHTPRIDKANRGRHDNQMAREIPAGNHRALWQHETTGCEATSCGRQRHGSGRGGERKTQTSGHITMRSTMDRSANKHSDNMCLADPPMRTLGTTRRWRRSKA

SEQ ID NO: 1010340 - protein, 285 aa, Homo sapiens
RSGRRGAVCSKCCLDFTVPRGSARGLMSESASDDRERGGLLLCLNLQFLVRLALKTCGSLLVEPLPLFKPCYMPQIEFPKSDLSLQVPVPHLRTPGALIPAGPRAKGPPLREGVNGTGPLGEAGLRFPRGHTGTDAKELRRIRHVCALQGNDHGKHGGTPLTFLKIGTVITVNRNGDIQKKQASRRRYTTQRDDATAYLGDKSPLCTQEKFLKYKRAQRMGRNMQIGGGMAQEGSNKDWKRLPASPWVQNRAHGTLIETSEEVTIIAPRLSPHNKMEEGKQGDNQ

SEQ ID NO: 1010341 - protein, 228 aa, Homo sapiens
SGRQGPRPSALATTIRPGPHGATGPTADPPGPPVIRQAHRDSARLHRVIRQARPLIRQGAAKPSDLPQKVVGNQATALAGPYKTPNHSKVDGARGPPAKGLRGHCPGTPRQGVAMEPGSRKGSDITDRHSTGAQQPSGIPAEKGPAQAAEVGGHSEEQPQQHLGQDEASGAHGTEQLGHENTRKLRRPRTRDSAYEMGPMHPKKSTGAEADPHKAEDNAPHSRDGTTK

SEQ ID NO: 1010342 - protein, 323 aa, Homo sapiens
MAAAFEASGALRSSGDAMPDEHVCVQVPAQKQQPGPVRILRNRSGSQQDPEDPHRGDVLLAEPGRLRDHCLLTRQVLEGTAGRHGSRRGPSTGASSTDNALGGAEQARHSSSKLDLAPGQHLESTYNTKLWTLVEQDNLKVRQTPEESLRSPNNDSNTCEATQTYITWYITKPKLGVNNMGQRYTNGNEQQQCERRQPKKQTETQHHRTKTGDTTEHRTDPAATKIPHQPPTQTGRHTAEPTRAQEKSSHPQTDAQQHPNAWTQTTRAPEDPPQQSQQHTTHAITANHKQDRNTTHAQTKGGTRRRERHTPDMTTITPPTERQ

SEQ ID NO: 1010343 - protein, 372 aa, Homo sapiens
ERSEVRRADAGCWSAELDQLAARVPVSWARRRPGAATWRGGRDTAAGGAVKNAWLAEENGRLRAKTDWVRKVEAENSEVRGTWAARVNERDASVLDLPNMLLQQCWTRGQDMQQQLQGGPAEGPCVTLHPFLEGGIQALQCLAWSPLLEQPWETRSNAGVPRLNGEQKGPRFHGTGLKNYAGVHSSKQRTYMENTRDSLPLEGRSALFGLWGEVKPSGPPQSFQEHQGALTGQSFVFQQKDAMLPCRNSSSLTRVDMWVQLVHRVHPHLNPCDHGGPASARSTGWDFDPGGVPCTRVSVSPCEPLGKSGDEHSDEVTLGIGPQTTPREYIIMGTRTVTSGPPLLERRTNVMLREERRQIRLHTKLGESYNKS

SEQ ID NO: 1010344 - protein, 133 aa, Homo sapiens
MAQSKEDKARSKNPSRVSGPRVQTARAHITGKYASQSQRLRVPLGGQDGRKDGYLNGSQFSWKSVKTEGMSLPKPGVRRVKATVSGSFPSNTGSLFQDAREPRQAMTEGKAFLESQMLEPFKQQGQGNGIEQC

SEQ ID NO: 1010345 - protein, 152 aa, Homo sapiens
MRLKPSPCEELSINLGLGPCGGKVQPRVLHRANRLRGAPWALLSSLSGQQGPLGDTAEAGAHGPGPVTRSSRDAGAPPPSAAQGGHCRTSHACAVSPDRPRVEYANWGWVGRRPAASCTGGTDCVCRFLRSPRLLLICSSRYSLSIQPLAFP

SEQ ID NO: 1010346 - protein, 82 aa, Homo sapiens
LPRKLWECATTSRETIPSTAGLPSHDVLRRLFSITDTLLAHLMILAMEDTIGQICCFLEGFSDSAFRESTMADHVVRPIDNQ

SEQ ID NO: 1010347 - protein, 183 aa, Homo sapiens
MLFGVVNTIACWATFEMYLGLGCNSWGNLFICAALWQVRECTSLHTTGRRLRQSRGIAIRHALPGENPLVGRADHFTVYHTGPRATNGLDHPLPNRRDSATFNGGLGTLRPRTSSLENRHLNGRATHHFAVAPTPRKSGHPGGQLGTMYRGSYHQTPYTSPRHTLVGPLEANHSPVHLYASDV

SEQ ID NO: 1010348 - protein, 249 aa, Homo sapiens
LIDEGSHMVMLECPETVNTLLHEFLLWEPEPSPKALTGATAVRLQNDNECSRWAGGGIACVSTAADSEEARACSADQLGGPFAPVGGASVRETPPGCLGWGRGIRGEPMRTFRSPLSVPRGPSAVSGAASRDPSRQDDLVHERSSLTFPSQIARGAEGMAPKAPVIIPVVEPVALKSWVDPTEDPNWGNRVEATNPGLSRRNPFAYASEYPSGGWRTPLFLADKESAEIGHALCGTPHTLRLVSTWVLH

SEQ ID NO: 1010349 - protein, 71 aa, Homo sapiens
RRGEHAEERARGPRETAAVAARAEQGLRVIPLCTAAALRVPAQWSLDCCPVWHCSCLCCLDGSVAAWRVPH

SEQ ID NO: 1010350 - protein, 376 aa, Homo sapiens
  misc_feature (93)..(93): Xaa can be any naturally occurring amino acid
SSPFCWHPWYRLFSPVGRPLLAGGNILSSVCILSPRISDGVGFCRPPHVLVGVWARLFRSDNTVSLLLVSSACVASSMLILLVCCYIPPSSVXGAASVFADETTTPPSRVDETSPCCFCLLVDNMFFVCSSPWSVFLCYEETHRRWFATLMALSFLLQELVSSSSAWYICCGRASFFAVSRARRCVREVGLFGLVVFHTRPPSLLLREHPSCCVAAPSSRVVISSPTQASFVVASEWRLVSLLVSILCGDPRSLLSAPRCCVSSGGHLRGFPHLLFCVGYSLFFLSVIALAGGGVPHPSFLYSPTRCRSVGVFGTSHRHTLFCGALWCTHPLSRRVALAPSLPVIFCAPPVWVHHNLCVLLALRGVYTAEGATIIG

SEQ ID NO: 1010351 - protein, 112 aa, Homo sapiens
MRNDSPWTLKKQKWGAFDERENGPPKEDEVARPSGVAFFALYPKGLEPRLDLTKSLGTNTRRKTSHVVERRGGLINSGVHSPGGRPGEAMGTPKPYINARPKGRPHSLGDRP

SEQ ID NO: 1010352 - protein, 209 aa, Homo sapiens
MTLNIVSVDVPDTDLTPRAGNASRTRSPAAALPHNSPGKFQKTVRDRVLRSMRQEGPPEYSVRLMPKCPPSVTAPSPDEDPQAGAKSPGTSPDRNFAAALERETGCGWAAGPCALWSFCSPAPRWGSLYASTRDCARPPATSCARGRPRKAPAGPSCQIFAPEPRYAHTPVRIKEQVVGLLAWNNCSCESSGGGLPFPSRNKSELLTHQ

SEQ ID NO: 1010353 - protein, 262 aa, Homo sapiens
AGGRGAQGPGALYGDSASPGTDGFLSTLPRWVAALGIHPWGSSAVKPACRAVPLVIEAIMVLVNSLLKASLNSWMGNVVEHHEDHVYLWPLVLWSLLAWSWLLVHLAEHCWASGKEVPLEEEIGKSGSVQLPYMNEGRIRLKNKEEQDMVTPKGTWIRVGRSRCGEQRRDDCTHVVEANEGRGGTVQNRPKERRQNARGKRLPDETTYEGRGGRCLRSPGPHRRGSERRTRYTRPKELGLQKGPGRGGGSDDREPARTQGDA

SEQ ID NO: 1010354 - protein, 125 aa, Homo sapiens
EIREREGVAQPKELPSLGSDSVADVEETSTHAPISANGAVCGPPLPITVLCLFLPLCLLHYTARTGPRFVSSTQLSPYDPAGPRLSQTTRAHSPRFLLTNRSGVSTCTKNCVLSHGRSSHLPCVS

SEQ ID NO: 1010355 - protein, 184 aa, Homo sapiens
GGGGSHIVGPPNSFAPTGREGCVVTTETTQVLFMWGPTRPLWARVLPPPPQFVARFRLPKQRCFCLSQHTVGGVVSLLSPLSQAPNKWSLREIFPDGLHLGCFRRPLAHTSGVFVCFWCRVKGLCGDELLRVHAEISRRVLCGSSGGTRRTHVCPEPPVSHLPSRLLLLMEMSHKPYPLVFFFL

SEQ ID NO: 1010356 - protein, 288 aa, Homo sapiens
MVIRFFLANRSTCYPGHCCGTYGEDGSEWQLHRKGHSDNSPIRTGAVTIHKRGKASFEQDTTLVLEDARAGNSRECDRPLSNNLGELMINRRPQARHRYNEDAPGYNNTTDLKSQDKDPHSRRRRSYIWEKLQNRIMRKGEQRERRNGPQLTEYIAPVMHLAVRKNELVCCHSIRLVGWERQFTLYSRNAQRDIVTSGGINSLTQRVPEKSVTRETQGEPWPPGQTQIQPCARMWRNKFNPRPMEKRAGETAKGHTRGKMAPARPYKLSRHSRVTSGAETIGRERSRH

SEQ ID NO: 1010357 - protein, 234 aa, Homo sapiens
SATGLGTLLGDRWIPHQPPKPCIPRYTKRKSKASLEQRSWATTRRRKSIMKLGFYPIRRVQRPPRTTVRMSPTIIEGDNRPCLETGKIVSAWVTTSCPSASLRTIPSKTWAVMRHIVSGFGVMEEKIAADLRFVRLTLANPQACENLAPGERIGWYVFSHKDVSVAGHPSRKKQIACQGDIGGVYYAEGTRITDRCGDTGIVSRGHRVQQGAKGFYTKVLNNVDWINKEMEEED

SEQ ID NO: 1010358 - protein, 80 aa, Homo sapiens
ISSVPHPGCVSFPRVPAPVILGSSESTRSHAVIRVAFNAMGSFFCTPFAYPYVSWDEVLFFVFTCFDVGTECMICVSYER

SEQ ID NO: 1010359 - protein, 187 aa, Homo sapiens
MDGIVTEVAVGVKRGSDELLSGSVLSSPKSNMSSMVVEGGRVMIVRKFKGEDKMAWCSFSVYFIFENYLGKKQKLKLLFRLTRFGKVTNILMLKGKDSGISGTRQPRKRAITMVNYYSACDTSSFGNQPIYIQYSNLTKNYETDQYIKATCSGRSSKAVTAVQTANTPLSGTTVERECSDSSPESST

SEQ ID NO: 1010360 - protein, 220 aa, Homo sapiens
VLQPRRHARARLIANGPLADSHRGAPLPVPWQGQDARALEDPWNKHTQRRTRSGPERYNIAGALEAADKAKMRNLETQHKVLGAARARGLSGLQKKVGRIASRLSVTHPAEQCIKQLPEPLLAVHPATASAAPERVPRAGRGRDSGERPRPRPRAPRPRPAPAKRLATGALGSAGSPCGNCNMSYLDMIHRQGASKPTAHADGAPARGRYSTRRNVYVYR

SEQ ID NO: 1010361 - protein, 112 aa, Homo sapiens
FDTPLKDTFFRGPLLLGGREVGAPLDAPGGGSTSTTPEERGVGIEATSLLARCSNNTKWAPLITRSCPDILFIRKNTPSLPPLSPPENLLLSPRGVLSGGVYPGTTKIRPLG

SEQ ID NO: 1010362 - protein, 144 aa, Homo sapiens
MWLNTMFPDAVNGSDGDYDVVVCGEQSWRLDLPVGHATRHGLTAEKTFSYPLDLLLKLHDERVLVAFGQRDGHPSGVMHCLAITWHGREWQVHGRRAKRCWSIWVTLLITRCPFDFGGPGLTSNEKLMLAPCSTRLFAIGPSVS

SEQ ID NO: 1010363 - protein, 59 aa, Homo sapiens
MTVCTTNEDLLIQYIIIRARDLDKTVSKEMFHLNRQYEFFRMMLHCDIIKIGSLVRNKE

SEQ ID NO: 1010364 - protein, 109 aa, Homo sapiens
MGGEQDIPLSTLRMALLEATMLQSRMPQDSWPSPLLHLDIKRLRGKEEPLVTRCCREACSWDLPLGLIFAHWGLVAMHHEYRSLYASMSYCTWSLGGLHPNQVSVKMTY

SEQ ID NO: 1010365 - protein, 99 aa, Homo sapiens
PRPATVGLNMAGAPCGEDIFFSSHFFQRTHLLCFPGSRAGFLVRCPHYARGRICSQDPFLFFGSVGAPQFRVPFLLSTGSGAFQGVAPTEEPEIQPGVC

SEQ ID NO: 1010366 - protein, 84 aa, Homo sapiens
AGGAYGLRRDGRMSGLGLVARAMGRAGPQHVLLSADAANMAPAWGHRSFTTIRAMHRRMRVGGLRMDNFHDGRHTGSLGSIPSQ

SEQ ID NO: 1010367 - protein, 433 aa, Homo sapiens
NPRRMVALSALRGAASRETVGANIRAFRRRGRGLPSSRSRTAPGSVRAWARVLYAVTGLRCHCVGHCVMAQRGCLVCLACAGPSPARAWAWVPWLHGCGLAAGRAPLARVACAVVMCRKGRTGGLKLGLATVERGPGQFWGGDVKAWRSLWCCGDRPLPNNFPQVGHPLLPFGGDGNLSEGPGPPEGFGKRTFGGQVIRTVKNGPSFRLAPFFVEGRPIKWPFDLVYSFGLGSPMNTRVFGHGFLFPPTFPEKGPNTNRASDARRAWFVFATHLGEELFPEIDNGPQVCLLEDGLCHQATVWGPLVNTLRGLLPLLANAGGGAPGWGAQFPQFFPKEVGAPGGRATLPFSTAQERGKFLRDPCALFNSNTVAQAAFVDLPLDKGPRCQVRLGKSSHGITLARGGPLRWCLNRREKTTLVAKLWRYRAVLHQEN

SEQ ID NO: 1010368 - protein, 179 aa, Homo sapiens
MSAVHVLCKSMFWIITPKAHSSALDPLNDAVMHPSRSSLVISVSPQDGLQGHASRDGYARFFSHGILIVSHVSCPQNGRVSPRALLLNGECPAFVRPILVCWSMPSLPAPGSEILLISTTLAREAEDGLQATAVSGACIRSVALSYPHLRQCQVHTNMQRGDLALYSISLILPLLLGLV

SEQ ID NO: 1010369 - protein, 228 aa, Homo sapiens
SGVRACGGQPVVAERRLRGAPGRGPHGVRQALGRGLQLGQMRCQRAAFTVQCAGGCYGIEGRPGPGRRAVSSGGASRLGQQDQGAGASAGVQGLERSLNRYSQHLFPTNVRDGTVAIDREGGDDTRDKITEQCREPLGSLHQEHHFADAQETVLTWTTFAGIGSIEPSSAGQNNTGRGRQARAAAVTSAPGSANDIPQAHLCTPQTTANDREGPLTARMGQTPRRTAL

SEQ ID NO: 1010370 - protein, 318 aa, Homo sapiens
LLFSVFFVLGVSLLVAFLVFVYSLFVLSFSVSVLSFFACSLCSSLLGCRFFSVFLLLSGARFVTCLCVFFCCLSVFFIACVFLLVVICASDYASSVVCLLVSLGVCGVALFGLSFALALSAVGVGVWLLCPLRRLLLFLVFCCSLVHCLARSSCFPVFYLRVHFSRVCILAVSCGSSVPFLDVSASRNLLCSQVTSRLSVGNVMCDDGWAQLAWRGNLTLGEYFTSIQSSESTSVQPLSSKRAFPFRRRCQPCKRVKADWEIHFGWAISFIRSRKARLVRGGAQLACQVFRNLKLSSCAIYQVWNMFYCCRDGVRRGE

SEQ ID NO: 1010371 - protein, 180 aa, Homo sapiens
MVIKKTPLSCQKEPFSSEELSCEGHFFHGFLSPRRFSLPRVNTHKGGTLTRGLLSPPHCGPTNTRGEGQNILYLSTHSGGSFFAPLFYAPSKQKGLSSFPQGERWSSYREGGEHIIKTTHRWGEHTHTLCGYRGEHTRGPTPSELCREEGGPLKRLSLRLWVSIHHPAPLPEKHTEGVVT

SEQ ID NO: 1010372 - protein, 278 aa, Homo sapiens
CVPCVRSGLCRPSSVGVSLFSGELFAIRGLAFYPPRICLVFFLLVLAFIRFGFPVLRLLCCVLAAHWCSCNPLSLPYAEFMPSLEPDLGRICSPSRCRGDLSLRRVCPSMSTSSAASPALFDQNCLCILWGLCQLDPGGPQGTTYMEQLLEKQGDGEAGVNYAVEMLKALHALQKENSCGCKMQYPEPERPKKERLLDSQRASSLCPSLPCHACPVPAGTTGPCPVGPMAVHSHQAGSSDSLSTSKSPPGKSSLGLDNLAVTLLREVGANEEWGRKEG

SEQ ID NO: 1010373 - protein, 412 aa, Homo sapiens
VFFVGPTWCCSGVLRVLLWAPNGVVPPRGEVSPPFFCTRLCCAPHFYPRLFAPRGGPPLWSSRAQMSLGLVGVAYACTSSTRWLFRGRASYKPRGVSCAPLIDYHGSAKEILCAHPRVRRPLWGNITERPLSEKGEEISLRVLLWPPGSDFWEHTVYMVSPLDFVPGWWGVPTHCILNGVGCGPLYTAGFYTDARVSASIIHALLWGFLVALVIPPFIFTGHHMNLSRTRLATENMCEKTTHAPERRRHMSVKMCHREGDIPTWGTLGGLSPCLNTRGEPKVIGPKGDPRLEMSQEPQRVCLKGLWSATWGTFIWMSKRNLFLRCDNTEVCLFGAHGRLNLYANAVLKRSHSLRGEALGQNRHTLAFPLGPGAPHITPTSRGATPGEKREALGPFSPIRVFLPGFPQKLLKG

SEQ ID NO: 1010374 - protein, 291 aa, Homo sapiens
GQVHSCARGYIRCPLGPYGHSSPCRAQHIRLQPFGKPRNHDVTKEPFQLQSHGIARERFCRHGHQGTSVTCPVSVLRDGQRAATHGSALTETVRPHVHCAQAKQCIRYCWSLKGPVTNRRQSLMAATVSMLSSDFRPSLPLPHFYKHLLGAEHWGRAAAIGGPHSAPWASTSRALEPKLPRTATEHAARTVLCSNHWTNERARRPGPVCASVDGSWSTMVRNLQQDQSGTCLDFSTRFITRPGQVRHTETPARGRPRPEPPCLTSNKGPRVPPHQPGLTLLSSVSCSGFSS

SEQ ID NO: 1010375 - protein, 116 aa, Homo sapiens
MALNGEKKRSGRTTPGVPRSLFGALAKDTNLCDTSGTSVLVRNASRLGSHLKELPDRLLNDRGRQDWTLALRCVLQTSGSQILFLGHKTDEKGSHETLSQTEMGQSYANFLGDTRS

SEQ ID NO: 1010376 - protein, 180 aa, Homo sapiens
MSTVRSLGRKPLGGTQPPTGSTHEGRGDMTAQRDDRMFPRRSISQGPTDNVVSWVSRTGEPGTTDPGEQQYSRHGESTWVQQHKAWHGFGLSVILPQRHTQRLLQSNGGERSQVSGAQGTLTTTPPGRGATSLEHQRQSLFYKTRNLGTSHESGFGTRDLYQIDEGDPSQDIFSLPSFEL

SEQ ID NO: 1010377 - protein, 121 aa, Homo sapiens
MGVCFWVLAVLVCVSPACWASKPIPVRPDVFPVSNLCLRPNCRDARLRYVRRCNVCLDPWSIRLEGSPRLCFLSMLWGKLEKPPQWEDLCLTHGPMGTHVVLDNQTSCFGETFRQGSNHQC

SEQ ID NO: 1010378 - protein, 297 aa, Homo sapiens
MTEDATRVPGASHGRDPAPGLYIVMEHVSKGNLVNFLRTRARALVNTAQLLQFSLHVAEGMEYLESKKLVHRRPGRPQHPGLRGPGGHRSADFGLAKAETVRRVYTQAGCPSSGRRLEALKHGKFTSNVGLSGDSWGDCSGRSSSYGRAPYPKMSLKRRCRRPVREGGTAVEPPEGCTRPTCTSSVSSCMGGRARPHGQPFTANWPRSMARERTQVQGVTQPPSQGQDADRRPPSPTKPGARDPTRVGPLAQEDRESGEYGVEGTDQAQGGSRRASILHGANSRGWPTEGDNARAVT

SEQ ID NO: 1010379 - protein, 280 aa, Homo sapiens
  misc_feature (267)..(267): Xaa can be any naturally occurring amino acid
GGGGEQCVTDAVQAVLSFDKTSTVLGGEEAVGLLRLYDIGVHLMTRTRTVRDVVIAGPQAEPADLIRATTQACGPWMLDPTMASREVAFACTAHGHARTTGREASSLISGRLHRTAGQVVMQAHAATGILRPCADRVRDRSEEDQECPRHCSTEGSPHAIQRRERLATNDRCPEAPVRGHTQLSAAMTKGVRARQTVEHTSRPGSHGMHTRLHAFVQSIHPPTRPPPHRQRPGAGPGTTHPTGPATVWTRTSCLKSRLGNCLNVVWXTRPHHIDERKPRH

SEQ ID NO: 1010380 - protein, 291 aa, Homo sapiens
WWRHITERDVRPTRDGFNSLDTANIYVDIDNNRDKRFHRDAWVYNGGVTTSGCNNRAVPPSPPFLSQNMTTKSVYIRVRHGTIVHRIPSSLFNSVNFRSTPRENVNGSSSRLGHCSQHDFFSVVFDPPRALSRRHFRWANVNHSLVNTQVESCQSEVVNGERVLVSPQLPDPHKKPRLRIECSCVARLVVAQLVAVTLVVVTQSATAGPSIARGSNMKTGQRRGMKHASGHPAKDQPSPPSSSLSRGPRRCFLVIQEPGPSVASSFLPEAKLLRYFLELLIDYIRRGGYMQ

SEQ ID NO: 1010381 - protein, 161 aa, Homo sapiens
MNGRTCGTETAVDYIREYEQCLKVLDAGVSSSEPQSWAVVTEALSRSALLPPGGPPPLDLPGSKDLSPAGRTSSMKPHYRGFCSRVRLIWSSAPAPGGRVLEVSPMFTLGHCQDHLWECHPYNTTAARLLPESSPSLGGSRHDSRAVIYLEAAGRCKSGHN

SEQ ID NO: 1010382 - protein, 317 aa, Homo sapiens
FPPCSGGPGPGPRPFGAAAARPGFVRPPALARGRKRAPRPNAQLLQPWAEYWRFLAASGGQCPDAYDGRGTVQELGRGRWRICWRPNVRSGRGRGRRRLRIQQARVRGCRLACSDLGAATPQLMILALGLERRPRRSLTAAASLALVLRARLDPAALAAQRLSPRARTPAAALQTHRRHQVYRRRPPTGHGCLREAGDRDTQTVDPRACGGTCWGRISCGKQQDSCRGWQPPHRSAVPLDHDVGSELPPEGVLGALLRVKRLETPAPQVPARRLFANLSTARIPCTWDPEVPRHPATRTAPRQHVQSNVTTPGALSP

SEQ ID NO: 1010383 - protein, 73 aa, Homo sapiens
GIKSGRWMVLILEEKKGGKNFRFRRKLELTDCKRLEVDREGLLRSISGGTSQDCPVAGVVLCLDFRTDKMTAM

SEQ ID NO: 1010384 - protein, 152 aa, Homo sapiens
MKHESGVTLVIGRLGAHGARSVSKWQPGSAVPEERRLHVGCASDFLGSCVQAGVDQLMFINGGPHPCRDYHTFYIFIISQGEGKERVRSVSFDVHDDVRLLSDAIHGEGYESHAGKLVLRSWYEIEQAHLPRQPLGRPMIPEKKWDKVHPSA

SEQ ID NO: 1010385 - protein, 85 aa, Homo sapiens
EVNPLLSMAPGWTPNDPFANIGERILLPQPTGSAWHRQKRPDQVGPAAYPEEAKRARGPPKEGTMKNQHKWSQNNHKVTELDQYC

SEQ ID NO: 1010386 - protein, 126 aa, Homo sapiens
SSLLFPFVKSHPNCRIFLGDSYLNQVVTCPLRVYALSWSFLLLLPNKHFSLRGKHPSRASCLRAFLRLGFLMRIRVFYSPRLFSDLVLLCPTPWHSCQVEGTMIVLVFSSRRWKYSCFCVISPLPL

SEQ ID NO: 1010387 - protein, 108 aa, Homo sapiens
NSVSVCGFSPLAVFPHPFVVLLLCPSVSSVACHAIALASCFILHTLRSQYYLVLRVLSINRLAIRCLYVFLCCCELLCLYSPALSRCASVLCLVLTFDFTDSRSSVVF

SEQ ID NO: 1010388 - protein, 108 aa, Homo sapiens
VVFGLRVSRPLLVRCGALYTLYCRTLFMVCHWSPIAVSVHVVCSVLCSLVLFVARVYVLPLICVLSLCLAPSSVSFVACVCAFSPHGALPGLVISECLHLVLASRIAV

SEQ ID NO: 1010389 - protein, 391 aa, Homo sapiens
NVPLGSVLCCCGCGGEGPAAGRPPPAAGLFFCLCFGLRNHQLSLFLWFCFVRCAVVIVHRVSRSLLSSRRLCCLCLSFAWLGSRGCACVCPHFAHVFLIARVLGVRVPPGFVSFSWVLCGPCREFCVAHSHVSAAFFVWCPVLCGLPARFRLYCSCSCLLAALVFYRSAGVCGFRPFCTYRSPLSSLAGVRSHSPRPQISLVYCIYVVVTSPLPGALVFSSLAVTLLVRGPTTRHAPRTFVFLPSDRATLLLSRRAVSAPPHHGPRSSAGWSLSFLRPAARLGRDIYGPRRRLRLLVFFFVLAALTPRWLPVCSASPFVGAAGGELRDHVLVPPPSSQLPPPGASSLAEFYFVCVSPPLPPPPPPPPAPPSFFFFVFFPQISCRFFLSATK

SEQ ID NO: 1010390 - protein, 97 aa, Homo sapiens
PSLLINACLNKLLLYRVVDNEGTLQLKRSFPIEQSLTSCAQHLLSPDVLPLKGACVVTGSEDMCVHFFDEETGRAKCLLVNIAAWATVHLCLMSAST

SEQ ID NO: 1010391 - protein, 415 aa, Homo sapiens
CVVLYVLFFFYFFPLLLFLFASLFSLLLSCRFPSSFSSLFFSVFCSPYHVLIPVSSVVLCIVSLVPSLSALSVAPRSCVPLACCAFVISSGLSCSLSLVCLRSLSPFFFLFTPVVCPFSCPFPFRDLPGGVCVARPFLCARPLVSRPAFRYPPVVIAAPFQRVLEPFFHLSFLARWDHTVGLHSGLRILTVRASIHFSISNRIYPLGILTRLPCSQVPCVQRQHNSVIFLHPSLLSLPPVVTLCVPSSASHLSMAPVLQALCMGHREGGPLSSKLSDSGVLSWSKLLHDPTTSPPSESSYTAGGIAVLAWTPSASSQPSSLASLAWVLGENGATGSECMVLCPSLLQPSRPLSGLPCTFPHHLASPPYPAWNPSTSPTRPLLCVSGFSALCKHLISCTQERLGEGPWAGWSRDSE

SEQ ID NO: 1010392 - protein, 164 aa, Homo sapiens
LFFFLFCFAVFFPPFSVVLSVLFLSSFFHFFPSACPPNVASVRPFGSPSSIRLFHSLLLFCRVSPRLPSSLHFSHLLFLNASFCIIPAFRLRTCCYFLLLIINYLSTSLLERGLVSGLAATSSLGTDARQTPTLTSLKPLSIQFILQQVFIIIIIIIIHNRHFP

SEQ ID NO: 1010393 - protein, 170 aa, Homo sapiens
LVFTSAPYCDIVSGGSLSLFLVVSSLRLDSCSYVCQSRSCMPAVSLSWDLFRSSRQLYGALSSLFLGWPIVLYTFLLMGFFTSAAIFLILPIDGGAPCFKDCLNCFPGQLLVESLDKPWGPLFSMSKVVIRRGLDLLPWDTSEKCTTLPDCTMLCSFAFLSLQTFWSTVT

SEQ ID NO: 1010394 - protein, 383 aa, Homo sapiens
MEYVSYAVNPGDSGMILLQLAIYCVFLNTVGSVAICRRRTSGCLVLHACSSGLTLRSLMETSVPMEGLKFNRFKLFLQGPENGLCLPVHSLTCQLPRYTSHYCSHICLTSISYGLPPCVHSALIAVTPVTVSIFLRRGPYCVPLPWVMHNCEMRVPSSNGLRCLQKVSQFLSRLLEYSTFTGAESVHLDSLSGPVHVLGLSFSRGGELISGCHVGSCFTTRVAISTFQKAIQDTVEKFQEVMNSIMLISAPAILGTSNMPDAVPATQPGMLQPPMVLRRFPHPSPVCSQRIFWLAISNDHAPSADPVAMAQDVLGHLEDALAKVTKIIMAFFIALNRLLCQQRGARALCHSSATVFLEDHCSVFKSLSAKSFSPPSSDSTDFN

SEQ ID NO: 1010395 - protein, 111 aa, Homo sapiens
MTLLGPQEGHLAFALDVPSFKWPRRTLARATQHRQGYVARSPAISCLLLGSADLSAGLSSRLMLGPSRRCCTFWLAPYQRLFPVPGSFSLGPTVTALPLGHKDFRETIEAS

SEQ ID NO: 1010396 - protein, 307 aa, Homo sapiens
MFSVSERALRPLFGFSGGPTRGAPLSPGGDPRICRFFLQEIFWGSTAFSGGGFSPLYCGGPHWRRGVIWAPLLALPASFWWDPPMVAARPLITPGGVSGRYYPTRGVFGGFAAPPCVPPWGGSSRGCVPPFSPRAEVCGCPRPPGGSWVGDITPAPTLVERVLLGRHCGILIPRGVFSPGGNYTLRAPPRGWGRPPTCVAPLPPLPLCGEPPGPLGGPLSHVFTPLFPGGVPLSPGYPWLLRGTLLGHPTVPISSVGSPPCRSSLPREEPPPRPPRCPPPPPRGFFVKKCFFFFSQKRVKTPPPLSS

SEQ ID NO: 1010397 - protein, 274 aa, Homo sapiens
GRHFLASGLSFLLCLCWALPPGAFSSNPFSPLVAVLVFGLCFFLPWLTDARSLCPLWDFMWELLSLCMFVPSYLPSMAPCVCFFAAALCGLGRFRLQLGIRRVPVALFLARVPSPFPCGALPYSIIPFDAIPRVLGTFHVVGNYWVGERWSEGFEGTMLSPSLVGCLSMALLGKVSNRGRDVDYCRRLICMHCGLVYARVPRFAKLLRLLPVVDLLGCNVNSSLLLGQIVLPSKWTKIIFQRSPERHVITLHLLLVMVGLFFPGTSRITLSLLL

SEQ ID NO: 1010398 - protein, 76 aa, Homo sapiens
DVVIRMRSPGSLPGPLITLTSDLSLHDPLLHDEANHRKENGSCNPASGDLQLASPVYQISELIVSTSSNVAPFAQL

SEQ ID NO: 1010399 - protein, 67 aa, Homo sapiens
SSRRTTDNPPSTINRAPHTRYVGAPDPPEDTQKPWAPMEEFSYQRFRTRACAARDAYSLIRAVAKRL

SEQ ID NO: 1010400 - protein, 221 aa, Homo sapiens
  misc_feature (58)..(58): Xaa can be any naturally occurring amino acid
TLVAGVVWWSAPPLPSSLYCMWGAPLTLHTCGCVRPFLRLSYSLRGGVCVSLSSPPVXGVCGGLASLLLFISSYGLLGPIACAYCGAVGEIILPGVRPRSFVAAMRSSRRNELSFSPPGHLPTNSRVCGGCFTTTSSPRYISVPFLWATNINLSLAALDILVSPRWEIRCRHVPHTHIYHAYALCPVSTIYNIYTPPRSFTFYSLPILLSKSITYTPLAYT

SEQ ID NO: 1010401 - protein, 194 aa, Homo sapiens
MGLPTAYALCVPRPVWVCLFLAASLPSRPSTGFRVGPGTFQRLDATPFTTMLGALSHSFLGLRRYTSYGWNEVVFFPRIAPFHLIWAYPIAQGGALMTRSVSIPVSRVACLPVNVWAPPVCLVPAFRPQIGWGQFSCPVTGPGAVCSSSFAAAVVGALRVSSVVAGYGSPGVKKGTVMGTSAQPRCSGQGRGAL

SEQ ID NO: 1010402 - protein, 259 aa, Homo sapiens
APGLLLWRRPPLWPRGPQCTRSPRPSLSYRLSRRILVLGAVLRSSALLWRPLSTLVRTHFLSGPYSCASYACYDPYPPTGHTLGCFFRDHDDARVQCLVVPWIGAMEAVSCLQRISCVVTSRDLEMDGSLGSQGPRALRSGWSRPGPGPCTVLSLECLVLSSGMLVAGTLLSPGCLPACGAPDHAEMIRSTSCCDGGEWSRQTLIGAARCLVGSLIGAVVSPWQGSASTMYVPHTWAPGEQLGAEGSHLAMGLAGRVLA

SEQ ID NO: 1010403 - protein, 415 aa, Homo sapiens
  misc_feature (381)..(381): Xaa can be any naturally occurring amino acid
SFLGLHSRIAPPPPGGVLCLYYLVDGCCFLSLLYPAARVGITARVRRAKSKWVGRPPPLFFFIVALYLVVAASSDVCVVFLPSIWRPLCRCGLTSTSPLSFSLCERGEPSPLSHCCGFPTLLFVSSLSRSLPPDAMIPFLRVAIPAGARFSMKKRDTVVPPPLLCRCDAPPPPPPRHALAFSVAVVPHPPADGRVLSPLLFPPPLVALRERVVRGGPTPPSRGRGDTIRSMRDPTLAPPLSFSLLRHRTREGASARSLSILLSSLALDASVLPPLSVSPRERESAPLSPPLACHLPDAHHTTRTRSLVCAPPHTQAPLSYPPTPRVVDGYNLLWSLHPRLLALRASAFSSTNHQGQAGVLSAQPVVFVQPSLRVGICFFRXATVKSVAASFFFFSAPPFWGQLRGGEKNIFFFPP

SEQ ID NO: 1010404 - protein, 82 aa, Homo sapiens
  misc_feature (26)..(26): Xaa can be any naturally occurring amino acid
MLPTEVLALDGILSAHADGHSSPGGXLCLTQHAPRGEQSHASQVGTWGMLFSLRLDCSNPASLAGHVPNPDDSFSNIARYTS

SEQ ID NO: 1010405 - protein, 147 aa, Homo sapiens
MWILYDNWGSTSSVARPSEAPKTLPKAKLGPQKKVMFACFGGLTAGLIHYCFLTPGETITSEKYAQQFKEMNRKSSTPAVSNGQQKGPNSPRQCMIAHYTTKASKVELTGLQKFCLIHHIHLTSRQPTTTSSIISTTFCKENTSTTM

SEQ ID NO: 1010406 - protein, 79 aa, Homo sapiens
VPRYIILVVVSPFLCGFSLSSYRSLCSSASQCSSLLSACCPLPIPQFIRFGVYLCARSTVWADCSNGSWAVEISLADMV

SEQ ID NO: 1010407 - protein, 202 aa, Homo sapiens
MITVWKRSKAQTGRLLVNAGSSPSHRESHQERHEGSNVHQFTEALSGPPSGTSPTVGRVSKTDYPAFIGVGAPKPLTPYRTLAPRTPKEITSERRLLKETVHLPEPPEPGGLGGSALGWHSRLLQWSEKLGPHDWGRAGDATCHSHGPVRDLGHSVLAVGLSSSRVLRRERQFATSLTDLHSPSPALGPAHEGPSDPSCLRV

SEQ ID NO: 1010408 - protein, 222 aa, Homo sapiens
PRLSPRVLPTVLFALASCPLLGSPPALSPFSLSFFLSVLSVSCCLPPRLRLSLLPMPRFVPRSPHTPLSRALCSSSLLRRPASPSLSLPLRPLSVLASSPPSLSRSPSLSVPSRHLRSGRARPHLRALLLFLPPPLRSLGSSVMWLQPASSSCVLVISRVHYTSSTLHHERVLCGSLSAGDQILSEPVFLSHVRPYVVIIVLHFLSAGPGMPTLAFHLIPSC

SEQ ID NO: 1010409 - protein, 222 aa, Homo sapiens
RTTGLRARRTTSYLSQALYGLITQLNNSSKGASHVKYLEMTDRYASDQMTWKTKCCVTTQAERHARMNTAQNSLSPFYLSVLVIQQVVRHMRSIYNPRSAVNISRRKSLHSRFLEGVPQQLPVSVLQIGYPGVASRTPFYHQRVHKEILALSEETDLHLPILLKRSRPSCADPSAFVAAAPVAAATTAAPAACCSPSLRLQPRKTLGGVGRGYGCVSLHTES

SEQ ID NO: 1010410 - protein, 333 aa, Homo sapiens
  misc_feature (110)..(110): Xaa can be any naturally occurring amino acid
  misc_feature (143)..(143): Xaa can be any naturally occurring amino acid
  misc_feature (174)..(174): Xaa can be any naturally occurring amino acid
HFFFSRAGATTLFSLIMGGAVGTHRTVVPYLWSAPLAPPPFPRRVPSALVCAPAELLVWRPPWLFYDARRRASIKGERDMSPASRSGGHPLVGALAGKQILGVIDALLLXLGTDRLVVCHTRLAEKVCSFPAPPRAPRKWTSXSYSPLVLDRATASRHPSAGPAASALFWTLSXEYNNIPPPPAGECTNTSLSLGGLRERKLFAGGGPPSEETPLFSSGPRVVPTPLCGADKSAVSPGVFPPLAARGPSFVEGDPLTTHWGPAGTSSRELPTTGELRVPRGTRCVKPPPAWYSLPRGALPQGPPPGAPRVFLKKFLGKSGGFYAEIKNFCFFP

SEQ ID NO: 1010411 - protein, 362 aa, Homo sapiens
MLILRVFGPPFSACLFLFLVGRFLVSSSGLFSSSAPYSTPSSSPPLSPLSPLSLSCFFLVPLLRLFFTVAPLSIYIFSQPHTRSTLSLRFSLFFCHLYPSLYAVPLHTGCSLLFLRCLASVLPRRPIRCCPPASLFSGSRLRPPFLTAVSALFFCQNRHYGGAFCLVLPRLGKFPPTASLRSCAISAYHTGVFAWVPIPLPPRSLRRPTLWASPPRSLLPFLAGPRVDALLGFVRSFPGTTIPRSLPVPRPSLYGRNPCPRGFPPCPWDVESRDPGHYASSDFASPLSLEPMHVWEHAAFSPASVPVVPTVVSTTPVLAGSRWSCPGSMQRPPHFDTGLGCSLPCLCPLEGTLGPPHQGAEA

SEQ ID NO: 1010412 - protein, 76 aa, Homo sapiens
MLVVDESRDTPVSISSRTSLTLLTLNGAKDPAGTFQSMIPLSLPVFSQCHAPIVSLSSWFFSQVFSSQALTHGCIR

SEQ ID NO: 1010413 - protein, 370 aa, Homo sapiens
MSCLMKPTTNSLLFVVFLRYHYKDTTRASSITTLPSHYILLSSPARGRLDILYIFTHSLAHYCLHLLTLCSSVLCVPISTIQSTFSCVCSSTNQPVRFVIYSAPGDRSRKLDCARIHFHIDCISFLLVSACRWPPPPAVSMIGESPLPCSCIFSCGGATTPLVFCAARGEGHAFFTPLFASSSHVRLLESLSVFPLLRVVGWFLFLSSPLPLAVVIFFARRGEIGTLPPRVWVGITLHCLFLHRNILFFLIYTHALQVYDRTTLSPPPQREKIQKIFFFSPSPPPQHSRCAFDSSHTTKLTPLHSPVRRASHNISNNTLRAGAYNYHRIFFFWTQSTPLFVLFLTPPQTGSSLIYYMFVIGQAPASFLFP

SEQ ID NO: 1010414 - protein, 302 aa, Homo sapiens
  misc_feature (169)..(169): Xaa can be any naturally occurring amino acid
  misc_feature (239)..(239): Xaa can be any naturally occurring amino acid
AHGPIDYTRTGQILEVNFNFLLVHVASKVIGVEWKRRIVFPQEGNRYKRCLLNLSVNISIGQNHACRVTQTTSRHVLVVYPWMSQCHRGYFRPMHLVVLVAESTLHSGALLRTIQRILPSIIPSLKPIDWPYWSAHPVDHYVDAHTCFHGSTYGWSNVYDIEYPGRNVXTRNDSWDIRPLLMRQRSYRLVQYLRSLTFYHWICAYIAWAFVRRFVIFLPAVDSRVRFRLCILDGHPSHXYLTSGTEVTGPGATCCPRCGLASVQQIHKSTGTFTPMGVGATFKRSFYLPFHVMRGRIRRECM

SEQ ID NO: 1010415 - protein, 234 aa, Homo sapiens
CVLASFLVRFLLACSSLFLSVFLMGYVPVVLCFSSSLRSLLCFVLCPLLVLSFLFLGVSVAFSSCFLWPPPFPPCFGVPPLQRFCLLFLSRFFFSCFVVSLWVFSFLAFLSCCHSVRAFGLCVIDWVFVCVLRCPLSSFFGSPFSLLISSSPLVPFFLCALLCQYRRFPPLPLFPRLRPTHSAYRASRLRLCSSGVLGSWSDVPWGSHPSGTSRWPSPASISSVLCIAKEIRHQ

SEQ ID NO: 1010416 - protein, 137 aa, Homo sapiens
MAYARPVDLRPIGPPFCGPICSPPDFLPRSEERVVTKRTTPVAQIREAFIGTDPTKELLTLWRLKLARMLKLQSLMEDLGPGTRTAGGEHSHGVCPPFPGRPLAFDLQPRTLKGCKLIGKMENHPLGVLFESQTHGG

SEQ ID NO: 1010417 - protein, 41 aa, Homo sapiens
MRMGNSIGPQIPKPLQLYNRLCAKCLVISKMGGLAQGSVYV

SEQ ID NO: 1010418 - protein, 86 aa, Homo sapiens
RRKKKRGGEEETRKKEKEEEEEKKGKKKEEKREKKRRKGRRKKKKKKRGRKEKKKGKKKRKKKKKEEEERGGKEERKRKEERRRRE

SEQ ID NO: 1010419 - protein, 284 aa, Homo sapiens
MKFGPPRVGVPLGAPPWRPNLSGGRVPWWPLVVRPAVCARVATWGGVFCGGTHSAACFAPHSEWVVRADHRMGGALWLANCCRSVVASLGAKGGPSSVVSLRLSEGPTSFNALAAPLLCGGIFFPPPPVIVFCPPLLRHTHFVVGRVGVCVLVSPTGGERNTPALEGVGEVVAPPGAMVAPPQPAFHRCWCTHGASLYSPPGGGERQRECTPGTSLSLFHAGLMNALCMYASDSPHTAWVQTRGFLPGDGSLLWAPPPHGSVVYVNNSPPRLCFRHSLSLSPAT

SEQ ID NO: 1010420 - protein, 282 aa, Homo sapiens
MCCVIGNSAIVHTMGPLGPFSVYVLPYIPLILSVPLYGGSSIFLRMLEEMVNASYRRLYVNPFGTLKDLFFYGQLESREHLMWFVSRGKKDPEDKMTADRAVFHDVAVIAIQGPPRGRHTFCEPVMVALSNGSLILVGALVAWNTQVVKSGPRCRFNVLSVILVTLVQLLLLFPGKVCTDQGTQRNSKRNGWTKEDASFLLDGPGLDRVVLDVRRSVMRGHKVAMLVFPRDAPTHCKPLTIQVPIAWAPTLSASSAGAHFRTANYWTPWIKRQEGHQLLQSS

SEQ ID NO: 1010421 - protein, 100 aa, Homo sapiens
VTWREPRASDAAGDMSSPDGRSFPYRAALQEAPLPVVTRGYFPFVLERGGLITWEGAQGLRSPRDHSLCRLQRGSEQESCMVETRAASVQDDIRERTNET

SEQ ID NO: 1010422 - protein, 157 aa, Homo sapiens
SIALVSLAGRVPFSFPISHLACLRYSCPYSSAYFFKGPMTYIVSGVWIPHHGWLLFPRCSCNVHCGPCYPCVSGCWCSGMSSLIGFVLTVVSVTIVIRNALSVAFNFVYFAYGLVSLPQRLAFRAIVIVVALPVFPDGVWVCLSRAVLLGPTVARRL

SEQ ID NO: 1010423 - protein, 104 aa, Homo sapiens
MPHPTKLSFSYDTIGRVSGLSVAGRECVPSQPESVGSGHQAMVPSSRPRWYMGTSYTDGREMRVHCLSAPVTIKPLTLLPSTVQGFLPAHPPGPVPFITVNTSL

SEQ ID NO: 1010424 - protein, 306 aa, Homo sapiens
GNINEILVPRGRQTASGHASPTPRLSAVQASPKNWTRVREPVIGSLKYETGVFLRRLTVGKPASNAARPGTLRRGGIGDISNWGANYGTALEIAGKENEFPLVCVPRTPMVNLGSVPCAWSLEPLVGTPPPFYRGPLGASQAPRAKGPVESHAFEYPQAVQQRQIWPVGPSPVSDSRHHQRECLSQALPGASTITWAPSWSMDQAMKERACSLRSPSLALTSRRASISSASGAPAGQPPVKVLPYVEGFTGASPTACTETTAELRVYRPRPATRRRPSTHRPVVRHHVHPVRDQEVTRGAVRRPGR

SEQ ID NO: 1010425 - protein, 170 aa, Homo sapiens
VALLALLVWWSRASARACWFVLVLLSSWVIVCSCGGVGERVRCFTPHHACVFCGGWLVVAGSVAWLCLPPDCACYVVGVSPPLFGSETVWCHTKTVGCVGLAHQIGMFSTPLCVAITYYFVVWARQLGVSPPPRWVLLSSSWVLAQHTRVWWVSPEVSPLPPFVRGRLLV

SEQ ID NO: 1010426 - protein, 204 aa, Homo sapiens
AGRGAGSWSGPVRSPRPRVQEALKRLLHRGAQAAGWGAGGRCLLPPAGGVARLGPLVLARSPSPPLPCCRAEGWWQAAVLPARGSRARAWGRAGGGGSTASRREWGAMAKLRVGLRVHGSRGQEHPARHGILIISGRRVSSTSSGYMLAYEIPTLQGYRKPTGGQIGTRMLEQDAAKNRQKDVPTCNPFTMVAADMPGSHHSDR

SEQ ID NO: 1010427 - protein, 114 aa, Homo sapiens
MSSLLDSERYTLRFEKGGIGRDSVCFILGVCCPLASLLDAARDYMRPYTWIHDPCICHYKTPLVGLGATAETSVLVAPTLITFDLYRQAVRIGDCTKQRGSTGENGALQESGLC

SEQ ID NO: 1010428 - protein, 104 aa, Homo sapiens
MWLYIKGEYTPIGIGCRSPVSKASLGGHFHLVSTKFCHTSSLVFALDVRHRSLSSLPRFMCATICPVCNFSLPYDCEVVDITSGWHPVQACNLCCTLVSLHRNT

SEQ ID NO: 1010429 - protein, 87 aa, Homo sapiens
SSCRPYGAVFSLSRGVRASHAGPGREKSKACRGCREKTEKRLHLGEFEMFKSVQEKRKRNRKKIEKQIATIRAPTEKVELGGQFHKA

SEQ ID NO: 1010430 - protein, 269 aa, Homo sapiens
ARRQGFALTRRPRAYAGSNMARPRKPLAHPIEGTADYRPRTAHHASATGSDPPGRSGTPKQGENRLATPTSSNCRGPLGDASPSPSVTRAHEGLPTLRRFLATDRPSLAICNPGGACRHSCLDKLRDALTKPLEPSSDSVDLYWCLRFIPWPGELYISVKARASPHTWGSTGAPDGRIDNSVRPGHRYARDLRPVIPPVDQCMPRLPSPTCRGSAAGNRGGSLASVVARQQATLPTYTAVPGNWTRALTTISTITAYHWSPAQNERQTA

SEQ ID NO: 1010431 - protein, 113 aa, Homo sapiens
TRVFWWGFVFLLDALLVGWCGIDHALLPRRRSAPWMRTFFFVFVVVCWCCGAEDSALFVCVDYSLCAPAWWDGDRPLRVVGSALLWWGGSSARWTTRLISPLLRMSVCLFVVC

SEQ ID NO: 1010432 - protein, 108 aa, Homo sapiens
MILTEEVKMTNCWVLKTVLKEELHSELDWYQNDERVQQVAVTHVTDVMAELGRAQHKPVHRSPEPSQQARGPWTYEDIEKFQTVTGTVLVGPSAGSMRPALCVHITDL

SEQ ID NO: 1010433 - protein, 119 aa, Homo sapiens
MCAPALWVIVCWCAVRSEYSCLATVVCGVVVWLVATGVVGGGSAYPLTSYPSLPVALFISMTGCGADPIYFFALAYSHRVRWWVSFCGSTRVGDFCCVRSQRVCLLLVVSVYRLDRTQG

SEQ ID NO: 1010434 - protein, 256 aa, Homo sapiens
HRPAAALYLRPQVARSFAMLTVDPGGARAPAPGRAGKRQGPFFFFFGILFLETGVSYWSPMVGSVVGADLGFTGNFRLPGSRHSPASASRVAGDYRRPQPGPGYIRGILSRDGVFTVWARMVSIFRDFGIHPPSASQSAEITGMSHRGPGQAVKGTLSEKPCCGLEVRELGLSRIPVSAISGGQRPEDGWYRNLGRLGSGLRRGSVLAYGPGTGEETNRQGESPGTLGRHHDRGTRWAGQARLTGLGDSGTRRLTG

SEQ ID NO: 1010435 - protein, 255 aa, Homo sapiens
YINPERFLYCETPSGVLPSWVRPPLSHARLCEPPPLNGERLPPGARVFSPFPGAFFIPMGPARGGEYTTLVATPAGDHRFWPLFWAPYILEGGPHYLGHPAVVHPQKARGCGGTPLPPRISPGGLTPQPLSRVGASNHDVRSHFFLAVEIFSTAFFSRRSGNGAAPHMRLSAHPHGGFPPAALAPRLLFHKCQEGRKLHPSLPEELLCLLCSPPWACVTKVCPPARGFAKGSLGGDLPRAWCPEFGDSVFSPRRL

SEQ ID NO: 1010436 - protein, 324 aa, Homo sapiens
DEKQLLVEAIRRARWGHASLVPRLVNITIIKEQARDVVSFEQPEFSVSRGGPGCARIPVHPDGVLEGREVTSVSYTLDRMATAQGNRDYIPVEAELLVPSLVCWPCERSCMVKAPGAGNECLTTLLQGTVSVPAGYSIVQLEQALSLGAQLGPATMSHIIIIREPRMNWDRSFTEVSMWMHRKSYPLHGDAWGAPVMNAQLRRALWIPGKIHVQTWGVPRFWQRQWGGYRGLKGGWDFHGKSIPEISTVRNVAADKHKCCALKLGRTCNPGSSYAGELGEPTDDCTGVGRPLTGGLQEDAGGTGKGATRWVVPWPAGPNRGHRR

SEQ ID NO: 1010437 - protein, 90 aa, Homo sapiens
CAARRGGLFDRPLCLPTDGFGGLCVVVRSRVVVPHAARVCVVISCAPIGGEWGGVRVNRVTVAWLAFADMVAADLFFCDRMRPPRCVVVS

SEQ ID NO: 1010438 - protein, 331 aa, Homo sapiens
HKDPTGLPGVSREMPGQAGVCPCVDTESPLLAGLAGRLCSRGGGEPLHAWLGVREGLLGHDSSIAAVDASRSWECVTRSGAAVHVGRSSNDLRVNDASPVELTLCDEASIREEEARIRRRLDLPAGESIGQPGRDRYAVAAGGDYRGFPIGGSTYSSMPQGHNVLRFGLGMQARSFNCLSLRTHSTAGVGLRCPAFWRKRMRKGFALPPRSGGKAPKFFHPQERIGFRRKGVKANGESRLVTNRYYGKMHDRGLKLELRTVYPGFDSTVEFRNEESQGRSETIIKERKFSRIPDRGRGPLEKAIIAAGDTPRKSNYYLFLVTEKRVWVSPP

SEQ ID NO: 1010439 - protein, 47 aa, Homo sapiens
MPLGEGVASPELGSWMMVGWPDSLDMWVFGLTPGPLGSLLMGQCRES

SEQ ID NO: 1010440 - protein, 226 aa, Homo sapiens
ARALSEPACHCGAGAALALAAELLRERWAGCPRGTPMRSGVRAIDPWSETAWTGCCGCLADGTMPCVLAGLVTPLTVDPSAVPCCRSLQWPRIHQQDGQVSLQIADVAAENLYRATSYQPGERDGRPGGLSYVNSETLQLADSEELEELSGGVDPGRHGSEAVTVPMDPPGALKETKELDWSTPLKELISVHFGEDGASYEAEIRELEALRQVLGSEDRQNGRMKN

SEQ ID NO: 1010441 - protein, 296 aa, Homo sapiens
WVGANYQEGGGPPDHHCRSSVWVGEERGTPSCALGGEDYNDCGLGRRQPALVVGGSCCHCLLWGGMKDDIIHSRSSRRACLYNHNTHLPPSFVWLVIAINTWYQRRFDINMGWWAPHRKTTRGVFVSPLRESSASQQQISRASTRHTTAALWREEQKSRRGVLSTAEKTTLVLHHEEASLVGQQQPDSGGVSLLLVYPGGSLYPGVVWAPRISCQYMVRRGVDDTQHGLQLARPAFLPPHHTPSSWGAHTHTHTLVSAVWRELVVATLDSNNTHTWRNSSGGKHHAATFLVHTLSV

SEQ ID NO: 1010442 - protein, 200 aa, Homo sapiens
MSQAARSQVPPRLQSPRLCPECELDAVALPSSHLMPNKKRPALQLSAKDWTFDSRTPQNGARMRVKNGLAEKHRNWTVLYEILYFLVIYRGRNLRCRPSPPGTQLGQDQRCLQGNLIGIISGHGGRFHQVQRATYPLWKETRHKDGQTDIRIYKGDQSRVRKGMTEHRPIEEDEILDTEQPVTQSWRSNKEEIRMIESDN

SEQ ID NO: 1010443 - protein, 256 aa, Homo sapiens
LFVWFFPPPSALSPLRVCVELGRHRVVLLWWGSSAAVSSYCFCTQPFLFSALRDILDEEYRLCAFVFVLVSILAPMPVFGRVHSLRVAGERERALFAAPARYIIVEDVCEHLLFLSSVRDIIAQHSLSLSRYLLCVWSNLHICIKERGEEIVHPPSLCLCGDGFSTLFHTLWSRAVLSSLCVVRTLLSSLITSLCAHLWCALSVSLSLCCLHTPLLCVSRAQRRDSCLYTHAECSCPIVLATTPSLLWCARVVEKI

SEQ ID NO: 1010444 - protein, 165 aa, Homo sapiens
VVHSFTITALTSSVVRPDFGCTYPYAPYDRPAPGAPGTRCGSPPKSADFYIQDLMTSSGFLGISLEVSTPTLLRYCSAARSNQSYTTRRGQFYSSSSVMLLLLDIRDRNNRLAPPVAPGKPAAGTCSPCIAVKHRLELTNSEIIRVNHALDLYDTEILKQSEPDD

SEQ ID NO: 1010445 - protein, 333 aa, Homo sapiens
DIWYRLGPGTRSSVAAAGQLGRQLGASWDRLPLLLVTSPCPALTLLRSPCLLMPCLCLDFAACVLALHAALSVGPCSVRRAGDLWNALLLNWGNLCDPVPVVWLECQQSSTCPMLPCDVKGMYCRRFLLVLRVNHNNLSLNMHLQVINGDFDAVILALGHGSDGKPSMVQHDTPRDGLTKRPTEVNDSETAAGPKASEDRTLSKTFGSSARTCATFAHGSLQGGQLALFEGPEQHERPFQVQKAGTEGPVKRTDLIIGDSTQRERLPTGHGLNTNTTNRDKTTYPQKVSPLGDPGSRYQQRLRFTLTVLERSLVDRKPNRQRGVQRREEGAQT

SEQ ID NO: 1010446 - protein, 116 aa, Homo sapiens
IFRCDELRQESVYRRLYTIEFRGCSRSCSFQRRPDASQPHDSRSGCMAITIGPVSDVRKAKLLLSEQVAALHPPMLGHPMGAGPAVALTTPWELDCSRYGNEDKSALFPFRSISLA

SEQ ID NO: 1010447 - protein, 104 aa, Homo sapiens
LWAPPVFPFFFLGPLFWGPGLSGPCFRGVGFGPLFPPAPFSPPPGFPPRGPPPRWGPPPGGGAPGAPAVAPGFPLGPGLGGRPPARGGPPPRGPPPPTTPKKNP

SEQ ID NO: 1010448 - protein, 247 aa, Homo sapiens
  misc_feature (89)..(89): Xaa can be any naturally occurring amino acid
  misc_feature (237)..(238): Xaa can be any naturally occurring amino acid
REAASISERLRSNAAVVLEADGPDAGGLNALVEAVTLGYWLACAWVACGWPVVYGPWSVGPALPRGCYEPWLWPTACACVPGVLCAELXMVLILLCMSPWAACDVTTGSAVPICLPSVLCSAVCSCVPCWERRHVVLVTCPALLWSPWTVAERLLCGALLHMHHVTTKDNVTVMDCTVLMCDKTVPTLCDALDVIANRAISKRISSSLSKASLDDDVTIHDQNITPSEPTLLTPCAXXLRCTRVALV

SEQ ID NO: 1010449 - protein, 117 aa, Homo sapiens
KRLFLLSRMINSVCGGAHKTFLAPSVVGFKDTTRNQTPCGGQPSPLTHNIFFSFLKEASLDTLLVRSPLTKHFHHGAPLFGGKYKGRSLSFFLSQEGVENNTWAPDMWVGWLKTHIM

SEQ ID NO: 1010450 - protein, 119 aa, Homo sapiens
MWGVPPLDRSLEPSAALETALGDLYGFGVTPPLAAIKCTPDDICSAKRPPSVSKASTRFLRVALFWRVAPRHLYGGGAFPTHRLRESPWDGTGWLSFPVVDDYLTSVMWSIDDLGKDEL

SEQ ID NO: 1010451 - protein, 121 aa, Homo sapiens
  misc_feature (77)..(77): Xaa can be any naturally occurring amino acid
RICFTQQLLFEGKKKKEANDTKNKLIYRRSNQQYVYGLKDTGEMRSENRAKEGLPVLLQKPVSYSETSSSIHLLARXFTFPLIPRKEHSGIGNTASVRSGCFYQKKEEDWICCALPERPET

SEQ ID NO: 1010452 - protein, 122 aa, Homo sapiens
GAFAAAPPARPCQHRHLRRCRLGALLGFTAPFTTIYTVLGLLSWRRSYMSFSLVGPGDCSHEADGRTSVRGNWRWWAVLCVNYVHGLCPVWQADLWRYLEAMLVVRVAPIRARALALPSTET

SEQ ID NO: 1010453 - protein, 80 aa, Homo sapiens
PEQKAKQEREKELAKVPIKKEDLELIMTEMEIFRAAAERSLREHMGNVVKALIALTNCWVLFQNKPTGINLWPIKFFFVL

SEQ ID NO: 1010454 - protein, 125 aa, Homo sapiens
GLGTKGASLIVKHNGWALVNIERPPTEGFQEHPGHIPPHTPPLRGEILPLRQLFVPLGNFAPDKRRFSQAVSSAAPTCRIYLERVCALFGWLWGGNNPQVCCAAKCSAPHTGSPIVTPTRTSLCV

SEQ ID NO: 1010455 - protein, 224 aa, Homo sapiens
SWSGHPRLAFVVRPRWLLTLPLTLLPPSFNASLSPFLIRSPSYLTIAPGLCRVLSRGASRALSPAALLKWSSFLLGPIHVVAGLRSSWSLVCRLMASSYYTFAHAILAPGTGSLVHTHEVSLRSQPPVGHVPLPIPPCSFPLVVLLPPRECSPSLYRDQGLDTWAGLYFPLPCGFSPAQRSRFAVCEADGELCALGHIQTDPLGLRLLTGSMCPDLLLSPSLLH

SEQ ID NO: 1010456 - protein, 262 aa, Homo sapiens
  misc_feature (96)..(96): Xaa can be any naturally occurring amino acid
MPRDFFFPSQAYLKLVRNQIPQNMDPLSSGFSPTCGQHNIVLDEQERKFTPSAPQRATSFGKIHPIFPKHWFFFPPNMGPQHQSIPEGVFYTRREXRAFFETLCAGINSFCARFSRPLMTHGLTEFSGFKKESRCLYLRKFFYVRGVWNPECYILVHHQRELGQHAFFYTTCVDWRKVLRTLGGSLPTSKVNPRDNPLDQCTPVWIHVHNICKPLLSSTPLMRHPACHTPMQAPCVSGLFLKRKIVAPGRGAQPVIPAPQEA

SEQ ID NO: 1010457 - protein, 102 aa, Homo sapiens
MENRDTGSRAQSLNDYLQGYSVRRYLVSGPLEQGSPTARLRTGTVAYEEPGHAAGSERWAGIACTENCTVRSDGSTELDFSQRTHGAKGYQAARSCMTIVNA

SEQ ID NO: 1010458 - protein, 325 aa, Homo sapiens
GSAPSPALLQRAVRIDACAARTREPRCQQPGLRSQPQASPGGAHAPTARIARISAGYRCRLLPAQRRRHDALRAGALGAAATVVNAAAAAVVAVAGRRRRRPSQNATQTSYGLDLTKSSTELQAFQCQPIMAYQIQPKQSTRSPTSTGPNGRSLGLRVHTGEANHWVVFPGGLRRRDTSQAWALHTRSLQGPTSLSRLYAVLSRQDSLRANPVMLPDPTSEEAPQEEAYIASGCSAPPRVTGLGQTLHNDGATEGVKEAGLNEAHHRASGPRKFGTHTDVIYPREKRSLGGGDTKRHGPTQCWVVPHQGDLYAFPTLKGGRKNVS

SEQ ID NO: 1010459 - protein, 178 aa, Homo sapiens
MRSPRVPTQETIQACAQHTSQRTDGDMSRRSTGVPEPGLVKPYPGRRPGGVNALPGRNEAQEARDVKDTPVVNPLTPFDPFPLRDIQRRSFRGITGDRGLESEYLIDVDPRRSATHKKRPLSGHGQTSIRGIKALAKGATNEKCSIYGTNNREWVKVNIVGKTGFEEQEGRIKEKRKG

SEQ ID NO: 1010460 - protein, 160 aa, Homo sapiens
RCSEAGQCVRSGPTDARGGVVRGAMERGLGPGGAGPGWASHWHDMETCGCDGSLVALAWTAMGAGPWPPNCGLRVWWLVAGGGRSPPCPRLGATHIPFPLHWCTRCQGAGANDSGEGATRAGMATRTWGQADPSQGSEACRVEVSILVDVFMTDRHITES

SEQ ID NO: 1010461 - protein, 209 aa, Homo sapiens
LFFLAWPPRGGRIFLTAVLIIPRNRPLVCLYNFSLAALISAVPLNMSSRRGRALQYVCGPRHKIVVEPPSLLWGLFVSRHRSSHTTPSALCGAVVRAPPLEGGSRRRYTNICGRRTYSVVVGPPTVSLPVIAPIVDYIVGTELYLSRWATHTTTGVVIVRERVKNHTWGATFSYSVEPGCVSQHLLCVVSRRNTTQDTMWGSNTLLWGK

SEQ ID NO: 1010462 - protein, 270 aa, Homo sapiens
QVDCAMQRLQVVLGHLRGPGDSGWMPQAAPCPESCAPAVPRVRVTVVGVCTGAGCTGHLAGLVPAAGFNGHHAPTELLSCMSLTCWFSMDCESRGREQLGDICVVTSRRLCLCPLSIDSVRRWATWAVAQHSMGGRPCPWLTEEEPLGNITSRLMEKDNGQEICLIPMGITSETVAERFGISPGRSMDTFALASQAEVMQEAQSNGLFAKLTIVPVTTNGPDDKGTKEGPSTVTQDDGYTAQNSIMEGLAKLEACLQERWFYHSLETLAR

SEQ ID NO: 1010463 - protein, 354 aa, Homo sapiens
FPKFSYGITSPFSVPELLQCTPRVTVIRFSFLDCSENTFGRWICPSPGGERFDVSVTTSPEGVVPTSDGQGMPNRTHVLWVTRVLFVRAVEIVNRMTLRASETGVLYHLGPCDVLPTRASRSIECSMYGSVPILSRLVFLHVDVTQPFRGCELKAPVGSPRSPELDDKAMLNVRFRSIWGPRCRLRGNLAQSMRRSLLDVAGRTRTDGSYTGDLQLENAVVTSKKTLILKRFCRGLQRRVGETVIQELVCLGVHVELMRFGITVFDLLQSEPGAPGLRVTECSIKRAPMLSKDSRVSQEILENLRLAESSGTGRMWTLLAIRRWSLICSNLDRLGKSRGGAGATKVIDGRKLFD

SEQ ID NO: 1010464 - protein, 102 aa, Homo sapiens
MILPCPYLSGDGRVTSGTSNEYGAHCVVGTQLSATAVGNVAAILELVRASPSKDCHLSFECMLPLETSGHRLSIESPWPYYVPCDPASAPAPSYPFWPIAPL

SEQ ID NO: 1010465 - protein, 328 aa, Homo sapiens
RGAMAAGGLSLLRAQMRRDWVGRLREEQQEGTRLRQVSRILSEGGWLELQRRASGLAAGLRAADLVTVSCRAVSRCWLLEGPLKRAARQEVCERPWMELRGERSGRPGTCCPFLDTAKIAWSVYNSAAGNQARCQRSIPDVPVDPNCELLDPGFPENGDERGFSCLPRPDADGPEPIALQPTIEAFTPDLAIDARKGVEIASHCCVVSGNLVDRGLPTLHAQLALGLSATVPIFLKLPTGGNPLVTFGKVRGTLPLAVSPGQGQDTGCRGVVTDVVYREYRQRCPFQPVNTQKPWARRTFVQPQLVAEPKCLAGVPPTWLPHLGRARS

SEQ ID NO: 1010466 - protein, 219 aa, Homo sapiens
FWFCRSAALCFFFPLPLLLPTLLAGVFLFFRGPRVSRLHCCTPPGGVLPFSSLLGEGALHLERGAPSLRMAHLSPQSFFCRGFFPLWLSTHLRPVGTPSCLYRKCCLFVLKKGFFLALRFHTILGPSILPFPLGAGAFLLTPDLADIIMGGSQRVNPTSRSSEIFFSAQKNTFFPQLDEAPILTGKMSENGRHSTAEHHDFPQPLVIHPGGMESQRAPQ

SEQ ID NO: 1010467 - protein, 430 aa, Homo sapiens
ASFASSWRCFCLLFVSVFVSVCFTLGFVSALFFVRALLLLCLSLSDLLYLLLPIRPCLLFGVLSVSICVLFGDAFVRLGYSSCSEGVSCLGCMVFFFVVVSTWVHAFVRFFLRLTVPQFALLVLTLVAMPPLTPSAQSSFYHLVDPFQSVSPGMVSTLGMVSLKSYHLRTSCETNRSIAALPFHLARSLVPWKVFPKPFISRCARIPISRLLADVPLSVPGEGRAMPTRFVNVACCQYSQSSEGPPPLGGLCVCTRLSSGPPIPSCASLLARVLHIIRTKRIRKVIVITWLRLKNIGTFRRWPSVTRDRSGFAPSTGLGTNELSCGMTCFTVTSFSPCCPLEGRPTLHCLLVVPLDTGSGTLDGAHCSHLGLCVKRWQPHLSDENGISGYFSPGLQSGSAQRPFLAHQGPVIRAITVFHTTTLMKKCERV

SEQ ID NO: 1010468 - protein, 110 aa, Homo sapiens
MSHAVCVPPIARVPPLGATCGALVVDCLVTLLCVHKLGPLVRRCVPPFGEEEGAPPGYDPQGGPPFAVSEAHKIRSSGVTSPLRVGSFALRLPRDVCLTVCLPALQTAGF

SEQ ID NO: 1010469 - protein, 114 aa, Homo sapiens
MACCLLRVACRGRGALGAFPGEWPWRCVYGTLLSLSGCVDRGVVGPLCDFVCTVGMSVRVCYGGSVHAGNMCVQLHGAILCRVGGLVGDVFYRWSAVLGSCMLGLRGLISPGGR

SEQ ID NO: 1010470 - protein, 199 aa, Homo sapiens
RLASWSPSCALHSPLLVVAATPPYSVVFSPGGQSRLHTGSLCVGTSHSVVVGVTHNNVFVLVCLLLGGFSPYSPCATLRFPRYSGLRGTPVTFITTVFAYMCSGFLILWGLPRWRAQHTYLLGHVTPWIKPGPRMCQYLAGMVPGMPRKGLATYSHICWDAHRLHITGHTPCRIPEFLLYAARDLHADGIQTQRPTGNK

SEQ ID NO: 1010471 - protein, 115 aa, Homo sapiens
RPPPDVDGMITLKVDNLTWRTSPDSLRRVFEKYGRVVDVYIPAGAPRPMAPLGLRFLSCFHRPGATAQDAEGRHGRGGAGRTRAAWMQSVLLLCACLGPCPDKPPGESHAGRVHK

SEQ ID NO: 1010472 - protein, 176 aa, Homo sapiens
MDVTEEVFGQRLLDINVIGPKTCDDKGQLVPRNGETRSGSKCVISVFTIVSLQSISWLQSFTMSTLQQPRWGLDSKILAYRAGPKEHERVTAKHLELIKTSLQQDALDGQGKRGKHERNPADKKVRGARGLCWHRVFPVSLIDASYITGEYSVGAVEVPRPASEDQGYSPQARVGL

SEQ ID NO: 1010473 - protein, 90 aa, Homo sapiens
MTRGSMTEDASIHTSSPCRNGHQHEDGSRRLAAYPRCSMLRCQSTNPQDGLKGQGSRGKLQVRDHVFQTVGAHWLGPFAVGCLPFTAWGG

SEQ ID NO: 1010474 - protein, 407 aa, Homo sapiens
VSSFFSGLLVVLFLLFFLGCGSRSFAVLSFVCPRLSVCCVSISFFSLFCSSCVYGVSCFLSLASLCLFSHFVVPGWRVLLLSSTLSLLCSRVVSSCVLLFFVLDFFGGVGPPPFIPFVLFVLCVFSIVVILANFISFFVVFLLLGVCVSRVVVFMLFSVDALVRSCSLFLFSLPLSLLFVCSPSPLVGGGVSPWCCLFYLSFFPLRSPSLCCRVCLGADFSGVVPYGVVSLFILSCSRALARTVSHFFSFSRCASAARLCVCRVVCVSGLVTSPPFTCCFADDADPPPTLRCVCVCWFLFVCGVYVVLFSGTFSMCVVRGCVLSLGSMLFLQSVTPPLLWMRLTAPPPRTSRDKQQHMSVIAGMVACRRTHIKSKKSERTQPVPGWGGAPPPPPRRASPPQEPPPPT

SEQ ID NO: 1010475 - protein, 207 aa, Homo sapiens
  misc_feature (42)..(42): Xaa can be any naturally occurring amino acid
MSPVRLYVTIGVYCLPHSGLLASLGLFSPPAMFLYYVCLCIXHVVVRPFSILFRVRFVLWSLRLPLLCPSVFVSVPHSLYWLRSPGFTSLRYIVVVVMSSSISGGGSPPLVNGVSYGVCISSRFFLIGSFERYVCSVPVSSMPLSFVSALGHRFSLLRGVRRTVLCVAPWPSFIAVVYRRFLLVFPLPVSTSIVGRGFQSVLSFVGF

SEQ ID NO: 1010476 - protein, 108 aa, Homo sapiens
MVYLSTGGYGGNQVLCPCAILSGASRMIDQWRHAELNESTLMSLVILPCLSYMYGSVGKSEGEIYMCDCFFYNMRDLISDLSDHYGLTAVVSRDGSDGCFLRLAGDGL

SEQ ID NO: 1010477 - protein, 112 aa, Homo sapiens
  misc_feature (46)..(46): Xaa can be any naturally occurring amino acid
YRHHGPFSFLVAPPPAVVSPPVVHSQIVRPVVVFTPLLHIRESRLXGGLMIFSYLLSPWNFLSPLLCPLAGRPVVFPASVFFHTGWDDSCGCVSPSLLAPLYFFVGWATPFI

SEQ ID NO: 1010478 - protein, 245 aa, Homo sapiens
FGPTYMPCDPWPRNDEHFAECVFPLVPKTLFNTSEVVKHKRLRDLPGGTPPGLMFEGAKMYPHRRGFPPWAVYHCVFSREVRPSGLGPDLWSSEHGPSFYEPPVSCAPFGGHPTPWEPPGPPPSPCICCLEVVAPPHLSATPFSMHFPAGPRTPWPHTLVYRSSGVPPLGVLVPLPTSFTGLPPVFQNTPHLMGGHHRFTLLPFTLCTPCPLPAPLSQPFYLCFAEGVGDPPRSISTLPHMCHTL

SEQ ID NO: 1010479 - protein, 95 aa, Homo sapiens
  misc_feature (54)..(54): Xaa can be any naturally occurring amino acid
  misc_feature (62)..(62): Xaa can be any naturally occurring amino acid
  misc_feature (82)..(82): Xaa can be any naturally occurring amino acid
LGKSLLRESTFLSWIYLNSGPKWKAAETAYDFRAVKFSETLERITNRDNFWEEXCRKICPTXPPTKSSLKGDKKMGRTQIAXRKEPHISTWKHES

SEQ ID NO: 1010480 - protein, 376 aa, Homo sapiens
WGRFRCVACFVGSLGCFLFTFYLSCVFSLFPVSVCVSVLGVQGLGPSFIVASPFEFPCCVLSLLFSIGVRPLVVLLCFLFFGLISAVWWVSSVGGPLRACPSNPSVAFGSVRLVLASALSLHLLLVFHRVALVFVGYFYAFVLGLRPIVSVGFVLGAFSVVDLSGHVFDSKVYEIPRRGSPPPVLFPMIGLSALGGCLGLPAVLLCHLAPVPWSPVSLVGSCSIALGDAFEVMCMVLLDVAQVFPVYSRRVLDLLASHARRKSLRRTYAPGWADKPSSMPSLSPALSVHAYLGSSRDFTFLTSFPCQILPGVRRLRVMVGFSETDCPSSGCLAPPVRCSGFSGLPHSDPQQMRPLVPRPCSCGVTQPPQLCFDVTA

SEQ ID NO: 1010481 - protein, 271 aa, Homo sapiens
MSLLDPWWRKSSGLALCCCSWRSYVAWLQTALLSVALPAAWCSGSQRVRFRPDSEGRRNASCEGPWLTCSSPDLAWAPADRHRARRCTTYQHATADRWLCTGRAHKLSHAQASVDSGTPRDDGRTEELETVTGVQSRPGPGTRSGRNATVRQPLWYQTTSRTCASDPMHGPTAQHAVDMQHDTGGRQTAHLLPQTCEAPTGRGRAWSFPLKTCSDAVCFWLGLGLPGHGIHLDTGRHPEPLCQDSILVPARLLFGIRPPNWRGHVTVGAES

SEQ ID NO: 1010482 - protein, 191 aa, Homo sapiens
PVVSVWVVFVFSSSSASGGRSAARRRRELCVFSVGVYSWRIACAAPPTPLLFPCYGGRSVGQVPAAPRAVFARPLCGVVLFVFWRPVVAPALSPPPLILGFLCLLAPRSANVFLLFCAAPVRLCCIARSLCRADGFVLVLSPGSALFLLVQDGRGSRSLFLARGSSRSAPLAVSRYVVSLSLLSSLARAYA

SEQ ID NO: 1010483 - protein, 113 aa, Homo sapiens
PRVFPFMFPVCILGEIVRENHFPPGTSFALVSPKLKFTPPKRDKKWGPPRGGARLKKRGPPGGKKLGKNPFSPRLWVFRAFVFRLFSFKPLPQRGSPSPGSPQSFSGALGPGV

SEQ ID NO: 1010484 - protein, 98 aa, Homo sapiens
VCQDQQDLLRLPHPLGAPMGLFFWCLTVPPAVCHVSNGREMVVPMSQTPCENVRDDELGRAISPPFDQGSIGLQGDSVFGRHGSCEILHSMLDVDDWP

SEQ ID NO: 1010485 - protein, 269 aa, Homo sapiens
MALRSFLFDLTFISLGGGKVSRNPVVIGYSHVCLIVYIGGCPIRAHLVAPLFQGKGWTFKGCQGRSRHFPVETNTVASEGSLSKVHALLGPYFVVCLDLDCPTEARSPVTFVGCPLKSLNFFGLNFCHVVIGSLLAGIFICMWFCNPFRCLYPAKRQDPGQLVPCCGWRGPFTEASPSASECPLLSDSEVKCIENDAKLPGHWVHWASAWRYWLGARIILPLVHAPTYQPSSRSNIGHLHGDKGCIGTSSQPCHMTLVATPPLSTASTA

SEQ ID NO: 1010486 - protein, 112 aa, Homo sapiens
MAPSRTAGSHLKTLPRAASARVAHAHVVPAGPPPTCTVAALQETGVLRARFPPSRCNAGSSDRCLCVPERSHCLLTGFGRTGDPAFLYLLSAPREAPATGPSLQHPHRRWNG

SEQ ID NO: 1010487 - protein, 33 aa, Homo sapiens
HELDATGAQAPNATYWECYYNSLDCMLQRRDWE

SEQ ID NO: 1010488 - protein, 125 aa, Homo sapiens
VVGGLWIGVPPPLGGGPPFSVVVFAGEAVRGSVQVGLSALVTEPLPAGVVYSFSIAHSLARAVCPPHCYLLVSPPRPLCGVTHSPPLALRHKLIDWVCPPFFLLVRRAPPLLLRRCFSVGSPSPR

SEQ ID NO: 1010489 - protein, 159 aa, Homo sapiens
CPCVSCPPPCSVVAHRATVVLGTGRAFEPSSVDRGTVCTFCCRFRTFPRQMSCSWHASGHLECGVMCDLILEKPLTNIPALVPALLPRPRFYRRNSSQLGAGPSQESLHRCPQSPGAQDPLARTPRKPPVHPAPEEQLRLALELSIHGIRRSGTGAGSR

SEQ ID NO: 1010490 - protein, 189 aa, Homo sapiens
VGGGGGGALCSLRILCPARLGRWWCRLASRGVCAGVGVARASAAPSARARLCVVCCGVFAAARARALDWRAVARRVAPPRLLCVWGLGGSLSGPLRCCVCVLWAVAPCASLSLCGGRWRGAAALSLSLRAQMSFARLSLVYDRWVCVSLSLSLPLSRSRATPSTNSRINSDVCTTSSEHSRLTPLSFFL

SEQ ID NO: 1010491 - protein, 299 aa, Homo sapiens
MPHSFVILLFKAVSYDAYHISYQHPAPLRHCYVYPTSFPTHRCCSVNQSDLISFVNYLIAMFFSSYTTDFGSANNPLQDGPHYLDNGIVHIATARNNVLQISVLGVAITLGYLFVYMRGFALLGNSRPLTREIASQKRFVSVSRLLHYARSVLSKWHAQVHRPNLLFYAGTLSAPRNSSEYTLSVQLVTHDPLPISLSIRCMNSTRFDANAPRLRGICLGERIQAQSLTLDGNYVMPIGLKLIYDTDASWTEIDTFITLCPYMTINGLREAYSNNALGRVNHHNWRTLRVDSNPVSEYI

SEQ ID NO: 1010492 - protein, 254 aa, Homo sapiens
LGPPPMPVALFPPGPVNELAHGNAMGTALGFHRLPESNRRADPVWQPWAAPCSSAIHSTKDGMARMDEPWMCTELFLTLLQSCIVHARTVDAGLLLHALPGSHDVQREGSSEDHGTTRCALRDVFEGPGSLNSTLCAVSSSLNQDAGQQHLDPTRVPRGPWLWPTPHPTSPPKPEPPASLSWDRAGRSRDPKPGPLVRLSGICGSLGSGQAHGGRSRSSSHPHSRVTITASFPAPGRLMIRAVAIHVFMQYSLP

SEQ ID NO: 1010493 - protein, 147 aa, Homo sapiens
GGSFPSGRRVLAPVRFCGLCAAFLRPPCLLCCSGDVLRYSALPVSLLPTIGLSPFRGDGRFFFSFPLRLCAASAPRVPSLSLLRRISARCCPGASRFLCLPVVSCGPLCVYDVLLLISFSALSSVVDVLWAPSLVVASLFLFVNFIF

SEQ ID NO: 1010494 - protein, 171 aa, Homo sapiens
LFPGNIPQPGYPGPPAFPGQPFGDLVTSLFKEVPTAGKKGEKNSRGKCPKSNGEEKNFTKGGSPQAARKKRPRGVNRSLSQNFHHGVFTEEYPEEERGFPTPGASLPGKPANTPHAPLWFPSIGRPEIGVSHVHPPTEGPPSSSVVGHSWQEGLVHGDSPTVGDLAPHPSF

SEQ ID NO: 1010495 - protein, 283 aa, Homo sapiens
VLCPVSCSVSLSSLCTISGRLPPCFSTSRLWLIVHSAAACVLAARRYFPGPHALVGDTSCVHLLVLCFLSPRYSVAAYFASLPRPLSVRSCPCLFRWVLPPVQSLLLQLTFRFPCPSRVVRFLFLIGGWLWLSVIFCVLVAPWLGTVPLGLIGLVPLSSGPYMLCLTFVAFLSVSSCCSFMYHGLSGVVLRAIPGAVHRGVTPSFGSQTILGLLWLTVALSPCSLLLYWYCVLRLSCHCLAGVPRSGLSTLHVSLTRPASHALASVSLVYHGPVFGFHLLVLH

SEQ ID NO: 1010496 - protein, 144 aa, Homo sapiens
PLNPFPPIPPSKCAFNPNSLPTNCGTTTRTCTTAVVHKSFLLHSTLHTDHALIVLTSPLTTLCPPTLYLPSSHVTRFFYSVHETATFPANVFLTGEYSITRTCNPILTRTRASWVAPFALSLFLFRLVSLDHFVILGNVYSTLV

SEQ ID NO: 1010497 - protein, 334 aa, Homo sapiens
WVLIIYNPRGAFPFYIWWNALLQVLSPPRVLIPPSTFLPPPPFCCDTPPPIMVEGMTLPRGARSLFYVLLFRGELFLSPLMLPPPRGYREFLPHSWLFAPTTGVHTAFFWRPLFGSLSFIRGGDPLISEKPTCCCGPPENTHAVLGCSRVLRGNFFPGSVSRKFVTPPQGYVYTLTPFFATEFYTSFPRALCETSVDTHAVLGNTGFLITQTYTLYMTRAVTDGGATNGAARLYNTRGHSRGAIDQTPPPGCKNAPGATESTERGGPAPPVEEDRARWVKTAPSGHVSISTRRMCGQHVCGVYNGKNLLTRVEIKTPDVSATTCGEFSHHLQTP

SEQ ID NO: 1010498 - protein, 286 aa, Homo sapiens
RFRQLSCLGTSSQVPRLSGWSSRALVGCRSPGRLGAGTSALARGLSPSAALGSPQLLLSPRPLRPPSAMSIPCPMLCPAGLMGCTSCLGLLCVAARSTASGRGGGSWRCTTAGHVGNRAAERVSCQGPQVGRASVCALCSSTSASVCGRCSPEHLRGTGSALAEEVTVQRQGHDRNSGSHSSRDTDTGDNTRVGRSTNTHADRALDPNPLPLRPSTHPGVTPGLTYILNIPALLGSSSIVLLLKHLVDDGAPCIAVLVSYPGLHGDHSRRITSYLLITRGVHVRMH

SEQ ID NO: 1010499 - protein, 85 aa, Homo sapiens
PLWAPGAPPPFGPLRLPRGPPGPPPGGGFSPPAPPGGPPLFFPPPWAFPRPPFGGFFPPGGAFGGGFSPPPPPPPPPPGPPPPPP

SEQ ID NO: 1010500 - protein, 309 aa, Homo sapiens
SCLFWVLSVFPLFLLRVSSSCCGYCWVSSPVSPCVVTGLSHCVSCSCAALRCCNSSFRVLHLVRTSYIVWWVVGVLSNVFLPDPVVTAFHTLDVVVSFIGISSLWGFRRSCFSLVRLLLLCCGCVLCSVGALWCAVQSLSLRGMMSASCRLCHALVVSMPMCCDYECLFRCCGGGALSADFMSYRHLWGLLEGDPLGTLFSETPCACFQPTLSCLQLFASDSSFLPGCSTKLSASALRGFSSLPGTLLRCLTVLQTGPSLPSHLSYGLYGSLCLIPRNFSEDSSSYVTYNKHTSILGYNPIMRDLISMP

SEQ ID NO: 1010501 - protein, 121 aa, Homo sapiens
KKTVLRPIPRKPNGFPKGHKHGGHPTGDVNKGATRPSHRGERIPPGVIARPQKITEHFGEPTYESTTRARTQKKKCVLINGPRPLMRTPGGVFSKINTCGLYREISCFYHPRRGTKSRMVV

SEQ ID NO: 1010502 - protein, 241 aa, Homo sapiens
AHHCSSPVTVSLPLAFFFAFFFVAFVSNPRCLSTVPLISARYSRSRSRPVVLPRAVLPLLLCVLSSPFPPLASALVPLLPSFPLGPCVTFNVVSVMLSCRPFLVFRPSVSPVRRCGVCFPCLSGVLRSVFSLSRHFSTLIRAGYLRTPSSQGFYPALSLICRIFPTLISEMPLTVAQVPPGILCTTSTSEPSYFFFVCCPLPYPVDGSSVLIHPVSNVQIVCSRSIFSLLSPWQMTICLLS

SEQ ID NO: 1010503 - protein, 66 aa, Homo sapiens
LHFYLRNMTFPELAYNSYTGYNWFMVSNVGPNFRDEILKQILNFFCVPHEEYECTIIPAFVSYSKM

SEQ ID NO: 1010504 - protein, 194 aa, Homo sapiens
SVLRCRLLFVLRSVTRWLSCATCHSSVPAARLSWSSGGVRPSFSWRDSRRGSSVVVQAATGFSACRRRLHVASSSARSRPLMALVSFLCPIVARRCVSSSPSSCLCVCTAVLLGLSSCPGGPCAGLCPPTIRRVFKHRRLPTGSLRFICLPLSSFYHPRPGPLSHPDPLLHISTESCPLPGAPSFGYYFFQTGF

SEQ ID NO: 1010505 - protein, 186 aa, Homo sapiens
CISLLIILSPRELFAKVGWFSVSFCCLGPPVVATLPHFGGPRILLWGASFLLMMFLGTALFPGATPLFFVGVVSSPPRGWVAKLPPSFSRGRFFFWGSPGPPAPLVAAGVYTSTHFVPFAAIMWGAFSLPPYGVSSSRGGSHSPTGGFIIVGAILVLLREIFLPPLIGVPPIFSRGDTPPWGGYTP

SEQ ID NO: 1010506 - protein, 275 aa, Homo sapiens
MAISSQPGNFRSLGASACIKDVFILRSLKWSSSYQTLVIEVICRPRKDVTFAGHLRSDSLIYKEPRNGPITRRFLTTCLDRVSYAPSVTTSGAGRLCAWRIDVPCQQSLVDRCPTHFFTTVSVAPPSQRNVPTPVASLQLSLLTLTYLARFYQEPRFPVPKATLHNTASCWNLFASQGHGHISSRTSLAAPWGRISVNCGIRVLGQATWIGVVVCKAELKSVPGALNTMQVLLSSCPEHRSREPAGGSRGQQGARQDRAPCCSCPFLPAPPPSLG

SEQ ID NO: 1010507 - protein, 111 aa, Homo sapiens
PGAPGKGDGGGPPRKNGGAPPQKGPPGFFGGGPRKKTPGPHFSPPLFPHFFYGQGPPPRVFFSPGKGFPPPPGERKNPKRGAPPNPGGKGAPGAPAKFWGGIKKMGAGLNP

SEQ ID NO: 1010508 - protein, 267 aa, Homo sapiens
  misc_feature (190)..(190): Xaa can be any naturally occurring amino acid
EKIIWWGAPSSPCGGNFSREGFGAATEGVYWGRPREEGSPPSPGLVHTDFVVPPGVPCVPRALAIGSTRGVSSLKKSPFFPRHIFRESVFSLPLFRGTPPLWRALLVKCLLGPIYLFVLYYPLLGVHTPRRGHCVTRAPGVFGFLALGRALSPLPVVGLPSHCHGVWRAELYDHFYKGVLYSAKIPRPNXVSSPISRTHVVFSKGCPRGTCPPVDDPSRELLLIPCESPLFFIAATTTEGTVCAHCCPPPHSFHAGAGSNSRGVAVL

SEQ ID NO: 1010509 - protein, 344 aa, Homo sapiens
FQENVESKHRGVPGHQEFSGSLQECGLIWVYIPQVTKPPLGSKVPPTQLATVGQYTRGVIGRAFHRETPGVFPPGVEPPGAPKVGDTSAWTHTWPLLRAPPGRLPPRGILSRDVASPREVLSVGDTRLLREAFRGFNPQSAPRQPPLWWHTPRSWVPLSGVFPHEGFDPAVGCLGVAARASPERVFPRRVLPKTSFPLDPSGPESPPGAAPVLLLVGHPIALRGFQTRFPRVASYGRSQNGCFPPAHFGRLPPGRLLCPKVGEQEAGAPLGVVSRPTTPAVWTPGPGGEYTRPPGNNRGYTYEALGPGANPDSDTQPLPGCIIPPPGSPPQPFFPRFFKKRTPL

SEQ ID NO: 1010510 - protein, 80 aa, Homo sapiens
GFGTRGFPSSSRKSNLTNFPSKSGTANFRKKACSKNKGSFPPGGKKPAKKGSTLPKEVENSAKAQKNPARFFPGIGGKKN

SEQ ID NO: 1010511 - protein, 102 aa, Homo sapiens
  misc_feature (26)..(26): Xaa can be any naturally occurring amino acid
MFCQRGYLSWPSVERTFVGAPLCVDXVVCPQETPVLVFPLLGDFSPGVRNHRVGGMLCPTHTSPRRGLLTCRSLEDRLLIVATPILLQRAVKWWSTQPGGVL

SEQ ID NO: 1010512 - protein, 31 aa, Homo sapiens
PPPKGTKKGAPPRGGPPKKKGTPRAAGNRPE

SEQ ID NO: 1010513 - protein, 300 aa, Homo sapiens
MSCLVYISKMLFLLHPGCFYVDDPTPLVFLWILSWWGALTYSPECDASPADYFAAPLSCVGTLIWVETLVPIYMWRPPTSRWGTHTLPVRALFGGLFPGGLPPPSYYIAGGPDLSRGVLVHFRARGLFVSIQSVLHVPFLGGLVVGYAKRFFSLAAGLSPHTHLFVCPAGRENCIRYAVVTPHQHLLLRAVYHADPTTRGRRIFPSCKGLSRFYHQGGPPVSHHRVPLLGVLRGPPRCGVSYRAVGDVSALQPGCCHFPLSPYELGSTEKGPPGAPPPDFLIFFSWGTPPLSLFLRVQIC

SEQ ID NO: 1010514 - protein, 150 aa, Homo sapiens
MKCAPPLPQLLSKPTRGVCGAPHHKKRARFVVCVYPLLCGCCGQTHQACSRSGYTLLPAARTLRGWRSPTYVGEISTPPHTRGIHHPRALVTRDTRGLNNTCGLLWGQNFSTAVGAHHNPFTVPAPPLPMGKDVTMAFPVRPPPLPTRLL

SEQ ID NO: 1010515 - protein, 231 aa, Homo sapiens
SLDWGVVGSPRPTVRPPARMLFWLWCSGGWWGGRGNRRRWWCALAQHRLVARVSVVGVVVGSWVDGAIRTVYGVCWRRRVAAWRARSTGTRAVGCSLSRSVGVPRPLTHSARAGVVASLSHRVFSESGERRCGDEDECLLAPCVFLGGRRFCSRHYRVYGSRYFVRVCVDLGGRAAGPRLAFVVTPRGEGAPSSSFCVVSSRLYRRETRSHRARARERESPVRCRLPLRAK

SEQ ID NO: 1010516 - protein, 221 aa, Homo sapiens
VSVLLFGSVLAWFLSVLFIIRFCAQVLDPLGFCALGVVIRCWSLCCLVPSCPFLSALEFRAFSVPLPVSDLPASLLGLPRCPSLELPRRGWALSAWYSLLPVHPSQVTLSTLLRIHALDLLYYFTFKSPTRGKTGTKIQRRSKSIGRSTFQKGVHSRRKLSPGSTDLQTTSRAFRSNAERRLPTRTSPRNRAHPSHIAPSFSQKGLQLHLPGGPPSWCWPC

SEQ ID NO: 1010517 - protein, 112 aa, Homo sapiens
MARLVLLQGLAQVGESPVQFSVVRDSCSPWTLSFPCPVSPTADLLELEAPTFGFSTGRGKLQNARISQPSPRPAGFAKGAPARSGGSGPASSRVAAPARLHVDSRWGGGGHA

SEQ ID NO: 1010518 - protein, 34 aa, Homo sapiens
KITPPKRDKKGGPPPGGAGLKKGGPPGGRNSARG

SEQ ID NO: 1010519 - protein, 191 aa, Homo sapiens
RCYCIEIPMRLVNIPCLSLPRSRASTGSFLGDSGFSGLPGYIAVNQGFPCQDLIRCACCSWDSKYTATIPNPLALNSQPYAVLQRPLWPSMVACKGQLDWEESPLLLTACSQFSDGSNLLYTAATRSRCLVNLPTPDFSMPYNVIIALRALVVGRARYGSFYNLLTRTCPHRGALHRMAEAKRLANLIRRA

SEQ ID NO: 1010520 - protein, 196 aa, Homo sapiens
GTASRQPDRREPTPPARHSPEWTSSSRENRAPQVSSGATGESLKRRQVNTGTKPAAAAASLKISRLAARLKDKRKVRRTSLACPEGRDRSSDGGQAFHVCGHLQRWNKCRYAHQNRPLRSVSSGDIALPPSQLTPRKPHKLRERLPEDVYMALAASGRGSSAFASQDFENDLHNGMCMILSFPGKVKCQIGLLNIS

SEQ ID NO: 1010521 - protein, 273 aa, Homo sapiens
CLDVLCSLNDVLPSMFMLSPAFTGSCSAHELALLVGLNIPYGYRLVILSYHRPLGFPYDLHPPILAVCPFQGLQVQGPSTLVTMYDYFTCCYSHRGAVLVDSCSEFSVGRFPMVSTDLSHRSTLVSKRVLRSNWKQAHCSTEKKEINKRKQLILEGKDPDLEAKRKAELSKIKQKNRRFIRTKRGWRRMKRQKAGRAGHKGASTQDTVWVPLRPSPLPGPWIMSPTRPYCPVLDSSMETEGRRNAYLWRADSPLPRGPTTDASQQNHVGAQCM

SEQ ID NO: 1010522 - protein, 107 aa, Homo sapiens
MKKQRIIILCYNYTDVLKDPLCKRFKVHHAVRQAIEQNLDSIDIALSLRRFQIINLNSMHSVCEEECVKSHCIIELASSERIWIGCLFVIKLSSSTSIHKLLYIKFI

SEQ ID NO: 1010523 - protein, 112 aa, Homo sapiens
LYRTPKSAIVYFTQGLSPTSRSRKLNASYRFAPLSHSPRQPYLVHILVFYAFIEPQYILAPNLADYSLPRQSTFPSTTTRSSSLLISLDIDLGYIGDGKGVIGGYIRDHLKS

SEQ ID NO: 1010524 - protein, 194 aa, Homo sapiens
SSGFSGCLLAFFVFFSVLPCVVVQCFPRVAMPFLRALVVLRFTVALFTYHRELWFFSLIFYAAGLYVRRSLACPDDLSSSCYIWLMLPAVGLLPIDVASGGALVICIFLSFFSSLILSIYLGDLSFTISFFPHISCCSKYGAINPKLHFSLVFAIVYWSHFTLTYSFVYLALFPHIASFSSKGSLVHGCYPSKT

SEQ ID NO: 1010525 - protein, 164 aa, Homo sapiens
SLLSFSPLSSSPLSVPSPLFLPSLFLFSLFSLPSRSVFSSLLSLCSPLSRPSLFSPPISSPCFALSPPAADTLSVSQSRSAGPRLCLFFSLVFLASSLGLFFLSHLLPSCLLFAYLLILFPFLPLPLCCLSVPLFGRPLSFSFRPHLLALHTTLSPAFDSSLCL

SEQ ID NO: 1010526 - protein, 166 aa, Homo sapiens
MPKGSPPPRPSPLDNHQPIGVLAATEERNCCVAAAWYIDIPGKDLRLEVDPTKPKGYHANFVPRATAPTIWSLDREYSKVLALYKPSRTPGASGGRLMRAVRSEATGGRCPSCTTWASKHKVEQLSNMIGASCKMQHEVPPATPSPAGPAPHPAPPRCLDNAGVLR

SEQ ID NO: 1010527 - protein, 51 aa, Homo sapiens
MEHRYNVFNDTPRGNHWMGSSVSGSPRPSYSSRPNVNPPRRFQYSDDEPAE

SEQ ID NO: 1010528 - protein, 117 aa, Homo sapiens
MEVYLSTKSVFNGPFISMLLMHFFAHLNELHGVIVYIVASTIEARGYTSSVRSRDVKQSPFRDEASGEISGSQGVSSPICCTFPRARISKTSIFGQADMDSWVQARSYYTYTVKPLI

SEQ ID NO: 1010529 - protein, 316 aa, Homo sapiens
EPAPEPRSGGQAIQPRRKGGRRPLSHAGADKGAPSQRSSRDNNPVELSTRALTLQRNEKDVPAAKVKGETRREKTREARHRERPRRRSVRRRAGSEEQTLMMSWPETLEALVSKAEEEFFDIIFTELKKKGRQTPQSGRQGLPSPVPAERRRKDIACRGAPPSGPTDKTPIRYERAKEQRWKEKKQRQQPSPEEDQVVEEGEEAAGEEGEEEVEEDLARSQHSMRRYPCVPSFPTCLTVNQTCMAMAGPREDLQELGKGFSSMIDPPRPPTNQDRKSLHYENTFPGSFLTIGHTANDRSLQVCGRDGGRVGLGLHM

SEQ ID NO: 1010530 - protein, 92 aa, Homo sapiens
REHWPQVQPYVELDCNAFFEDIMDRLRRTPTLNIQQLMELVDAVTVHEKPSSWCRSLLLRSLCLDGGTPCGVCALGACDLDWCPYRHEKIDA

SEQ ID NO: 1010531 - protein, 307 aa, Homo sapiens
MPPFEVGLDFGPFCLQTPCPLCAPVGMCKPMFRPVLVDPSCRYGSCSVKPGTPPMNCETGFLVNRSVICRDHGSSLGAHACVSTPWMLGSVMGDGLVYSIEWAHSDVLLPDGYPGSQTNVTDRPFDGRRDRSYLVLRAVNLTIRPEPIHVASPYQRLVSMDGHASTSDSGPLRGPSYTPSTALLHPPHRHRTSGLQTPYKHTGRLDYSSHVTPLTQDRGLACTDNLLQLPASGSKAIGLVLEPGLGWAHRRFTEPCRAAVHPAEDSSLLGAQAMGQKLLTIPGVTGVKGLCWGPSTRHIGTRAHTLP

SEQ ID NO: 1010532 - protein, 109 aa, Homo sapiens
MVPRPIDPEARSLCIPRFNSGRARSRSSTSSEHVVLLHRAPLACILCCVHSIVCCCHRSPVLCQAFSPSPVSSQSQAGSLHPYGLGQAHGSDDTRPIVEWMSGILGSDL

SEQ ID NO: 1010533 - protein, 135 aa, Homo sapiens
GIRHEAKEKLPRYYKTIGLGFKPPKEVIEGPSIAKKSPFTGNVPIRGRILSGVVPKMKMQRPIVIRRDYLHYIRKYTRLEKRHKNMSVPPPPCFRDVQIGDIVTVGECRPLSKTVRFNVLKVTKAAGPKKQFQKF

SEQ ID NO: 1010534 - protein, 135 aa, Homo sapiens
KGGVPPGGGRFKIRGSPGVREFGPGSAFFQGGSCEEGPFPKREGAKIPASPIMKWPRFCFFFFSGVGKFGPGFLWGGLRTGGGGKNGEKNSVFLPVFLKGPRWGVKFVWPNRGKRPCLFSPLLQSPGQGDSPVVF

SEQ ID NO: 1010535 - protein, 74 aa, Homo sapiens
ARGELNGKTFEAVFPQGFGKLASVPVGGGVPVFVAPGFPPPVVGFAPAPPEEKKNEKKGGFKKSNNAMGLALFD

SEQ ID NO: 1010536 - protein, 106 aa, Homo sapiens
APPFRSPVPFLRGNDPFQFFLGPAKIFVFFNFPLGTLFLVLGGVTLEKFGVFPPKKGPPGFFSGVPVKNPKGNIFPPRFSTFFFFGRGPNPCFFFPQEKGFPPPLF

SEQ ID NO: 1010537 - protein, 233 aa, Homo sapiens
ALNKLINDELQKNLISNLHTILKPFLLRRLKKVVLANILPPKREYIINCPMTSAQEKFYKAGLNGKLKKTMFKELIKDFFTLNDEYIGHVSNRSIRDFINYKLSGNETSNTDNKINPTLLQMDKLYKKNLQMEISNKKLQNMMMQLRQIIDSTFLFYFPYLHPEDLTLETLLKTSGKLQILQKLIPPLISEGHKVLIYSQFVNMLDLIEDWCDLNSFATFRIDGSVNNETRKD

SEQ ID NO: 1010538 - protein, 121 aa, Homo sapiens
  misc_feature (21)..(21): Xaa can be any naturally occurring amino acid
MIAVVPRHQKAKNCDFDHIYXCLSLFIFFCTDKCFPLIYEGLDCFMLEFKPSNFFLFPLVFYRPAKFMMGSKTPIVTNRRGSKVVNSWKFTRKKDTENLEEEAMPSMSTSHNGIARHTIGY

SEQ ID NO: 1010539 - protein, 38 aa, Homo sapiens
HENVIFLEVDVDDCQDVASECEVKCMPTFQFFKKGQKV

SEQ ID NO: 1010540 - protein, 66 aa, Homo sapiens
TSTDDVFSKSNDWSSSSSSPVNCSVSDPLSRYLNGLVYAIEGTYKTKYVPLSTEKTPDNPLTRNNT

SEQ ID NO: 1010541 - protein, 103 aa, Homo sapiens
GVFQNLARGKTGFGVFPKKPQGGGKGPGVPPGVGKGGVPPLVFGKKTPPGGPPPLVVSLGSPWGRPALGGVSLSPGTLKRVWLEKKLGKKGGFLNRFGVRSKY

SEQ ID NO: 1010542 - protein, 216 aa, Homo sapiens
FPTQTFPNHWSMVTGKYPIEHGIVSNIFWDNFSSSEFRPNNLDARIWSNTADPIWQLLQTESQGEYKVATHMWPGSEVVYEDHGDVPRERMPFYFAKFNQWEKLQDKLAQIFRYIDMPQLKDRPELVISYIPNVDSYGHSFGYDLRDKRLQKLIGEVDGFFHDLIEGLQKRNLLKISNVMIVSDHGMSNVNTNDGEHVVVWERVFPADAMTAFISH

SEQ ID NO: 1010543 - protein, 127 aa, Homo sapiens
PPGPPGLGPGWWGAPPGGGMEVSPPPRGAPGNPGAPPGPGLPAPGGGPPGGSPPFRAFLVPGGPGGRGVFVPRGGFLFFFFFFFFFLVFFFFPFFVLFFFFFLFLSFPRVFQGWGGPGFGEVLGRAP

SEQ ID NO: 1010544 - protein, 104 aa, Homo sapiens
KVARDDVDCTTSRNWFDNDVGTAILKIYLTVVEEPDSALRCKPETEPPLRIAFEKEKAPELEEGENVTWPFVDSDRLKEISPLLSKEPGVKEYADGKKQQALQR

SEQ ID NO: 1010545 - protein, 160 aa, Homo sapiens
GGLLVTSFFLGFSPILGKTGFPPFREVKPLPPPQPPRPPSYLGRKGKRAPFANPLFPGGGGFFKKRGPPGFPLGKGAGGAPQLMWGRSLLRPPRVFPFCFRVVFWGEFLGGYHFPQGKGLALISPRLKITPLKGEKKWGSPPGGGGFKKMGPPGGRNLGR

SEQ ID NO: 1010546 - protein, 230 aa, Homo sapiens
GVSVAVAAFEVTSDGCASVTGERPIREISHTLRTRLNYALVKLQNGWTDKTLPELETELAPAVQTPPRRYHNIFPDSADAGTSAHTAFLQALGGHPPREEATAVETLMLLSSPTKKQQHRPVPATSAGEPTDETEPESDTEVETFNVEYEFFLRNLGVNAAAPAAAPFSIYIKCVMCVLKKLTSAYSAYLCVSADQHPRLKWNRTGSRKKRKLVALAGRAHRSRRCVRQI

SEQ ID NO: 1010547 - protein, 231 aa, Homo sapiens
LTAHFENTMNLYEQALTEVLLGKTELFKFYDTLKGLYILLYWFTSEYSTFGNSIAFLDSSLGFAKFDFNFQRLIRIVLYVFDSCELASLEYAEIQLKYISLVVDYVCNRTISTALDAPALVCCEQLKFVLTTMHHFLDNKYGLLDNDPTMAKGILRLYSLCISNDFSKCFVDHFPIDQWADFSQSEHFPFTQLTNKALSIVYFDLKRRSLPVEALKYDNKFNIWVYRSEPD

SEQ ID NO: 1010548 - protein, 68 aa, Homo sapiens
KIRWVFVFLHEFLVRHFVIRNQQVLNVFIVTIFEVNEIRLVERIEDKSFDHLLSLDQLDRVMKSTQYS

SEQ ID NO: 1010549 - protein, 217 aa, Homo sapiens
KEFFKPYFDLRAAYPNRCTTFPFKISMKHMDFSYQLVKVAKSLDKLPHLSDGLIFTPVKAPYTAGGKDSLLLKWKPEQENTVDFKLILDIPMVEDPSLPKDDRNRWYYNYDVKPVFSLYVWQGGADVNSRLKHFDQPFDRKEFEILERTYRKFAELSVSDEEWQNLKNLEQPLNGRIVECAKNQETGAWEMLRFRDDKLNGNHTSVVQKVLESINDS

SEQ ID NO: 1010550 - protein, 218 aa, Homo sapiens
KAKNDAERNKINNKFANQIAMSVKLGNGITDPSMNIRLATSIELANKNNVSKKVIENAIRKASGSSASGKDSNASELCVYEGRGPGGVAIVVEALTDNKNRTIGLIRSAFNKANGSMTPTLFFFDKKGYVTMVPPKMLDTEDKVLESVLEIQGIEDIAPVQEDAEDLECDTETETTGQTYEAVMEPADTNKVAALLKERGFHIRDLGIGYNEKPDRKF

SEQ ID NO: 1010551 - protein, 230 aa, Homo sapiens
ELDGTIHSSTFSSEWLRTKLVSLIPLGCGQIQLARSSLVNGDSCCDLLDLGGTIVSLNLFKNRRFFHEFFQFCMHITMYHMPFTVHLRQFGFQLRPGLSKEASNFCLISATYASIMGFLSWSNSLENAVFLNVYIVIYLVQPIALSTVPGRIQLGPGIQKRLHTARILPLPVRSFTNPLTESSHYLVLLPKHRYYRFWNDNGGLRRYYSSSPNGRFYRYRYYCYLSPFFE

SEQ ID NO: 1010552 - protein, 56 aa, Homo sapiens
ASPFPISAGLSGSPFPPPPGFPGLHVILGPPFLPLCFPPPLVFPFPPPPPSASPPP

SEQ ID NO: 1010553 - protein, 72 aa, Homo sapiens
ARARYVFCIYGSISDYKLLLKKHIDIEDKIHIVRSVFILPGLTVKSAELYGASRVIIYTDPFDDGKVPEENG

SEQ ID NO: 1010554 - protein, 138 aa, Homo sapiens
TSLHNVFNFLVVDSPKGSTAEQYNEACLLKGDIGDLLYHYKDLYKLSAKELSKCLELSPDEVACLTKRHKDYVEHIADSRLAKGYVQRVRYATVGGGKFSLMAFLIIKTLRNMGTTLPVEALIPSGDEGETEFCDKIL

SEQ ID NO: 1010555 - protein, 54 aa, Homo sapiens
CLHWDSHEFPVPVYCDSARTWTYKTKTLWEAGAGGSRGPEIETIPAKTAKPRFY

SEQ ID NO: 1010556 - protein, 191 aa, Homo sapiens
HEVTMGVITGDILVNGIPRDKSFPRSIGYCQQQDLHLKTATVRESLRFSAYLRQPAEVSIEEKNRYVEEVIKILEMEKYADAVVGVAGEGLNVEQRKRLTIGVELTAKPKLLVFLDEPTSGLDSQTAWSICQLMKKLANHGQAILCTIHQPSAILMQEFDRLLFMQRGGKTVYFGDLGEGCKTMIDYFESH

SEQ ID NO: 1010557 - protein, 47 aa, Homo sapiens
GKSVYFVNTNSRLSIVPGDPQGPPRPFRSLTQGLVTRKKPIKPFENL

SEQ ID NO: 1010558 - protein, 122 aa, Homo sapiens
GEGAPIPNPLFPGGGRFLKTRGPPGFPAGKGAGGPPPIKGGGPPHGAPRVFPFMFPVGIWGGIGGGNHFPPGTSFAHVSPRLKFPPPKRDQKGGPPPGGAPFKKRGPPGARDLGPEKKKGEC

SEQ ID NO: 1010559 - protein, 83 aa, Homo sapiens
MKEKKLTPITYPQGRARDKERGAEKERESAALTQRGRKKGETKRPEQPSARLPRKRGRENACGCKCLSPSCVALSLGTFGRSA

SEQ ID NO: 1010560 - protein, 77 aa, Homo sapiens
SMHFLVAEWNEPSLHFYKKKGAFDLSSEKGWRLFKIAKEYLLKMAPKEEECCCKSHPPFYFRINSPLFLLFMLFVVK

SEQ ID NO: 1010561 - protein, 138 aa, Homo sapiens
GGPPQGPPGVFPFSSRPGRGGGRGGGNNFPRGEGWPRIPPARKNPPPKGDKKGGPPRGGALLKKGGPPGAGNWAQKNFLGAPPGFFPPPPGGGPQKTPIWGGGFPPPKKKGGGNKLWEGGGGGGFFFSPPPPPKKIPF

SEQ ID NO: 1010562 - protein, 111 aa, Homo sapiens
GHEVHVPSLEGIAPENQLVFLAGGPLEDEAILGQWGVEALIPLKVPARMFGGKVHGSLARVGKVKGQILKVANQEKKKKKPGGVKRGMQYNRGFVNVVPPFGKKKGPKANF

SEQ ID NO: 1010563 - protein, 142 aa, Homo sapiens
MSNSNSKKPVANYAYRQQQDYNGMNAMVGNPMMYHPVDFVNGAGQYGPSQHPAYYTNSPLPNIPPTPFDTAYGASLLPSHLLMGSPFVSSPNMQSGYNSARSSNLKRKAYSRPVSNHNGYNGNSNSNQNNTNNGMSNTLELL

SEQ ID NO: 1010564 - protein, 39 aa, Homo sapiens
MLSYGNQPYYKSQIGNIFLLNGKVIGGKYDKGFVNMHFN

SEQ ID NO: 1010565 - protein, 197 aa, Homo sapiens
HEDDMILFSKDLNANKKIITTLKKQYDTKIINLGEGDNEIQYDILGLEIKYQRSKYMKLGMEKSLTEKLPKLNVPLNPKGKKLRAPGQPGHYIDQDELEIDEDEYKEKVHEMQKLIGLASYVGYKFRFDLLYYINTLAQHILFPSRQVLDMTYELIQFMWDTRDKQLIWHKNKPTKPDNKLVAISDASYGNQPYYKS

SEQ ID NO: 1010566 - protein, 142 aa, Homo sapiens
MANDNLHWADLRATIISTVRINKLWRCAVVALIAPAELASTSSPLSPLKLAYYHQLMIDRLIRRRKKAGIRNPASTFLAHPKIYPRRHPRSTRKTEVITLNYMPLRKISYEDTVNNPCEKVFPKIIPGQKRFWYISDWETRL

SEQ ID NO: 1010567 - protein, 131 aa, Homo sapiens
LAQGKPPPVPCKVTGPFGFVLVSLIPAPRGTGIVSAPVPKKMVIKGGIEEWYPSGRGCTAPLGKFAKAPFYAIFKTYRYLTPDLWKETVFPKFPYQEFTDPLVKTPPKVSVQRNQGPTVGSTKGFYTKKIK

SEQ ID NO: 1010568 - protein, 89 aa, Homo sapiens
ARGEEDGDEHEEADSATDTRAAEDDEDDYVHTKKHKTGQDDYTAKKEKSKLKKKRPADLFTLHFPYKNLNAVTFKKEARPPTVGSATRI

SEQ ID NO: 1010569 - protein, 101 aa, Homo sapiens
HERHEKVSKKYGIMQNRQRIIGFPEGEEKTKNLENLFEGIIEENFPVLAKNLDIQIKEAQRSPGRLITKRTSPKNIVIRLSKVNVKEIILRTARQKHQVTY

SEQ ID NO: 1010570 - protein, 224 aa, Homo sapiens
GQEIPQHKPVEVKRGSTLSIGKLTSGCRAYLGIRGGIDVPKYLGSYSTFTLGNVGGYNGRVLKLGDVLFLPSNEENKSVECLPQNIPQSLIPQISETKEWRIGVTCGPHGSPDFFKPESIEEFFSEKWKVHYNSNRFGVRLIGPKPKWARSNGGEGGMHPSNTHDYVYSLGAINFTGDEPVIITCDGPSLGGFVCQAVVPEAELGRWTGYTRDSIQFGHFLTKA

SEQ ID NO: 1010571 - protein, 163 aa, Homo sapiens
TRLDLVEWMIRIAANDAPDFDSTKVEVNGVSMEARLYAENPLKNFRPSPGLLVDVKFPDWARVDTWVKKGTNISPEYDPTLAKIIVHGKDRDDAISKLNQALEETKVYGCITNIDYLKPIITSDFFAKAKVSTNILNSYQYEPTAIEITLPGAHTSIQDYPGR

SEQ ID NO: 1010572 - protein, 104 aa, Homo sapiens
NPQPSKGPFSPKIEIRQGDTCVSIIRRLMKMNRGIKALSKVKLMRFDDPLLGPRRVPVLGKESPEKPPIFEHAVFNVALMSKKILLIENGIRVDIGNPKIYWVH

SEQ ID NO: 1010573 - protein, 39 aa, Homo sapiens
ARAEFRFTDYSTKENVLSVLRNLRYMSGGTATGDAISFT

SEQ ID NO: 1010574 - protein, 161 aa, Homo sapiens
GFPPGKGAVRPTQLMWVGSLLRPPRLFPLWFRVVFWGEMLGDNHFPQGTALALISPSLKLTPPKRNKKWGSPPGGAALKKRGPPGGRNLARGFLPWPLETGGWSPPPPGWAKRGRMLILPLGSKKTWGLAVNPGEGVPGETPRCPIPSQVPPKKNKRVLLG

SEQ ID NO: 1010575 - protein, 221 aa, Homo sapiens
STGLREPNRNDPQIKISLGDKYHSTLKFYDPDQPNNDPIEEKYRRLERASKNANLDKQVKPDIKKRDYLNKIINYPPGTKLTAHEKGSIWKYRYYLMNNKKALTKLLQSTNLREESERVEVLELMDSWAEIDIDDALELLGSTFKNLSVRSYAVNRLKKASDKELELYLLQLVEAVCFENLSTFSDKSNSEFTIVDAVSSQKLSGDSMLLSTSHANQKLLK

SEQ ID NO: 1010576 - protein, 152 aa, Homo sapiens
KGAGGPPPIKGGWPPLWAPRVFPFFFPVFFLGGIVGGNHFPPGTSFALFSPKFEFTPPKREKKGGPPPGGAPFKKRGPPGPRNLGPKKISLSFKKGGPLKNGILKKFFLEKTTFFFPPHFGPFGKILERFFSKILGGSQIGKNFKKKKSFPP

SEQ ID NO: 1010577 - protein, 126 aa, Homo sapiens
SAREKLSPLPEKDGVSSELVKHAASRGKKTITGPLSSDFLSYPDEAIDADEDVTVQVPDTPLERTSNGEGKNHNMKYIMTTSINVSTPVVVNPRKYGGGFYNELLKRRDAVYGTDKPIALEIGDCA

SEQ ID NO: 1010578 - protein, 160 aa, Homo sapiens
MNGIFAIEKPSGITSNQFMLKLQHALTKSQVFSKEIQRATAERKQQYEKQTGKKASKRKLRKVSKVKMGHGGTLDPLASGVLVIGIGAGTKKLANYLSGTVKVYESEALFGVSTTSGDVEGEILSQNSVKHLNFDDLKTVEEKFVGQLKQTPPIYAALKM

SEQ ID NO: 1010579 - protein, 223 aa, Homo sapiens
QTWGFWSNLAYWGAVSFTAGTWMSGSAALSVGLSYPETIVSFLLGNVLIIIFTMANSYPGYDWKIGFTLAQRFVFGIYGSAFGIIIRILMSIVNYGSNAWLGGLSINMILDSWSHHYLHLPNTLSPSVAMTTKQLVGFIIFHVLTALCYFMKPYHMNYLLIWSCVATCFAMLGIVIYLTKNAHGVGELFTSTKSTATGSKRAWAWVYMISYWFGSVSPGSTNQ

SEQ ID NO: 1010580 - protein, 200 aa, Homo sapiens
TSSPSRFPSKSERLKRYVRKGIPAEWRGNAWWHFARGQEKLNKNKGVYSQLLRKMKQIKKQNPNEKQVQDLDIIERDLNRTFPDNIHFQSSLHNKEGPPIIKSLRRVLVAFSLYNPKIGYCQSMNFLAGLLLLFLDEERAFWMLVIITSRYLPGVHNINLEGVNIDQGVLMLCVKEYIPEVWSYIKPSIDHHQKNNKTFS

SEQ ID NO: 1010581 - protein, 139 aa, Homo sapiens
LESLHNNEIKSAVGNIIAIQLFENRYHQHVQWYPRVICSENFNVLPNQPNVVTTTPPKSAPKDTPVSAKCFIVEQPYQHRQECRPMRHFRWGNSQRKLIIASAFLDLIHICSSTVMMPAKLQLDVLRTLQSSARQERKR

SEQ ID NO: 1010582 - protein, 100 aa, Homo sapiens
HSRRKRCYNHRNFAYLLRGQRRDLVQTMNKGLFISRIQPCRRKPLYEMLISYNTLFNVIVKFDMPLSWLAHYISPFACLKPASPKKVLQSLIIVHFLVFL

SEQ ID NO: 1010583 - protein, 174 aa, Homo sapiens
TSSVIMLSFTRIAIVRNTVIIIVIFRESVSSSDGGHRHRLMIIVHTNTRIFLILVVVVIHDYVRLRKVIITVIAVVSVIIVFVIFVVLLIMRCLPEIPIHNCVMLFIGVGMIHIEDDSFALNAANIFRIIIIILASITVIIVININITTTFHNILLFRVFVFQILRMQLRIMVL

SEQ ID NO: 1010584 - protein, 101 aa, Homo sapiens
PEQDWRKYYKVGPLDFGGTQKQKQLFIGGEACLWGENVDATNLPPRLRPRARAVGERLWSSQEVRDMDDAYDRLTRPPCRMVERGKAAPPLYAGYWNPENM

SEQ ID NO: 1010585 - protein, 50 aa, Homo sapiens
KQWNQAVLVVLVDEMKYWQYEITSKVQRLDGIVNELSISEKDDTDPSKLG

SEQ ID NO: 1010586 - protein, 40 aa, Homo sapiens
PRAAGIRHEIVVCVLFKNFEVVSILYASSSIICVNSSSIS

SEQ ID NO: 1010587 - protein, 32 aa, Homo sapiens
ARGLGDRSRLECSGTIPAHCAPAWVTDPDFIS

SEQ ID NO: 1010588 - protein, 47 aa, Homo sapiens
MVQNNESVFFVGCDSYKESPSTSPIRLDDLDGNDDVSDQGLAFDGDV

SEQ ID NO: 1010589 - protein, 84 aa, Homo sapiens
GHEGGQRVKSMKFVDGLMIHRGALVNYYVDTVVRQVLFRQGVLGIKVKIMLPWDPIGKIGLKKPLLDQVSIVEPKNEILPPPPI

SEQ ID NO: 1010590 - protein, 206 aa, Homo sapiens
ELRAQKDGYIDRLLQYDQLTQEINKGVVFQGFKEPTLQFRPTYKYDYGTDNYDTSEKARTPSWTDRIIYKGENLHPLAYSDAPLKISDHKPVYAAYRANVKFVDEKEKLNLVEKLYAEYKNTHPEALTTGPDELSHARMEKQKESIPLDATVQSAGIKLIDLDDTSSCVSPLLSGPSPQPSVVGPGGLSNVSPDKSKLNVLPPPPP

SEQ ID NO: 1010591 - protein, 184 aa, Homo sapiens
ARAKTVANAVEVSKESQKELTRSVERKESPEIRDYERAYDPKALKTDVTKLTVDNDNKSYEEPLEKVEGCIFPLPKAETRLWELKNQKRNKIISKQKYLLKQAIRNFSEYPFYAQNKLIHQQATGLILTKIISKIKKEEHLKKINLKHDYFDLQKKYEKECEILTKLSENLRKEEIENKRKEHE

SEQ ID NO: 1010592 - protein, 207 aa, Homo sapiens
HESTLGFLSASLICIVVFLLFYPHVTWCSWVLIPGAALSLLVIPLIFSAYSRSSGSRDDDETEELEEKGMLLNDPYLSSKSGRFDIDADSEANLRGDSRTNLLGDNFKNGTNITVVPDIISHNQDPKLSNITTSTTSDISTFDKEAKDMENSNGSGLNEEEDDGMAYDKRRSTSTYSVIESESGLKNGSVSNNYVRNNGSNTSNNIN

SEQ ID NO: 1010593 - protein, 99 aa, Homo sapiens
ARAPVHFNTTDFEKDLLIPAVNGTKSILEAIKNYAADTVEKVVITSSVAALASPGDMKDTSFVVNEESWNKDTWESCQANVVSAYCGSKKFAEKTAWDF

SEQ ID NO: 1010594 - protein, 113 aa, Homo sapiens
MISIVLELFQNLCCCRGFSDATIRVNDKRYRIQRLLGEGGMSFVYLVRLSKNSLIIDNGIATPELYALKKIICPSVESISNGMREIENYKRFQSPYVIKSIDSQVMQEKDGSK

SEQ ID NO: 1010595 - protein, 186 aa, Homo sapiens
HEVFTDLKNAPPYVPQRSKQPDGMTIKLLPFQLEGLHWLISQEESIYAGGVLADEMGMGKTIQTIALLMNDLTKSPSLVVAPTVALMQWKNEIEQHTKGQLKIYIYHGASRTTDIKDLQGYNVVLTTYAVLESVFRKQNYGFRRKNGLFKQPSVLHNIDFYRVILDEAHNIKDRQSNTARAVNNLK

SEQ ID NO: 1010596 - protein, 297 aa, Homo sapiens
  misc_feature (92)..(92): Xaa can be any naturally occurring amino acid
MGICTSTGVIRDFAGPYFVSQDNMAFGKPAKYWYSWTLPQVYAIGPNACDTAVHDASEEYKLRNANLCCDNCHSPRGHWTLTSDAATIKQHXTGHMRARSACLLRCTLRVKYAQRSGTYRVMTWHAPSSIVLEHFILHSSGRALFKPSQVTRLDSEGDPISLIHRDPQMEYHARPIAIMWVSHELILYRPYSTQYKRKGLGAIAELLRTERDQAGLVMDVDMDLTEPCIERGRYCPLSSVPLQGSSRWSPSLLQGTVYLRRLAKTHFASCCVKRPWCFPCVAAHAGTHLAGGPALSP

SEQ ID NO: 1010597 - protein, 149 aa, Homo sapiens
AELTVEVRGSNGAFYKGFYQMMYMKDSLTVVSVRISWQPERQVPFNEVRLPALYLIYRKGNLVKDDEVEVYSRANDHRAMWVVAWLNVRSDEEENVMSLEYAACDSYLQMTIVQQFEAYLRSCSNAKYRQACHKELIPSLNAQWMFLRI

SEQ ID NO: 1010598 - protein, 79 aa, Homo sapiens
LYLSIWLAEQLAGSLSLSETQVQVWFQNRRTKYKRQKLEEEGPEYRAEERRATHTHQPVGAYSHEAGQWGRTSMYTSND

SEQ ID NO: 1010599 - protein, 176 aa, Homo sapiens
HYVVCAERKQLVGSLSLSMTQVKVWFQNRRTKYKRQKLEEEGPESEQKKKGSHHIYRWRIATKQANGEDIDVTSNDYAVGNHKPTRDRVLLDCWPGPCVGTKLDSGHSHGQASGEAMEVNGPHRGIEARGHANLKRGDKRMGWLRPGTTLAVLPRRAMLCLGRARPPQQHHQLHLT

SEQ ID NO: 1010600 - protein, 73 aa, Homo sapiens
MNGCMRLCSSVVCTFLHACCLTLAMCACPAQLTAEPWNSYSFAPEGFHPNQCQGPPLFPFQIIDVYGTIGLFL

SEQ ID NO: 1010601 - protein, 134 aa, Homo sapiens
MDMVSLGETVHISVLDSVETIHDTTKDALLHGATEQEAAGKLKNRTRVSFYEYLYYHTGTATLYLARRQGRKAGQTFENLPHNDTKTNHNLYLATTKTVHTLLSQVHVYTHNSIQTCIDSQLDTRLRRSTYMHL

SEQ ID NO: 1010602 - protein, 115 aa, Homo sapiens
MTDRAARATWCGYGSLRVAQKLIYGHCDHYDGVRKLWKLAAEHGLAKLKQNIRDLRPGDKIQSWIAQCLSESEDSLLKKITSFVSPTRGFPQMGDHTEVLKGIRATFPGYQLPSP

SEQ ID NO: 1010603 - protein, 100 aa, Homo sapiens
SALLRLLRTGAPIRCVPAVGDQCRDRVAPCLWTCIHIWRERGAAADSQKLPAVVRVKKCNVGHVHCPPFHDSSIMEGYELVTGGTTGILYEAKSRNCMQY

SEQ ID NO: 1010604 - protein, 258 aa, Homo sapiens
KEVEAAAVRCSGWRAIAGWEPWVRHAARWPIVGPDAVRLGSEPGPGCGCADVPQPAFRDGEAGVSMKWLRAQGGGEVGAWCPGSVREEGGAWMCLDRGFALVPWDADRTLAGADRTSAAGGTRELGGARTVGPWRLCRRPAASGATCCDLPKMPWAMVWDFSEAVCRGCVNFEGADRIELAHRIAAAQLKRSHVAPLMWPVLPWAPGPLMQPGHQGTLACGKPDMGPPSLPGPRKWPAPRPVREPGWRAVVEAKGTGY

SEQ ID NO: 1010605 - protein, 475 aa, Homo sapiens
MKAVKSERERWCAGEDTGTGDVVLPGLGVCSECSERLSPEVSTSLPYLTSWTTPGGSPVSAEQLSLAPVGPLRGTEPEELDGPTNKNEQQGRQWTKEQQSHPRPRFMRKRESSPPTTSHKCRGQERGVIIPVKRTGRIEEAKQGNPSDRQGTTAQSDKGTRRTGDQSHTGDQMRPQTKGKETVYTEKLRKGQLGHTGIQATPAIASTHTCNNGGQGPFHETTEQKRDTHPPYTAQGRNGGTAQYDNSKGNTATAEPARSEKDGSITRERKENNVREPWEARRDATRTQENAGHHDGKGTHRPKGDGRRTEHEAGTTRTTEGAGHNERIHRQRYDRTKKKRVGWRARAETGQENTAEKRKGEGTRTEQKAKKRDKEGDHKEDGETNERARRDGRQDEGGTEKQQKHSDKHETRKENKGKRGAKSQQEGGGRPRTGKSAEGPKKKEPEKNDRGKKQAKKRQEEEKSKRQKGHEQQQK

SEQ ID NO: 1010606 - protein, 266 aa, Homo sapiens
REEYFPPKVFVAVDYSHDKLVGASRGHRPGWSWASCGLYSLLTICYTFILLRTWSRRATRSTNDTQWCVVAVVASIFIFWFALPGDGGIIDVLPGAIVSHLPAAEYKLDSLCVSFAYINCCINPSSNSGGWQGLPGPTCGKSPTNKLLRNVYDEESVVREEQRHSLRSTVDTMAQKTPGSVGDSPHWATVDRVSPYITGQYSLLLLHISRLPGRMGYPIRITYTSPPKVPDDTPGNGPHYIPAGPIDHPVPQYAKGEHSTLREHTP

SEQ ID NO: 1010607 - protein, 196 aa, Homo sapiens
MVGASAPRVVLGPRDTSTLGPMPNSDIDLSNLERCGECTRSFERLPCAEHSTRGARAPDSMGVRTVPMSISGEKDYDPIRRQIDIGAASNQKSSRYLNHVTGNGKTMAIRGATGQLLEGGEAWTASALLAKQTEWSPAGVPDGEGRGWGDGPLWAAYRESQQSWLSTYRASTENCSTVHSFVAPGVPLHVGLRLWG

SEQ ID NO: 1010608 - protein, 244 aa, Homo sapiens
APQEAGTRAHHDPCCRALRAQQPPGKERSRDRALIGALRSAASPRGAGYQELNAEEQIVRVRRRCCFRMASREGASRRVAEADGGAPRPDALRTQRASLTEVAGASTMATLRVSRWRMSRLLGGPSRGSARGSDGRHRGAKRLGMDPGPTDSGASAGPGLGGGGGELGLGGSGGQHATPGLDAHHLSPSATRGSLTSVPTSTLHEPHLDNQICYAFVFVTAAGPFDVLVCMGWKNHRKPPGVLE

SEQ ID NO: 1010609 - protein, 102 aa, Homo sapiens
MIRKEKKHKRVRTKKRERRKKNKNKEDEGAGPKKKYSHRAGGSAQQIARRAHVLLNKRKAPPREGGATIRSTRDGRGGYSTGGGERTKRADGGSGERTPSVR

SEQ ID NO: 1010610 - protein, 282 aa, Homo sapiens
GGRPRLGRRWVVADPNPLRGPPGGRVKAWCSWGETWKWSARPGAGGARLVGLQLAPLWGSGLAASSRLWGGEGAGWAGSWLRCGGGPGAAGSSPRGCLSAARRAEAVLVACARLAAAMRPRLRPCPGPRAPCRSFAPRSPEGPEPAAGSSHGATLARTGGHAFRETQPPCKGPADIHLGKTRNSGAQNPEETKGPEQEAHRKGAQRDQGNVSGRQATSASKGHPRRKDKSHGVMGVEYHGATPMPPKKPCGMENGTGHEERVVSVDRTDEAYGGMGMKYPHD

SEQ ID NO: 1010611 - protein, 69 aa, Homo sapiens
SLGRRVHRRTCLGEAQRAPAAAPAASATAGHAWAPTALPVVWEQARVYVAGVTVCEACPTSRGGRASSA

SEQ ID NO: 1010612 - protein, 107 aa, Homo sapiens
MSETDPLRYTAAQVPVFQDRPSKNFAAGCTSPTLQVANTQTANAAAGAAENAFLGPVTPDWDALDLLLRGSVIFSYQSVKVLLGSLERYHYADGSLRSAPNPMAMIC

SEQ ID NO: 1010613 - protein, 151 aa, Homo sapiens
MLFTGIAVLGIVMLSTDPLRYTASTGASFQKAQLRISAAGCLAPNPAGREHAAANRSQLGLLNMPYPGPVTHDRMPWPCYFEGADLSSKSLKVSWDLETSSLKLMAPPSAPISYRMTAEPDQACGEITCDVVPHTGHTAATSKYPSELPLV

SEQ ID NO: 1010614 - protein, 172 aa, Homo sapiens
DQQVSWEFPCLNLSKPKSRVHTLQDVASIMSHSYAAGTCHVYVRGPRRAAPALTRYCEVARSRHGPAELGESHEPRAHMSCRDMEECSCPELDQLVDICRKCSGLQLHELDWSRMGRLPQYQVVPADKLPSFLANVHKAYYQRSDGSYSTGESNTYLFVYQTCEVGLYRFPL

SEQ ID NO: 1010615 - protein, 153 aa, Homo sapiens
MRHVSSTCIVTNPCHRFLQENHRSHVRESISCSTQDRVYYQWSSTQIARGLAVQGLYRSIRLPEPLVYWDQNVGCTSERIVVGLNRLQTTERAKLQKVHCLMEKSHREAPWAFYFLIVLSEKEQELGEKGDSQVLTICYVLDTSFYTHEIWKH

SEQ ID NO: 1010616 - protein, 117 aa, Homo sapiens
HAADSFEDNIWRDPSEEVSDTTCLRTLHSGQPNSRPMPKPIKQMDKFGPGLKGIASSQKREPCDTVIIFAPRLLSNGGALCALWTRPRGLHNAFLLICFLDREGIGISEVRQTCLSS

SEQ ID NO: 1010617 - protein, 215 aa, Homo sapiens
MGLRLIYDSLEEVDTSIVVPILQEPTAWILHHVCNQRHVQCQSRRHGGKSETASHCHHGTLELTVSSAFNPSGLGDLADSCRVSSDDGQAMGKQPVVQLAIGNILGRRCTGNRYWKDAIHFEGIALGGEGPVMVRVWRHAPTQHDLRPPSGGCTTTHSCRVPTGTRSSWARCQPGAAGAELGSGRGRAMESGLSVDAINSSVAIWLLTNVPTTSV

SEQ ID NO: 1010618 - protein, 191 aa, Homo sapiens
EGLNFPAIASLNWMKQLSPRTITLTMPHTGVCKDRMTVQGPARPGVSCPPSLHNGAERCQNLSNEPHQGEGKMYCTAFIFELEMDEREPTESTQQLNKPGGHRESDPEPPIPVCMGMIKAPLPCTSWAACGQPAEPQHEAQGPQNHSDLARPSCPWPLEDKGQTADNNPGQIETTVSPSSRPATYFLHNEL

SEQ ID NO: 1010619 - protein, 111 aa, Homo sapiens
GRLCAISLILSCRSRRRLHIHASCCPFEHARESPRDSRVAGSCICSLCCLHSDVPRCSVMVVRRQRGYVGVGVRVSRSASSVVVCLWMCGMRVGGSGGVDRCIAEGGYNHL

SEQ ID NO: 1010620 - protein, 181 aa, Homo sapiens
MTQYTGEARKLRTPLLQESYIRHIGTTPWEQELIIVLNKQGIYHGVVTHNLVTHKVYEVIETNIARENYSFSVIIERYVYGRGLSRGPRDFFLRRRLVRFPFSSSQAEVPLPAGTLPKPPQTGAGAPTRTPRPYLARALTRSAQTAPHMTVRAPCVPSLSGPQSEALRSHYLVYRCPRDTR

SEQ ID NO: 1010621 - protein, 136 aa, Homo sapiens
MVGVELLDEESALPGYLGPFPLYCYTMVWGYIGRKKKLCLPGVPPNQGECSTRSRPLPHLLGIGGAWTRGSILTRFSNAPGLSPNQGQSVLPSPIRSEMTRGLIGVKGAILGLQASNFVVINLVGCGHYEESDYEK

SEQ ID NO: 1010622 - protein, 269 aa, Homo sapiens
SVCHTPWAGVLLVELLWHLVLWQLLPVRSSASQNGVSGYRLRLCVNAPLWRPPMRLSVVRSAPEEVWRTPIKCPLCNRFTRCVEHSVAPLAQLPVLIICGRDPVVPPLGYKRAILYPRYPCLDCMPRGHVGPLSLGMAGHMCHRGSTSHLSMWEPLVSHVRFTAGDMRLGRAAHVTRKLVYEGDLSAPSTSTCPIGDMSQEVGDGTAFIRVGGRTNRSRRNTSYSGATESQVTGGQYDGGISVCTKHLVAYTDLSAITRHSSRRAQLES

SEQ ID NO: 1010623 - protein, 73 aa, Homo sapiens
SSAGECFCASSREVSFSRCTEGLPCCSEEPSSHASTSAERVQPRVAYPVNRPLRSRPWVAASSPDQLHMHLLP

SEQ ID NO: 1010624 - protein, 76 aa, Homo sapiens
GVPCSRVSLRKEAPVETAGDPGFSRGCTTDEGEREWTWERGDSIGPQVNCNFLGKDARGPSADSGTETCKIPEPKK

SEQ ID NO: 1010625 - protein, 190 aa, Homo sapiens
  misc_feature (183)..(183): Xaa can be any naturally occurring amino acid
MGRLEASGACVWVSIPSTLEVAVEFSMPLAKLLSCPYWTRRVQAREHLARKTADRVGKPCLKDGAHSQSMHSSAAMLTSLLEQHGREQEPASVQLSRGATRLESQAMGLCPTAVYGLSCSWTHEEDSHWIRASVNSLELWKVGTLRGRIPWEMTVSGVSVGPAWVKDPVSSVSNGQWEAGGKXYRPGYDV

SEQ ID NO: 1010626 - protein, 176 aa, Homo sapiens
MTGVSLNTRLAQGSGAVDSVPPWDSLRRVRTTSRARQPFPYPGMSATPIQSPVCVTRTERYRSRVVCQHDSTSLVQCVRSKVRQHGRSWSEAITSELSQRSRFTISHVSLNLGETCPEPLSAVASVTEELDPEPSGRQADCSQLPQPSGHLRSISPQFYPSRKAYAAAFAPTSVAD

SEQ ID NO: 1010627 - protein, 106 aa, Homo sapiens
GAKNVVRTCAFWAAYPNNVMQPAHGSGSPVGFPFHPERVFPLPLRRQDRAFILALLARCLRWSSSGPEAPLSLGPTIPAFPGPMTAIQEPLVTLGTVLKTRPRGIT

SEQ ID NO: 1010628 - protein, 141 aa, Homo sapiens
MELGIQLCNPMSMAIMGTSAMYRPSEIELATVRVGVLDDESLTCLVSDVRLMTYPLMGSSKLTVVALSVLSTLYVSSLEAVAGDRAQSHDTAKEAVFHFHQQMIGCGPLPAPQCLQIGTCSKADNYGSLEYKPEIQYRKKG

SEQ ID NO: 1010629 - protein, 111 aa, Homo sapiens
MIPPSAPGREVLTISIGTQSPVKFSSSPTCDVNGGEGIGILVSRDIGVYEHEAEEVVVVVLEPSSRDSPVLVRIFARRRGFRGWGSDSPKLRWLLINPLGLLKGMDAIVNV

SEQ ID NO: 1010630 - protein, 106 aa, Homo sapiens
SHGLALLRPESAHNWWAPPFPVRSFSKGTVARPDGAFQCDMTTYVRTVTFCAANQEILLLNKGRVTPLCSQRPSVLTKATCWGPRSFYPHCGGPLGSQRPALRGLN

SEQ ID NO: 1010631 - protein, 301 aa, Homo sapiens
MKHLTLAKGSCCQRGVSTLPPEDSNFTQDVTAQTPLEATVSLMPRGNSMGKRNTVMSSLMGAYLIACRSATGVPCLVLTHVGKKSVEIITHIGSRTCSQRGLRSATDRARGPFGTRCPTLSPWGIYPMAGTGHCRIGKGLFSSEPLYQAKDKALLGRESLAAKITGIHDCLLIMDPTVTLAIWGPSTATPTPSDEGHFSVQVKGIDEASRLDVPGGPSCERTKGLGVPSQPPGPRPTYRDASAAPLHSGACAARTGLCTPYAALAAWRPHDCGCLACQEQRLFFSSTPFSSISHTRGARTL

SEQ ID NO: 1010632 - protein, 125 aa, Homo sapiens
MRLGNRAQSQAMGFLAQSEVDAGGRGAWTTISAKSSAQQRYPSCPQPTCSLGVSFLVTYYGRESAALCIRSGATACCKVLDHATSTLGSGVPTAGSQSFDQIVIPALAPYVVFWTEDNSGGLQCF

SEQ ID NO: 1010633 - protein, 274 aa, Homo sapiens
MSFFVSLVWTRHSSPLDLSKVGALYSGTSGDLASWQGRFIRRMEMPERPVSGGIRAMFRSSSAHPKQVQEVEVLSSSPIPGQTPASCALVVVKLMRYSGPRRLTPIVPQLSLVHNPPLLTSQINRIKQDYIHEWMDCYQSLPPAQNLWEAPSELASDNGLMLISTLVASSLSPPTPLAQVQIDSLRFETSSVPVMPLSTSIVTGHSWRRDSHAHASKSPRSARAAPQGEWRRAGGGPAPAPRPPPQLPLVLSVLLKSVKYGSPSGSSCLTDGYL

SEQ ID NO: 1010634 - protein, 368 aa, Homo sapiens
MFLSLAKLSTVCTRNTPFCSNHVSDVPSLCGFIWDGVSLARSRVPTMIRHQFEPKALIRLVVHSQVTAEVPGGAPRSRGKSFGAPRGPINGEQGPLLISGKQGWPGGIRLSYHCGLAEHQRLIFPRPLRHVHPFELGRQHAANNPGHSLNLCASPRSSSTLGKIEELLSWREQGPPFMLPYQFQDLEEIEGIPAIAGQEMPCGISELSRPFGGKIEGDTRKSFLHSEKLKTYFEDNPRDLQMLRHDLPLHAAVVKPNLGHVPYYLVPPAVRGLVRPHKKRKKLSSSCRKAKRANSQNPLRSFKHNRNTKFMTHSSDPPEVVGPLLEREHIVEHRLTPFVDRGRVCVLTAQPEQTVLGPAVQDTRAWTF

SEQ ID NO: 1010635 - protein, 144 aa, Homo sapiens
MIGFGAKNGSIDIFPSSHLHAEIRSTLLCRNQIPNSMTSASRIQCSPQRDSPVLLFCPPCWGGTGEVDVGESHWGLQSLALLCSIVALAGRGTVAKGEVAKTRTSSLNALFPPGPSGPSFQGCLSQLLTDMCLKLTRGLPIWND

SEQ ID NO: 1010636 - protein, 61 aa, Homo sapiens
MEQWREDLFLNHWTPEMCMQIQSQLPVKIQINFPVTVLRTLLLINNLLNFCAGSYRSGNFG

SEQ ID NO: 1010637 - protein, 71 aa, Homo sapiens
LCHLNSSTLLCGPVCIDMRTSSLHHVCSFHRYDTSSVQLCGGCFLRGIYLVLRVYRQHSVIPFLFGGINFR

SEQ ID NO: 1010638 - protein, 190 aa, Homo sapiens
LGPSEQGPPNRGRPTWARPNYRSVFPGVWKRETPLCVNSTHAPIWGTWARLFVSALSWKGVLYLERLESKYVDNSWFSQMAIMNVGNIDFSCVRVMGLYMHLFQSGPLLQALCSPFPKLPPTTPAPLASVHSGPSLGQALLCSALHRPPPLLLPTSLTHVPPTWQSGLAHFPVTRSPGAVLSCPIIDQCI

SEQ ID NO: 1010639 - protein, 85 aa, Homo sapiens
  misc_feature (80)..(80): Xaa can be any naturally occurring amino acid
MVGDVTGAHGLCLHRSSALNIWVPDFWASSVTILLIVISSADLPGLWIDQEASLRPRALPMTCIHRTPTSIPRLPPSILXGGPLL

SEQ ID NO: 1010640 - protein, 146 aa, Homo sapiens
MPYNELLQLPTPWQHRESKMEHLAQLRKKFEEDKQRIELTAGPSANSDRTAAVRAAANGLEVQGQEEARQGLQRSLRGRALANGPQVEGHRVQQPQSESTQARREGPGHPSVLVLQQFLGTKACREEDLSFLLLASTPLTPGPGGS

SEQ ID NO: 1010641 - protein, 179 aa, Homo sapiens
GKRSSVDEDLEGPEEAAGKSSRDGRPASTGPAPVRLTARKPLEAEERGWHRLAFVPQLQVSRPVIRARLPGTWPPLPSSTLVRSAVPASRTRPVRIQEGRYRHPGCYSRVPTVGLNREDCAGTSWVGDELYCEKQCARLAASSGYPANARHDVLLRPRGPRRCRIKHCRLLLERRVMPI

SEQ ID NO: 1010642 - protein, 98 aa, Homo sapiens
WALKKARLHGYNGPRPFSIADKLDRDVLDSCPPKQKVRLLPLPEVLIVPASQLPHHMTSSKAKTFSPFLISVSDIMSREVQEWVSTSFHVFLHIHFQK

SEQ ID NO: 1010643 - protein, 305 aa, Homo sapiens
AHWALWDQFIPKRRFPPIPRNAMPVSTQPLTQRSVATLLRLIRLCKIWRPSNFSLMTELSYQERQPRGSPPADRMMGLRLLGGLPTYQSSLSSSDNLARLWMCGDWRDLRESMAAHLEGCRPCNGLQSDSVLWLPVYPLWDMPGAGGGSCEGPMQHPGQSRPSPAGLRQLDLMDTHVAALTMHGHRHAHGTLSPQLHYPDVTELDAKPGCTLPGHGASHALAYGNVRTEGTQSSLRGLRLVPTPKLVRSAAPTLLRVSGQSVHREHHHDGKVEGFISTCQQTVLVVQVAWPAHWIGTGIRWGDRG

SEQ ID NO: 1010644 - protein, 222 aa, Homo sapiens
MAEVVRYVSCGSKSLAWSSSARPTTRLGPEVFQVCNWSTLPLYGPDAIPQKRSQGFGDTPTSHFLRTPMEVLRDAETSFSLDASRGMNASPSTLGTIMQKMAMSPRSTLLLPEGGSPGNEQEWSFRLRQNLWAAAVPPEWVPYYTSRTFRASVKVKPSAPSEVMLYLSGIACQDDSKLRSDIHKRLQEDPNYSPQRFPNAQRAFADDPKLFALWPNTHEGTV

SEQ ID NO: 1010645 - protein, 149 aa, Homo sapiens
GQGLVDGKISTVTGWGNTQYVVANRPGVLQEARVPHNQQVMSAMATDILTGNSDQGPKTVSVARLRPRVAIDACQGDMLVVPFVCEGQHLSDATLGRHSVGIVRWGTGCALAQKPGVYTKVSDFREWIFQAIKKCTAEASGMVTQLQNR

SEQ ID NO: 1010646 - protein, 121 aa, Homo sapiens
VGFPLTCHWRHLWEVRRQPLLKHPCRTAERSPGRFHAQPWYKSTVIAHDCWRLPAFTVHIYCGHCTTSLPQYGAREQYTLYGILSLLSFAILLSDGWTCMLTLQLTLHSRFVSAGRDLSAW

SEQ ID NO: 1010647 - protein, 219 aa, Homo sapiens
IKEVCVSPCLVSYPRCRRAGKVSDSICIEALCGLSQGEQAPKWAAVSMRLSSLPLVRLALTYLSPIHSESSIKAPQCQLLPPPAHLPSYLSPERLRGTPTSPPEPQDLSSSVCKEEQDAQRRLTGERTASTKEPAKDSALTVAIRRQAAEKYKHRGEGERKDIVSSSMPTAKQRGACGQPDARDRESELTYYGAGMQSKPTRIKAAVVFTPLGVGLVEP

SEQ ID NO: 1010648 - protein, 148 aa, Homo sapiens
MSVVRILRTVSKMRCIVRITGMTASSCSLVDCRGDTCPGESTQPSAGGGSRGERTTGARPQSGHCELESSERGAGHPGQPGYQAALTVSVTRHRSAPAEPSTLEGASESGAFEPSGPVLGETGTFGGTVKRLGKADVTPMGPCAPLAW

SEQ ID NO: 1010649 - protein, 217 aa, Homo sapiens
MHSPRRDIIGFLLLALVLGARDSLLAPVVPTIGFITGDHFVALHPRLLFPAFPGLYVLPLGGLENERLTAPNPLNDSFDIPRYVSIASSGQRHTEVHDQGSKGTSTTGSPIRRSIEHYSRSSVHDGWALVSLIARIQRRHHDSSLETSPALPRYDHWSPSSRSHLRTTSVYLGTSTWTPTDEENSFTHALTANSRPPAVITTLPRSHAFIMRGTQIL

SEQ ID NO: 1010650 - protein, 303 aa, Homo sapiens
VRARTQAYGVANANDPHNGLSMGSLRPKTPVGPVTRPGLSKGAFDRCNQRIRDATRDRSPVAAFGGLQPTREMPTPNALGSPTTAIIVGASSRGQRLHRSKPNEGLFRAKPCDGWDSLAKGLINDMAALKPGESKAKGILAKESPEQPLYHVLHRYCAQGASSPASAGAPGVAKTGPEATQMAARTALAHGSQPGTHELAWSDSHMYWKQRAQGCKIAAMPSVSQRELSEAFASTAQKLGPEKRPGRPVEGQGVSVQKKLGPLACLMIGKMGFNEMAKEKDTDQWSKKAALFHMIQHRVGQQG

SEQ ID NO: 1010651 - protein, 138 aa, Homo sapiens
GLPEKLGKGTQVPFERSILTSDSTYSSDRTKERTTVEWTQTQALMSMRVLGKPEPRSSAVSQRVCQGNRRSFLKHPAKCSSEGSWTEEISLMNDDLLPPAPSRTHRTEDSAPWILNDQVAMGRQWLAIQKCTKHKSYK

SEQ ID NO: 1010652 - protein, 122 aa, Homo sapiens
MRPGSQASSDMMVAEAVSPGVCCGWVRSSLRRQVCVWTIAHLQPLIPTSLVSQRVMVHTDRTLRYNPFQLQHVQGVIQALPPSCSVQVVWTYKLNFEREGLGVEDFVIRDISKIGSYGAGAH

SEQ ID NO: 1010653 - protein, 145 aa, Homo sapiens
VGLDSRILADLAVYGVLRVMEGLDALRGPDASTRTSSPGTCGVERAITEASLSALNVPAQTQSVNGSVNDASCHGPGGHCGQRLAILVRGRRIILAPCPLHPPPSPLASNTGHLLGYRDRLGYEFQLLPHALGAQTPACAMPPCS

SEQ ID NO: 1010654 - protein, 178 aa, Homo sapiens
ESSGLLMHPEVIGGLMKWYIRMKASSRFLRSDAVALLWGQKEEEHQHDLLTIRWVRAMRYYYIREDLWNAFGSAGDSSNIVLAQTQAVWKHGRGSHRVGIRASWNYTLVPNSRTTRGLHTFLGGQAGQMAPPLGNAPASAAGEKLISLAVLSAIAPGTPEIYGLASPPSSWNYNALGY

SEQ ID NO: 1010655 - protein, 43 aa, Homo sapiens
MRTTLGSSIGQPLGSSPNPKVDTWLSSGDLGTGTVVITPRCQR

SEQ ID NO: 1010656 - protein, 221 aa, Homo sapiens
GTTLTPRSTTYLSTDAMPHPSCTVHPNHTGPRTFPFSWRSTPGLGTRALKVDEEVPALSSHCRRSVHAAHRVNEGHPWPVSTSRHKLPRFQWLIRARAYRPRYTPFGYEQAFCEAPYPRPTPGEPKLGDPGEAYESCAMAYRGPHATTQGSRRGPMPREASGGALATWWGQVDAALRGWSRIPQSLGHPGVAPSCPPHLPSLFGPRSVHACWYFVTCGGAL

SEQ ID NO: 1010657 - protein, 101 aa, Homo sapiens
CFAVSYPTLPVSFPPGLERSQVLDAVVIDLQVSDFQQLLACAMRATLSSGVGVFLWRGPMPKWDGPLFIFWPLLVCYVSVNNQQPGYTGKDWRKDELMSID

SEQ ID NO: 1010658 - protein, 72 aa, Homo sapiens
MHAPWPGWNAYIDNLIADGTCHVTRPSVGYKDSPSVCAAVPGKTFVNITVLRGLRGPGHCSGLDPEGGTWVG

SEQ ID NO: 1010659 - protein, 142 aa, Homo sapiens
MAGVPSFGAPVGNRRILSVLGKGVRKQEQPSGVGLPATGAVGETPEGGWGSCLRIPITQRSPYSMFTRSTRVLNIVFTCIYLHFLLIICHLVGSHFISQSLLFPPYLGTGRGGPSAKSSLGNFILTLNIPSDSIRPNFNFNF

SEQ ID NO: 1010660 - protein, 55 aa, Homo sapiens
MTRLCGCSRSSGVCGSASVAGAQVGVPEGRWPGARTSRALSTGPAPALRPWTALG

SEQ ID NO: 1010661 - protein, 71 aa, Homo sapiens
SWLRLWRRRQLWPRRQSPGPDCASSVHWFREGLRFHDIPGVAGGRARGALRIAVVYILDPWLRAPPPHVGI

SEQ ID NO: 1010662 - protein, 242 aa, Homo sapiens
  misc_feature (125)..(125): Xaa can be any naturally occurring amino acid
MGTKVGLRSAHRVEQTAKGAEHFRVPPPVVGLCLKGKLCRRRCSPRKGPPRKGFAQPGSFAVALERRTSVAVRKTFVSQPFCAPRFPRNFGTRKPLGVSIAAMAAYRDFAIATPLSGHCGCWCSXEAKSWELGHFPIWNHGHRFVPRLSKDATILLSEFSHGGKRIPGSALMAGKENWGLAMVEAKVLVLGYGIAAAGPQLEIIGPRPQKRRRANAVGHTAVTTSNSKHLEARLVAPQCVAY

SEQ ID NO: 1010663 - protein, 56 aa, Homo sapiens
FVHPTGATHSFLPPTSSRDCGPVPPPPHTGARLNPSVPQQAGCAWRAVTPIEPKHR

SEQ ID NO: 1010664 - protein, 118 aa, Homo sapiens
MEGCGFLAESTSELTALDSRNQSSGRRGDPAPLLTMNRAPLKRPVILHMALTGASDPSAEAEANGEKPYTAAGIEIALVVSLYWVTPSPLVFLNKYLLDSPPEAGHPIYDTFYQCLVT

SEQ ID NO: 1010665 - protein, 303 aa, Homo sapiens
RVEHVAAAGGGAPGAGRAGRGSRTRRYGRGGQEGQEVFRSVNVHTYGYLNPSSRTEILHFIRTMQREPTMVPGTLDSMSSDAVLDACLLYERQGWPGGTGRISSSGCPFHDIADVSYVRELTLSHLVVLTDSARTPGISPSPESVCGKFHEASVHGSLSEVQLGPLEAMRAWSVLAAESWVAAEELCCSARPGLPGCLQRSPPSTFWYRAIFDGSLYAPSHHVSLDSDELFYKKWTLEEDLPRLKSQHIIWVPLNSCGIVRLVHWPDEEMTDQVKKPAEPAGPLSMMRDYMLRLATKVYFRDP

SEQ ID NO: 1010666 - protein, 210 aa, Homo sapiens
MGEQADCVVSLRSYKISVDHQRYTAGSDHSSTVLHAGCNDAASPRALLLTSSWWPMSSCVPVPSQPAGPCAGDVRSDSDVHRSACRECFPEWTVELIVRLLHCGLKAVVDFLYGGELELDVLANIDYVLDDGSSCCRSVTVADFCCDVPGSRRVSEDNVIRVACQELGLASTSRQGGLMPFTRVGFILKPLRARCPFTRDFLAERVHAEG

SEQ ID NO: 1010667 - protein, 342 aa, Homo sapiens
  misc_feature (260)..(260): Xaa can be any naturally occurring amino acid
RGGKRVLEGVYPRLDLGLSSHCSLIECGDVGHQELSFFFMLSGAAPRGRLSLGRFCPPCAIAYMLLVSVGAVGCVSARVPAGMWFPVVDCGLITVGSPAPCGGPIVHFYVLTPLPLWCAPQGDPSTGVYGVIVSLTVSRASLGVSHQASPVSFLGRESFLPRGAPRCVQLSRKMYEYVLEMFVGFLPLATTQRSVVVPSPVVSVGGATVSPASICSPTIGGTLGLSIDHLLDDREKTTLSPPRGYRNKAEFVRIGAHRQXFLWRQAENAVMRHQELEEKSTHTVSRKFTEGFHAEIWFSDKKGFFHSRALFFYTRNVFSEKTITKDHKVLEHPWIAHLSSVK

SEQ ID NO: 1010668 - protein, 188 aa, Homo sapiens
MVTRFNFLVCLGVVDITKLWCGCGWSHHPCTTQTSSESVRSSIVLWASSRGAQRMIFCSTKAWLIDQRRDGAHTCQTTPTPLVGVGGYTTHRLFVVIPPEGVCPPANECWSCCISTHGVRQHIWMGPGTHEPARCGRKLVCGDLSFLCLLGLFSLCRATKEISCFGPSREESPRRLLIFIAGGETLLS

SEQ ID NO: 1010669 - protein, 105 aa, Homo sapiens
MAPPVCFSTPVFCGNTFLLPPQRFVYTHMLEEASKTLFHHDGRPRIGCLFHHEGKGAIFLYRANISYWVILFKEPQDKTWHIFSLSQKYISGRLYMALDLVKSSF

SEQ ID NO: 1010670 - protein, 274 aa, Homo sapiens
KEAGCRIECSPRRLPTLVVVHNLRRNPCKQRQGEHATTEGGRTPTATHNQPHRCGSDRPTLTHSQGRPVHTSPPRAVVRRLHETVDSRQSCQPPTAPGQAPYRNHAWAYRPFSPHHTQGTHNCAPRQVNNVRKLLCRRPPSRAHPPGFFFRPPYSPSPPPLSFYDHALRHHPRLGLAAPPPILGKGRAPRRLLVLPPPMLTARHANVRTLLLLSLPLTERIFLHHPKCALARRRGRTFPPPSPPHPLLSSSPPQERGGGGGIFFPPQTFFFFQT

SEQ ID NO: 1010671 - protein, 186 aa, Homo sapiens
VWGGGVVCGGWVWFVAAVRRIDSLVPLMMGSVPATLEKVAVAAARCLSSCGGVRGMICEEVIESDVRSGVLIRWGAARVGVGSWRSSDSVLVRCSLCCGERVVDEVGACLAWMAFSPRLREGTRGDDFFCGRGGRLEASSPRHRVVALAPVVRCALSFRSRAPEAGVATLLQFSVFAVARSCGDER

SEQ ID NO: 1010672 - protein, 209 aa, Homo sapiens
FLPGDFWVFFPPEILGTQFYTGKPREKVGGPLFPRALEPLNSPEPHKKLVTSLKRNTLNGVGDPSSECCAPSTHATTVSRVGCGICDRLSPPPKMEHELPQGQEKRDSPQRGFTRIKFFLLERVVINYTFTLIAPQGTLVDNPLWDQTVVNKGIVLQRSSASLKARARTGGTRFKICKRRITTTGKKQRVFPKNFGFKSFVFDPFKIIK

SEQ ID NO: 1010673 - protein, 120 aa, Homo sapiens
  misc_feature (10)..(10): Xaa can be any naturally occurring amino acid
  misc_feature (87)..(87): Xaa can be any naturally occurring amino acid
MRERGETLSXASPAHTAREREARESLERRRYRKGNGEHTATRETLVSTESSFAREKHPRVSLSQPPPRETHTAPLSRLLGRTLSSRXRAQLSLISHACFMPSSLEFIIRRKYPHKNISPL

SEQ ID NO: 1010674 - protein, 139 aa, Homo sapiens
MYPPRWGGLMKNTGGNWGFFSLLSSGGGNFFGGGGRSNNSTSSFWGWQQQHTEAQVEAPPYWREQQLVALPCGVFTHNTAPTIVVPPPAAGRLQHTSIWGAHPDSCGSPAPPPPFFSEPPLGARGPPLAGSLKKNGPFC

SEQ ID NO: 1010675 - protein, 223 aa, Homo sapiens
LVVVLGADNVFGHTLWGGPTCGCSPHPCVLWCVSLATITAMYCCGNAPAVVCCVVVVASPPSFCSRAWAVVHVGALSWVWWCQVERVVLVVFTPPIARVVAEDAFVVRDHDCCCLFASAPMCRCVVVVCATHIAPHFCVVFVYTLLFGARHRLGVRCAIVVYLRGDLIFCGSVFCFVPFASLLERSRFMCGFVFLSTALALSFGGLGWCLLFCCRVSSDITAG

SEQ ID NO: 1010676 - protein, 55 aa, Homo sapiens
RTVLGAARLERSAEGTAGLKCAGHKPPNSPGCHIAEPKHARRAQLSRLMNRPGAG

SEQ ID NO: 1010677 - protein, 419 aa, Homo sapiens
  misc_feature (85)..(85): Xaa can be any naturally occurring amino acid
VGGLGMVYCTHGWVPNNVRRCIIWGGRVYLYMLASYTGCLSPHADAVCRAAGVSAPCVVLPVHTSSVGSSTGSAGGGYPPLLMAXTMCGCSSCTCSRPAVVVLLARRDGVRPANAYVSTKIKKNREGDHNIFEFDKTSPLLVSFCRQHLIVCSMIITRASRLIASHATQQGCWINATQVNFVECYQQNDQRERRLKDERNTVCVRVVVIHTQLLLSQSDHTDTRSINAVTRPSRGNNIIRGGGAHTTPPGAFCFFIDSQLPPCVFSIRETHEDEQRIGRTRDEWGSTTTSAHIFCLCDSTPGATEECLIHGVDSHASRPHTDSAPLEMCWWEALLDSAHRRFFWRRPPLLGRRPLYISPGKSCGTGCICRAHTRCAPLLSPRKAGFTGHSFYPAEGNSSPTTPLVATPWYTLESQENNL

SEQ ID NO: 1010678 - protein, 149 aa, Homo sapiens
  misc_feature (108)..(108): Xaa can be any naturally occurring amino acid
MGINVVEERTTFAPNGGTTFFPTKKILWVELRLPLMAPSLTKQHPRGVYPAGPFSCVVPPRTHVVCTTDPTTLWRIRRKTPLVGDNHYISLSGWCSNSNMAPHNALSXHCCVASAAQVFLVGRRVTRREMVFLLWVGDFSPAIRNRPLS

SEQ ID NO: 1010679 - protein, 167 aa, Homo sapiens
MTESTRRWTPPPLRPPRIPLCALPRESFQTPSRHLCGVFFYTDPKFARVATHVDTRGGRITFHPPAHTVSVPPSHRGGRPLSRLFQEWHPKEGLTERTISLFSVDLHEHVTQNIWAIKSKKSAPIPATLRKRISTPISIHGRVPGGRVFPGKHLPRFFFWRKIFFLP

SEQ ID NO: 1010680 - protein, 154 aa, Homo sapiens
  misc_feature (31)..(31): Xaa can be any naturally occurring amino acid
  misc_feature (64)..(64): Xaa can be any naturally occurring amino acid
MLSRVQRHILGVVIFSPGGLVIVPHQTGRAXFSVAILCGEGPTTGFWGGALPSLTHELWERERXPPHCVYYGPAYWGKGCVEVSDLWSVLVFWCTSTRFLYHGSRKHSGARVFSPLGEPLGGREQSECSRMDGRVTLGFSFFALRTCTFAHTAL

SEQ ID NO: 1010681 - protein, 106 aa, Homo sapiens
MYGLVRSVVLSPLSRVRVTPTWGDDFLWFGVGRLPQLGVSLHSVSVFCGDPASWRDSFSLYVWSLVEKGDRPQRALGVRCLNSLVVHHNGACLTNSGDKRFSPAVL

SEQ ID NO: 1010682 - protein, 342 aa, Homo sapiens
  misc_feature (36)..(36): Xaa can be any naturally occurring amino acid
HTGGCATAPLCVGDGLFGRPGKVCRLEPNIFVASVXSNNIARVLRAPCSWVFMPQLVAQVYCGPRAKYLGEVALLLWGSFQGYRQLMVGDRRPFFGIQMRNVFGQSFPARAPRCASQDGGIRDFCPSEREPLGRELPPGGFLPVVGAPLCIVGRHDILTKLLDETGPLGEPYTPGTLKEKEFELCGPPREPTVGITHQGCLPEAGTFLEFPRGEFNWGFEMLGARGILSPKKWEKMWLNFTARFEQNFGKGPRVAHCLPVHDFEETAQLRGEVHGTEGSQWERTRLKDTFYYHHGPSLSQHRGANPRVNPARLVPHQDSLRTPRLLWQTEKCRRTSPKTARA

SEQ ID NO: 1010683 - protein, 116 aa, Homo sapiens
MSWEPPASGAGRASKAQPVTQGSGPPQAGTWLLRGAPRGATHEAQSLHTAGNRHPTTGLLESGPPWGTAQRGWGSRGSRMGAVPFAPDRALFNPGTVRLWGHRGLPGQQPQGPLRV

SEQ ID NO: 1010684 - protein, 117 aa, Homo sapiens
LRSGGGFYYLSPRGVFFCGGDPLLVCCCCGGPPLLLTPLGVLWAPLAIISRTTPGGRASFSCTFSGSILFILLGSPWGARGGYTHKICRQPTGRTQRRDCAPTYGRLYFIEGDTPSI

SEQ ID NO: 1010685 - protein, 117 aa, Homo sapiens
CNAHIVFCLGEGAVPLPLFQGGRYIFLWLGCRLDLASRLGPNQRELGGVLGKSLFNTPCLGNPWHIPFCSRCGCVHPQVLWALKLLGGAFVSSAAMFGNLQPLLFPHTVVSSGEREF

SEQ ID NO: 1010686 - protein, 104 aa, Homo sapiens
  misc_feature (17)..(17): Xaa can be any naturally occurring amino acid
MHRGAHDITPNGAPMWXSPRGESLPIFKGATPTEFYVCSPTAHQRGPSTLTRRECPSGSPISSQKAIGCPTPGGGTPDKEASLHLPRHVPPLSPARHFSHYCPW

SEQ ID NO: 1010687 - protein, 70 aa, Homo sapiens
MTRPGHRWSATCPSGLRHTSGGHSNLAYTPRFRHPLGGVVPRGRFGKAWHPQTPPYPRFSEPIKGLCYFF

SEQ ID NO: 1010688 - protein, 115 aa, Homo sapiens
MCSCSPPSSPAPPLPLNYWVFFGGVLVIAGVSPRVFPSPAPLSGGWRLPAVLPCVAPPRVVCSPRRSCFLSHRGTHPPLVPSVGNVHHHCREHVFLTMLQRFRPPLFPQGRHTKT

SEQ ID NO: 1010689 - protein, 315 aa, Homo sapiens
PPGWALAPGVVPYSEGRSPFVAPPLCGGGSVCPRLCPVGQRGGSHYLVPHQSFGATQHSPLVPGSQVQCPGSLWPPCPSPRWEGCLSRRSVVTPRGDTFSEAFLCARWVLCGPRGLPVGARVHLPPGPHWLSLVGASRGPPVVLKTPRKERGEPTEEIWIPRCTFCHQIVHGELPLWRDPPAPFLEVAESTDELFRIFSRWGYSGPTVGVLTTGSISWGNGAFLTRCSHALSSIGPKVNPWTTAHHGQEPRGVSGFFSGFTGPPANYGASPMPVEIVIAENNVGLCAPPTKLSTETLCEGPGNSGTWCRHRSPQA

SEQ ID NO: 1010690 - protein, 110 aa, Homo sapiens
MAWGCYIRSCNTNWKHTGQGSPLRGRHISCTKDNKRVTSPVGRKWLCPECDPPGDDGVTVSPWCRKSVGGQRRGPEVGLPGHDGGVGGPTFGVRPGWCGQPTRLRGCFRE

SEQ ID NO: 1010691 - protein, 454 aa, Homo sapiens
  misc_feature (245)..(245): Xaa can be any naturally occurring amino acid
MVDFFVENEVESAGFYYRPSSCCIVPPTTVLGCVVHVFFMLGGYHSGGAFLAWVAHRGGSHNKLRLVARTCVCQRVGHRPRGAHRRGPTVHYIGGPPSGVHSVASPVEAHLVVLPPHRVCVRMVLFCNARSAGVGFPLAEDWSPCSSAAFLLGVGSVPPDFVELRLVIVVSPAWLLPPRTLDGRLVKLPGELFCRSQPTGLFIFPARNFFLALRCSGLGAHTRGAHSPACHGGACVYNSGAPSCXDSQGQHTCAHDIASAVTPPFVPSHAPTRGARSSLGLFARSPTLVGGYIKGFRSHELPAPHGVLLSPVERCVGCLGRPCGGGPPPTLPSLHCGHHDPQHPARGIVLHRPPVATSTTTTPPHSGAWGHPFTCLASQFRPLWAPDVAVVLVTPPSVLAWHLLPAFPRGVETRRPVHEMDPRPDRVGPPPIFAAYNPPFSPIFSFPLKPFDNT

SEQ ID NO: 1010692 - protein, 258 aa, Homo sapiens
MNASITSLIAKSGDELLLATGGSRGHGVKMTHTPAADKKGQTGIIGAQDHRQLAHAPPARQPHLTGAPSMSIAVVGDANWALMHGSRIQSQSVILPASGRSRDVSHSSWHRGTRSEAEKGQLHEHLPAIGSKLTHTHLPRSHPPEKNSSSMSAMYLSCEELMCCAWGRHPTLPPPWGTDPTQGGDAPTPACTHTRPTCGWGAPSRAWPQCRPDWARTWLSSSSPSWFRWHSSSSLGVDQEPVRDGPGQMSDTPQVSVS

SEQ ID NO: 1010693 - protein, 185 aa, Homo sapiens
MLFSTPSLVHTHWGPPFHAALPSLRVVGEHFSLSAKLFARRDWFAPPPRVLSGRPPGWLLFVSLLREGPTHPHRMLFRTPRRPSFLPAALSTTSGCCVSPATPALVVWCCTPRCSSVGPTRVLPRARIGPPFGAESSSRWGDRLFPRGSQAFSPLMTRAPPLGCDVPLSSPTLLAAAARSSCVAA

SEQ ID NO: 1010694 - protein, 152 aa, Homo sapiens
SPGTSRVPPGFPSEKDFYGLYGAAEGPVEFPRGAMTGPLALEGTLGTEGVFGHIGGSNLVGQDVAHNTEKFRRSRVPGAPVSITKARNSPIHGAQNTLSAPSKSLCDRNLVRHFLMKPCLQNWGCLREIICRTAANHSPGKRMGAPWKGASP

SEQ ID NO: 1010695 - protein, 243 aa, Homo sapiens
FEGFSAQEEVRVSKEPHKRCMSLSEPKQGGLCSVCKKAWLWYKGGIVRPTTFWGLWHDAISAMFLIFGAQNLSVPVGSPQRNGGAPVPKKKVTKGPAHMPREAQSQNGRHTPGGHTLGKEDLFGVKPSGGGALDKAVSCKAGVPSHYPSSAEIALSPENPTPGLRPPWRAIRPTPRHRLGTDSRPATRLGEQTQGPPRPWSSRSTEGIPFGQDLQTPQMARSNNSWEEESPLGNPLRHRSEYS

SEQ ID NO: 1010696 - protein, 383 aa, Homo sapiens
MGHPPGARSIIPLSGIFLILLAPPGGRGFTQVCDGRPGGTMPLVRPLRVALFLCRGNPLLERTGVCCPRKCLRSCGVYTRVSREIFPPGVLWVFCAHTHKSLGDFFRRFLAHDFIVYGTHHVVNACFPGGRVIYGFYMGGVPVGPNRPLVGARHRQCTTLLVWETLGPFGPPEVGHKAPWRSFVRWNGPGYVLRVILAVQGMCYHARKWAHKRSGTYPAGSVDTHTCGRDSVSLVHLVSGVSPHPRGPHLYGDTCAVCGLKLVQQRGICVAPTQTFFVGGFTPRSRRCFLRGGDLPKIWGYPQAQPHHFPMTRPHIAIRRPFSQDVYHVWPWDTPRGPEAYMASPASDVWGGGPSWKYHTACKASERTSTLDRVMTPPGEPSI

SEQ ID NO: 1010697 - protein, 290 aa, Homo sapiens
MGGPYYLTLGRAPLLSGEYYFFHGYTNGYTWVVSNTHQTALCVWAPLWIVVAPPGGVCCPLWPRFSRPGQVCHWGRFFYRHPASFFGDCFCRGGSLLLRLRVVFPPGVLNKCSHTFVAGKKTFSRSPHTVYPLPTLGIFPERSSWERIFGWQKYIPCRVGSFFYTRAVVHNAHALVVIKTMGALQWAHKGPTYFFPHRSKCAFFCRTCGVLKCVEKESNILTRGEILQRDLSCERKMAPSPALVTHTGGRFFQRLSVRKSKDEKKAPPKVGRQTPETFGATSPDTPTVGC

SEQ ID NO: 1010698 - protein, 254 aa, Homo sapiens
VWLWVVLCEMPNQVFVWGPPRMGPVFCCGIPPGGDPNDFVWVIVLVVLSLSLPSVPLCGVNLPGWLPPFWFSHPPALRGGSMRRVPAMSIASLSLRRTRFVLSPPTGVSLPTIFPRVDAHPPPSRVRGAHTTAFGSSHHAGRLRPPLCLTLLSLRERERVCLPHGLSPPGGVSLHTIPGPACPPSVSPARLELVGGYHICAPPPPPALTEGPTYCCLSAASALALFVPPSPPLSAPFKHPLFFLFFFSPQLFPP

SEQ ID NO: 1010699 - protein, 120 aa, Homo sapiens
MVIFHPLLLTTPGWTFQWSVALTVSSGCHSRISVCIVFRGSTLHFHYVCVFIGVSYFPLETGSRFVAQAGVEWRDHWHVLSAFAYPEHRAVLTSASGDSSADHRLHARPMAQSNALHDIL

SEQ ID NO: 1010700 - protein, 240 aa, Homo sapiens
EQLTSRPPGQREARAVRRAPGPLGPINRPSKTAGFWGAPPGGHPEGYAPGISTLPRVSENPPSRFSHQSFTLETVLSLQELKAPLPDVNLRGFGSRGSWRPPALVFLVLLRQSSLVSEGPPRRRKSGHRPQHDGLWEKLSGTIEGDATRCHRGSTSPEDNLIRPNSLCHLNQLFSPTPSNTRLEPEAPPILSCQGPDRNIFSASMGPTHSHPLQLLKFAVVAQKEAIYPGLTNEIWLCAH

SEQ ID NO: 1010701 - protein, 192 aa, Homo sapiens
MGGATGRDEMFRPAFLGGGASRCFPAPPVLSPTRAGPPRLAPPGQREVMLPNTRATGVGRPHLVVSHPAEGRLFPSFFSERGRPPPLSGSVARTGFPQRGGASRAGGFLNTPPPVTAPPRHFFAGLASAAGPRAPSFFPLSRGRTRVRVPPTRGGSLLFVVNTARAGGAAGLPFFFPRDDWFCRPLFLSRGD

SEQ ID NO: 1010702 - protein, 201 aa, Homo sapiens
MTTRGTKPPTCLRSLPRSLFPNDVMWRYIVYLPCEGMMYLTGNATMARTYQSMNRANQSAGKYATEVCLWPLHHDTDSSPALDLLTCCQSRSRLHSMGPLAPPGESLPLYHPCPLRSKVSFMSALCIHGPPATPCIAICSTYDESLPSHADRPSSRIGQEVTQGGPQGVLKPHLDHPPCQVLSKAPDPSLWRKREAQGSCL

SEQ ID NO: 1010703 - protein, 153 aa, Homo sapiens
MSLAQRDAQELYDGRGETAWEQTSPRFNAVLCSRSRAHLVAVLSMTYPREEKDRDIEKTHHDRGRCSVREPSDVSGHVWAVGDNGSPETLSPAFTCRESAQLRTTRRGVTEHKAPGTLMSSHGVFAADDTTILDIRSEYKRMYGKSLYHEHLG

SEQ ID NO: 1010704 - protein, 268 aa, Homo sapiens
  misc_feature (170)..(170): Xaa can be any naturally occurring amino acid
GSFIYTPFILCFLLYWAVFFLERGHSGRIPTHKGRTPLYFFFFFLSLIGPHHTTTLWGKGVEREVLHKRLSPQCLFAPLGAPFFKCFRTKRPSFGGPPHSNYKSVSGETLSLAHQSFPLRVVSAPIKSGAPSPTRSTVFVGAKRERPTMGGAHTTGLDAPRDTLGAPHIXHRGRKHTLWAYTEGPTLWGPSPHVVEEGPPVFWPLFRVQGRQRRLVPRRVARVESLPEDFFGPGASLSCPVFGVSSCALPRFTCSPFLGFWGNLPPLI

SEQ ID NO: 1010705 - protein, 139 aa, Homo sapiens
MFNDPRDRYIWRSLYDIAKIRERDMPHPKYLPPVCEIKGEIYKPFSTLFLLGVFFELCSEKREGRKIYALQKLRYWFTINAHISLLHATEYTREKYRTPHEENSHGVFPEGTGTYTPTGTHESHGSPHKPLSRGPRTTP

SEQ ID NO: 1010706 - protein, 157 aa, Homo sapiens
QFQRAHRGPNRGPRCVRAAQRPTTLGAKTRGGHMRQLRASGPAGEKSPGGSHDSTRPWGNHPRDLWLRFHGPFKETKHSLAEGGLQASGDISSPISLLVWDPPSAKPKQGFRTHRLCWGQPPVWLTCADDTETPNHLVVESCHHQRSSEKPGSGCST

SEQ ID NO: 1010707 - protein, 103 aa, Homo sapiens
  misc_feature (11)..(11): Xaa can be any naturally occurring amino acid
MGYTKAFGRLXTPASPERCFTEHLPLLGPKGPPGPTRPDWEGHTTALHTLGTGNSYGPQVPRMEFPQTEERTTVATPPETTRASGWKALLTPLQNTTLAPPGT

SEQ ID NO: 1010708 - protein, 74 aa, Homo sapiens
LFGPSDTITTRGPFMTAKITTLCEFAVWASQVVRHNLLRQGSTPHPYDTLPEGHRGRPKQMCCTTTDFAMGPPH

SEQ ID NO: 1010709 - protein, 137 aa, Homo sapiens
NSNIGEKESGDKTPESNVGCVGRTGPGGVVARTQNGWNQHHRVWERTPKGLSPVWFSPHSGDHNDKLYGPAEQEKNGATNRVPAKFAREKGEEFGINHPTRRGFSPRENFCLGLKPPECGPTDPGRKFSCAGGFPGV

SEQ ID NO: 1010710 - protein, 299 aa, Homo sapiens
CGAWGGSAGHGGWVLSAAGSGLGEGGGVGAVARVSCDRHEGGGRRGGGGEGGGVLQRLGGGRILRGAREAVLWGAYCVARGGYSWSWSFWGGARVMSGGPGTGGVCCCGVGVATPECGGGGGVGAWGPGGLCREERAGVAAPVGRRCGCVALAIGVLVLVECWFRSGGVLCGAGQGPRCWGGAVALGRVSRGRPRGGVVVCIGRLIEIGERGGWSTRATRCGWAATLRSKQLFRHPRPGCHATTSAGGQDRKEVFVCTRRRASRRHAPREGITHIVRASSLSPPHGLFHKQDTRGGRLA

SEQ ID NO: 1010711 - protein, 144 aa, Homo sapiens
MFFGRRYLAGGEIVPTVVGARRRERSDSKTRGLCCSLCGAHNRRVSDKRERVCFLCGKDREEGEVRSLVGAHPPLWWWVEGHSTRAPTTGGAHATPLCFDSRAGGGYGGNPRGGSRRFTFVLSPGGVFVLADTCWLYVWCAQDM

SEQ ID NO: 1010712 - protein, 121 aa, Homo sapiens
MWLWVKGVGFEDAARPFTAPVEAVLLGIDELGAGCVGVRDRRRPSERLRAEQVSSSDALGTPLLCSCMRPVFQTVVPFEETSAWSLQPGEVKTVATPKCGPQSQQLYIMFEAFYKMQLCIA

SEQ ID NO: 1010713 - protein, 324 aa, Homo sapiens
RRATPKASRQASGKDRQDEPRCAQDHHRWTPRPSLWPTQKITGEDHPRPDRALGGRAKTAIAARGPLPTRANITQSCIQQTRQPCASPPFTKLGIDTIIQKALLAARHGNACKEGTGKQPRAISYTSASLTRKSSYAVLRRLASWTRMECYQVWTKRLETKPGEPPSLRQELGVDPDDIPVTSRHALTQALYRIQTSHHSVLPQASRIPPSCTVPSKLRGRILMNPAPDPRKGVLVDHSSAAAGSSHEDNERLPHSSLGSLGTPSEVHNLSPDLLPFKTFAWSFSAGSKKALQLPPKCGPGDQQLNIIFEASVKECTVIPTESD

SEQ ID NO: 1010714 - protein, 78 aa, Homo sapiens
RKVRVVEGVYVVLQRAVYSRIPPRSMKDRHYYEYVCDNGPQSESCVEESVMTGEWMLKIVCDRSAYHNYLSHAIVVCA

SEQ ID NO: 1010715 - protein, 192 aa, Homo sapiens
VPLKAEPQRWGTYIHSLTALHHSLPSVLRWLASEPPVPTSQPAALVGQGARQHDSSSSSVVLAVQGSSQGKLFDPCRWPGHSAESPSAKLGGIGKAKLRSMKERKLGRKKKQKEQEQAESHEPRWALRCRISVNKLGHRGGKGMLWAKDLRGCVRGPEEPLAERVETSHARRSCAHTASKPQAEEDEDDRES

SEQ ID NO: 1010716 - protein, 361 aa, Homo sapiens
GLVRAFSRERLSSLSFALRFVFVAFFRVLGVQLVGVLHAQCCLLSLAVVILMLCYLSAHSSALMLSVSSLLLFLLLVLYQINLLTLRWSMSCIVAYDVVSALTSCVFCVLSYSGLYHLRTQCFLMLSMKYCWLSCALLQCDVTVACSVVAGLRYCVVVRASRSLKCSSVVRFVVSLRWQAGLAELSLQRVRLLVLRLVVGGVGRCLVVECQPPFVSGGLSYINFLYRIGGAAFRALVIGGWKLRRCADRVCRAPFGGDDVRAYAFVHTALVCLLYGAPLLIIVCEGSPPPGGGAPDGFATVPFSPRRSFVFIPHIVDPPAGVTAGIYTPQRGCLTSHNGGRYSRGLLWWTPHLIGRPSYSV

SEQ ID NO: 1010717 - protein, 172 aa, Homo sapiens
MGAHTGCFSLHHKSAVATDTVGGHTEDALRGPTICVRSRLRMASCSPRVTSPRATSVYFLESQPKGFSHDFVRRWSLLARDTLQHPVVVQNNRGFPPGHWDKGDRGGRPRSWGSRDGRTKALLAAYGGLNSLSAHLTAILDHLTTKGKRTPRKPGNFPFWFQGFPINFLTHP

SEQ ID NO: 1010718 - protein, 281 aa, Homo sapiens
GRFQAPGPKLAPCRESVGTGQSYVTKGEAKDIPEGQVQARYPGLYEDWAGASPAQEPRAAVLSGLGGRTGAPELYRGVEAGEAEDTVAQACGRRRLETERKTTSGLGCPGSRPKATPSQVAGLRGPVLRLAGAAGVCRAVMCPDERPRLALVSLLAPALAYGNTVVIGAPVRPVLMLALEVCQDMATVFPAGTGQRGDRRPGPYLTRCLALHQDVQANVGTFGLSQGLHQFVRVGLGRKPQTGVGEQGLPSGHWDEEAEGAGPELGLRVARTKALWLPMGD

SEQ ID NO: 1010719 - protein, 140 aa, Homo sapiens
MWGADTACDTTPQGGALLWVVRVCPQQQLLGASLSPPWEGNHIRRVVCVRETHTHTPGDSCCPAQNTHAGAKHVVSHRKDAFPRDTDLCGFFGVRRAPPLIFRGDISRGRFTLGANTRFLFSSAIFLRRSFSWRIEVLLR

SEQ ID NO: 1010720 - protein, 153 aa, Homo sapiens
GLAVPQSRKLYDCRVDEPYVLTYGGAKPVPPSTLQRGNRIDLGLPRTYGSRRGITGKHTMPLTQGQTQSLSHSCVCTGSSSESSGKPSAVHRDACASGCEERSLTTCHRALTTYASVTGLMEASPLWSNSTSNEALLQLVFRKEGLGFGDGGQ

SEQ ID NO: 1010721 - protein, 268 aa, Homo sapiens
KAHIGGETVIMRYSVHALDVPGLFPQYWELTQGKQLLNVVIKCYIGSEGTWGLVFRKDGYRAVKYVWSGFARATSRRMNKLHWKMHSYVCRNGPIGSIRFLRKFFSIFTKDESAFVMNSYTQVTAQGYHLVSGMARAYYSNRRLVEPSGWNIATHMWNVSSISAYYSCARRNAMVTPFWWNNAQSKTLSLNQRVSIPSEGIPTKTSDGIQHALASGHQSRKGDYHRLEKAYLGPSGTCTIVHTHLPFRPGPGLALENFVPNTLHFINR

SEQ ID NO: 1010722 - protein, 345 aa, Homo sapiens
LLVFASSLFVFFPFSFFPCSFYVFILLCLFVCLSLCCISIVPSSVSAHFCCLPVFFAYFFTPLGFLFPASRLALAIFLSLSPFPFLVVYIGPSGPFSIFPSSRLKLETKSTVSWTWSEGHQPQKVARRVFYQQPGVLRQQNVNGCLRPTLRNAACRRTSPVAGYAEQSNEVLRLAMKYIGFLVRLLRDQSAALAAGLTPTRASANGRCTGSQIDGARRGSGRRAEAAARFAAPAPPADPDRQPRMELARPIKNGANRLLSPEVQGDQHAGSNLLSQEGTRDSAEGRQEYRAVDVRRNAWERTSPREKDACCQTDQAGQGLGGPEGDQSTPQGPADPVKKSPTTLC

SEQ ID NO: 1010723 - protein, 286 aa, Homo sapiens
MSLIPPWCHPNHSLGHQFSYLPRMLPPVPIPGPQSQLHASDEEEGDRQSPPLELLYGETYGLEPRAMGSCLAETGSKKKIRLYQFLLDLLRTLADMNGTASGVRWTRINGHLLSSLSKHKEALALRWGIQKGIRKKMTYQKIGRARCATYGNARAEVKKVEVKKLTYQFSGEVLEPPGDLAERLPPAPHEPAAPAGPRQGLHRLANSTLSPSATARNTGRTTPGAQMAGPVAGRGLSSHSATPRAPLQAPSTSRFASLQESPPRLTDASWASDPTGATLAEDDPGY

SEQ ID NO: 1010724 - protein, 107 aa, Homo sapiens
RVFLNHAYQLYTMWSRSEVSPNCFPNSLRGLLQTWSCWYCRTALTKYPATNQPLVRALMLTSSRRTLIEICLMSYGRAMAMSHCHDESSITTSIFAASFGARLFTRV

SEQ ID NO: 1010725 - protein, 65 aa, Homo sapiens
MLPERASRMQIQARPQRSGYQLAEERAKDHLGMTRDHSVDRGHARRLRQEEAPNGRNPVAPLATP

SEQ ID NO: 1010726 - protein, 125 aa, Homo sapiens
YTSYGDHLSKAPKKQTMWDSQARPDRPPPVPLPPAPETRLQLLRSSTEGAWMPPVDSAAPAQQAASAWVDGPPPLPSLDAIQVRYSCLISRLNGLEHTFGPGWPHLYPGFWYRGTQEEDDLREYP

SEQ ID NO: 1010727 - protein, 240 aa, Homo sapiens
  misc_feature (93)..(93): Xaa can be any naturally occurring amino acid
TNPYCLMSGSHKESPEWRPPCGIKPPLEVRASWCSRSVKQSSKVVCDLLPKDETSKRRLPHPTVYYGTPETLVRKCSQDAWAELCYCTRVYGXVPKRVVSLDAFAWTHYEERHAAEHVSVAVYKGEPSPHSVALVSRVPWHRRKVHWKTPQGSLPKLNVMTQLAENHLSLALTSAPLPSTHTAPSHCASALEPTVDNSSPYDHSETHHNHTSCTLDPRPTAQAIPCAWISPHHYCNHDVE

SEQ ID NO: 1010728 - protein, 169 aa, Homo sapiens
MGSDLIRSTSLGPVLSGRFSVDPFGGKGTRQRTNLDMTVAAYLMSAGSAAQADGGPIVKVVTPIRGKDGSVCGIDWRPDDICHHFCMSAVSRSACLLRKTRWLWPTEAQPQGSRECTEPRLEGWRPSYGCRTSPHCQWSHQKPRCCNQGRVSTVPTMRTEGILYRMYAG

SEQ ID NO: 1010729 - protein, 234 aa, Homo sapiens
MRVMTEEVVWPNTAGFGMAPGLLELSHGAMCPQRLTVAPLLHCQLNVSHGIPRCPIRRVQACTHHVSSATWSYRVHFHGTTFLAHTQAPRPWQLGLDALPPQRPSTSALLHTDFAPASSAWHAPPVTTYAAPHFFHLNTKLYGQSQWSACEHCWTSTGAIQQAGYCCQGARELVQCYHMDTRATSLGWAAMAQVKKKAVGKMGLSQGSSQSPGAEDPVVKRRWERWQLTPESEL

SEQ ID NO: 1010730 - protein, 71 aa, Homo sapiens
HLPFFPKVLKYEVGYPSNLLESTEVIDVSGSASVTLAAAGTVLKHSTEEESMVLTGYRGSHHLVERAGTGF

SEQ ID NO: 1010731 - protein, 235 aa, Homo sapiens
MLTSETREGSKGRGNSQRSWWVSSSSARMPRRQQKEQNYAAGEEEITAYSQVTSPTDLTVQQRLLQEHSELKTQSELDRINAQYLEVKVTASYDAIKLRMEELKIVVTTRYTVEKVEVHRLIRDRLEGSHSPNRRQHMENSRQVLNSYEVPWEGVRQAGEKSNTCTTSRQQTNKSVGPSHVTIDDNGLPSRALNRDHERHGFYIRLLPPNLHCNVGTTFTWGCLQYKRDVEMLAH

SEQ ID NO: 1010732 - protein, 344 aa, Homo sapiens
QFDRPSIPVTGLKTAGIPRASYHNGLLVWFLRSRVKPTCNSMLTSQPGILTGKTLHGRFTISGLTLRLPRVPSHLQVDVYSELPRAASAPSILIHFINMFLFSHSPSNRLLVPPAGGGPRHTLLVLGVGHRCPSCCLDTPLHLLHRHPLVRLREDGHADRQEENKAGLAGPCHDASVNWLESPMRKKGRGLWMMKRRPKLVPSRGAHDTRPSHTIRVLHWDASPTPPSYLAPCGAQEPGQQPQTVQRFCGTMFDAAVGHRAMAPGKAGRGGCGAGHPSLPPYCRGDRALILDCGDGGHHQPSLDDPAEHALGGIPEQVLIRHGLQAESLTFAAQILGQPRALQA

SEQ ID NO: 1010733 - protein, 69 aa, Homo sapiens
RHDMGAIRLSNLPGDEGRNPAIHPASGLKVGHETERHVIGSQRSLLLSTAQMELRDSFATCAVSGSMTA

SEQ ID NO: 1010734 - protein, 71 aa, Homo sapiens
ATLRFCQKTKCSIVDSAVEMAHRSNSQKRQLPWHRHCYEEWTRKVKRDSAPPAFPCKTGRFMDNDAGPHGI

SEQ ID NO: 1010735 - protein, 182 aa, Homo sapiens
  misc_feature (87)..(87): Xaa can be any naturally occurring amino acid
MEWTRIYGRPSSLLSGHAYSPLDKAFPFTSSSLSEFQNEAKRLSAAPGRYSCLFGDPDHSSLLAGLIEEGSITYGHSVRCDEGLAGXPGRCLAQRSSYVPSPIHAGNRAPPYTSTLSPAKTVGAQPPHVTCSPGGQPPLSMYAWEPSPCKAFAIFSHWAELQALEEGEGRDCVVMGSPANTT

SEQ ID NO: 1010736 - protein, 345 aa, Homo sapiens
LCRFSSLFSSRPIYPHAPVRQTPLARRAHVLWSIPADFPEWELGSACLSGVPPGVDDAHQGGTLGLCFEDHRLVIIHLHDQSASDVHCRIRLRGGCLPVSGGLEFGLTLRRSVSGDALPLAFWPGHIAPGGDPSTLASSLDLLPEPWHALAGAPSCRNVHPVDGYETSAALLLGTGKSPRSVSLSSTRPTQTTVRGVFACAEWKVQGSLRSPQGSAHSDTTCRPCRATPPALWLLMSPRYLYDLSKDHGENLSTLHVGDVRCRGHPRGDCNAVKQLTAAQGTSETQRVDLRPPARWPRGEDPSHCRSSMSYLACTPTPSMAAIAQIPMPEGPSGLAWACDGSSRG

SEQ ID NO: 1010737 - protein, 121 aa, Homo sapiens
MTRAPAQDIVLAHRILLLLLQSPLISSRRQSSVSGPEQRSMRMVALREVTHDTFPENGGKHAQSKHHQDTLSSIVIWTLTEAYNTAVRDSQELFCASGFLPYREITPALIEILYCLHEIQD

SEQ ID NO: 1010738 - protein, 102 aa, Homo sapiens
PLPFHSTWLLSLLFANTRRLTHAHRIRITIRPPIYNDLLAAAASSAPRMYGPLPFHFPECFFFAMTFSPLGRFITPGLCTFFSDHRNRCTANTSAPNCYAPA

SEQ ID NO: 1010739 - protein, 176 aa, Homo sapiens
MCTLQRPYILTEAHGASPFHVHIPTMLERYTVCGDHHRAQAFHVSHTYRIQRHVSRTTHPRLFDIAIGNRDSQSEHRTMIRPAQLHRACALGFPSCLRIGASKGLMLISRRALISWIVSTHSSASRVTCGHPPVQSSCLSATYGRSSSCLPVASFRHQLIPHVGHSGPVFPFRQPL

SEQ ID NO: 1010740 - protein, 87 aa, Homo sapiens
MKTAKAQNLRSIEGPFSLRTVFLFNGQFASMIISVLEIEVLYELSVHCHAMFFFFHSFFAVILEFLVLGRIKQNLKFYEIPLGNIFC

SEQ ID NO: 1010741 - protein, 196 aa, Homo sapiens
PSVFVARLSGDLRVPCRAVICSCSTVLSAAWLLAASAAAAPSSASHLAWLSRHGGTFCPSGLAGTRSVTSCHQRCKSAPSTSKVVVMLSCPAVPQPCLLSAVAAFDWPQLYSGHSASYRGSGPVLRLLHRSTPLLAHQLPSSHLPVLGFLDTRTRNGETLLAEAHIEGLAGSGMYDVTGLLDRGGGALSGSRIEWD

SEQ ID NO: 1010742 - protein, 67 aa, Homo sapiens
CVWVDGYRMISYPHLQPEGIIQTVEGEKGEDVARDEGSGSPEDAAGLAEGFNAGNGKHCMNFKQQMN

SEQ ID NO: 1010743 - protein, 182 aa, Homo sapiens
GQIISGKEDTPNGVDSSQGGIVSDPEERDQEAEGEATVSEALQAPPNRHHGGRGGDKYHSFNGEEPKPHDPQTRHPDARDTWSDGSIKEASPPGETTRSPEGLRGSDLGWLPSSCQWRDEIGAPSWGRAEGRHVPFPWASEGPGLCSAVAAAPQSHEEERQLPLGSLDHTHSPPGPAHEGPF

SEQ ID NO: 1010744 - protein, 197 aa, Homo sapiens
MLKGDSVYMTSPPWELANGGLLSRRFFETKVLNSGQPLTEFSDKGPHECVRLGLPLLIPTAIFHKGGKNRLGSFVAGLTMESTQGMIQTPNEDSVHAIGVTQFRLEKNVGGGIPPATCGARRAPTKRCGPRLDFHFCSRVRFSRASANQYAGNRLPFDSPEESIYTCLSQQLRGKVSIRQGRHVLFDLSLCQIGANT

SEQ ID NO: 1010745 - protein, 325 aa, Homo sapiens
GTTAAARKVQALPGGPGAPGGHPGDSVTTGTAEQREVPGTSIMPLRTREAEARGEDHGTNTAVLGACAPAPDQRRADWLADKGPLPRHPCAGPRAPSCLRDETLAGEAAGGNSAQGSRWDEAYEITSGLGTHPRQRFRQRHPGHLGAPVSQQQEDMVWDGRTSRLRTMQRTAKPDANREGPEVQEPEKLSHSPHPSASDTVGTAGFGSAAFSGTGVSAEAHRQPKSSGSQGNPKGSHLDKEAMGPESPTTDQRPEARRWKLGRVVCTGGMAGPHEQLQAGVLVIQQVAPVEAAGLLEGSPMLQEAGRNWQENPVPCPGGKLSPRL

SEQ ID NO: 1010746 - protein, 208 aa, Homo sapiens
MSVNPGRCFVLVVDHPYEQEVSFPESNLSNWEPKDFVKSMHQLRRNECGQAMWCHKTLNCSAHLEATFNKNSSMPSHPAYTSRPGNTLPRSVPRPLTPASSCCNVLATRLSSRTGPAASYYGELATTESRLRTVEGTHSTSIRRRFVSSHLPNHTPFLEAPRSVPLSHTQGAPPPRVDRTVTCCLIGIMSLEPGYSCAGILVYQHDMF

SEQ ID NO: 1010747 - protein, 82 aa, Homo sapiens
RRCALDRYVSWYNGWLTDSIPLLIIPSTALGALHHVPFSGRSRGLSSVPEVKKFESTPSHSIIPLKAYRFKTGGYKCFFSLG

SEQ ID NO: 1010748 - protein, 208 aa, Homo sapiens
FHIYHMGQAWLPRSAGPSSTPHEILLWPRRTCHSGAHQCNRDLKPENILLDDHGHISISDTGTKLCMVPRGPDQSKGRVGTVGYMAPEVVKNETVTRSALTGGRSAASVYEMSRRTSRPVQQRKKKIKTGGGGAAGEGGPRGVVRALLSPQAALTLLHSCLMQGPCSNATGVFVGAVPARCKEHPLFKKLNFKRLGAGMLEPPYQALT

SEQ ID NO: 1010749 - protein, 108 aa, Homo sapiens
MGRQHSIGDTEFLGPKNSPLYDTQKYRQIFPMGDVIYPMQSFSVQLLPCELCRTSKQAHDKQLESVIREKSHIVEMIKSLCSRTEAQWLTQCNPSTFGRHDGQVDHLR

SEQ ID NO: 1010750 - protein, 363 aa, Homo sapiens
PYTLDHTPALGTLHGPFQPSDTPPQETPLDLNSQKLTRKAASPTTPEDHPSRLPPYELAYTLRCAAALIYPEPYTPSPERRGTLEPSVMVNHIAPCTTRVSYPLHDVATASVSNVTVLPYTRTHKMDETVYATTKKFPRINEGSTRPQLLQPQWIVKLVTTNHMSGVAIKRTSSADVFGPPVSTSISSNTFTHMTGPFGKGRLYQSIVRQVSYKSDYENVPKSPGLFETPPVGPCALEERRLIRRPGKQRSQVLAKKAKDHANHTSGTEAHTPWNQASADTARHTLTTDKAHSLACWPSSRVAIVSQARDRVLKDEARDLMTGLIRLTSTMPRRLSILAVVSDRSLSPLHDPKTGRQQMAFIT

SEQ ID NO: 1010751 - protein, 81 aa, Homo sapiens
LSRFLFPYPPEISISVYLINLQCLCLCYDEQETHSQIVDTGYGALIAYVPLCANDCSMSPSPFDISRQVQQPLLTQQNGPV

SEQ ID NO: 1010752 - protein, 362 aa, Homo sapiens
  misc_feature (17)..(17): Xaa can be any naturally occurring amino acid
VFTPLKSWLRYAVFRGXLTGGNWTRRETFLPRCQSSTYTKCIFTNLLAAWDGPVLQCLSRSLQVTGSKSSRGSVVTNALTVEVLCFPYMGPPWCPSAPKVCWTKLFYPLRLLWVVATPCVAHRHVLLAKVTIHQPGFLLSNNLYPMSSPVLYVMGQAPPFWGRPRRTSGKYTGAHWVLGACFLAILRVFYVPQPLSTVGLGPLPSPNNLSQLLPGCPAPISDHNDLISLRRGGKGAIYRAERLRKHYRLGSRCSLPFAETGHVAVPVVAHQRQGKGATTYARAPMVKVDPLPLYHARPGHVPCSHRNRMGGSVQKLSIPKAVSVVEARLDILPLSALTPLSLFEGGELCKDIQPAGTRVACA

SEQ ID NO: 1010753 - protein, 147 aa, Homo sapiens
MCIRNSGCQIFTCILLCLYHIPANLPYQPSGKSSMLPGGLGGLAFLGSTSALNIVPGRILSPVTNLEAWLSLLRQRSPPGCSMTDRTRPLMTDTRVPDRTALVDAINGLITRPPLPRTLATSGTGPLAVVHAVGAVPLVSGPPPSAP

SEQ ID NO: 1010754 - protein, 131 aa, Homo sapiens
MAMEHNECKNKAQDVKLPWRNSDGEVSSMHLGEGDIQPIMNGKRPSSSLGLTIGQTQQQTRGATGATVGTVLRNHAQTDRFCGAQKRVEKAEGWRVNLGHIRHPHRAQHRDGLAANQARMRSFLTLACCGS

SEQ ID NO: 1010755 - protein, 230 aa, Homo sapiens
VDGGYCLDGRFQREADIVKLWLVAEEYLDPSYVIREDCSESRHVLFIVLQATSTQPQPSRQDGPRLPGERASYASHNASRYLAATLPFRTRYCRGVQPLTKYDGLLWHRLLAMVTMNCVPHALETTSDPSASSSRQGWCGGSLGRCMTFEVPGEDDESGGSYTLGRCVEVLDSSNPILVDRPPAATSWASSLPTTWHPMIPIKLFRGQKLFVWSCPLRKEGQGKKDVDVP

SEQ ID NO: 1010756 - protein, 124 aa, Homo sapiens
MLFDSTTDVHDAFRSKDRCTYIRDLPGCLERNSTYSHFYSNLTIWKPYTMLTDNICYWRFYYSSCSQIETTLLRDFKSKLEVSVIYFRVMWVRRSQSGQIKIKREDYESASNKRLPCARTPKYC

SEQ ID NO: 1010757 - protein, 289 aa, Homo sapiens
TFTTRRARDIDRNNGGLRQAISPVNPGFIQSTYTVLCCGPLTVIRLNTKCSAIANVPGTNQGVERYVAIEPGHQQRGGDLLRHALQEPVRQRIRNEPFKIPEHDGNDAEPTLFFNPDSAIGLAPEKLVGRAKTCKRRWFILTDNCLYYFEYIHGQGVPEESSPWRILSIQKLDDPRKPFCCELYIPNNKGQLIKLHNEADGRGGGKPHGDRISAHTQEEKDEGIKSIQRLEVDPFYEMTGSEKKRISVKKKQEQSDRLPPDSINYTELPRVGGQTLAWGCDPVPCLESH

SEQ ID NO: 1010758 - protein, 104 aa, Homo sapiens
MAPPTTFVQNSSSSTAHTFQLGSIRSPSLTFFHVPSSFPGFSVQYMTSCVLAPSHMPDTPPGLHLEHRSDDKTSPLVKDFLTERSALYILLISLDSCKRYHLGY

SEQ ID NO: 1010759 - protein, 143 aa, Homo sapiens
VCRRMSLLFTYVMTTCICSCPLSLVLICFGQPRFLAANLSPQDFLAGIPYHYRAASQNLIGVNPSRVVPYTLKKNPTSGGDPSAGLSHEYKVRDLRSRHNRPYGLSTMTPCRMHDVLICTRLRSHHVIDTKPLPCPHYLLKNS

SEQ ID NO: 1010760 - protein, 58 aa, Homo sapiens
MRVLESRVVVSTCGHQGAVRCLVSRHLEPFDGGGSSLLPASCVAIHLHPGLKAGCCGW

SEQ ID NO: 1010761 - protein, 272 aa, Homo sapiens
LSCPARAPCASSGVFPRCPGLTVGAGRGSAGICAASGGDRSPSGSAAGPFAPGGCGLRVPLPCAGCPALPHLLCPVSLGLPWAQRLGAFLGQPSAFMAGPEGEDLGRDLLSDLRSEKLSEQTKVSLLALSMEYPAQLWPDASAAEVADTSLLDTLVLLPPRTSALRTALLLAAPLPWRRAARWAPARAPPAGSCPYCSAWPRVAIWGEALSPARNKAPCRPRAASAARARELQPGLLRGSLRLLRGLLGQEGPVQPLQPVAGPRIAPKPMGS

SEQ ID NO: 1010762 - protein, 80 aa, Homo sapiens
MSERTLFARWAVGHRHASSPGISSPDRNQEPLANFFDSDSEMIKHEETSIHWKSAIGVYFKEIMSFSKGLRLQRYFLQYA

SEQ ID NO: 1010763 - protein, 296 aa, Homo sapiens
WVIWHPVLVGWYIGVFIRCALLFFPLLFPFHLRSVSRKFASNEIHWCLGHSCLSSSTRVSPSSLCVLFAQACVFLVGPLCPLLAVTLWWPSFIGRDSIAILFCYPIVLAAFVFSALNARLKFLWAIHKTALLTLDYCTHHLCLSMCLRFLSLPLGANLRDACPPATLFVWRFLAMARFVATVSCLAPRLAMVLRRETFLSDSARSCSAMTFCRGLIMPGTATTSYNVMPAPHLRFHLYTKHVGHAPLVISVHLWTSTEEPYNTAGIAAPGGSYEHSALHPRKPGTMHPALGSGGNK

SEQ ID NO: 1010764 - protein, 80 aa, Homo sapiens
MFVEARDAHVDMLLEYFPPALAICNSHLWTHRAQAQLTGSTGTGRLGESADLQHDTECLQLGTQAARDSNFQEYDVGTQG

SEQ ID NO: 1010765 - protein, 102 aa, Homo sapiens
  misc_feature (51)..(51): Xaa can be any naturally occurring amino acid
MAHTTVAYVRCPRAPVALHICATEGRRRSARLGPLRMAIVGTIFVLVVTAXLRSGRRRGSVAYVSWYMSVAAGDPSCHAPLTTASQAGLLLACIVVGWGYIV

SEQ ID NO: 1010766 - protein, 82 aa, Homo sapiens
CFQTPRAIVNPILEGKGSIAIYRSRRMDIVNDLALFSGRDFIISPCVILQNSFSSSPFLHGTLSCYITLQRRHQSASSSSSC

SEQ ID NO: 1010767 - protein, 214 aa, Homo sapiens
MEREVRATDYAPSHQSVSGRALPCNERRVVPQRSTETSGLPSEEGLFVLCYSSYSGTKGRLQPPSDTRQVPLMDTEPSWSKYPRSYSLNSIRCDSATSGVRTRSSVLTRHHQDQPEDAAGVVCGMRTFGRFGLQQVQVDCNFLQLYLWRFVADEELGHLLLDEVVASAEPCACPEPVPMEPSVDEVICERGYAQPLQGTGLSCTPCTITRGGSF

SEQ ID NO: 1010768 - protein, 130 aa, Homo sapiens
LPEGGLQVFQSLTPSPCRASPRSCLEMNAPEFQGLKRLSARRCLASSLNPFRVQGLLLANGQVSVVPMKISRMLLARAHSTLGKRTCTEVSSRVFDPSRLGLPLSSGLTQRMVAAGQWCVLRWLERNILG

SEQ ID NO: 1010769 - protein, 300 aa, Homo sapiens
GKPFSLGESNIRASLDVSSPGPFMLERTFLNREDRFACFGASYPRRETNGALLLLGYQSPLHLHSDPGEPLQRKNALGGYGWDRVTMLARGLRMVTGGRRANRLYAKTRHGRKSLNDENALKARWRESLELGQDCSEALGTSPSGLARQGTEETGPREGASHRKTPEARARRTTCAASVSGVSRPPVNHTCDKNVQCSATLLGPAVDPGLSSAIGTSDMVSTGIGPAVIVQATTCQVGLCYNGSAWSARSAERSQKATPQVPVLRGPPASCTQGRSHRTVKPEPVTGTEGCRGQTGTGAN

SEQ ID NO: 1010770 - protein, 66 aa, Homo sapiens
MSNGSFVPGGACKRQLVAVARQLLRTFRSKRLMGMTPWEQDAGPVLEALRFDGTEPGTEARERHRA

SEQ ID NO: 1010771 - protein, 341 aa, Homo sapiens
FVPRGVRRRGLWCHGYAVFRDALWHGSRHSVVVGIVVRSQRGTGRRQGLFCPGWFPGGRSVGPRDGRCLNGDGAVKRGGGMAAPGSRRPGGCYRAAPGGAASARGQARGAPVLPGTGLPVYTDRLCVGPEHLRPGTCPAHRGGAGDLARVPGRYPSGPHPWTAELEGRTPGYPSGACPSAAGLRLKAPTLCSWLVGTGCMSLRVLTRAHGCGPSVAQDGVQPWRRSTTWTPRRPGEEVSLEPTLEPLPGTLRTLTRVQTTKQLIPLVPRKGSQDLVMAQPRDWDLEHDLLTSLGRTLPPLGSGPHASKWHLEYEQRSWLQAGLACGSGIGPAEHLVPLMLL

SEQ ID NO: 1010772 - protein, 263 aa, Homo sapiens
GPVPAIKTITITAMGKVDGNVPRAGVLHTWGPKLTWTSMSWLLCWAPLLRVPVYRHVLSGWPALSSLFGIRTIMKHDRHQDRDELEKLMVRIGVFSVLYTVPATIVIACYFYSKAFRDQWERSSGRPRACKEHTRIPCRSPPGGGGAQPHPPMSPDFTVFMIKYRYELIVGITSGFWIWVRQDPQLLEEVLHEAHQQQTRGDYSLRPGAQRHAQASAGAQRSHKASAVEFVPILDISRFPQLDNSVSTGSFEQTQLTAKASRA

SEQ ID NO: 1010773 - protein, 144 aa, Homo sapiens
MSDAATLPHAHLPITSVENAPMVGRRLFFRYSSQLLHTNFAIRRNFLVCQPTLCWTERNGHLTRDEHVLFEISDHASDGLLTSYSASEWHRDRTGLGTQGTWLSQLVSDENDAKILNDEQDRFEVNNSELPDEKDISSYIEQTR

SEQ ID NO: 1010774 - protein, 259 aa, Homo sapiens
HFQIPRRGKPIKSASLVIPNNPDLCSVYFPLRNRKISPVRCVELLRVLVMHLIFGPSVGIHAMSLQSLLVKPANRVPFLGGYNFRLQPRISTDEVLSLLVCRPKMETRVSEVLHACSVPGPYLGHTTKSICAQVPAVFGLSGAHKASTIWDWHSWQSQCDGVCVALPREKTCQNVCHYEDTQNTPFPTVLYALVVPVLSSLSDRGGEACQTLSLVLVQTAHCSIHSARVIAGFGNLNRTFLPWFRLHVTNKENGPSCDH

SEQ ID NO: 1010775 - protein, 109 aa, Homo sapiens
MTFLPSMPCATAGTSRVDSRPSGARRTTASWSLPDKQVLTRRGTRRGKLPRMDPGDLTDANLNLTVDEGVTGGQSTSCGRWHSPSTREDQLGLYLLSLEQQNQRRYAQR

SEQ ID NO: 1010776 - protein, 188 aa, Homo sapiens
MSGGHARSAALLSAVVVGAHAVTALPSRFHAAAQPRLGSAQVRCPAGIVVSFCASPRRHRSPRTVRRTLSAPVRATFPAHVEEPTRPAQGLDISQGWRWRRAADPGEKRSGQIWEHRASEGMGGYSQDQPALLTQGVLKKRGEGYSSSGLALRRAVVAEAAKAATFRGKVIPGAVGGRIPEAHRGLTG

SEQ ID NO: 1010777 - protein, 70 aa, Homo sapiens
MSEVQLCHGSAEPQSPEHKLSVSQGHHPHHLGLTPPSSMDSVATGPCILLSVASGVGAEPLELKTAKDSD

SEQ ID NO: 1010778 - protein, 151 aa, Homo sapiens
PGLRSCTVKPGTRNAAGTTRRQFSYGRADPGRGPRRSLLTKRVAAPQDGSPQSPRIRDFSWVSPKWGLQSPSSKAPRSPPVDNVVRAFLWVEAPQVFPVGVLRLRFDLNGCCLKTLVRTRCLLGQNLPVVQQHGDTPGYCRLDILTRSALG

SEQ ID NO: 1010779 - protein, 364 aa, Homo sapiens
MIRRSKRCQLIWSETEEKDNLHKEYLNLFMNFRGCRLKMVIYQLTDLIDYFEAGTLGGAPCAPCPPCTARADATLKAPPQTCTPHVHNHTQPSIYPYPFTNPSHPPLRTRGDRRHRQTLYRRTSFTFYRTHLTGRRDTLAAGAPRPRLWNLANKQHDSRAGTSALAPACTATCSETQTDVPFWTTPTRTHTCSHPPSPYTSISLPSFPTRPTPTHARPLPCRPPLVIPRHHAPQSVSTQPVSGCVMLTQSARPSRLQGVPQPPRPSSPASSPPSPLRRLHRLPSATSLSPRHASLSPLPPPSRSPPLRDLLPSLPRLSSQPAPACPLLLSLLSACPPGVFSRLVGVGRGCAPSSSPALVRSRVW

SEQ ID NO: 1010780 - protein, 279 aa, Homo sapiens
MKRWGEEEKRNTERIEVERSWKDTNSDGERYRGTTRTEEQGECAKKPKTRERGTGTEQEEQRRRAGEDTREDERKKRRTAKQRERRAEPAGAEERRGRSGEAERTRRAAREREKSTPRGEKGQRQKTGGKRRGKRREHREQGRRQGQKNNAQAREQRGNRQEKAKKRKRRRREDKKSARAKENTEETKAGRERESRGRGRRRERGEKEEKSREREADGREEKKREKEEDKQESEKREREKTEKEEGKGRGEKQAREEAEGTREEARETDGRTKRERGKR

SEQ ID NO: 1010781 - protein, 130 aa, Homo sapiens
MGQPGKAGGAFFDGTPNGKPLRLDHDVTAAKWDEVVELDGPLGIVNVSQSVLAQSMYGIVLVITRPIAKFEASCRRVTQLTSVHSLGLCVICVSVPKQWLPFEGRPYSYDNVDVGHFLWRYGHSAGVEGD

SEQ ID NO: 1010782 - protein, 619 aa, Homo sapiens
  misc_feature (562)..(562): Xaa can be any naturally occurring amino acid
RGAARGGAAGRQEAAARHAWQLRLKLPLTGTNRTTLWTCLNDLNLLCKPTANCDFPSRWAKPLLLLKPNSCCALHTAERTLTHTLLSAHTGAALCSNSHAARELSTPQTASALHLHCKPQPAPLTLSLSNCNTNPDIFSHTATLTYTPYTPLTLPKTSITPCTTANKTNPSSPTLAHHAKALPSTKTPNIFQHFQTPIVDLDANLSSHNPPKLSRAIPLKHFVPNPNSPAFPPPCFPLYWRAKITGPTPLCGSPLLITQGRPLSVNAADPLSKQAKGGQNTPFTWHDTNPPTPRAPHQGQRPHPKKAPGQNDNRFINAPTGRYTPGARPPPPTVGAQNTPPPWCAVPTDRARVQDEPNMHDGDGHPLQQHNPPQNPSRARLSIHHQHPPTLPHPTPPLWRRNHTRPPPTPVEQATKPPFRRRRAQQQPPPDPPPVGHPPPQCGAQNPHNCPSKTRRPPLSTTHFFSPPHTSPPNNSLFFTLHTHKTPKQDVLLYRHTPPHPGRPLNHCPITPRRCSKTNSSIAHHTRPPSTRIKRTTIYTYPPLIHVTTLKPHKTTLLPPPXTTTYYEAAIDPHTSLFSQMLNTHLTTPRNMDDTPHTPTNPTAQKYTLIFQYPTNESN

SEQ ID NO: 1010783 - protein, 179 aa, Homo sapiens
MWVDEKHSVEDTRGRRPLCEECVGSKRGKSGKKFIQRRSSRKLLWTVLRGLGRQTSTVVDKTRGAGGRNKNKRGAERYTMWKRLPCGYNGDKDFGGRPFRNSYIKQRKVYPQGGQTSDVGDQPILLDRQQGRALFGSHTAQCPKQCVVAHFTRQPVGGGDLRWTSWRAGVNAARVGNIP

SEQ ID NO: 1010784 - protein, 59 aa, Homo sapiens
MQSAANASLYDPRAFTLEEIRPEAQLGSQADSKPLQPCQTQPTPFQTAFLRRKYAWGFQ

SEQ ID NO: 1010785 - protein, 392 aa, Homo sapiens
GTVMSVRRHERVRLRCISARELRARCAPSKPWSGPLELRPGGALVVWRCRCPRPLNTLEWLFRGHTVFGMTCIDVQGTCCRPTSKQPSDDVNRDVTVVKRLVAQELVKACLTRKPVTPEYGRYHAGLEWDFGLRAYYRRTMLMWDRAGVGNIGELLQYNRKYNGRISSANYLGDGPRKEPVRTLDGNLPYLTGRAPSKRYVTTRRVPCVRGNHAITGAQSSEGDMESRRGRETRHIKKVGHCGGNRYRVPKLLDPDNLGQALQQTIGFSHRKYKCGSPGFHFPEVVCSISEWTQRNFIAPLFRSSSPFGKSPRRPTIGYLVKVLEEGRQSKVVGPSRNTTEPGNGYFATVWPKDRKIGPRGWPTLWVRNHQEPQVPLGRIFGAPPAAVGGRP

SEQ ID NO: 1010786 - protein, 177 aa, Homo sapiens
MPGLGSPPRFPSAAPGNGLLQPLVTEEEAGGWRRRDGGGCRPFGKLPDPAASDEEPIGGFLARLSLRNGGPPGAGPSAPLARRRGIALPGSESGGSAELVVVTPGPRNQRTPARYGERHCQLLRAARWGRGRPSKHAQCGAPGPVRAEPRCRASGSSKGCHIGHRITRGKKLFPRDG

SEQ ID NO: 1010787 - protein, 107 aa, Homo sapiens
MSRRQRLTRSRWLVKRGQDPEELPVVQEDAVCPVVLALASRATSCEERLKEMEAEMALFEQEVLRAPVPGIPIAVPAGAHVSPTVPTVGSESRSAAGSLMNRVLIYR

SEQ ID NO: 1010788 - protein, 286 aa, Homo sapiens
IFPSRRFGVKLPSASTPGISRSAVSPMTRLRAKSGPDNFYSNSSTTDCTAVKDPVEEALPCSYTNKDGKVIHEAYGFPVWVTGTNGSALKRRDSVLQHVSSSCHRLPCKKDSVQRMAVGGGGAGSSPRPRRLGPNVCAVNGRPGCKGHASDGNSQKMSLGRAPAFAGGSVNPRTMGPLGFRLIRRAGRKLRLRTDVYFLRLQHSGSEKFSASGDALVGYLLSVTLGDLKALSIKTMLQKRLLGGVTGLCERLRKGLTLSPILGVQWAFLAHFSLEHPGDRAPANFP

SEQ ID NO: 1010789 - protein, 396 aa, Homo sapiens
  misc_feature (393)..(393): Xaa can be any naturally occurring amino acid
RGLRYGPGDDNLFERPKHRVSNDLTDGGQPTARIQRGTRGNLKRRGRTLHGGQNHEISHVPTEPTKRPPTQVPPGQGFTESPYHRGVTPGVVPSPEPGQAYGTKSLRQVASSVAGPCSGSPSPGCTSMFRHGLSDGKGTYLTLARTESLGDAKRVPAPRNLFGSHIAQKSFHEAILGSWKDQMTTVNSNTATQKTVGRDHQRKARQRWTGCPPEQCIPASTGACRKLVTKVIPELKGKLDYGIGSSWVPNPLDVSVVDHDLAASPEPALLSFTPYKEAVKAAAKGTHGLASLRYTRGLRYVSYWTCRTVIHDIRPSLRCLRPACALNDNLSEDSCVMVRQANIGLSVSRDGRPRCRYMYQPKQVKREGPFFPSKGTGAGKVPPVPASGCYGRXDTQ

SEQ ID NO: 1010790 - protein, 37 aa, Homo sapiens
KASYPITSLITCENTADIRRGPASPDQLRDNTPGRVA

SEQ ID NO: 1010791 - protein, 37 aa, Homo sapiens
SSARERRGGVDRSNLAKSRAKSVPGLRPRRLYGRVRL

SEQ ID NO: 1010792 - protein, 255 aa, Homo sapiens
FGPGGTVMETVREHQGQDYTRLQAFVGSRKKQQYSRGPATPSPNPEQRLNRQRGLCAGLHAAGEDPSDKADKTGPSRPHQAHGFARRTWISFRRPRGTLVLHSIPVLAGGLSGKTPYPCGHIRVVTQRRPLAQGGTLRVPGEFLQWNSMPRLPTDLDVEGLWFRHYDFSRAAGSVPYPQEDRRGPLLAGCTPCGAGEIGFRCTQHLIPTRAPPSEPRDEQQCAPILRALHSCGDPLGKFSVPCQASRSIWARAHG

SEQ ID NO: 1010793 - protein, 105 aa, Homo sapiens
MGCLPYSTTISTEGGRLSITWILAADYNDGVNTYDVLRQIQVCLCQPCRFQRVRRSFWNSVNARCQNDDPVFTRKAESPHMSEMIGEYSTLSCSGDKSQYNWSSL

SEQ ID NO: 1010794 - protein, 258 aa, Homo sapiens
ARKANCLEKLGERREAARTALADPAQTAATIHQRSGVPNANSTQSRCCWTVVEPRLAATEHVDIQNFSSKPGVNGSGSSVPLVAELSSLEALRAMGSLALMNRASRTLRGWPVLIHAVTPWRTARSSVDNEDSGRELRELSDWKCVYTYMPGIATACHGPDEGLVTKPDKVAKPLLRGPTDAGGLCDTVEEVDDMMIMGKKADPKWSVTYVQSLYNHLDATNCACAARMFSLPARIGQRSGKLPPPLSGHRLLPVVRP

SEQ ID NO: 1010795 - protein, 102 aa, Homo sapiens
EPVNARNLPPTGWSQRDIQGARTPTRWPARATRGRSIPWVSQHGGGLPRPQRSPSQLPETGEKQPIAVTCYPKDRFGAHRKLSEPLASYVTSLHLATMMEPK

SEQ ID NO: 1010796 - protein, 147 aa, Homo sapiens
MKNQNRSRMPWGKCKISRFLFVCSQHYNEGTVMKFQKITGDARIPLRIVDCLYPGAPRCRTSTTGFRNIPSNNVGVPATEQRQESFEGFIARMCSPVSQMRASGTGSQRKEEEWSRNSRSSSENKTKTGDIPTDTLISNSLERTCIL

SEQ ID NO: 1010797 - protein, 271 aa, Homo sapiens
GPFEGPGPEAGTEDAAATSQSDNATEKNAGPQGDISQRPESYEETRQRQTATETPPRPTTTAPAGGHKARSQQPGFPQMKNEETVRTDGNQCPHSITRLSGYSTYDDRQLGQPVLPSRDVTRPSGSQGTGGPYLPSGGTRPIGHPMLLQPGSAVLVAHQRHEQDHVLQKVQRVLEQRKGPQSPAHAPEHILGDCVLSYRAHTSPFLPDRSCFCCNGAYGLTHLLGENLAPEGSVQKGYCPLGLSWGKGSSGAVEDLVQKVGLFFPKYFSAG

SEQ ID NO: 1010798 - protein, 257 aa, Homo sapiens
IQWQRGATGRRSWAPGLGRYAPMAWSWTIVFLDADIGGRAQYHTCPRDAVATSREVARSPATAAEAREGSSATWGSVNVAFKVTPVCDCVPAPVGDKKLMRDLLLFHERTRIASYKQPAGRQGAAPTLPTAEATLQKVTGGEQAQPPGDQEPEAVLAMLRSLDLEGMRSTLAESSDHVEKSPPVPPAGHAGHTGGFHAGGNEARQRTEQKPESVHWGVRTKGGSTMSFLWDTASHQGSSPDPVDASGEAKDKERSKV

SEQ ID NO: 1010799 - protein, 174 aa, Homo sapiens
SCGSVPPLYARLSRGETTYPAVPTVWRHTRLAINGDPMPTVTVSSLLNLAKATGVSHTRPPFQTVSLGENSHNSRASLRKSKPVPARGAFSRKSQTALQVLDTKAVQGLLATSATLARSSPSTTALDDLMRHNAQYYSMKIASTHSDCNMTWCPGAKLWRTGQSLPSATSSMED

SEQ ID NO: 1010800 - protein, 102 aa, Homo sapiens
MGVCMVLCSYASAPGVAMRWVMHCFKLPRGQDCPTDDPSYSTSRTPPACQPPLVLPPYLRSCGAHGSITTATRPHMSLGLTGSSHGPASCLAKARGLGWERL

SEQ ID NO: 1010801 - protein, 102 aa, Homo sapiens
IDVFHRLVAESEGEAFIELVQIGVWGSWLHGINAAEKQNRVSVPDACQASIVVASRVTYVKSDEQAPLTRTVTPHIVTPRHFNGTERVLESLCSKAEAICNT

SEQ ID NO: 1010802 - protein, 241 aa, Homo sapiens
MRVSTCVDSMISSIASPCADVAHMVVYVLYGCARSLGLSCMDGRTVIDMSNQGVLVSHGALNVARTPVRRYLPIELTFVLRMNLSCNVSPNIEDITRLLALAILSGTHFDKDGWSLWYLTMYRFPEEAHSDLCMSGNLITGMFHALDKLRNECLRQCHPVSEPDNSRSISGVLGHSEARSIALSAEIQSWQVDYESYTCAETGSWQRGDPDAGFESTFPGRGPSSMGAKAFNQGKILIVNI

SEQ ID NO: 1010803 - protein, 484 aa, Homo sapiens
RPVVGGSGLRACVRRRVRLLVCAPIAVLLVVRRFSCVCVLLLFVSLRCCSICLCLLAFAVRFSRLVSRRPRCSCVSGCCAAPLLLGSPVFPSVVRCSCLRYLPRVFVALALAVPGVVSAWRLAVLVVRLVFLTFFRVCGGASRSRGPSLALLRALVCVLISVPTVAGASRGSLLIAVLVSWSFVFALFVLPPPFSFLLLWPRSVRSSMSLCPVLFWPPCTLVLYCVSSHLFVGSSVAPSYGSSLLLSLCVPFVLVWVYSIALGPSCYFDCSPNCLDFYSRGSCLVPRSFWVVICRRSLLGGVPVVPAVFHCVCSATPAPCFLLLVVHVIIMDRPRDASALSFLGRCWTNSQYSRGPPHVYGTLNVDRAFWACRGVCSNRSTGALPSGRYRSGWFCIAACKFPDRALGTDVLPCWLLPHRCPREESSPDRDPSAIWHCVITDQLWDCIPCRNLPAVRQGGPLLSHICCILGLRDPDQMDLQGAGH

SEQ ID NO: 1010804 - protein, 285 aa, Homo sapiens
LFFLLCLFSCLPSVSYFLCLFFVSPSFSLCHCTRSGSVGVVCPPLSFLVLWTLLLFVSSLVSLCNCVCFVSCSLLYVLSPLGVSPVGLFWLLVTVLVSFFLVICLCPPPRCFRVSVFVVFLSPVSLVPSVPASFPPLVLAYDLYTVSLIPVDAALVLWFLVLFFVLSSRSVVLWLPVVVLRVALSLAFVRAAACRFRPGLHVNVSLAVRLWSGIGLKAHHSVMKISGIVSDGSGSLVVAISMPDYMSCMHGLNGPSIPRCGDSSGCSLLCIVELREDFQQWSEEK

SEQ ID NO: 1010805 - protein, 265 aa, Homo sapiens
LFPAWLIAVFRDSCIAVGLGGRLLPVSAAGLPSAFVGGSYPRLLGHWAGALFVDIVTLADCLSSVDCLLRYGVGCLYVPTCYVLLCVFSEPLGVVGFVRHCRPCDTFCSIVFMVVVWCPVMCAVDMVTGVVLFAKFVLSCFLSVTFFPNFSDSCTYSTALQHLSTCTWRYTTGSVPCVGSTENEGLEVSWASLICVHCVRTVRRMSSSVLAASEPLRPMCCADAGVILRVLDRIGGLLSASTSDEHATSTCTGQQEEAHMFAHEG

SEQ ID NO: 1010806 - protein, 111 aa, Homo sapiens
MVSPGCYLRNIVRNCSPSIALVIYRTKVFVLFGLSTADSDGTYMSCTECSVKCIVFIQIIMSRYLNSETAMTPGAWHYRQVHESSIRNLQWPSYRPYLKSLSRRLLRCLPN

SEQ ID NO: 1010807 - protein, 148 aa, Homo sapiens
  misc_feature (122)..(122): Xaa can be any naturally occurring amino acid
  misc_feature (126)..(126): Xaa can be any naturally occurring amino acid
RAPAPARHLAPRPPKSPGHPSPIHRAGCASPGTFSAPEPPRTLQGPAVVARPPPPAVVWGGPPVSGLQLRRIPTRTGALTRRRHCRRRRRLRCTRRPRRTAREPGSAVVAPRPTGFSPHSSXGAIXHSTLTANRSRLLLSLIITASVP

SEQ ID NO: 1010808 - protein, 133 aa, Homo sapiens
PGRAIYAPRPPKYPGHPSPIPQGWGAASPWNCFLCYREPPLNSPVAQLVRGSAQYAHAVCVTVPASSHVQYQTFADDAQTSDHYVPSHIQSQGLTANYVWTATVRTAHITVHTTTDTDTHWLRQPVHSNPLLP

SEQ ID NO: 1010809 - protein, 243 aa, Homo sapiens
RVEKRFKIQPEEVVRTEVKGPMQPSGGDPSHHPTPKLKTKSYRRESILSSSPNAGLQSGPSRMLLVSAREPGHCFHAESVKRVFDKDKSRNARYERGTAFRTTWSPSSGLKWPVKPFQLKEEELGARQSASLQWGLPWQQVRMGPPVSAPPPIRPLPGRLGHPSASPPPSLSPVGQPACKHGGHLATDRQEELSCRTAMQSLSGGAGGLALSLGVISLSPLLYPYHLLEPGRLWRRGKILASG

SEQ ID NO: 1010810 - protein, 109 aa, Homo sapiens
GPAGHCPMVFRISPGGVPLGEKCVSMQGAPLEFLTEFTLLGFVFRATPFAYTLFGTSPPPTFYDTKLLIYRWLSLLYYKGYPPLQYFLLAPQICLKYWVSPWGELTRGT

SEQ ID NO: 1010811 - protein, 317 aa, Homo sapiens
  misc_feature (229)..(229): Xaa can be any naturally occurring amino acid
GTFHIVYAVVRDQLVPATLGLKPTCSGALPKLKANALTYRELLGLTADCTDVHQEGTLGSPYIGSYGEKLKPELMGLIRQQRLAPSSVEGIDSSRKITQADGDQDKLSVHAALSTLTTTLLLVTETMVREGAARPRPYPGRVLRLSKLPSSAVQVSGTSLTRLSDSLLHSHGKKGIREAEQGTFYELAIHQSAMTVGRRKRTSNFIAPLTSGEFIPVDRLGSTCTLVWXSAHEGSRADTVVTWSSVSDHNGDPSCDLLESGERAHPPSRRTPCAPTLSTNFNFCYDCSIAGLDSVAGHGLQLRPLQQSMKLRRGGGV

SEQ ID NO: 1010812 - protein, 72 aa, Homo sapiens
  misc_feature (58)..(58): Xaa can be any naturally occurring amino acid
VDTVDVLPGPVGPRQRVLCNIEADTYWCMSKLLDGISGMKKEKRRSLVVRLENWYTFXIPTLRPGVPRTYRR

SEQ ID NO: 1010813 - protein, 254 aa, Homo sapiens
SLEKHKPHSHENCMAAEASIGGRRPDEESGFPGMRGTYKCGEPPHKLLRPLGTVLLHTLSSQRAIHSCDTAASYLRVVEELSRTIDLKLNIHLAPGSPGHQGQPLDAMLATRAQAYHSSVVKHIETILASPDPALSTQEAGVTSSTSLPVPNMKEGERDATFGLSLELIGQWLSLTEWVQVWEGGTRGRKGASTHVRESACGLARQPQCHLTFLVTSNISSPWMSPVPPTSALHGHLSATRRQPSLLIRQGDAA

SEQ ID NO: 1010814 - protein, 289 aa, Homo sapiens
  misc_feature (1)..(1): Xaa can be any naturally occurring amino acid
XWELGKGIISVVNVPFWVGKFLTWIAPEVSSCLNPPVYWMNPYVTSQEQVGRNPEECPTIERCSNPSGLYPKGGRAVASWVGARRRVGHGMLVRCLVSPFNPQDVKPTFLDASQTAVIATLGSHLCRNDAFHASLSMSCLDQSRKPTDKIMMRASPRPRGVPSEDMIRYPHQLLQCTPWPPGLHGTQLAALSGMWTVNDLDGFLGVGSPKQTKLSHRTPLWTGGSVTRLRKGEYAGGPEVGIYHGTLDLPCVWTFCCWIDMMNTLDPITQIIVPVQQQQSGWSMEVHES

SEQ ID NO: 1010815 - protein, 228 aa, Homo sapiens
MQAAPLTATADEPRRFTEVVCLQANLESAGLRATGSPSMDLHGSDYVKGTVVQVMECRWPMAEPSTILHTLNGCPTWEQGQDRGIPPRITHSSGTAAQTRTGCPVKLYLALVVITRMTQERPRKESFKRHGQPARSLQEKSVAPPSDKGGEVSSGCPAALMDVEDEFDNGKRSSCRQSHQCSSRRQHRKPIDLSVSKGHIKTLLYGSRFRCFNEEWKLQSFSFSNTAS

SEQ ID NO: 1010816 - protein, 194 aa, Homo sapiens
RRNWPQSGANLIRFRTESLPGPFAPMRAHKHPVSSLQVCVGDTRESCQPRGGTSVFGRPDANRLHSPTADSATHVEPRTKAYPIPGRLSVRSTYVHHSHVHGGLESHKCRKSRGCANPLGMPQSEPLGSHLKLALAVCSCSQGAAFQRKSLVSLGHRAIAQHTECFLFLSQCTSYLRVYVRGRECVSCVTPKAD

SEQ ID NO: 1010817 - protein, 110 aa, Homo sapiens
GENAPHKGGKNHGNPNKALTKSHNASIERTFKDHVHPNNYGMGAIQERGNPDDHKIEEYSSSIYTAGNHREEEHDAKAQDGHGAEGGIDRAPYSAVNRYVRVVRQDKKWE

SEQ ID NO: 1010818 - protein, 106 aa, Homo sapiens
WERRNLRYLQDRESKGPGDPMGLTASLFGASNGASRCPSHCCVHLLGTVEIPGDKVLIQFGCTEIGSVDGERGFLILSRCTCAAPIQDRPYVLLVKVTPSIPVLHT

SEQ ID NO: 1010819 - protein, 208 aa, Homo sapiens
GEYNPEVFDYTYQFSNDIRSSKEKELVKKQLKKHLSGEEHRRYLHAYCFSVMEQPRNRHSRNRKQQQELHLALKLRTSGSGPAGPSADTVRGKESEQRQLGTSCTKLQGRSKLQQEILENFIESKEADEMTGKVQEIIVPLTQESNKELSSALPLPQGDMDAVTDQSLVHGMVSSSKGQGSQLPVNRAIAYRDRLEGSVDYPSGLQQE

SEQ ID NO: 1010820 - protein, 185 aa, Homo sapiens
  misc_feature (8)..(8): Xaa can be any naturally occurring amino acid
MAQKYCTXMVFVTLWPFLWGPILFAFADVLPFGRPAPLGPIKFRSDQYPVGALSNSASWHLALPSIGDFPSTSQAVHGGPFVEAPSPAAALVPPPVFPFRRFACRPPYYPGLGSPLPGNGVQLLVPCFRGPSTPGSFSRPHVNAQAIAHGNAATWTRCAKRVDSNPNSVSDRGDWAAATDVSYGA

SEQ ID NO: 1010821 - protein, 131 aa, Homo sapiens
MLHFTCPVKIRIHLSPGVPNLCKSRYLHRSFREFGSLVSTSRFPQPQQHNNAYQLTRFSVPRSQGLSDSYIPPYRTRYTALAQTRLIRSVKLTRDNLTFGGYLVLLIFKSQKYTVFTNTDPKPRNSFLKIL

SEQ ID NO: 1010822 - protein, 67 aa, Homo sapiens
  misc_feature (56)..(56): Xaa can be any naturally occurring amino acid
SRIEIERKQDSSSSTDSWKMAPSNSQYCNNDRVRIRTITRIDILVVNCPRGDVLAXVIKSALPDLNR

SEQ ID NO: 1010823 - protein, 270 aa, Homo sapiens
MDRTSGPGARMVRLMASSVRRSPSYEGYPLPSITEGMDYAGSDLTAYLLGLAEQSRGTNSTQDQMGIVEDIKEEMLAFRWPWIPLRRRKSLSVMHTIRYVLPDGKGDYSCAQEQVPPTSEMFFKPSAHQQSMQLGLHTQTSVRALTSETSPSNWDLMGNIHALLGAALIAQVAFRYPSAEGAKQHVSPSDTHAGKRAALKETCVRVERWLHPGLTLRVSNVIVGHTAVEYEEHRGLSFLYQKVLLNGDEDGHCTWQVPTLRQGDTLRDTG

SEQ ID NO: 1010824 - protein, 246 aa, Homo sapiens
MRQTQQIGPGFLLCPFYAFLAWYEEVVQNLACSLDFANDPLVTICVPLCPALVVECKFSMPFYVWLVLFVTMSFALYYLERVPVLTRLDHRQIVERVNLVCHDRKHVLAWRSSIGNSLSVSTAEGANEEHMPSMVMWPSQSTVATLTVCPLMSLWRPGSQQRGLSLSLLASMMNAEWAITYAGYTLLFTSLSANGNPWAQRRRSLPSGPRLTLSLVSTGAIRTTLTQGSMILFESSAQPRRYKSHV

SEQ ID NO: 1010825 - protein, 424 aa, Homo sapiens
QPLTRVVVSTPYTPYTHTSFTRRLHMSVYDDGLYSAGATKLLMFAGCSPHRQCTDPLARRAILNIRREHVVKSASGYDPAHVVCPHSTHGNKTAWQARALRESQKPPEEVFVPQRHLAPLGLLVVNLSIACTGVHKSRLRVVPNLCSQPRPKCGAHIDLLPRAIIVFDYGHCYPPRFVTHKLRDHDLSALSRYYRPVVGKLLSALLRVGALVGVFSTNTEQATLLSGLRQEAYFKHLLFALVSSCWANVGGRALNPPGIFSSNMPGSPYMCTPNRCSYSGACCFAAQIFGLSPPLLGPFPFAEIILQAGYYYFRGHTKSFPKFAPNGTSPAVVRRSSVPLLFPPTGGTFLLVTHRYGGNDNGGNANEIVGVPTPPLALNPLWGNPLQGPGNKSSQRATRAHPLVGHLYGGNKVRLRVDISRRYI

SEQ ID NO: 1010826 - protein, 218 aa, Homo sapiens
MRDVIGKRLNHKSQNHMSEANKLCTQIVGSESETEEHRNGDQWSYCPVAELYWRSSSHTIALPIAPAGLWPSPRSTGYSTWPPETVLNIGNMRSSFLGIPEQALSLLHMAIEPMLWLDGAILDKGRSHVLEWPSARWLQQLPNDQPKKAEALEAAIENLYMKPRSYFAKGDCKERIRERRLLPRPDSTIPGEDSRRGTGVRCSSGSCHQEHALLMGYP

SEQ ID NO: 1010827 - protein, 218 aa, Homo sapiens
TALRLRDLVLECLDCQETAEQLRLGYMFGFLALPSSWPFDFATVKRVQRKTVEERIRLGKYEYAKDSSIRWVPRSPLPMGQPFLSVSPCTGTSSSEGRSRPPPAAAVGSSTSPSTKPQGTDRMLGTACYHNASGNACVTFSDRAQIAPIPTVLRRPVGTRNRRDKDRCGPAKGYQTATTKPSHIQMPRGPGNWLVTAWTRAPRGGRGTAQRPSRHASF

SEQ ID NO: 1010828 - protein, 78 aa, Homo sapiens
GITMLNDAQTFVRNGFLYESTWRLNLKGVKFLIFVKILYELEEFDRNLLTLSGYENGAMTTKCRLVKLTCFINVGFEI

SEQ ID NO: 1010829 - protein, 376 aa, Homo sapiens
KRRTVTPGRDHGPVLETPIKDGISLPDSMSQYGKKCWREGVVLLHVVQEAQSVRGSAWRAVEVRVMVGWEHAGDMVVSGLVGEGSDGSSALADCVSVRAGYGESCPPGRRLPFLLTTTERKPLYWPVSGTARPGWGPNLRTLALPGVHGGGTSLTGSRREWCTRRPHRKGVWVRPIGVKKLRICSLPGQDGAAEVSPDGVSCTKRYGGPDEPGSLPWMGAPLGTMTCGCHECARESVLLPEACKGQASQRGTSAQGTPYVNTLLGLPYHDFTRVQTEDLRVFRTLGVASRIPSRILEGPGPGSHLATASVGWGGGRDFDGRFLGEPLAIVLHPYATYGCTGAFGGERSGGPIQGLVRAWYSGRSPYYILDRPRVGA

SEQ ID NO: 1010830 - protein, 143 aa, Homo sapiens
GSDPRWWFQEPKAVFREGIPGAGLFIPPGGGQFREVQWLFALLRRLFLEMSSTSSTIKSGSFRQLGTYLVDVVSPGTAVGNTWTKNDLPDTPVNLTDDWDYQAPGAGHVKFAIMFANLWSVPDVGMESGVGASTLVDWVTRQT

SEQ ID NO: 1010831 - protein, 169 aa, Homo sapiens
VGGRRLQRGVSWGRCEVCEAEPGTCALGALILNGDAPEVALGSPVAAAAIPWEPGGWVPCDGYLVYGLSHVAPGAPPCVARCLQRDVELLCELRAGSVRQAVISPCNVFPLGAARLAKLVKPVRPCQAWHAVPHPAGGLATTCRPLAQALAGQWEAPIVFVGLDTFFDP

SEQ ID NO: 1010832 - protein, 131 aa, Homo sapiens
MGHRALLCYTLLPFPHSGGPEVMGKQAGQYSFVAEELNIYIQYVGSSFGQGPACELVWVHRGSTASCPLLLLVVTPLLSAHVILPFSEPTQVLIVTEDRKVSNGGQCIDLSCSPVHTADQRERLSAEEAPC

SEQ ID NO: 1010833 - protein, 189 aa, Homo sapiens
MQRKLLGAGPIGLQEAHSRTNWRETRCVGILKEIRGLQRYKRWWKGEKKHLAYLTYVKNGGSAMDNKLLTNQDKTFTEDYHPIETQISKKEVQAMYCVQQIETKTARSPPRRKASKKGTPPRSPCNLVQETLFHDPWKLLIATIVLNRTSGKMASTCAFGSFNGEVSIQLRLASNSTSTAQKTVVTNCL

SEQ ID NO: 1010834 - protein, 163 aa, Homo sapiens
EGCLWKKGAALDGGPCRVNTGTGQPGGEPGRLTGQAATTCWLQNERQSLASPGNAGGTPQGFVKALAAPAPKDYHPSPRRRHLGDPSAFPTGGREVDIVEDSRDKAPPTVRLTPDSGGRERPTPGPKPASQLYPAVDLGPFHPWKIVTADHWTQDLDSKQIPT

SEQ ID NO: 1010835 - protein, 59 aa, Homo sapiens
GRRPTPTRDPRKSSTVLTDDNTYSRGACLREMRWDPGVYSVACGAWMERHAIRGPLRIQ

SEQ ID NO: 1010836 - protein, 110 aa, Homo sapiens
LTCVLRVRLARRGVAWAGACELSIAGRAEQARPLRRVYHLSRRETSGETKRCCPVLRVVTTTCTYGMSTFAHNKTKGKPLYAEPKNKQGNGIYFTRTTNAWSSMDFYLPK

SEQ ID NO: 1010837 - protein, 233 aa, Homo sapiens
GRKRTRAKTQDIRRPKGGSGESSCSRAEGKHRLQEESPQPPITSIPSDSMPRKRHGADKSNTETRRQLGQQKAYCPDDTRRSGRVDSPETVPTSWRKGPTEGEQQGAVGVARKSPREWTYAGLPTDYKCSDQLVRDTRPYLQEPEIVGRLSWTLDEDKADSQAGRTNCSVNTLPPSFSFHCPPRPAGTGRPPTPPIKAHSSPHVPRRPPRRAQQGRRSVGSLRVHGQDSVPPR

SEQ ID NO: 1010838 - protein, 123 aa, Homo sapiens
MHDATTATGTAKRRRSVRGRWRSRNRWEQAETRLQTIGASRRLRSPLSLAAAARRQLIQRRSVPAQRPDILRRRSVRRLRIQRCTMDDGAKVVATDPRGPQGSRLFLLLRGPTLSTPDPTVLP

SEQ ID NO: 1010839 - protein, 99 aa, Homo sapiens
GRIRLIRETWETGGSVEEDDRYTCCVRAMLCVCKFVFVSIQDYFLALSRKFHHVLSARAIKRLGAQDRDFPLPAAWRRKRLKGIAPAEFRHSLIRGGRD

SEQ ID NO: 1010840 - protein, 156 aa, Homo sapiens
MPAPMTYRRPDTYRNHMPGQSALTCAAPRGMIRARRPGPCTLARSHPGARPPQQHYGQDRCPACPALIHENATRRVTSVFLHQPAQEETKRAHAMSIALSISSLVFKEAVWYPGGIDIAFVEFETMRVQDRGSIAMPCRAFKITQNNAMKISFAKK

SEQ ID NO: 1010841 - protein, 104 aa, Homo sapiens
  misc_feature (11)..(11): Xaa can be any naturally occurring amino acid
MPEERELLGNXCVAISLDHLYAVGRYCDVTYPVERDVPTRCGAPEGWRERLETRIVDSAVMPLDSCVGGHGLEMYLAFLSGSSPEGGVTGAAPKSQQKTLLDGM

SEQ ID NO: 1010842 - protein, 235 aa, Homo sapiens
FLFQKGQQRGPQRRTLAERLEQGGATVKRNVKRGVREDSRKPSSGEADLLDATVNKALAERGPHAHEFPNGERIVKKGGRNTASACAQDKERSFSSGLAKAHEAPPPPQSPKWEEQQTSVLAPWWGYNLPGDPARRRNTLLVMFIQPLGSPHCKKVIPHFTATADAFKDDRKIACAAVDCVKDKNQDLCQQEAVKGYHQLSNYYASYGKFAEKYDSDRTELGSTNNIRALTGGRP

SEQ ID NO: 1010843 - protein, 41 aa, Homo sapiens
MGSWVHNLCIICTFMYLGAGSSSGLQVEPAYRLKIPDGDAW

SEQ ID NO: 1010844 - protein, 66 aa, Homo sapiens
AHHEFSCEGPMLALELDPALTSPAELTWESLKGHRATVSQGKKGRACRGDDHDLEMATRNRDHVTR

SEQ ID NO: 1010845 - protein, 117 aa, Homo sapiens
MESGPFQREYTHAQFGKQLAVMLHAEGLGSGMSVLSMRDVWRWTLPHQLTRNALVRATNMALYSLLSCHHPCVSPSFVSQRLPHSPYMLGVIRSIKATASLIHCPSLLSSVEAEHRQ

SEQ ID NO: 1010846 - protein, 275 aa, Homo sapiens
LDPRRRWTRSVSWSWGCAGSGAHPLPLPLLLPHTHMCIRSCKDECLTKTVDPQRRHRPHQAPARQRSRRRIPTRQTLPHTRRPTNKTTPQQPHTHPHPQHTHATHTPPTPRKPEGNDSTHNPASKHRRIHQSHARHDAHASAPTDERRSTTRIRSVATPRNVTRKRKPYTPTPPIRRRHNPTQTIHYAHEENGKKHEPNGRKTDRPDTRAYRRSERRRRLVAEAQEREKQGPDGRLGLRPSATITTRTAPQRKTARNNSNKTAYTTTETRLPKLH

SEQ ID NO: 1010847 - protein, 67 aa, Homo sapiens
MPLQPMGEEMGKWSQPCTLQGKAGPATVGLGTISNHQRGEAEAKALARLQPQALEGLVRPTYVPGPL

SEQ ID NO: 1010848 - protein, 114 aa, Homo sapiens
  misc_feature (50)..(50): Xaa can be any naturally occurring amino acid
DLSPRNCSIRDSASVSAADGETRAAAGVITKTSSTVIPARCQDALSLHVXRKLHEMTEVMADCSGWRAEHVRPCRRLAMGRATHSPSRRLSVGSRHIPHLIPGCTYNPEYRIAD

SEQ ID NO: 1010849 - protein, 76 aa, Homo sapiens
ERMALTLCIRFFRGPLAGNPGALFVTETLGTILLELMVTITLLPWKMQTSALVVAISFLRSCGTAGQTVYPLRGDC

SEQ ID NO: 1010850 - protein, 254 aa, Homo sapiens
DGAPDGGIEQMGLVHGALEGPTLGRGAALGAAGITCASSSSWSPSCKYLIILEARALHGLVASVHVRHRVATVQATERRAEGLYSQLLGLTASQSNLDPRTLNIHQRAPRMPSCRCGWDARRDLDSHQLSGFRASARVTGVIYTILIRGHMAAIILSEKQFRDQFTGTMNKSCDAWVFMLNQKVKTLECGDSQGEDHWHYGYRHSVLLKKRVAEEQVVECVKTRELQQQERQLAKEHCGRCKPLLALDKDKFEM

SEQ ID NO: 1010851 - protein, 83 aa, Homo sapiens
ATVSVLCTFSKVCPAILDAVCSTGSLSGPNFGSETVDISKTKFSGTAPEDDAEDARVGSLQGTGLHGRAKGIPGQRCEIDPRV

SEQ ID NO: 1010852 - protein, 262 aa, Homo sapiens
GGPGAEARPGQAQIRMLEAVCREPGLVRVHCEAARVATIRQISLELCGGSWSRSAVSRRARFVMKNSLKDCCGSGWAPRGSMTTFLILSKGETNVYFKLMRLPGGPTVTFQVKKYSLVRDVVSSTAPARECEEQACCSIISSWYSHQLWPTEWYACDRLMATYVPEICAPPIDVQRGEPLNTHQGACLLIDYGPDSQERGASGMYRQSKLCLCGAESRDERKLRPRQNVLPDMSRHAEDMREACMAHGRGAVGEARKSLTGN

SEQ ID NO: 1010853 - protein, 141 aa, Homo sapiens
MGALRPLVEAQDRQSRECKKFILGSSQSDMSIIKRNWRKPRGIGTNRVTRRFKGPGSVMPNIGYGEQLEEKQKHMLPSGFRKFLVHNVTGAVNAADVLTNSLLCLRSLTRVCSSKNRKKPSGKELPNWPSESRKPKCQAAQ

SEQ ID NO: 1010854 - protein, 226 aa, Homo sapiens
YSQDYPWHSSTDFLRDSKMSLRGRQRPSVKDVPGPVVTCDTERPGTLQRHLHEDGIANPEWLQDTAAVQTVFGVRRHQDLRETWPRCYSKVPLLTSQHQGRHLRLHPISVNRCRDICVNDLVLRDDMIPAKTLVQVAIYALGREPTFFFDPEIFDPTRWLSKDKNITLLPGTWALAWACAAVVWDRRIAELEMTIFLINMLENFTVVETPKQPAADVGHQQFNAHS

SEQ ID NO: 1010855 - protein, 172 aa, Homo sapiens
MSRTRTWAPSSRILPRRSPHGSSPTRSVILSPRSRSGSQNRSIHGAVRRTKLALTPRMRSSNSGLGLLPGPPRVSYKPHEPTPARSPPVPERPPHPFPRSIVIVLEICNQFAIPYLLILLLVLLRPFLSPPLPIWTSNRRPVTDSKLVKSNNRTRRHYPVKSLSLVATQERY

SEQ ID NO: 1010856 - protein, 251 aa, Homo sapiens
  misc_feature (130)..(130): Xaa can be any naturally occurring amino acid
MGRVPWDCAQIFCADPGSLLRMEAAKARFQDRAGRSLRQNGNGGITAEVMMGILRDKESGICMDSGGFRTTASMVSVLPQDPTAAHACTFISRTRPEPQSRSSCFKPLHTSGVRGRPRPSEVHVPPLLEXQDPCIGLLPPIPDSGRSSAYPLPWTPGSLGLMERDQDRGQQLQQKQQDLEQEGLEATTGAAGRRVGPTPLGAGQPRPGLREEGEPGLCVSFIASAGMGWTQDPWGLGVLSGGKVENNFTVM

SEQ ID NO: 1010857 - protein, 292 aa, Homo sapiens
HAGLEHPQALMQPAPDEARRTVAGDSQWSMARVPGMDGELLLGIVPFMYMSVSVIQASAPILTPVIQESRDVQRWKQRMEAGIVLSKLRSGCYCHDTGCELAARDRIGGEKVILLSASAWGSITAVTPLLSHLGGSALLVFMTFSRILMGLLQGVYFPDLTQPAVAEGAGELSGAFTYRIVGAWVPDLGRCCTVGGVAPLSWHGTGGTSIFVCLRRPHLAWVWYVYRSLLMCIQDLILALGVLGPKAGRCPWHERRGPHGDGLFPESLLSGQPLNPRSLHACSVLHPSLLRA

SEQ ID NO: 1010858 - protein, 156 aa, Homo sapiens
MKRTSKLCIYLDKSIMTLKTPFIEKYLRRQLTKSRPVILDPAEPTGRTWVVETQRVGGSWHTEAEALAELPTALSNRDGVPQMRLHGFCWSESKSDATYGVITLTYPKDGYQETKVGYIGKHMRYPHFSHRPRRIPGSIQTHKAKKEGLCPCSNRV

SEQ ID NO: 1010859 - protein, 111 aa, Homo sapiens
GPSSCYGPPLNEDLSVLAILLVGPIWALLSREVECSTCWGEVERVCTSASIWHDRKGNVVHGAAPDLERDGRHGHEMPSGNHSDETYRPEQASSQECINVLLQYGCPDECV

SEQ ID NO: 1010860 - protein, 172 aa, Homo sapiens
MRLPATRTPYYWGTARPLYVLSVNTGVCNIAEIHDARSLDSGSRRHISFRSLSHLLGLPLHWSTQLPCVETRPIGLHLRPREHRRHSEKRCKTCPKVEDESYYVVMRCLGPSMFLFSSVDTQRTSGLMTSGLHFVPPMGRMMPEGNGSEYGVQDRNSGPDSTFPSPGGLNRR

SEQ ID NO: 1010861 - protein, 283 aa, Homo sapiens
RSVADEQQRESRGNPGKPGLGVAATYDGKQYVGSPWQAPCASAARSAFFPVERIVNSNGELYHEHVLRVCPVLPWPSPRGVFYEFEGRKYCVTRLPKMLFAPCCGSCGESIIGLWSSRPVNEQVAPGLLPAASVCDVELADLGFVNECRAGNLCPDLATTVTNVPEACAKVHHAMLVATVVIGRVSPSVSGSQRLPTLTQFNWHPPVGRKLDTRMPGELERVQLYCLPVANVTKNWGSPPFVRGHCRAGQFDGPDSGQMRLELSTLAQLDAFWSVQSCDNAIL

SEQ ID NO: 1010862 - protein, 172 aa, Homo sapiens
FTGYTFTVCSMNSYPLAYTLLDLPANSSLASLTSSKRKGPVIEGFGNMAFGSASFGVFNHRATFRQEAPGLLTGRRSPELTFRTGTLARYLGVPKVSHKVACVYRPCQGPHRPPSILSHGKSTCSSCLPQPPATGCSTPGRRWSRPRMVVLALAMVPMPAAMAHPCTYMHRT

SEQ ID NO: 1010863 - protein, 375 aa, Homo sapiens
  misc_feature (123)..(123): Xaa can be any naturally occurring amino acid
SSSCAGLQCTDHGAGRLQAQWASEEMKPPATRALRGGAECEPEPQIPTQAWVLVALERGLCEALAQLRRLSPRGVTGTDLRAPNHMAADQRPKADTLALRQRVISSSCRLFFPEDPVKDLSVXPRAQVPLLPMNRGARIPFDLPISNCGRNGWAQLGNPFSVVPRPGTMTPEPACSNNQNSRVPCIDKPFVATYCARRPVQQNLAGASFSVVVTYFPLKFLGSKNAQLTVGPCRPWLRHLTPGTTRTGWVGIKINAYHGPTFELPLIWTLRVRFQFPANLWIGPRQDGGVQGWDPSSQRAYGGPLKRGGTNPSTRIMGLCQTEGETVVVRKLPRTQGSEVWQRFSDKFFGHVGKGGYNPRCWKFSKGTRIRKGGG

SEQ ID NO: 1010864 - protein, 239 aa, Homo sapiens
MIAEVHSVDADQTSSVRKPSGGFCLFRGHPSRRPSGRAPDAMVVPPQVVTRADDQLLKRRLAFQEPLDRDPQGLFRAVKERGTWLTVQPPAPRTAEEGAEAITYPGHRAVPGALLKSAQRGPVCAHTQHGGVAAPAITAMPGTSVQIKSLGSQLATEARLIGAQEGEGVGREEAKAHGGLGTLTDTRGWPPVLTVWALSPSLCSQRTTEHELTGCHGAALIGGLRPVAGRVELLIFLRS

SEQ ID NO: 1010865 - protein, 161 aa, Homo sapiens
GLDVRTLLKAVVRTLAPHSGRPCALCTGRLYARMRLCLRDKRFPGYIKLCYSRMHATDEWCHDVGKAQGERCPMPPGASRRKMTRKLAALPEALHISGTPYEDNADNSTRTRDQQPHPGSRSAHRIAPPADKVSGSPEEAGTEHAEPRLPPPPSPSGTLGI

SEQ ID NO: 1010866 - protein, 366 aa, Homo sapiens
GTFPAFGVRGPWPLLAIQVTKGFLTALRVLGYLMPGAKHWETRMGTGRVDCGSGSLILGEHEIDEMLDGTALKNGFLRKIRSGGGIVERSVTTLDGYCVKANRRSCAIRTARFESLPLRTAILGGSSQTSASSVKAEQSMWETLSQVDQFEDGTCTEKENSPEKFSPESCATDACGLWAERSSVTTIGIQHTRGTAGRMACKNDASAVHSENRSASQWRFAILEPRAMLDHVVPNMLETLTDRLMMEKKNPRPGQEHEADEGSLANSGPGLVTSRSRTRLPRSMRQETWADALSPSSRQGQRRGDNPAQSVRIRAGVESAVFQVDPPPAQQFHLKSPNPAPHPTLHTPPQSAGVRKKPYFKVVFCL

SEQ ID NO: 1010867 - protein, 102 aa, Homo sapiens
MGQPCGACAKTAREGLALLLLLFSVLVCRSAGHEPVCEPGRRAMGPSSARQQGIASALSAEAVVYASPCLPAGHGALAPLFVPCRWLPEETPLTQPAWAADH

SEQ ID NO: 1010868 - protein, 265 aa, Homo sapiens
QDAGQELLGWSGGGGMSDSEKLNLDSIIVRLLEVQGSRPGKNVTCCQRNEIRVSVPEIPGDFSEPAILLELDGTPQDLLVTYTASIDLLRLFEYGGFPPESNYLFLGDYVDRGKQSLENICLLLAYKIKYPENFFLLRGEHECASGQQIYGCYDECKRRYKSNVEKPSLTVQLPAHRGIVDEEDLLLHGGLSPVTAVYGADSADHAATVCDWTQGLLCDCCGLTLSKGRAGWGRKQTGRLFLPFGAEVVGQVPPQGTTWNLIWRR

SEQ ID NO: 1010869 - protein, 78 aa, Homo sapiens
RVPGRYPGNAPGIGSTVETFEKTKPGAKRTPWVRDLQEKSKGADEKPDNSRKVNTAFNGIQGTSLLGDHFVRWAESEF

SEQ ID NO: 1010870 - protein, 235 aa, Homo sapiens
  misc_feature (121)..(121): Xaa can be any naturally occurring amino acid
  misc_feature (136)..(136): Xaa can be any naturally occurring amino acid
MAVVRCLRVIYPVRVGSWAIKLLHACSSCPMSCSRFALLAHRAWAPGRADGTWGLSRLVAVADQKLAVLIRQIEALNTVLEHQCFASFVWACSRCVPLARMPLLQGLPRTPSRMTALDIQXEYASRTGAHCVRARXFRRPGMSTCPLRDSRAAKHSATHQSMARTLPRALVALATQSSCHGPGMSWCQWPRNLTFPSTGDACLGMCPSAAAPAVLDFPSFPYPRVAGQPWFGQGV

SEQ ID NO: 1010871 - protein, 205 aa, Homo sapiens
GTGGQRSLYGRRYTVMQEITDGPRAIKSGKDTAGGPASQSKAVLTGVPGPGQMSPPCLLSSWGPTMLGTLRVEGEWLVRARSPERREMQTVRPPSPEQASGAPVTQDGKKPVHSLSTVTGLLVSRRIPLVMGGSYSPMVNWVSLSDIPWLRAWVEGALGRRIVRSWVLVLQCCWLAYSVYATSDLSREALVATPCSCGVPTAHVV

SEQ ID NO: 1010872 - protein, 195 aa, Homo sapiens
KLLRRANSGREQVAMTACNGCRTSYIVPHGVPEKARHDPGQPGSSTKDQRLVATRPLPVPSNCPEAMISVIANPDNATIPITAEAVFKKHGVYNPNEIFGVTTLDIVRANTFVSQSCRVWIRARVNVPVIGGHAGKTSHPPESLSAPLKVDFPPGPADSTHWVGSRRAGTEVVKAETPEQALATALQWRMRGDPL

SEQ ID NO: 1010873 - protein, 182 aa, Homo sapiens
MTPQSPRHGNRVTARTQTGVTPGVDHSLVAPGKRGVDVPGRISRPRKAQGPGLRRGRPLIARVSVRVMSVETNWPVRGQLHVRVLTVEKLLHRITTHRVRAVHVLAPASCSGPLMPQAGAALLGHMPAGLGRVAQGGGRTMLLWYASLPFMPMLDCPCTSAAEGTQRPVIRRHPIVQVSVQR

SEQ ID NO: 1010874 - protein, 155 aa, Homo sapiens
MHRIRGREVFLTTGHLTGAPDPSAFRCTGARANWKYRSLEPDLQVQSVENMAVQFVMGAQATQESAQGTLEDEARYNASSDQETIRVTKPCTRQDQRAKAQSARNGKANRSKIAKPVGLTEGGPHRDVTTGAMAHALPALRPRVCDTASAFLSAR

SEQ ID NO: 1010875 - protein, 152 aa, Homo sapiens
MARVWSLMSVPHHMGSVAGGAVYLSVRTGAAGVLAKRARQPYMKAGEVVPHRHVPVQAVLVSADRPARYPSSQTPPTIYFPIRDSWNAGIMTVMSALSVVPSMAREYSKDGLVKYVKARPSSQSQLGAVAASGQNGQGMSTDLKTPDVGPHS

SEQ ID NO: 1010876 - protein, 105 aa, Homo sapiens
CVSVKYTEVPWPQKIPFLRARITAYRTLYSLIVLSSAHLCLTSLMAAYWENIFSPNVPRSQEHNTRSTPKNFAPLCMSHLGIPYTYAVVSYLCLTGQNITGTFIG

SEQ ID NO: 1010877 - protein, 233 aa, Homo sapiens
MSDLQLDCALDLMRRLLPSRSRKISVTDRLVPSLCEDLLSSVEQPLTNWQRQGDGNWISFCVIQRDGDSYRSPWRNKYDPPLAGWWPCRQRRLRKLEVEAKDAFDQYRDLYFEGGDLICLPLGSGSWLCWSDPHKEGWRWFKEDRKAAGDSIHVVEVQEKLQLGGPPITQLTSTVMLWLRTKANLALAPMNLGGGLPDRWRKDETCAVTLSPNIVNIGRWLQDHGNSNTQTYG

SEQ ID NO: 1010878 - protein, 198 aa, Homo sapiens
DLSQQVERTSSPVRTAEYDEDSPGGYFHFFSNLEPNGKLQPRLPGDSYTSSMLVRSGVVLGPWGMITMGPTCCCPVRLGLGGPIGSGPPDSSPGYTSGDLAGILTHALEVKTTVHGVLNGVAHILRHIMTEFAPDLRCCPGPPSRSSLSPASVVQAVFGRQRAIMLLEGQKVIPRRTLATGYQYSFPESGAALKEIVA

SEQ ID NO: 1010879 - protein, 288 aa, Homo sapiens
IITIAFQEKLLIPVSIRNGCFGDIEGGSFLAPTNRGSARSEEERLMLAIVCSGDVHPARVLVIGEESRDRHFPCDPLRVGTSARGAKGGEHRHASSCARTLAESRCQASSRGPPGALSLRHHARQRPDMAPPAQKGRAPVIPSPVAATDPVRSALPLPTFPSTGQPQGPKPHPLASASSRSCPAGYGSRECLVTNGEAGSQMHPGRYSLSTTTSESPCKVQWACKHESVALQGRTKMRVIRSNTAYTKRMPFVCQMRGNASQAQAATCSGSRRRKKTTFDIDLYFVYC

SEQ ID NO: 1010880 - protein, 235 aa, Homo sapiens
MKIWVETHSNERIPGMSSDREAICVTVAEGISSLCMRVNVWKRLDDNQEIDSALKKGYRQRLDCTCPRVFRKQLVVAPEEVSMEIECHNRTTREENKSYKTASEVTYSENSEIGDDPSAICVSAEPKKKKSYDAKEELDEVAIRSRVERAWQQPGCADETERESTPKEETAPMTAEEAGPQKWLQGKEVILRRRSRSDSGPEEAGWQEQLQEEENSSIKHPRKSRMQMTVLVGYG

SEQ ID NO: 1010881 - protein, 317 aa, Homo sapiens
RAYGSIGNHFPLAEGPPRGDPPALVKIRAQHPGRGPQSREPTLRTQSAGEKGTLGPREPVGLTARKRVLPVGRSFRHGVPRKARARTPGPTCFDTKCQRLVANPGPACLRPEHWPGSHDTACNANPVNSTIPITAEVYQEAWRGTDPNNSCFGRDDPGHRQSQHLCLQTLKGSGLLARVERSHRCIWLAIDWEGPSVPPSDLLSSTPIGGLSPGPADSTSLGGSMEAGTEVDQGYKPEQALATLSMAYAGDPRLSSALVDDNEWKGRCLMAMFTVLKYTGNGMYLAFCTAPLLLGKKGIEESNLGIGKRRPLVERGR

SEQ ID NO: 1010882 - protein, 249 aa, Homo sapiens
  misc_feature (63)..(63): Xaa can be any naturally occurring amino acid
MFHDLFPARSCFWRSCGPPARGASVMLSTEVFAPPTRGDTQHLFCPATFWGPLSFFRGGHTLXCGRTPRGFGAHTTRYSHEPGVYPRFPGVFFSGGVTPLWSQDLSSLRAHPLVAPSPWLAPLSRVMPQRSFLWGPQGGFFPAHRYGFLVTGGPPHGRSSFPHWADIFAAPPGFATKEWEAWSPGGANCVSGANDNTCVHTSKPWGCTAPVVHQSYNLGGKRFWVPHWAPGLYSSPVSHQSLSYNPWDT

SEQ ID NO: 1010883 - protein, 115 aa, Homo sapiens
ACLPPLPSVRFFPSHACEVLNLSQHEAHYCPVATHLSDNDAVIKCSFTWERWPSSNLVSVRSLLPEGIPVLENAMNRANPEKCACTPLQIGDFLGQDTFSGTCMPLTKPLSICRR

SEQ ID NO: 1010884 - protein, 350 aa, Homo sapiens
LSVSRRENTERDTLGWSSFRCDKTDQLRESDRVLPSAVDPRTRECRKRRTRSRQGDLPLPAMGSQGQDPPHGPILANACLIGGRCQGSASEQWRFQCTNGCSAMIIRAEHRPNPRCPGQTAYAQAPDWTKGGIGLSDRDLSGHRQMHTFLSRLAYCEVTLLTQLSLFATFRYVATQSHVCTREASREMVDVCKRRNTQAPELRQPRGRTCPYLDMVSCRDAEEVPASLSDSHRERSSGLARCSGQRMPRRRCARDGRGCPAIHEPLSTGHKPGDHVNHVERFTGEARQQHRPITYLPYRGRPNGAASGLRLGLLEAQVRHCSTCCTSIAVSQACPETQVYRKQVESKSGR

SEQ ID NO: 1010885 - protein, 137 aa, Homo sapiens
MVVVCSRGGAPPTDSGGSPPSSCWSMVVVLRPLLTPPLLCVGTAAVFCGGALPRVAPPEEKIGLSPQHGGFMAARADYFGPPQGHLCGPPPFRSLPPLLCCGVAPPPRGASSPRLLYTSRAVFFLRRIFFVPPGGFF

SEQ ID NO: 1010886 - protein, 107 aa, Homo sapiens
EAGVIAKEEIVRFGFEVLYMDSCARHRIYTLLSRNCWVRACTTTSSTMSYSVTSLAWAMCLLLDATASEGLYRFHVFEKHLYNAAAFKSPEPRLEAVCRDQAGQTCL

SEQ ID NO: 1010887 - protein, 99 aa, Homo sapiens
PNSDNCTNVTVSISSTACLEKQGHSMDKRYTSSAFSRVCLHTLQIRFTYLSNFSRRRIPYRPLRDAFGSVSHRVVLPNACDLRRSQTSICHEDVTPSRI

SEQ ID NO: 1010888 - protein, 132 aa, Homo sapiens
EGHEGDEEEERKKRLGPGGLDPVEVYESLPEELQKCFDVKDVARCLQDAISKMDPTRRKATTCSACTDSGLEGPQVKASEGQGGRGGRSWGPHYWKLFHKTDDEKDRQVVTCPSYHRHQLPGTDEPLGQKTD

SEQ ID NO: 1010889 - protein, 133 aa, Homo sapiens
MAPWSTWEPGGLGKLSSTGTYTERENTSIGARLHTQPESGASWCTATAPPRPLPPNAHSSCYVDDHGTLWEQSRTVPGVILGILSVTWDWLDRGSWHWGSGASKPVEDPGGLRQIPPSDSVLLVSDRKPRQEQ

SEQ ID NO: 1010890 - protein, 77 aa, Homo sapiens
PFLSYSFFLAFSLGVFFIRGFCLGIRILISGFFGFCLSCYGYIGTGLVSLVNTFLCLTLQGASYCPLCLLYGGHPLS

SEQ ID NO: 1010891 - protein, 148 aa, Homo sapiens
TSYHPEQTPTSWRPTVDITPLDVQDRAFPSPTLREQEVKPSKGKPTVTYPITSWAYPKTLISLMLKWKGVAPKHMRMGGYGTNPLALSPIQWFNGCTRLRCVCFFEWQAEYFSCREACPYFCFLYLHHHINVRSNGSDMSALRALDPP

SEQ ID NO: 1010892 - protein, 76 aa, Homo sapiens
SLRSVLLSSWRVFRSLFSLLSFLLSPCLVFVWSLFLFRPFLSSSSVLLFLRSLLLSLPSSSSSSVFLVFLSFCSLR

SEQ ID NO: 1010893 - protein, 298 aa, Homo sapiens
EGSGYSGGPKLERACLTGSARIRQLSPVLHGPLRGQWRPGLGSTRRGESPSNPRRKNPHSRWLFPDGVVPALKLTTLSKSEGLLLRPLLDLGTWGPHGGGTRPVGWERLGEGNCFEPPCTASNWEDGDRGLSAVVAGEALVTRMGFRRIHAAAVLLEYGVPIPEPQKRRGGREVARLSPGQPQHGLRDSPRSLAAPAHRWGSWIGIAIMTQCRPGGAEPPSLRRGPAPPGRQPLLTPVLSLQWTCSAMVGFTQMTIWAKGKHRSYLKEFRDYPPMRCQYHLLLLAYLLGYLNPYILGD

SEQ ID NO: 1010894 - protein, 227 aa, Homo sapiens
GSPHCADGGSRNSNDGPSISGGIIHVGPTLRALYCTSQTLFRYKEPRCSLHWVSYRTTLLDEYTQTPHQEICHFLSYGQQLPSRGTMRDVLTLTLKQGASRLSSIEQEVVRPDSGACQMQLRVSRWKHDHTASNSGHVALRSTYLGYLSVPPKIPCAIQESMSHQKHSRGAMVALTLKLMYAKATEIELMESCAPQQGAPRDHLYYGITVSSWNTNSSVAYWSARIY

SEQ ID NO: 1010895 - protein, 238 aa, Homo sapiens
FFCYFFLLSVVVFSVVSPSLCLALPGLPCVFLSSSFLCLALDSPLIWRLFAWLLASSGFVLYFFFSRLAPSAIIDPLRWPVGSSVFCPRRPVLTPAAPLRPPYTPGLTTDTVPAGPDMTDGRPRRPRPPDVDPELLRYLPGTEFLDGKRGLRRVWARPAPASAVPADTRVWAAEPARPEGVLGALTACETPRDPRRPRCLHAASCQPEHCPDPVHHGTQKCPPPSRHKDCSPPDVRAT

SEQ ID NO: 1010896 - protein, 93 aa, Homo sapiens
EGDDIIIVACEGSRISCHVTLCCLLVEDSTVRSEQREYLHLPLTSSLSTAACFPLQLPACEQKKSTVRAPSQHNTCCRRSGVQSLRDFGVKIL

SEQ ID NO: 1010897 - protein, 174 aa, Homo sapiens
GIMGELRGHHLVLVGGCFSVGGENTSVIGARTTPLGWGPPPRFVSLRFYSHPTNCCATVTVTTKVVSPLGGPPRRFSKTTRGAPFSRLYHKIFEKNLGLLPRGREEEKIGPAACYCVDNTTSGRQSCLLCGGVGPPHFWAPTTEELCVWRRFIKTHLGAPLTTTTVVLVFTSGE

SEQ ID NO: 1010898 - protein, 291 aa, Homo sapiens
  misc_feature (245)..(245): Xaa can be any naturally occurring amino acid
  misc_feature (254)..(254): Xaa can be any naturally occurring amino acid
GASPTGPSEPQLQEEKLIGLMGHSQTSSSNSANGELLPVVGDPAAVAGGRIKVPNDSDNALLRATILWEQCPAEPSTLIDSHILKLEQRVMAPPRCTIKPSGTTISVTASVTIAMVPPDQPEVQHESSMTYGQPVLSAQDGSTGGRTMRTQLDLRRFRIYSNHFCTGVAGSDPITGPSEDLLQIGVMPMLNERTWRGVQIPLPEGNQTLQCIEVGDETIAGFLTDRGVICRPFDQMGSTTSVISXKNLAMHDVXGVHCPHTVHSSCNEPSIPKLAAVIQDPNPSQPLFSTL

SEQ ID NO: 1010899 - protein, 83 aa, Homo sapiens
MPSCCVTPISVLGSDKPKSFLMPPLLHTREIARDSSCDFVTTLIPFKQQRRNYCFIGLYSNLVMYWPEINVVQNVKCFYLNIR

SEQ ID NO: 1010900 - protein, 150 aa, Homo sapiens
MGAIWGASQSSKSCPRGCPGVHALEAREPSGNGISARRLLQLPSWRTNMKKIILSTAKLFLGGPWLRNPRALEDTDLSRLYTAHIPDADFDRQSLTEEDFTAITSLKGILLRKKVAWRYLHRDLYVPLTAGVMAADESVGAMKRLRNHVQ

SEQ ID NO: 1010901 - protein, 164 aa, Homo sapiens
MANCLPCCFSPFHRIPISFPGSSYDNPCSIPPGTFGVPNQDYEFQAKKLAHTGHHLYPPAPLPCRLLHRNARLRGRLTRALLLLVRCGWTSLIRGWSVKSEFVFSEGSDGISDGELRWAGICELEDIVASKGIRPWAPICLWSLEADVRGPGQPRSTDGSGGPG

SEQ ID NO: 1010902 - protein, 174 aa, Homo sapiens
LSFPPLGVFFSPPHIFGGETLWSKRGAPPQYFFLSPHYFILPQGCPTKGTERYSSLREEIIRAGYNCVSPPRRSPSVGVNTRPSLLARHTGAFSLRAPHPPPLGGAQTSAHTGAPQYRVYTHTPQFVCSREYGTPRWREPSACVLATALFWCSKCLVNKGYMCSSLSLLERTLL

SEQ ID NO: 1010903 - protein, 210 aa, Homo sapiens
MTFISMVLPYESSRVTGPNVCQQARTSALASHYFDVILSSNTQHGKYCGYTVLLMTTAGSLNFSSGIRSQAARHDIALPILAAFGSISTRPSPLGGVTACARAIETHVLYSAQQHSVDATMRRELVMATAWWLWLLGEHVVARCSEVRQASALPGIDLYTICDSCADTCHVFQHRRPDLYGNLGHSLSIRRDFCRVIDSCHAPHPHTVPL

SEQ ID NO: 1010904 - protein, 66 aa, Homo sapiens
FPMRGLQTLWTNPEEETSVSYCVRKYGEDCVQEDYVRHSYVSVGTGNRNVSMPSAHLCLRKHGILN

SEQ ID NO: 1010905 - protein, 80 aa, Homo sapiens
GKVAALQVRGRRGGSSGGRCLRRGGRGAGVLVRRTHTPAAAPLRKKTPLLRDEVCDGGRHRVVRRKEIKLAAGETPLGGY

SEQ ID NO: 1010906 - protein, 271 aa, Homo sapiens
SVSRFLCLVLHLGCVFVLTYSWGVIYTVFGLVLGFPLCPVSVLDGFGLVTGLLDFSSCGQHLAHSPTRVSCRFPCISFLRIQLILVPSGVSLTQLSTPFNFGSQCSIGFQPASLVEYLSSCLIEQSSYEVLFLAGVDFGPLQVSRWSTQDVQHITRYLSSLVLCLAVLDLSFTGLSDELLHLLAAQPVGLLAPPSTQLLLNGNRLTRATARMLTDAIKDTYQDSTALAWVDLGNNVDVASVPQPLLVGLRRLLSQQHLHSPAIYEGLDLRA

SEQ ID NO: 1010907 - protein, 110 aa, Homo sapiens
CLPRVWALPDASQVAPAISPHPPVLPSAAAPMARQYANTYGLVSVLIRSYSLSTRETPHTSRPNLGSIDSAYSLFILHNKTGQLSALSRQSAHACNISMNKLLSREQNLF

SEQ ID NO: 1010908 - protein, 96 aa, Homo sapiens
RKRNEDGYQSCLMQYLKDTPSSKKQFFGGSWDEYDWYEDYNVTSPRPLRGPRSGLVGTAGCQKSEMSCTGYLCFWLAFVCCSCYFHLVSRAVRRQA

SEQ ID NO: 1010909 - protein, 93 aa, Homo sapiens
MLILTGGHTTHGATIVVVERPPRRGVVWVTTCWGATPAAQEFSRCRHCGAHTRAPVVEPLGWGAPPPRLPSFWAPFWLFPPPPPPFYYPGALV

SEQ ID NO: 1010910 - protein, 116 aa, Homo sapiens
LDTLVEFPIRDLDFSEMCIQPQNELISGSLYKYDLIHWYANMGEHARWTLHNILPAKGTVALSRSLAIDDNSVSSCSMRIQTGVQVSNSRRDLRLTAERLVSRQLVSATAELPGHD

SEQ ID NO: 1010911 - protein, 183 aa, Homo sapiens
GGVFFSPPPVCPLSLWFVSSLARARARARARPHSPPPPSLTQDALSLSVRHALTLTPHPTHAVCATHSARHTPRSAVLSLFCFTPPLSCPSLWGPPPSGLCFSPALFFVAPPPSKVFPFPPPARAHHVGLPSPTSLLREPSFLCPPPPPPPLFFLFVPPAAADEEGPPPFFFFPGKKTPQEGH

SEQ ID NO: 1010912 - protein, 236 aa, Homo sapiens
MVSHNGPISSVSAVLDNLRAKEEFGAMRRAVHASLDHGLPARCSPLMTGRVFNDGWASSSRRFCGYKDRDDFPVSVGREQGRSGVTAHRSPESEAIMPFRRRPTTLAHTVVRPRHKLRHQRGRGYLSSWCGQSGNTRNKSSHRALPVPPGRRDGGCPMGPHCKPRQERSNHHKLYGSYAAFDTLHSVTLRPSLSLKFPHLGLPGHIHTNPNGPGLFWATSHCVPSANASVSPPKPG

SEQ ID NO: 1010913 - protein, 333 aa, Homo sapiens
LCVCVLPFCRTFRFSFSTAFFSSSFCCSSLFTSSLSLSRLSLFGSRRRSSGLCPWALSGLPVPLPFTSRSVLVWSPCPRLSVWYPFAFYPLLLRLISRLSVSTFSSPYVSSAFTCSILLPMSSCYLLCMSLALCYLWCPPKFHPVDSPCCRLHLYYRPAFVACLCLLPPCPIFVCLVPVCVPLSSVIMWCCLDVLASRSAFVWNMPLFANYLIVTSVTMSCEGCGYCPASALSVSVGAVPYSSIPPLKYALRWTASPISHLGPAQEPRLAISIYCLRPCRHWAIWPGVLFPPGSQCHNPSGRPYLTQARNKKGPSAHIAESRLLCLPALSPVF

SEQ ID NO: 1010914 - protein, 273 aa, Homo sapiens
FWCGLWVMRSPQCPGIALWGSKPRDKPIIVLCGTLGHHPWTSAIWQGASPGKSSSWEVPQTLVDPWSMHPKVLWAPLLAPRSRSNEQSDWTIVLCALLNQPRALVGGLSLPRKRYPLFASLTLQSQGRKLLELTHEALTLPTSRTAINSQPRTHPSSALPVIRVPVHMLWLLKDTRLNRRSRARLRVGKVGPIRLGSTWTLSGRTRRSFTVPVLSQRCICAIRSQVLHKNVYLCQLPICDRVGPFLQIVSSLLDGNLLTERLFDVYLDICDDV

SEQ ID NO: 1010915 - protein, 231 aa, Homo sapiens
GKQKSEKIGSDICENQTTGQPYAAGQDHATIQNLTKPEAKGPEELPEKLKLYSEFLGKRPWFAGYKITICRCFSSMSVGGPPHVYVEPNCLERLPKSEGPSSPAFEGLEKIICLHEVQPLPPKTCCSQRWLSGATSRALEGTGGGSEEPILSLLPRLCSAAGLCIPAPASSFRFSCLLPICKLAKILRCVPLSAAPYTPLYPCRTRYEALQHTPLSVREHPVTISYRFHCS

SEQ ID NO: 1010916 - protein, 128 aa, Homo sapiens
MGSASPTCQGPLDTVPPFFNKSPANPGYLYQRTRTHPARVALGEDLVVLTLSFLTLAARAAEESTSGHRRQRVPKHTGSPWGSMLHSSGDLRRSFTHLACPLRNWWPSFHTPTSQSLASPSVYIGGST

SEQ ID NO: 1010917 - protein, 114 aa, Homo sapiens
WSKDPWALLSQYTLFPSRRPHKEAEMDVERVEYAEIGMRLSRCAHAHGIGKSRPCTTPAMDEHALRRPHQDSMGAVRQFMSYGGNGEAWERNALRCVEWHPAYLRKRHIAATCT

SEQ ID NO: 1010918 - protein, 286 aa, Homo sapiens
GLHLLRLPGMVKANLINQLWNGLPLSRLVISSCVGFPHFYLADATSMHVPWPLICGPWCFISGYTGYEPLMDTMDVPSFDPASHCLLLDPVDHPCSRGAPWFIEGSRSSEMHGPSRSKNISYFVEWIPNYVKVSLCDIPPTAALKMASHLHRHTARPLSGAVQALSLSKFSAMFRRKAFLHWFTGEGMDWNGRSTESESNMNDHGIRVPAVPGCHTPMTGTEAFEDEERGESMDSRKDAALNSDPTTRKFLLEPWCLDPYGPWMVHLVLIRCWCQAALHNMQRKLM

SEQ ID NO: 1010919 - protein, 130 aa, Homo sapiens
MALKDGGARSSCIARGAMNSLRCPWRCLLDAAALELRAALTWKQCNRAVGTGSCRLNREPDFSMPACHLSAPRQDRLPGSSTCSLVLSATTDCFTLIARKAIWSHHDPAGAQIPLRYRVHLQSCQETGHF

SEQ ID NO: 1010920 - protein, 59 aa, Homo sapiens
MTSGVTVPGGTSPGTRAGGSRLPMEACPLRRFASERAGIRASSLSWSTAAVRRQLREYP

SEQ ID NO: 1010921 - protein, 254 aa, Homo sapiens
MTGGPIPCARFGYHHSIAGVRIELYSCNQHLTSKYWGAFTAMKNVHVDVRQICTAITSCLEVVILQERTVFGTRDALLPPETSPCRSTSRPAIGTTLRLRFIGTVLSADQALQSTEVILAEYYTTKFPCRVCYVLKLFDRYSEAHKIKQVESLELCERICRCRGAAAPRNIGSKGPSPKLDVPRLSYNMYRYQKLELSTLTTDGDFDLEDTMEQERGVEEELTGPDQWTVSRIPTHNRDPANLSIFSFFIFTES

SEQ ID NO: 1010922 - protein, 287 aa, Homo sapiens
GLFPSPPDHVAYVHVLLAVINARTAKSLTNPQLFQGQARALERFVGHETVGIYIEGGDLPEESAQEPVTTAIRKEPFKIPEDDGNDLTHSLRSTLDREELATWMLGRAADEDVEAATCFILTDNCLLLLRVHHGTRSPEECIRTGESEHPRGGRAPGKREHALNSDIPYNKGQLIKALQNRERTAEDGGAESHNGVPDLGPHARSEKDEVGSSPSQVALVDEWSPYDMRVAGSRDKKRISVQEEAGAVLTTVPSTPLFITEVPRMGGRTHGHRGCGSWLPVNNWHLS

SEQ ID NO: 1010923 - protein, 256 aa, Homo sapiens
ATMREKPGTPRDTAEQERGPGCRHSVGSASFRYLGRVQWRVNPSRTPGRQAPRIQRSSGLTPRGPYPHGMPKASGFAAVSVCCADSFLKVAKPGTTVSPIRGCTLLGCKCTDEEVLAPTQCVKLVLVPPIYPLDRCCYGKFLLTVAQAGPLEDAWKPGKLVGGSDGEMELLPFCSWFQGVLGICGVSNSLASELRVPGATGKAGTGPYLCKAQRRGPYWLQQIDLFPYTRSSVLTKDSDMGDTRAWPASTKMSSER

SEQ ID NO: 1010924 - protein, 76 aa, Homo sapiens
GTPQFLMAAHASDKVSRPFQLDHANMRPLLVRHSMYAIKSAFRRLSIDANSAEKSLDSHAYRRRSNDSCRYAVLDL

SEQ ID NO: 1010925 - protein, 119 aa, Homo sapiens
MRVVVVPDHLRSSVGGRKYNRGEDLTYGGSLLLKREEEAAPSLVSIIIMWVEDLVLLEERNNNIFSSGSAYWDTAGGKHVLSAEAEHNNFMCSPLLKEGCFTHDTLCCHTSAHSRERGV

SEQ ID NO: 1010926 - protein, 83 aa, Homo sapiens
VIDLWLSTPRDMVVLLLGCVSRFAVQVDSPRPNSRHGSSHGRRNVNTSRMASHSALHVAHWSQSKAHLICSSLGQTKFFRQVP

SEQ ID NO: 1010927 - protein, 105 aa, Homo sapiens
IHTTPLSSRCDSRAPRRTPVFPPARSTEGVSLSRASPLVVREHSFSLSRRDISTHFCCCSLSDARAGAPPSEREREATTLCVGTTLVRGVGGGPPVSYIPSRRER

SEQ ID NO: 1010928 - protein, 321 aa, Homo sapiens
CDPLASCMYCRRMTCGARGFSIASTEGSGWGPVANCPGKDRWPPKVRAYCACEVSPTVGWYYSACIITNVCLNPLLCRRPGIYTTSRRNWWTPFGRLCISNAPTGVTHHIPGVGVSGSPLPVWSNSLWRLSTGVCLPAETLDIRGPLGSFAGIGPEPLTYLCSEVPLLIVDIPLWFLLGLEPAFWAGFYSLSYSRYQSRSLRSLVLRKLWAAGSLLLEQYASLMRGPSTTMREANHTSPWHPGALERYCHAFTSNCFACDHTTERNRASRTVLAQIRSAHPLSSMSFTPTYIGPERSLEQRCLRTLGFIPMLRIVHAGARC

SEQ ID NO: 1010929 - protein, 262 aa, Homo sapiens
GVLSGKLVSPFLTRVYFSSSHMYLLSSKFLLGRKKTGGSPVRASLATLFTYSGGGGRSPPHMVLSHTSRSYLLRSYAIAHSHTPVFLGKSPFSLPNESPLFLVWRQHRCLPLFFVRHTRISPPLGDGPGDCPRVASSERHPLYGREESRAYRRHHGVLYPRTPAGVPPWCEGRQRSLSLYSTPASSREWLPHPEIHGVLFASLRGLGAQFPRLRFLALYSPPGPKKIFYNKPAGFETPGGTTPTPPFQGGFPPPPKKLFGGG

SEQ ID NO: 1010930 - protein, 112 aa, Homo sapiens
VEKKQEYCYSGRTSPYCRLNMSRSVFNTCNVQSTVQICSRKRTARMSDYALYSVKYCWKIFNIDRVSVASIKNRIFIYRQSACVWILSEEVLIVSIIMRLKDLIKRSKSTLW

SEQ ID NO: 1010931 - protein, 308 aa, Homo sapiens
  misc_feature (73)..(73): Xaa can be any naturally occurring amino acid
ICLAIPRAPRPSPVRVVAAVQLWASMAVDGCAWPYAETPEALALRRARSCGLRLVLINTPPGDHRERAETGGXGCLSPVMTGWPSERDLEQAVRYAKALWLSQGTPFQPFPSLVTPVDPDCACTRAARGAPGLVEHGLSDSFVKAPLGIILHGHRGVSWFPYDRLQKYSAETREVMRSRFVIGNIGTSVNRKLAEASYIPLCVQSPSIAVGKFPNIAFRERPSTSTLPDNGAPQVQVEASRSRPDYIAEGVAQPMSVIGGSEGAPLLYANVELAFEVGRTSRRGLGEPLTSPPCAYREVHIDATPAMP

SEQ ID NO: 1010932 - protein, 111 aa, Homo sapiens
MEPLACNLTGRSGDHIGGSIRSLVNFPPGIDGLKRRKGPQDPGYDSNTSATAKEGIVLSLSVDQSHRGHQVGPYLPREWCSDAYTCEHSSPGRLTVAETSVVSAYPPWLAV

SEQ ID NO: 1010933 - protein, 394 aa, Homo sapiens
LVCDRSLPLEAPIAVRVLSVRITLSGGLFLAFWSVFPCGPVVSRLLALAHPGYPVLAGPFAGPYWSLGPDLILSRRASFESHWSCVCLALLRELSRVLRTLCAYCVPRAVLRCSSASIVPPLVVGYFNIHCLSPGLCSPAALLSSPLYPLSGRYVMKVYYPGRMEIYLWLTHSLPSSIISLFRFNVPGDCSRVNAIESVSYAYPHSAICLLGLSVSEGLPIGGYTRRCSHIVASSGLRDHLVDVVCELAKELCALSIGGLMHGEIAMLSRLLTPSSHTCLWFPPGPPSFRTPPPKAPLLNAYLPRALAVHMRGLSAHRKGSQGSPGKASRSVSPHFCRYTSAWDPSLGSVGPLVSQKYGGIGPRPSRTEKGRGGLRQSGKEGRPDPTFWRDSFT

SEQ ID NO: 1010934 - protein, 335 aa, Homo sapiens
  misc_feature (335)..(335): Xaa can be any naturally occurring amino acid
ERQRVLPGTGAAWAKPAPVEGRAEGTGRLGAWRRTHQHCVTCREATVSDKLRGKLKQDVGPELGRRQCPKLSQFSLAAGVTLIQLGEVCMRYLKNKGRSRYRISVGAPVYIERQLIEYLAAEILELAGNAARDNKKARIAPRHILLAELPNDEELNQLLHTGVTIASGGVLRQIHPELLAKKRGTKGKSETILSPTPEKRGRKATVMATKGGQEIQGCQTTDVHRSPNQKDSDKEGTSNSTSEDGPRRWIHHSGLLRALVLGTEAVLNPKSDIRPYLVHEKWRGIVPPQQQGDIDLQEDIGKALGKGGGKRVLETVKEFGNPEALESRRRRVSNX

SEQ ID NO: 1010935 - protein, 103 aa, Homo sapiens
LIDCLLSFISHSLPLFTLVVPMIYVFSNILKLKFVSLSLACIARGCIISTEMCPPWPLTVVVPWDLFHYPDSYRHLASRLVMASLGEFLSRYFECVLLTLTTV

SEQ ID NO: 1010936 - protein, 116 aa, Homo sapiens
MERVIYRIMLWHITYSMSMNQYNRCLFERKKISYHIIRCPNLGLLREIGDAINYTSILNGIKTYDLSQADAWKYVLSSCGYPDLAWFVIVHYLTAYVSVCVDVGSFVKWGSWIRRL

SEQ ID NO: 1010937 - protein, 255 aa, Homo sapiens
MLMGPSLLHLSDKATQTPLCWQELEGERARFLCNKRSVILGQHRPPKRDFQVEATTAEDEAEPAVGKRRMRGSPLLGDALQCGEQLSGVPSHLPLRVPCLATSSPLPAQEPGRAHSARAGGGICEGAGRRRSIAGGSLISLMGSRVLPASSPEMAADDHSPISPRVESLAERLPRLSVPVSLAVSPALCGLCQVYEETSGCRSRKLCIEPLNDEASSPGHPGAFLNDGMPDLQSLPLLASPRRYIIATIFKREPP

SEQ ID NO: 1010938 - protein, 166 aa, Homo sapiens
LFVLLSPLHTYSALCVSSFLSLVYVFVSCSPRSLVNSPLARARARALSSLYFLFSLTQEKHTHTLLFFSLSLLSTRNEHPPPRCVCCFCYSPLFPRARGSPPCFGLFLFPPLPRARAGGTPIHTPPPPPPSPPPLSLWGVRGHPPPPPPSSFYNIYIIYLCCVFFL

SEQ ID NO: 1010939 - protein, 329 aa, Homo sapiens
GEIPLTGSFQRVLRCELADRRLLCGEVRAGEVTGPGSGSMKVSSSQLLCNSGPTCESHRFPPACNLPPAPRLNCDGRTNSLDDFPSPLPLPALPLLCNWDRGLRHGSRFILKVLDVTWLSKSQATLIVMVCYSPRCLDGAVSCLVLTELMQPRARRLSWQRVALRWDLPQGDRTALNSQAVFLDGQSQGPQDLPAMGSPPRPLLWGWALPVSSFELPRHTCSGLQVRFLRLAFRPCGNANPHKWVRHLSHSDAYVILDLRLPKRGHDGPRWQFVPREDSRFFSSHPGLRTLNLGRKSPQSQRPGGGNGPSLSVVSDAGRTAVDITHGPT

SEQ ID NO: 1010940 - protein, 140 aa, Homo sapiens
  misc_feature (8)..(8): Xaa can be any naturally occurring amino acid
MWSCLDGXIITDFVQYRTSVSLRFDAGDSRIWSPQLVLELQIIRMWSEDFVPIGKHWTVKAIVHCPRRPACKMAWAPWNHERAVSSVTVRSGLLAPFTPRKEGSWTGNGGDVVERALIPLKSLGALPKGPATGKDFPNSQ

SEQ ID NO: 1010941 - protein, 78 aa, Homo sapiens
MRPCTRTKLRVDPVYFIAPKPLACLVTLASPPPRRVHPCGARLHWTKIPGFCDRTVTDLQIPLSMEPRWTMLLAPWIT

SEQ ID NO: 1010942 - protein, 109 aa, Homo sapiens
YVVVPPPGGADCEYTLVAAFLRSSDMVWGLFPPPSVLWGEGVPPLCVVVGGAAHRPPTPQGASCVVFLLHTTPPLLPPPVNVLPSWVFATLCVLYEARSRARLRRRLSV

SEQ ID NO: 1010943 - protein, 202 aa, Homo sapiens
MPPEASIPCLACTRAMWLLMYLSGGKHGTGSQDNGACSFSWDVKHLVSSTLAPAAFQPRYSCDSPVLKSQILTLRLLSYRPHRGELPKSIINQVSVSRLQLDFANHLRQAHWSPTLPLKPGVCKTSLLFPHCAHAALVHTLLITENPYLEACKSKISYLVTVGWFDVRALEYDTMDSDLVKVPLVPMDNRDEALGLKGNFIH

SEQ ID NO: 1010944 - protein, 182 aa, Homo sapiens
MCQEIPPSPCVTPNTICGLPKERLACPLPTGLHGNTQGGRISWRDPDTMVAHGERVITCGALFSPQSNAVCGHTPTVAPAGFRENLVRLGVATAHLLSQETPEEHPVRDPFAADSLETTGVFSAAGGDHSVFLTTGTLWVREIPRAGSIVLPCESSFTREKKFLHVGAIFPPLRPRGPTFVS

SEQ ID NO: 1010945 - protein, 234 aa, Homo sapiens
MDLELVAQKQRERVVMSMDTVRHWNWVTAAPGYHRASSCQQLRQSAIMEYEMRPGLLRRARREEWSEVLAARHNELVVKDREGQSRESQEVLVCSSGLLSASPMWHQSPGPDSLFSQPGALPPSVEYDQCRISGQAASMGPLLYPRRSGPGNMLSVCEAHMLSSSRGEELRGGQEPCAIAQWLPQSGPSAEADMDADLLQELRLVPSAVLNVSQEMSPAEGLCPDDTAGTSHRP

SEQ ID NO: 1010946 - protein, 196 aa, Homo sapiens
SLVPLPVVFSFLFSSVLTGSSLRGLLFLRFPDFLGSFALHNGTCFHVLNHSGRPWPCSATGDGHCATFHVLVPRPPVHRVDRHGLRCPLSRGRSTRYGMSFSLLLVDARDLLCCFFGYLLAYGVFYPVSLLACTLVVAVRIGRPPVFQFVVPYYVTDGMTILRPLPRSRDSSLQLSGLLVCVRQLVGFSGLITFRI

SEQ ID NO: 1010947 - protein, 184 aa, Homo sapiens
RGHFTIVFVKICSSNERGASYAQSLLQCDSRITSAKVFCLIYWYHGISTNRVYYTVRRSDSSPTSLGLTFWWALLMEALLHMVIFTISCGDTGSHAKYDLHFLYPTTLTIVFLCTLMVVENLFLANKFPPHSTSKDPTFFQLQVVCCDSLVMNDPCPFLSNECGEHISCARHGYTSAAILALLL

SEQ ID NO: 1010948 - protein, 114 aa, Homo sapiens
MAFSLPCFELYGPASLVGGLPMSCNLAPILPSVASPYGRIRSCTRLNSIKSLHAHQKIQVLNLCKRSTQLMRFNVLPLWGSFTRSYIRTLRGPRTYNYCDANITSLRTYFWRGD

SEQ ID NO: 1010949 - protein, 176 aa, Homo sapiens
FFSCVEYRYTRRETSYTLLSCCAGGTVFFVCCVVVYKERKKKGEGWEVALGAPHTAQLSLLLVLYEKTTRDTTLPSPRPAPLLSARGESFSCVRERARRASLLPRRDILSLALLVVCCVLLLCVELRGARAPALIVSLLVSVSPPLRGRAAHALRFRNDIYVWVRVEQNDTSLSSL

SEQ ID NO: 1010950 - protein, 158 aa, Homo sapiens
MSALSVGRTFSDISLLWSTTSGPTEGEKPYRCTVCGKHFSRSSNLIRHQKTHLGEQAGKEFQLKESPIESEGERVYETTNLLEEDASASFACLPWTVKPFIATLENGFDIAVMKQDLRNVLRRDSGIENPCLFPGQFLVLESQKTQSLACTFIGVKEK

SEQ ID NO: 1010951 - protein, 366 aa, Homo sapiens
MRSPRVGPLAQGVLLRVVCLAGIAPVILAMRLGIRAFRGCALSPGRVPVRALLLWPAGSAHRMRCPCPGRTPGRSVFGMVRATLSPGCNPVSGPVPLVCDWRRAEMCSYGQACPMRRACPGGTMAKRRSRFKAFDAMAEGALAAYATSRAKLERCNAPDRPRLATRWARVPCTQRRHLRDQLYTCKQGTADQRTLLENPADSEEDAPSGCTTTSETLSETSPQLSSLLSRCTMYGHASPQSPYERVLGFRLARANRATPWDQRRLVRVERYAGPRARKGPRDPECMVNARTDAEKRCAAEKCGRAAIAAYRNHCDPRCSPVLIPVPRMFSSCHPMAPNPLVDAALPTHPGPQLRVIISSVRCGCFA

SEQ ID NO: 1010952 - protein, 175 aa, Homo sapiens
SLVCSSFSSAFPIWPLFWASSLGPPFRKAPSGGSFLDGGPPRSCLAPPGGVRFPVDGCCVAFEGLTYRRHAQGAAVCWNGTEDNGAERLIKEALLDARTGTDMITTLQRTCRATCLQGGRPSLAPRGHVTRASPEEPRKDRDSRPQGQPRRTGCALLRPRTISKLEFPSQTPPTR

SEQ ID NO: 1010953 - protein, 119 aa, Homo sapiens
  misc_feature (119)..(119): Xaa can be any naturally occurring amino acid
AQDRWSPTCPTAVDAWPVRLYTNSLNHRSSLREKGGKVPYRPYEILPGSDDKSHPASVCGFNGGKELTRGSSRGIHSIPVTVWWHEGKLSLNGLHDSPRSKIPGNNLARAVYRLYPLKX

SEQ ID NO: 1010954 - protein, 106 aa, Homo sapiens
MWCTRFLYYAGAIGPSDGIANYPVVMRDQPVFGPPELRFQVEATVGKIQLRSLLGGDRCQKCMTQSNLQCDYLYCGSAIALRRRRFLADTGPVPTKETAFPLGIAW

SEQ ID NO: 1010955 - protein, 86 aa, Homo sapiens
HVPTPPRAGGLNSPYVYSRTRAHENSFSTMGVFSLVFSCGGHHAGGRPPPYSRDGGPPPPTWAPPYTEGCLAHLSSLSREHTPPFF

SEQ ID NO: 1010956 - protein, 380 aa, Homo sapiens
GFWSLHIASLFVVTLTRVGAPATLVLLISFVLPSCTTVCFVFRGRAGTVRRGLFCTVRAVLVGGVPRSLPLALLAFMDGCDLVCVVCFSYASARAVGCRPHPPLVIDWIASPRHYCALHRPRRRRRSVLAAHAVHVTRLPLLSGVCMAASLSSHFFVAGVGARFSARSARWRGGRAHSPPASWEDGHPLAPHARRSVSSSSRARCGCDASLLLDSTTRRPLSFVSSCLVFASLSLSWAPLFSLLSTALLSVVARRRPLALAAGPSSTSTPSGDPCCLRSRFVAACLPLSLSLSPLRLLLSEFARSGCRASLAVSLFFSLRARAFFYLIMCWWGAPPLFSCSPLRQMGRVSLPRLPSPPPPLRSALPPTPPPRGGGGSREG

SEQ ID NO: 1010957 - protein, 247 aa, Homo sapiens
RLCGWLACGSRAASWGGAQVVVASPRFALWIIASVALVLGSCDVGWGVRVLLWTGVATAIGGGPRFLRVLVLPTVLATFGWRGGFPGWSRRASCSIRPPWGCPQRSSSRCAREFTIETRRRKGLSEDVSSQANSSMDPIRSLELAITRMLCSTYPMWVRGPPGSSCVPTVVLQLLYLKTETSYDRGLRVVRECLEAACCHLVLLTNLQPRASVREEHMASCIPSVASAGLHSRGKSEELGLTEREGR

SEQ ID NO: 1010958 - protein, 102 aa, Homo sapiens
MSALGREFFCDTGRGGATLQGHARNYPARASICALERGAPKQRWNPPLVLDTRPRENKRVYAASLCVKKAESSLGFAALCQLPRGRQKRCLHIPPYQIATPR

SEQ ID NO: 1010959 - protein, 126 aa, Homo sapiens
MTLPHSNMQSPQSYSYPWVGGMPSASLPSWALLVHSYTDPCLILSTSPAPLTPGLWYTLHRRSSLGPTRCSPVLSNSVEGAVCGGGGLRFLPPWAEGPFPLVLCPHPPPLQLLLGLSSAQGQPRFC

SEQ ID NO: 1010960 - protein, 195 aa, Homo sapiens
MVVRWEANLRCTPTGVLSLSQGVVKEIFLSRRHYIGDGGPSWLFGETLRTDDLATRWSTPLSKALLNEDPSRGEFTEGTRRATGGFTSLSNIPLAEPPTPGFPHTAWGRTHTEGGIYRRDALSHTLLGGDTPTGPRCAHTWRESTTRMGKKFFVYTGLFATHPKSSTPTSVYSAPGREPCDCFFSSSLLCRRHQP

SEQ ID NO: 1010961 - protein, 102 aa, Homo sapiens
MSLDLYGTSSLLESYACLYEPGWTNLPKGACALLMNLCGSSIAHLCMACGGLMCSLYQVYRLKPLWVQENSKLHLRCVRVDLKGQHGQKWQHEYLVGHLVCS

SEQ ID NO: 1010962 - protein, 150 aa, Homo sapiens
MCGDPPSLAGFLLAWKTRPHPTRLVCVTPPPLVEEDPPAGPPDFPSLSRGRFFLPSSRAPPRGARMYTPCRIITRSRNTQLVLRHDLIGPLYLEVDTHYYRETQHMCVTTQIRDSERSGVIRALRGNILPADRRGWWRGPAEMYHPVGEI

SEQ ID NO: 1010963 - protein, 103 aa, Homo sapiens
  misc_feature (99)..(99): Xaa can be any naturally occurring amino acid
MLGQDRPACALQAGHVVLPCPKDPECPLFGSCSIPKAPTHYKKVEVESDSFMNAVLTATHTLAQTEPLPFSMIMISLCHTSLLRSSTVWQGSRRLYNSXSTVC

SEQ ID NO: 1010964 - protein, 334 aa, Homo sapiens
MHSFGGDEKCALSIRLVTLLCSIVPPYFIHVFAHVCYYRRSASLIAAPSTTVPLQTVGVLHPGVQALNSCGGIQRVFSPLRHHTECLLNPPLFSLFISGVHLTASCRLPFCDIRVTSAQYSVLLWAHNVSRPVWVFPWPELRRGPANMNVAFLTRLEAFPGNLGKHSKCASEKPQSREKEPLVSKTVNSGSQEVTVRTDPFYYSDSSWFLAAKILYGQEDGAVFACPLALTVSHGAPFCYHAPSGATCMMHSSLSLQPMAFRSLPPDPCRNSRWNSSCHHPLGRTLGPTGTSLGCMLTRSSALMPAKGPTAPCPLPCSFNRVNMCIYRPSCHCT

SEQ ID NO: 1010965 - protein, 174 aa, Homo sapiens
TVVVSLLMIVFPSPNMCFPLVGVGGEPTSQLHTQLWVFSVLFELLYLASCMIHLSCLVRHYPVWMVFFCLGLPSWLMGWVGECPAFCSTSTLRLGWPNYPPFLGIALLVPPPFVTVVDASLVFLGGCTPLFGPHVSSQMSPPPDLGGCRHSQCSESDPPNDVVLCKITASCSSR

SEQ ID NO: 1010966 - protein, 86 aa, Homo sapiens
MESSGIMAWTNSPYGVNNCQATLRIRRFDIYGYKRYEQCIKKELQLERDSEMEHTRPQITNANNPPAPPSTPSPTTIVLNSDDTVS

SEQ ID NO: 1010967 - protein, 261 aa, Homo sapiens
MLLGTILSRVFWYPMKGSRKSRSNFEKFLLCVLDRIPIHALAPPDQRSAILYMIILSYMRRQSALGIQEEVTEGPSHPMSTMEEEGLCSRIEIRVSYTTLSTITDPFPITQGPSLAQMDAYSSVYSTRHCAVCGACGSFTHMPTGMRDLCVCAWVYSHVSTYVSFWELCTIMCACSCVVLDSDNPFSPRSPLQMIIVHITPKSRKEKPGSRLAIVLLSSDTINLGASISHCLQIVSNYDLTSTRRFWVYHTPQPPAPSEDV

SEQ ID NO: 1010968 - protein, 146 aa, Homo sapiens
ISPTPGSLSFGFCLSGRYSLRGVDVNVPTVCLVFVFFCVFPGLSLLQRRLLRMGCCICVGFGPWLSSFVSLKGSMVTPRPCHCGGGSPTAIDYHSLMWSPCRGTVFSVTSSALCNRGAFFPPSVNEVLLFDDHFVNVPCVNPFMVK

SEQ ID NO: 1010969 - protein, 127 aa, Homo sapiens
  misc_feature (103)..(103): Xaa can be any naturally occurring amino acid
MLVCNSRGEIHAYMGLTLMGPLYFMGGTPYLCEWNQTCWVSQTQHIATRLWGEATAFRCESFSPRENWLQTHYLRSFFRALSQWRAPVQEDPRLLGEEAPTEXRGSSQTEGRIHTYMCLYTASHHAH

SEQ ID NO: 1010970 - protein, 122 aa, Homo sapiens
LSLSALGCVCFCARSVVQGVIFGARYRIGYGRPVLLSGTFVRVSLTLVLLFDHLTCERCPPPGSGVLNSSSTGLVSLLTVWLSLGYSSYRFSPFWLIPSCLLCCVSLLLVGLYAIAPTLVCD

SEQ ID NO: 1010971 - protein, 107 aa, Homo sapiens
MVVKQCVLVGSHLRPTRGGVLVRPLRPNMAQQQLGGGEIPYINAWSDTRAMAANPNHDRRCRHKSVRHLFAPSAGWRYPTRDDTTVLGVYVVTHSWVEYTLAYLVIL

SEQ ID NO: 1010972 - protein, 263 aa, Homo sapiens
VVLGLMFSTSVDVSSEHVCPRYMICVLNPLLVYMRSPCVLRGFLVPVDAFCKGSCYNVNPFWLGVRVCNAWFLCWFSILWTRSLRNCDFCSDVCGLAMVNSPSLAVCTYPREVLVFTRLLHLCGGLHGVEFCTRYLVSAYVYLRPFLVLSWFSIGSSTDNSAGLNHMASQLGVTRSNWCPVEAPATSKSLTGMTSSFHDASGCRLVKSEVTCSRDCRTSQSPADDGASLRTSEPLGVSHRKLRAQIYMAPLCERMHQDFIRMH

SEQ ID NO: 1010973 - protein, 141 aa, Homo sapiens
VNTPGSFVVDPWILPVSPSSPLFLPRYCMNPRGPSSALLCFFLLVPPVAGLYSFCHHEELLDCHSFCPLFFVPYLWRQTCFFHMSVLVSSFPAIFPGGVSIFFGFPLGWPPCCELFVFCAHLLFLSFFVAHYCGFPVTLSV

SEQ ID NO: 1010974 - protein, 167 aa, Homo sapiens
SKCHQPGSVLVHWARLRAGPTRWPNECHGLLAVQALILIQPGATRGHKLGEIHPVVHLVPTPLVAGVFVCLLEYPPEEKTRRSGSTMDAAARTEAHDIAVVKLFGPFTRNYYSSGTSCISSLSVPAGFLLPTILGTACLAIASGIEPTGVCAWTEQMTPIEPKPHRG

SEQ ID NO: 1010975 - protein, 36 aa, Homo sapiens
MDLRAGPDVLVDLTVKFLSNKHHFSMVRYSLRTESL

SEQ ID NO: 1010976 - protein, 229 aa, Homo sapiens
GRSGPSRAGPAVATVLRPWGSFFLPRAGRHRCSLPSVCLLRVIPSSSVRVPWSWASIMALSGLLGRDLMSVPAPAPRTLGPSEPSCSLVSCCSAVRPSSAFLMHYVCLLGDQCAMLLSRRCSRDRGVCVAGLALLSGMPPHYPLVTTSRLACHSLNPASSERPLSNPGRDGLAHTEMVVKKIRELTDVGKCQGCPEVYRGTYTPAICRRVSEGQSPSLPPSLLHLHSLP

SEQ ID NO: 1010977 - protein, 141 aa, Homo sapiens
MLYGQVNSVIASHSSLLLQQPPWMWLFGVGLVPRSPEAAVRGPGYSWYRPPRPSPYVRVGSLWLILSGAEVGGCPILCSYVSYATASDDRGFLSCILGLVLPLAYGFQPDLVLVALGPGHGLQGPHAALLAAYASGAGRGP

SEQ ID NO: 1010978 - protein, 244 aa, Homo sapiens
  misc_feature (219)..(219): Xaa can be any naturally occurring amino acid
GGAPPPSPSPPRSVRFLTCGDAAPRLLLPTLVRGGRSSLRFTRWVPPLSLSALALCRIPLLGARLARRRPLAVAHTHLSLALGCSLASHTLSVSAAVTLSLAGLSLSSTVAARAGVYTLTRARATRVFATRSDMLAPHTHTRARSHNTHTHTRSCTNDTHTLVCYTPSTRTQTVEMSVYMYATHSNDNNNTINMLVCCLEVLWWTTPLVGCGLLIPVLXSGRTLYYLRLLLRVCGGPLLLAVDD

SEQ ID NO: 1010979 - protein, 422 aa, Homo sapiens
  misc_feature (5)..(5): Xaa can be any naturally occurring amino acid
  misc_feature (8)..(8): Xaa can be any naturally occurring amino acid
RLYRXELXDRSCVSSDLLPRLARLSDPLRSAGPWSRAPDCPVRRALCARRWAATECGAGGCGALRCNEDMRGLQRWRGCGEWQSAMRLAWPPGAHGGRTCSWDNHAAAVLQLCCCRDAPVLDVRLWLCAMLWTCPLCCPVHFPVNRANGAPHALLPLGGIAYICLLPREHGAKTQQTIGAGHTDQHVSIELIPGRPDPRSIGEIERMESAGWSRARIEGKEAYKNITLASTLGAAANWVSYPRNPGRHQWIAKGGPARWGPPPIGTIIKCKPKKDTYTIQEQKRQELHTPPPRGTLYGKPPWIRKEPRYMYDSLYSRRDIRNMSPKTQRVSNVDTTAEVTEYFETQPVKKFYSYGTTRVIQYLWRGVTKSPIQETIGTTDDHHKDHKPAKFGYYWPMDRYDAQWMKRGRDTLRKERAKRGRR

SEQ ID NO: 1010980 - protein, 218 aa, Homo sapiens
  misc_feature (84)..(84): Xaa can be any naturally occurring amino acid
  misc_feature (139)..(139): Xaa can be any naturally occurring amino acid
IARSWSPQAGTTAIRVFHCSDECTPIWTVLAFHSAAVPSCCWPVRPAYVLFVDCAWPPQRSSRPGIQSPRGSTSYLHCVDACPXQTLSFLGEDLGSADEGWCGYRGRFRSLRPVEKPRTGLSVEGPGLRSDGTQRHLMXKVTADVTLVDGSALELSVPLCLLCSCALSRERKRVRTVLREASQKRKKAPIEHCTLKELFDYASNQFRGYGVPLCFGTS

SEQ ID NO: 1010981 - protein, 120 aa, Homo sapiens
GRTTPPVGWCFTHTRRGGVLSFDEEVESKQKGGCFLTRKGFLSACGRGRKSRCWWCFRRRVISLVRREDDPSTIISRCVRPGLRLLSTRMLTTFSPPSLWGVFREEHTPRGDTIFESSFG

SEQ ID NO: 1010982 - protein, 115 aa, Homo sapiens
RQVGPHCWLSSPMDEGVPGWNTTVACILTLPPYYRRGYGKFLIAFSYELSKLESTVMLPGEAAVMTWASSATAANGPGCCLEILRDFRGTVSIKDLSQMTSITRNDDHQYHAIPR

SEQ ID NO: 1010983 - protein, 31 aa, Homo sapiens
MIASRDPQGLLCHTLLEKTGQRLSSASVSPH

SEQ ID NO: 1010984 - protein, 130 aa, Homo sapiens
MPLPNCSCTLWHLLFASLPLSRSPLRSVSTSVFCLLVSIPSELSASFHGVVLGARASSHLSGLPASLSPVVSVPSPMCSVFSVCIFLLPDMGHTPSGDTILSLVLAHGALYKELGGRSRKWEPRDVKSEV

SEQ ID NO: 1010985 - protein, 111 aa, Homo sapiens
VSPSGSRLRLTSSCVQVANDAYRSGENPRSVPLFTAPYANLDVRLPQPSFLTSRGDIYPSYYADSRPESSMSASSTGLAAPGSLSSPSLGSVTIQHQSTTEHVHALRLTCA

SEQ ID NO: 1010986 - protein, 134 aa, Homo sapiens
ARGAYADQLQAQAVVYRKLVCLGSNRSGPQGCLALNVVLVWAPLHLRDCAPSQPSELGSTTELGEESGFKGFRPKDQTSGGHAVFLASVAISGTLGCTLRDFVPFDVAKDPTPARSGRRVEAVRVNPRACGLHL

SEQ ID NO: 1010987 - protein, 110 aa, Homo sapiens
MDLRLNRRSCLALVSLGLVLGVPSVWTRIGLLRMLDAASCPPVTVGGRTASALYTVLEAWNRSHTGMPQSGRFEQSFYLGARRALAQNIWNAYTTLCAVFLILGYNPGSR

SEQ ID NO: 1010988 - protein, 133 aa, Homo sapiens
NRPNILQEGTDRRSAQEDHTSRIGRPSQATAIAPMGGPGEHSSLTKQRREDEGHHQRPDQKTSCVPPSGVCLSAAVVHTKGGLQREDEDPWDFAPGQTLRLSQICQLCMAEAAYQYKPLYPAFCARRINFCWD

SEQ ID NO: 1010989 - protein, 540 aa, Homo sapiens
SSSGVGAVAWLFLVVCGCGGAGRAVRLVGVGCGCVVAGGGGGVSVASVGWAGLLLGCVVLVLCGGWCPCVVVGVVACVVGVCFVCVRFCLSLAGLRCVLVSGLFARWCVCAAVCVVLSVVASVSVFWLQVFGGGVCSRLSLGCVGRVVSVFVVGLCVGVLSSVLLFVVGCGRCWWCVGVLVVDGSLCVRVVFCCASVRAVVVVCVVLSGGAPGWWSVFVLWVRGRWWWWLSGGREWCVCGRVGRSRCCVVVWWGVVGAVGGGVVCWWGLLCVCVVVSLCGGVGGWGCWWWVCVVGGGAGRVCLFVVLVAVGRVGCGRWWPVCAVWLRGGRCCSRVSGAGCVWCLGRPGCVRCVRARGPVCVALWVLCAVCWWSCVFWCGCWRGCVWSCVVRGVVCVWASSVVVGARWWGLVWWFLLGLCVCGAFVVGLCVVVGWVCGVLGGGVVVVGVVGVVVVVVGGAARVVFCFVCAGGACRVVCLCVCCVGCLVLAVGAVVCWCCCGGRGVCFVLCGVVGCVLVGVVAVGGWCWWLCGGGARCVWGW

SEQ ID NO: 1010990 - protein, 107 aa, Homo sapiens
MDKSEVIVTVKVVWVKAGARSLDSCVGYHDRPFGISDCIYVAFLYRSVMFAHKITRHYVIPWQFACTFAEYASRSFSWQGMVIIQYLAGTERLHGSDTHRDFRTRHQ

SEQ ID NO: 1010991 - protein, 309 aa, Homo sapiens
EPPTAGGCPLTPQNIGLQRLDLQTQMRSAPYPHLKTTMAPSQTGSYSCYPGAGRRRRPVRGREKAESGSCLSQIAMPGNEGSWSAARAKLGLSPWESLSPVLGTVEAGPPRPGMTSACPFWRPIWASAPRTDSVQAGAAASSQQATNNGSEELQYAERKPGPLEARDAETQPWGDAGSEPPRAESRENERLSPRETTRRGGCGIGGAQELSLRPSGGSGTGRQSPAKRGRQELPTVSSACNMRRLSPAESVQELDALTTSTSRPSSNSPRTNTRLATVHVSPRGTLPYREVGALTEGPLLDNLTPETPG

SEQ ID NO: 1010992 - protein, 427 aa, Homo sapiens
  misc_feature (265)..(265): Xaa can be any naturally occurring amino acid
GCRLVLLAQTSICVAPVCYHTTDSPGGRRPHCFDRRGGAVPNSGRWCCATNKTFEERVVVVSRHRRGLSAPPSCVWCLCLWSRRLLLRRQRTRPPVLCAPRPALTEVGRQRGETQPPPHYSVECTPPAGGNDAGAHRRGGKKDGGAQHTAGDLFTHGSFFLTRGGQQPAHNCRPIVDTRWWVCRHRRFPPTRGPLLPLCRAHKRGDISRLSSFVSSRKQRGCPPSRSRSCLSSPNRESGLSFSKRDTLFFSGGASPAWRGHTPSXRTICAQNMVFGCRECVSLSLSPALAPPRTGGHTRGLCVKRGRHPVRDTLVKTAVCFPFFSLNYFSNKQTTPRLSEGAIIEGPRRVPLFSCKREVENLVAPVDPRPCDTAPSTPPTRPRVSAFCGNLNLCGRGNGFKRNKKRPKPIVNRNPFSPFLFFNTPTN

SEQ ID NO: 1010993 - protein, 72 aa, Homo sapiens
MGDPRSLESTLSRRDTKKSTISIYGLSSHTKGAMGCTPPVDPFWYIPSCGNPDDTLPGPFQRAQELKSFWFF

SEQ ID NO: 1010994 - protein, 310 aa, Homo sapiens
  misc_feature (241)..(241): Xaa can be any naturally occurring amino acid
MGPYAQQEGERLSSAAKVGGGEEIYHCGGGRNQKERGHLVNHAEDYRASSALCLPEKRGGAAILEERTNEGSLFGGEEAAKQPHKTSGWVSPPRPRGQHYVGYACRRQHHEVVPTGDESITTHDRVVSMMFLRPLGHIIVTLGGRYSPLTPHSVESALHPSPLASSILRAATPRRPPLFWANKKGGAVTHVEKTTSGGENTGSTGTQRHCETIRAGHTRYAYARDTSVIIREKNIEERVGXTHTEWRFGKKEVAGEKYGATREESVSRTPLGEAKAVRNGARSTRRNKSAFKGTTGPRTSTPQGATGTQK

SEQ ID NO: 1010995 - protein, 101 aa, Homo sapiens
MRAAEHSAQASTPERCTNRSPPDSGETSPASVFHHGCWRGPSDGGGNILPRGDTRATWARRPPREKKGGGGTPEAPRGERTPPPPERGFFREKKNTLLGPG

SEQ ID NO: 1010996 - protein, 207 aa, Homo sapiens
VPPTQTGGEPPGGRNQMGAANRGAENRLGAPTPEGRGRRRVLGAAPLPAPSGGTKGEKAAPTRAREIPGGLFGEHPPRPPSRGGQRGPHGCHTHERGATGGAPAVKTNGGCKLQLALGGQQGDTPPSAEAPAAPPYGDRPPPPLGASLGTTHALSPNRGGSTGPQRAGGPHTPREPLGGPRRKANTGGFRAPPYTPGPTSRANLGRG

SEQ ID NO: 1010997 - protein, 123 aa, Homo sapiens
TSARQVVCLGGRYGVKLSMVRIEVMARWDGDVLFEAVLFGRLGGEEFVAHLRFSLVQAGGEKTTLPERSPPPRSKSPGELWPHLLCPRDSPGWIYADRRVGTSRRVVHKRLFFGRERAADLEN

SEQ ID NO: 1010998 - protein, 125 aa, Homo sapiens
GVREVLGHNARPRPPCTCVQHAALKSAEEDLKVPVFPANGGPSSKDVKVASQIGPAKMALIQMGSSGGGGPGPHLTCTTTTSRENHHLRVSFVQGPPSRGTGPHGRAPWRQLSIIPEKSHVVKTA

SEQ ID NO: 1010999 - protein, 103 aa, Homo sapiens
VSYYWWWLVIYRVRSGCSFGGVRLNMIISLSYLRWGVFFFLGGPPRLFYIMMGGPSRTQFCCVFFPPSSSRLFWWAPPLLFFTPCFLERVCVGYTFFASRSVC

SEQ ID NO: 1011000 - protein, 236 aa, Homo sapiens
VLSSLFGSVSSRTWRAGVCLVVVLFALLTTYLGWRGVVAGAAGRSYQDGVVWCRRRTGCVPWGGGVESVGGLAICAWGEVGCVLFVSFFLFFVGARGEDLGLVCVLMRLILICCCCVRPRSVCFSVGSGCVEFYYAPPLFVVFVLLATVRWFVLVGIVCLWSGLCSWGGVVICVGVGVGVGVCCALVVYSRSAVVLCGPVGSVVGGDRCWCVVVVGFLRRVWWFMVFFPRRGVFVC

SEQ ID NO: 1011001 - protein, 109 aa, Homo sapiens
PAGAGSSLCVTSLIACVAPVVCCYPNSWVGVESCWGRFVVQSLGCVSLFWVGGDVFPLCIFWGLLVEGLAVCGCLYKVVCSISDVSSPLFWCGLRAPAVSFFLLCGSST

SEQ ID NO: 1011002 - protein, 237 aa, Homo sapiens
  misc_feature (1)..(1): Xaa can be any naturally occurring amino acid
XRSVDGDSCSWMCCLGVFVVERRLRCGVVSGHVCVVVLARIDVFVFVGVSVRSPLLRVRINRDSAVVCVVCGCALRSSPPSSFVRGCVCEVFFSPRLWLLFVVGVCPVNSCVVWVFPVMVSTARRRLCLCVFDLPLEVVRCLAALRWVLSRRPARWLCGVATHAARVCCSGLRFISSAVRSGALLLVIDQVVRRSSSEVGLSFRHCWGGDVCLVLAVGSILFVVACSLRVSGRDSVH

SEQ ID NO: 1011003 - protein, 115 aa, Homo sapiens
MATDTVWLGTLHRRPPLSWFRKWISSLPQMKDNYYYDCALRAAVYSYRGGGCFFKEREQPFPSLRREPTSTVLFVTSHSASAHGGGGYSHTPLILSGGTTHSVSLPSERVLLLKH

SEQ ID NO: 1011004 - protein, 232 aa, Homo sapiens
MFTLPPTCSALWPGVGDYISSPHRGLVYDTCCLLAGRIPAGGRCSPQQGGALSSGETPLLCSRRGCPLSLGRALLVEGEMCRFLLYTRARAPFVAPTVVCPHATRGETSLAPRMVRGVSLPHHRARGPSVRPQHIFAARSICAALCPLCHTRGRPRHRHTARDPGARGTPPHTERPHPCLCALPTHACQDFSREGRRDGSPWWHRGAPPVVGWRRVLFIFRSCCRNKNGLNL

SEQ ID NO: 1011005 - protein, 78 aa, Homo sapiens
  misc_feature (73)..(73): Xaa can be any naturally occurring amino acid
MRGLLDPAFGLGKSPLFTAGGVGPLTKGAKLVDQGLEGIPTGMTRAHCVGGPAGDGPRCGCRRLGGAKILLFXLLHQT

SEQ ID NO: 1011006 - protein, 216 aa, Homo sapiens
MGVHWFGSFEYGAETEKLQKQLASEKEIQMQLQEEVSLAAGFCPHPGEPLAQSGDPRPLELPDSGEDKQELSLVRFHPLHAWHSPAGDSSIKVLSGVECRYLPCGPPHDTRSPEPGPLALSLRADRQGVLDWGVPGSQQSVWVGSQLQDLREKYMHLWAALLIEMQEEVEDPPGNKPRCPLGLPPLPYSVPLVEDPPLVATFYVCACVSPWWLTGI

SEQ ID NO: 1011007 - protein, 348 aa, Homo sapiens
VGATALCRGERCRRMPETRSRRRLPRRIPRAGVDRAAGSHDPCITSVNLLRSLPSFPLLHHHTQLAAVTVVVCVEGALGRRRRGSPGPTRTPPRLHPGPQLLIGHSGKCVQVVEFSLLSIAPRLLTTVDGPPWEWPPVFLGPLRVSCQDHTGPQSAKRSYHEATRGQPRSEAEPEDAPPMYGPNTPVVTSAIMRPCIAHPAPVSLPHPPPRHQPPSRPYRAHTPTGPVVTPSYLPNPAQPFPVPCTLVGADRLRRAAPLSSRVAPPRPSISRVTPSSSALRHAWSLQPSSGLDDGCMARRRLFARAPAVLAGNYVLEMGLAPWGDPITGRSASSPWLPALRHSYSRFP

SEQ ID NO: 1011008 - protein, 297 aa, Homo sapiens
QLLPPGGLCRPKSFSSRLPQAQLRPLGGLSGCKSSSSQPLQAQLLLPPSGLFRPSPAHASRRPSQAPLLTFGGLCRPRQGPASCLQKACTRPMSLRSAADSPSPMPSSRRHCRPPESNSSCLLGRFGRPSSRLPVASCRPYGAALPAQTAVSRPSFFPVSWRTVSGAQITSLEVWRSPDRIYAAVPVISLRSPDSVPPVLRLPGPTFGLPNKRLWTQLLPSLPAALVGPTASRSQAPQAQLRPHGGLSRPAPCPLMASAGPRRPPVGGLLKARLWASWRPLQANTVLKVGSPGQLRP

SEQ ID NO: 1011009 - protein, 224 aa, Homo sapiens
MSLLLLHSAWLLILLERSSLYHVPSFRAILSTLLQCSNVIPQVQALRILGSSIDEQVVPSPGHHSSGTLGGLSVVHKVPRCHALSRPSSSCLPVDFIQPPAQLMALSGLTQVPLLTFGGLLSGPELDLQSDHSAGPASCLLKGLHRAPASASASQRTLHAQLALASLWPPPVTKLLPYAATSAGPAPACQRHSLGPAHSSPTAFPGPVFPFRQILRRGWTFVVL

SEQ ID NO: 1011010 - protein, 255 aa, Homo sapiens
MTVHKLTLFDLEVECVCTYSNGTDNESKHGIPKVGGDIMLMYGMLFSIRSFVMQDVAALDSEGWLPWPSKRMPVTNSITTDVAHHGDQIVVMTVLTLGVGPIQKDVLAATVYSALYCGAGGEEIPCARMGQSCAHVTLFRSRLDSYVRSLPFFSVPVLAEASYLKSPGEFMSAWGPIRNLCLTKGPPFVPQNQPNDLLTSVGYDDRFWLSVARNNLWSPCSRLPPTSSAPILLPGFYGLCVPESLLRVMVTAPRC

SEQ ID NO: 1011011 - protein, 81 aa, Homo sapiens
RTSINTHGRGICRSVEMLKNQGDHEEECLSTSIAQLKVVQTKYVEAKDFLNGAEQEQLRVWGRRVRVTLQWRTCFSRPHAS

SEQ ID NO: 1011012 - protein, 334 aa, Homo sapiens
RRPQQTCRGSGACRWLREQLGCLDAGQGVANSVAKHGTRGFHFTVDGNKRASAKVSDSISAQYPVVDHEFDAVLVGAGGAGLLSCYLDRYREAEGLITAVCYQAVFLPVSHTVAGTREESMLLWGTWRRTTWQVAFRTTLVKGSVLCLVGPVMPSTTLTDAGAPRDDGSSYNNYGMPFRENVKDGKIFISVHLVDRASSLEEGGQAQIGAAVLGDRTGHSRIAHHYMEGSLRYDTSLCVEYSALDLLMENGGVPVVVNVTVHKTKGVTVQSTYRSKSTTGEVADREGQRGRHPTLTGMQRSGPQPQALGDRARPVSHQGQGSYMARNRRWTGPA

SEQ ID NO: 1011013 - protein, 110 aa, Homo sapiens
GSSEKARGCPVLAMADYLISCGARPTCRTTESQHSSSSTAETASPYKCVAYGAHLGEERGGTLVNKARWGLPESRLGLGVGDRSRELYTHAPGSHFETSGAVLWGTEKHL

SEQ ID NO: 1011014 - protein, 361 aa, Homo sapiens
RAGLMSRTVEPILSNAMQASRVRTPCQQTFRANWLSCTAESGLQHGARDASSSVTPFHYEKAYSLTVRKSLEARHSQRPGREQWTVQVCRGRCNEPGECQLWTALREQVPSPESRLASLSRRSMGLYDVAVPESLGLHGWVKTHGRQKGCIDGGFVDGACILTCRCPAEDPFMRISPRIKSAHARDEGWVHGRLGIYPAVDRLRPWQMASIVERASERFVKRLECSSAHRAPSSSPILMFLAAASPEAKRDTVHALVVSPCNRGGLGDLKGEVSLPFVKEPVRSQLRRGIGDTVRSGVIIPPQRHCWGPPSVWGPSRNSPCVGLSGSLKPHQGKLVRMAQEKWLLRQILGGKVERQLESTF

SEQ ID NO: 1011015 - protein, 145 aa, Homo sapiens
MHTARSPICNILGPTVNHFSSVKFRGICLRALTVSCQLGRHYCGYTNCDTCLTLFTVDLKSRSSPKIYMVLHEVKLSGLTMGASRPIGPVGKVPVVVYTTVYEELRGFPPIGLGPGAGILLNFLGPPRVLNPAPAFRVVPKALEN

SEQ ID NO: 1011016 - protein, 109 aa, Homo sapiens
MWVSRHIVVHTGWGFSELSWPLQVVVPAASRASHSGLGLSRCEAPVPTAPQYGFKGVSQPSSLLGADPRYFCVPFSPALMPPPRFHRGHPHPGALFREKKWNTNLGPKP

SEQ ID NO: 1011017 - protein, 106 aa, Homo sapiens
MVPSMSPGGTGAPLKLVRPRDCRHVGPLSPRVPSRTSGYLPGFTGLTGELLAMTQFWATHEVWRTLRKGSPFKGRREISKGPSFVVLKQFGHGTHPGLPLQVGFPL

SEQ ID NO: 1011018 - protein, 184 aa, Homo sapiens
MTVPIRRKIESHSVSFWDGVCFQNRRPFSIFLWRKIGGWCSLSRPQTLGQRGGFSEPEALPCSPGALTARRQWAEHLHGCGPCGDAGSMRCCGLAQRQHAGVSMADRVSELAWPEYHAWCHAVAPVATKEFEASRASSATGHRKRILRLLQTGTEEGSLDPKSDSAMETIHQARPRQGTGHLET

SEQ ID NO: 1011019 - protein, 105 aa, Homo sapiens
MEGVDCVNGVGNKSACRGKRATKEAGSVLAEPSRAWMSRESSRFERSADSPLLSSPLAFVTPWEFRFLYRGFPSSAWVHFYQLTFYYSAGVTLRVVWGYGGLFAL

SEQ ID NO: 1011020 - protein, 212 aa, Homo sapiens
MGTSSTDSQQAGHRRCSTSNTSAENLTCLSLPGSPGKTAPLPGPAQAGAGQPLPKGCAAVKAEVGIPAPHTSQEVRIHIRRLLSWAAPGACGLRSTPCALLSWAAPGACGLRSTPCALPQALPQARPCPGRWFFPGCSLPTGGAQTILSLWTWRHFLNWALQQREENSGRARRVPPVPRTAPVSKGEGSLPPRTQMERKSRQSPLTWGCTNP

SEQ ID NO: 1011021 - protein, 184 aa, Homo sapiens
  misc_feature (1)..(1): Xaa can be any naturally occurring amino acid
XLGRRPLLCTRNARRCLSVSFSVALLPPTAPSPLLVRVCFLSLLLRRRQQQRLFSNDRSTLFTRASLSSDSTTPRGGRHDVFLSTPLVVFFITRLALTHVFSHHSWVSGGRRTPRLMILLPPSLLLFCPLTSAAVMSLVFLSHPLLRHSAVMYRLLLLLPPHAWCISSSATTPRAQRTLVCVFK

SEQ ID NO: 1011022 - protein, 189 aa, Homo sapiens
MSTVFTRRCSPTPTQWFFTPPSYRESRGTQRGGGRQHSLVVCSHNERDLGGAHTHTQGPPALWRAHLGVLGKRRTHGEHTSGGLVRGVHTRSSALTRLFIAQLSPVWEKKRAHSAQTWGGSRMDCVRCRHARRYSRDGRMHLRPISPTHGGEWVTPAWRPEDHVHWGHPSPRPGGNLSPAFPGPKIFSL

SEQ ID NO: 1011023 - protein, 145 aa, Homo sapiens
HATTILSSLTHTLLNNNARRERNMIFSLLMQGGVCVYRHHTLLPSLSLALSVSHTHAGARALSLSSTHTRTHISLSSRKRYFCSPPPAGRSTPRGAPHITKEGGIKGGVFPPHTRCPHSGYPPAGRPVFSPRVSLFSRGHTHITL

SEQ ID NO: 1011024 - protein, 141 aa, Homo sapiens
RGVLSLLINIKSYTSCLMKPALLLLRGFVVVQHAGLCVAHKSGCPRQILLSYCAQRCLDTTVTRGARGGRHKIASSSCRKTIDLFIITRGGAGILSFLSPDAAEVCFGAADNKYYPTEQPCLFSSTRGVIIVEAPRGDDII

SEQ ID NO: 1011025 - protein, 144 aa, Homo sapiens
MCVPLLGHRDTPTHSRNFFSPEREKPPSAFSTYNRARESSPHTAVCHIEGQQLVWRTHARELISSHAPRECLTKEKRLTQRRGPLFSRRGSQRSHDTTEIKHFLYTQPLPKPRHTHSLSGVSLLAGRKHSRETLVPTLPSLSSL

SEQ ID NO: 1011026 - protein, 150 aa, Homo sapiens
  misc_feature (104)..(104): Xaa can be any naturally occurring amino acid
AKCHPPGEWTRNRSIPLPRKDAGDTKHLPGRAARFVLRPPRFVSRRTNICPERARKTLSLLSVVRPAAPHTICGGDTPLLCRGAQIPPNSSQRSARAPHIPLWXDTKRGLHSGGRTHPRETKDGAHVAPQPKRATGGPPLGGRCLVPGAQ

SEQ ID NO: 1011027 - protein, 154 aa, Homo sapiens
VLCPGDKLHCCGLALPTLVVILRLVAVLLSIVEVTSFSYHGASWRRGFFAPPVVLCCRHFLGGALLLCWGAGDSLCSAGVQLGFCTRPIVVVRFVALCGIRPLHCVVFRLCSVSLSFSIHGPLFKGRCCVVYMPLIEYRVVISHTLNGRLVPLV

SEQ ID NO: 1011028 - protein, 87 aa, Homo sapiens
LGPPLGFFAPRGEPPLIGSDPCRVVFDSLPPPRGNPGLFPRPGYLRRFSSHRVAAPVGVHTRSLLRTTIVGRYFYITRGGEPPRVYG

SEQ ID NO: 1011029 - protein, 171 aa, Homo sapiens
  misc_feature (63)..(63): Xaa can be any naturally occurring amino acid
MFLPPAERTPLYSGVLFYRDHFLCSPQARPRGGVIHTRPPLAWGCTSPSGVSPGGHLSVGGFXFRARSIELTTPHRECLTTQRGIRLPLVPHTAHAPLLNLFSCFASTERWETAGPSSTVFFQTFIPEECELSLLVLHGASPLCGPPLQCPPLDPLALHWVPSPGRGDPPL

SEQ ID NO: 1011030 - protein, 397 aa, Homo sapiens
MCFRVHMSHWSVFLASLVFFRSASTKLCVLSSASFCWCGGLISFLFLAAASLQGFPISLCWLFVHSLRSAVCWPGWRILPTLASLFLLPFLVGGMGQLLHQHYSSHFLALRHTPLVLSLSSCFLLSVLHCEYLTVFIERLRPLVLYNQESVSLPRLLATSLPLVPFPHPPCFCCSVLPSPLMRGWWLSLSLPLSPSVAEDTNSMCVPAPLLSRWVVDQNWWRVPPLALALSLSLSASLLWRPCPVLPLLFYPFSGACMRFPPRVLSLRGRARHRYRSPPLCCYRRSTPHSPRALSVGSSATVRLLSLLPTLMFVSSCFCLFLSLAIYPRRSSSLTPTLQVCRLVPPLPLFHGTATLGGSVFFIVVICSCPRPPFFFFFAPRFWGTFGGGGKIFFFPH

SEQ ID NO: 1011031 - protein, 192 aa, Homo sapiens
MGSYALVIWPIIYSQLYGVLPCSTGPRPPMGFLRLFVAPTKTYAQDVSQSLLAICYCRNGLFLGATTFVLGPGLEISSDHECFCLMQGSNWNAALLYQCLRRELMVRTRGTKTLPHVNAPRYFTSRWQLTSCLCEGTLGTHACLTYGRPHPPGLKWENRDFVRWMPSVVHWRFAPSTIYDPVPRQMAGYGPH

SEQ ID NO: 1011032 - protein, 114 aa, Homo sapiens
LSGCGLSLFFLLSVLVGPANFVVFEKWGFLRCFSFLGPVGTGCHKSFCVRRCLRTLGPSSGCSLSLSRDVLPHLPRAPSLWVVRDRDTLSDVGSREQTALCVRPHLSLGHCGAL

SEQ ID NO: 1011033 - protein, 82 aa, Homo sapiens
PPASLSVVVVLFWVRLRSRGSLLLFLCVAPSHCVVSPLDAVFFLRGGPPSNGRPPLLFSTVHFPRGIPAVMEPTGGPWPSMG

SEQ ID NO: 1011034 - protein, 435 aa, Homo sapiens
LCVCLLWVAQPLFLLTHYRGAPRWISMFSLGGGAAQSSVRFVLAFASIFVGCWLRLLAPSDVMVCNLTDHRVVIIVPAGPHSLCATLHALWRIHRLLDASHMEVGQNSPQLGSDRLWADNACAAVADKIFRSQLRRYDDTHHMVVVHSGRRDKSLLVGEKKMTPPQVRIDIDDRRLSTTDCWSLWHNNVGGDIFVVPPPTCRTIVSVCGATTPPPVLERSKTTLLCSTQEWSRKMSTSSREVNSTHHLWATKSHVMILVRAPHLVGRPLGRQGANRKSVSEGAPQVRRAHHCALILQHVCPRWYSFCMCGARSPPVSHVSRFSPRENAQQNLWGTHTTTAHGGCPRISRCRAPLVMARLPSPCNLVFATTTGCLAPPGWALLFSCQDKSWVHPILPVSLLNTPKEQRPQQNQRVFATNLRGNQGGPPIKPLVIIC

SEQ ID NO: 1011035 - protein, 127 aa, Homo sapiens
SPGPGRPFAWGCTFALQKSYVASDGAHQLLGAAHSKQHDVTHERRPLLNTRLGEHCKVTSCSRSKRKDNKRREQRTTSIPLTAHYSQVNFVKLSGLWSYLTQIFPVQTVLIFSRFAIAAGKSALGQR

SEQ ID NO: 1011036 - protein, 136 aa, Homo sapiens
SGNNSLCYGFLSGFSTGSTRDYFFGGYSSPVISGIAVQRYQFSQGSMGPHEGYAFHFGHTWSLFSAMCDYPSPSYTGPLKLDALCAPASSYFPRCVLHGCPTPSYLVSQSVKVYLDPGGVHGCLTPDLPGEHGGRF

SEQ ID NO: 1011037 - protein, 310 aa, Homo sapiens
VHCPHTFTRWCPEKERDNVPPEKAEAPGSAAGRGPRKPEEVRRGRRKRTTTTNGDRSMKRGENEEEGRKTAEAGSEKDGRGPAGSPGRAVAMDGEEVPEVMAGTSKLEDKQRLAQEEEVTAKRLAIIDDRRRREKYLYQKIMFGKRRKIRDGQQAARRSGKPTMSAARGLRRRTKKVKAGVELALMAPHRARGQPARQLDVARGRPRGHKCDGSRVNFSLSPFSSQPLTPNALWHGPEGSPSLPHWIGAAMLVPGQRRGLCAELDIICSKRASDMRRRGQRSTLLLASIHHGYNSHLQHSGPGLRRVMSG

SEQ ID NO: 1011038 - protein, 80 aa, Homo sapiens
VLTVCCRPLPHTTAGPGFIPEFVTLTRGPVSNNLCSGNRDPFEPPALMAVYSQANARPLVSAPGFRRFPRLLRLLPGVPC

SEQ ID NO: 1011039 - protein, 175 aa, Homo sapiens
MMRRHAQCVDIDRGFVGTSRYAEVPFLPGYRSGLVPVCSIHRCLAHVQLYDHQTEEPCMRPDVRSCSLTWETPKVVHGWQSGYQHKRMPSAGCLRRDRDPPCRLTLQSLGVLDCLGTIAIHASPLLVTHGSPLARVARVMPVSPYHRTLSMHLASDGAITIDFDCPLRRSARCGC

SEQ ID NO: 1011040 - protein, 342 aa, Homo sapiens
LGALAGVWPGSSCAVCPRGVRRCSSTRLPSPCSVSFAFVPFWFPLWSYVSYSSGGAIVAVSGLPCLRAGSYPFVLPLGCSGLSLSLSRRCPLLFVIIAAAPSQAYGGDHRSKLSATIETLKALSVWDMDTLGHPSDSGKHYEASSVVISTCRVLGSRIEVEGSLVNVTVMSSVGPHCLGSTRGWSCPGPLVGTSWGVSLESSLMCTSLLCISYIAVSSNSQIFRVFHPLKLRHQGVFQRPAYGVIDKRKADETQGPVSGSLSRLRAWSIAELTVTGGVCSGQTRSSFMNTQQPEQSPRALPLMRAPDMAVPRDSSVLEGTPRTTARVWGLHVIVYDSVKTGP

SEQ ID NO: 1011041 - protein, 106 aa, Homo sapiens
GRCTLFFCFFTGALWCFFYGLFFLLYVTILKCIVVMSYQLSTSSVFRGFQRSRYLFLRNVWYSCMYISRITTLASSTADSGQMLTDISFNQFVSVLLLYITLLAKL

SEQ ID NO: 1011042 - protein, 202 aa, Homo sapiens
SPAVCGSRGCSSGPGSPGVSGVREVRRGARLSLPVRWVVRCFAVAPVAPVAGAGDAQGCPGSLSSCGLAAVASCLGLPVSALGSRTVLRARRLGDTWCLQGPRLLALPGAGMAPVFSGSAGRLWLLRPTPRGYLVRLGSGRGWVLSPPWARWVHLCWTWRQSESRASLLAIQPLSPQEQLQSRDLPTLMLRVTNAWDPWCWI

SEQ ID NO: 1011043 - protein, 148 aa, Homo sapiens
MVPSLLDIPTLALWNIVDYAIRTGPTEELEWNDFMVSSDLLRRHSGLEYSCIETELTEHKEKDPYLLSQERQVLKVRYGTGHGGLCGELLMAPVVLKTPPPRQCGDLFPAPLSACPSAWEAFYATNPLSTLSSRHPPRKTSTLGPLSC

SEQ ID NO: 1011044 - protein, 164 aa, Homo sapiens
TDLREFPIHCVSRHLCSDKTLSVKAALGVSVGVHRMASYGAEALERTVPGPSPPSKTYFPHFDLSHGSAQVKGHGKKVRCDALTNRQWAQQWTDMQPTRCPPVSDAAQRTSYQGGSRSTSSSKPLPCLVTLARPLSPHEYPLQVHAYLDKFLASVSTVLTSKYR

SEQ ID NO: 1011045 - protein, 104 aa, Homo sapiens
MDQSLWPLTHPWTSPSWPSSWGATWDTLAMKMSLWLPPVSRRELQTSRPRLMSTYICLYTSLVIGAGDTLMSKIRGQRKASNTCTLAGEAHRDLLMNSRTEQIR

SEQ ID NO: 1011046 - protein, 129 aa, Homo sapiens
MSSLGNPTCGTLWGALLYTYNWTPALSYQCAQIRPPRRLRSPPLPHFPCMVCLLMLHGELDVDSYCNIIYCVYCNREGREGAYRGGVGLLPPGTQARGDIGTGTPATWPSPLCTVLWKRYTHVVSKEFI

SEQ ID NO: 1011047 - protein, 181 aa, Homo sapiens
FWFVYCVCFSSFVLFVAPFCVGAFCFCLVFFWSVRIVLVSSWLTCVVCFLLFLVGVSFLFFLVPLPSISMSRSAFWSFCSSIPLSSWVSLSSLSCLSFFELWSFLCSILFLLFDIPLSPSVCLLHLCLFVLYVLPILLGPLTVLGVSSLFLCLFRASSHWLSLISLLLSVLSSRCPFFSLS

SEQ ID NO: 1011048 - protein, 139 aa, Homo sapiens
MTSKIWSPLEESRIFNRILADEVITRKNSCLEETRSHHYSSSLFHVEDVGFTYIISELTGWRVTDQKALVKRMKMRMRNNKLFFGKHLQCSSNLYKTFIIFVFVYRAASAIYNGYGVFGVFPFFWDNANSVVVDMIDVS

SEQ ID NO: 1011049 - protein, 151 aa, Homo sapiens
MTGSDCQIFHSRGRAGVYLATVKSHHAECQVGGFEGKGRWGMTSVRHCAESCESGAGHRSSACYPCCATSSCYRHPSAPSQPSTLQVPPKLVLRALAPCWVKQVLRWSVKGLESRCEHPGPCSPLLGIRCRPCPLVAGPHSYTELEVLCSE

SEQ ID NO: 1011050 - protein, 112 aa, Homo sapiens
GENWRGTPMTGCWLDVPCTTDRHSLHEEENNMLYAVKEEGATDTCLSLQDAALLADWTPGPPNQEATVGLLLPCVTSAQRYRNEVLMADKADHLSCLANSTTALQGTGLEDS

SEQ ID NO: 1011051 - protein, 239 aa, Homo sapiens
STGPESWVLPGHLLLRCMLLSEPQASVWPSCWRSLGRASEDRSAEPGVPTWDCEDGSSRRRGRGDGTPRDAGLCEPPASALTTRGSCYLTVHLINFKQLKDPPFIWVFGVVFPGRQRCVVETAEAFQETDLGFRCRATGRGPGSAGACFCLLLTGLTHLLLKLSTPGAFRYPGARPHCLHGALVPAPGPVQGTCVADKPGSYLQPGLPAHPASPRPVKDGADVAVGDLIYRVTSKSHSA

SEQ ID NO: 1011052 - protein, 106 aa, Homo sapiens
MFDLLRPSSLCHLIEHSFEGMAGTFKCPVCFTVFVHGQQVVSSTSFAVQVMEDKIYDLLTVPQKFFFQTELQNLHDEPSTHSEGSLNRYTSPQIGLLGDRRGVGPI

SEQ ID NO: 1011053 - protein, 331 aa, Homo sapiens
DLKRNEFTWCQRHSQAIMAIPLVRWSLKGTIDTLPSPAYCESTILATIILSHQRGPSYCRSVIPTVRGLSRRVDPGNKDIEHPHCPGEHRWREYSSLEHESVAGLVESLIDSVTRPSPCAFAGCTAFQAWLQDDSGSNESDGPGGTMANIMIIWADGLFLQCCMGVLTSLATPQITFENMIVDDTTMHVCVSRPQQFDCSWWMPNRHIGNIVNNVCSRDWSGGPGLVCWGQLWPLCTRCLKQLRGTPCKSIANKNIGQPYLATLLASCMIAGPPHELHSYATSIRIGCPWQSMDNENTAHSGHRGPGHNILKPSTDVIRHIRVINGRAVEA

SEQ ID NO: 1011054 - protein, 170 aa, Homo sapiens
VLFWFCGCCAMSGWRLARSPLCTLLPLLWLKAPVWMHAFLVECLAAFECPVKSSSRVCPMSTAMSPVGELAAPDAAHPHPESCTLLAQDAREAYLPGSLGPSSSTSPRDPSLMPALPPSGLWGGRSPSSLQRGLPGALGGLLTPLFLRGVLAYLIWWTAACQLLASLFGL

SEQ ID NO: 1011055 - protein, 234 aa, Homo sapiens
ESHLPNKVGPFLYKIRASSLGLSRVLSDIGTVVRYHTVGGISAPESDPLTALMYLLPSEASSHHLQRLECGVCPDLGAELPRHPGTRDWTCTQARLHRTHGACWVRAEASLHARPQRHALTAASWLRGPGWARKRLNIRRHFRGSSCLKSTRIRIQFVDPKVISGDPWRETWTLASRQTAVITEQWFQPHGGTQEFAFEASMCHDLCPHPLLGGRLLMRILQDMTCIGQSTIAP

SEQ ID NO: 1011056 - protein, 127 aa, Homo sapiens
MQLYSLIATFPQVPLCGIGDPSPRLYELGTRGVGNPSLGPPLVASAPSVICLSINTQVASLPPLSGTPQSLFEPGHVNVQCLPMVFFRGPRSPIASFRQFPTGAVKGLLSASCLCGTCFSLLTLNAE

SEQ ID NO: 1011057 - protein, 327 aa, Homo sapiens
DTLSDVPYALTKCNVSLTGIDDKVELVTLDLDLSRLLAASHEFLPPTMFYPASLISRSLLWASPDDFICPRMGKVFGSPFDRLSVELKLTLGVTWPCTLILASRTSTKQGTALLVTYVLTKDRSYRALSSPTLVLVCLVRHRTGPFMVGARSPNLADLASCIGVLDMMEGLDAFDDLMQHTHIHALVPAGGEGHHRGLPSALNVPAQSMREGSGRRQHARAWGHWASAWRYWLGAGSFCRLCPRTRHQPSQLLITGHLLGLRRCYGIELQRHAQCQWGRPLACPLPSCSAAPLPGPLSGCLMANPVGGGPRRTAGRFVLSGIHTWFL

SEQ ID NO: 1011058 - protein, 276 aa, Homo sapiens
LERVRVSVKCQATSIWDGMLAGHAYSSVFPVRKPRQGPVVPEIGPLRTTFGQPVAPSVRVMLQFFVHVPEPCLPVPVRPRPGAREKQEQFVDLYKEFEPSTGQQHRLHHGHGNADGHLRHQLQRPALHGEPAREQAPGVGVWQFQLLAIIGLLLGSSPDFNSQFGLVDIPVEFKTWSLRQVLLHGLHALALIGRTRVLQLFMGTPKHDKCYFLRWLVLVLHMLIMCVTRWAGTALTGPREGTLPSNPPTSKASTVIALGRLSWDPHSHPCTGQQNK

SEQ ID NO: 1011059 - protein, 183 aa, Homo sapiens
GRRRFNMFCRACGGSCHSAGSPTLSSRRSFPTRFGAHVRRSTRWSAAPVKPAWRPTCAAHGSAACLLLLRRLGTAPAVPRPSAFPVKYSSAAGGPKATGDYDKKELRLRALGTAGPLLPANACEALDKPGDPRMDRGFRRVERASRLLGTSGHLRPDGGIQESAPACARSMTFVLPTSPAHAA

SEQ ID NO: 1011060 - protein, 75 aa, Homo sapiens
FFPDSERDFPYVQPVVMSFLAPGAPQVACKVPRWIHSFCGNSNIDVGSTGEFVKRWHVSCELCLMALTLIIAVSD

SEQ ID NO: 1011061 - protein, 218 aa, Homo sapiens
  misc_feature (123)..(123): Xaa can be any naturally occurring amino acid
MRKRGLDQERPRLLEDAEKDVTPVGSRTDPRYEGGPMTSGSVKGALGTSARSASLLTALAAEIRVRLSLLTQVSYKGTRLDEEQDGPQALELYGLLSRAAMWSLTASDPTRLEMFSCILNSSXGLLGTVVHVIGKPVAVSQIFNELQAAILLAQVSLGEACQCNRWTTIRPAYRGYARPGHRWQAAGHSGLKAAWGHNCSLATHRDLAPTGWSVPRGL

SEQ ID NO: 1011062 - protein, 37 aa, Homo sapiens
GQGKRVCGGGPDGPGAQREEAPGQRRSGVGVRGSTER

SEQ ID NO: 1011063 - protein, 109 aa, Homo sapiens
MRRLMWVPAISGRQVLLRWSGAARRRIPGIGQEAHSSWTSLNAWKRTVESWDTQHASSRLRNALHRPAGDIPCTYVASGTRHGAQRALDHGAVALRVEIPPLMTDRIAV

SEQ ID NO: 1011064 - protein, 314 aa, Homo sapiens
MSLGWPCVLIWCLLASPNVPQGAPKLQASPAALHLTNWPTSRFSFQRSNAAHVVAFTGSSPGLLSDQPGQVPGDHEWSSLRILPRRDQTKHALCRIMGPSPSLARHPQQSQSTFLQLFVIVPLIANRQGGTVVISRHQRLRTQPGQPSSRTPMHTLTLGAIMAADMTERTKAHKGLPRCSGNVTSAHGWHRPPPLLETQHAHVVSLMLWTMMGAPRTVLHCCELKVMRSLATSLAFSANLLLNREELGLITRVTFLLALSAHSYTSPPHPVWIQMKPPGPQALALPDLHPPRQKYMRGAEMSTQLYTRSGGKTE

SEQ ID NO: 1011065 - protein, 109 aa, Homo sapiens
MAHGLSELVLPSWTWVYLSDISRMIRLLGLRYTVDYYAVCVWNKYHGVYSRSVHVWGTVPSVCTLNGAVRYGCQHVPCEHHGALLTPHPENNKDESDSCGDGYGNPRAS

SEQ ID NO: 1011066 - protein, 158 aa, Homo sapiens
MGRPWPRGVSPRIRDVHTMFLDLGHQALCISSCLRPRVSSSRASLVEPCPSFGGHVVLSVPLHPASFSRLPSLPNSSSSQLDTSLVLVSTVGSRIAPPRHVLMAQAPVVGGSLCWIPSAMESWCRDVGPDHFRSASPSSSLRGPPCGPRHSTLTASQD

SEQ ID NO: 1011067 - protein, 209 aa, Homo sapiens
SQGDGLRDDCGAPVRWIVRLSCDLYSWAAWVFRTGSATGIAASQRRFRGVHGTCFKSQTLTAACPPPLPLLHSLSTGYSQAQSKSPERPPSHGREKPLLWLKGPCDIFCHPERRQHDTCSRSSIGPVPIPRSTPQLAPNSRLGSAPNSTLSEMSSTPQQLPSPDESTPQQHPLHMRVHPNPHPLQMQPHLLSTPGPEYPQLRLSSWVQP

SEQ ID NO: 1011068 - protein, 64 aa, Homo sapiens
KSKSPKAEELGLLDLHQWFARGSRAFGHRLKAALSGFPTFEVLGLGLIHHYLPCPSALTPPIVD

SEQ ID NO: 1011069 - protein, 100 aa, Homo sapiens
  misc_feature (95)..(95): Xaa can be any naturally occurring amino acid
MGVATRRAEDVWSCAVELRLGNGHHAGALCVVGLGNVMCMLQAAAALYGFLRPLTLLPILSNITDELPLLLLAWGAQWPGRGVVEPVAVTLSLRXYPERW

SEQ ID NO: 1011070 - protein, 169 aa, Homo sapiens
ILIFFRLLKGIFPGDSKAILNPWDQLSSSPQEDDLPHGMPFIAGPWVDGNPPYCVENYDCSFPQVSKLAGFLVTSLEPGGSILGYAVISHRCTPVEHCSKRRGDHLDDKSMSSSVEELFPGNPFGREGAMPRYRCVATCCVQTKYPQSLHLVRRGLNRVPIDGVCAMES

SEQ ID NO: 1011071 - protein, 182 aa, Homo sapiens
ARAPSLEFRSLKRLTLVVAVPSAVPPVPPPLPFPLPPLVIRDFLVQMPEPLSDGPVQFFSAQDLVIGHYRKVQGPLGTTGEVPRAIWEDVERIGLPLRSPIAHGTDAVPKSPGQDHGALAQARSGACCSLLRSPRRLRVDSSSLQNWLMGQEVQAWALGPSYDGPLELAAQTPIFELLPYIK

SEQ ID NO: 1011072 - protein, 171 aa, Homo sapiens
MVLDKYALSMGQFLARRCVGRSLEVTALVTYVLGLHVRRRWRNDGFPPFGGGICCGKSLSAWRRFFATLRVGGDRHRIWGYGHRSRSSDTCASRRRLKAAHTRWTGACSGAMHTRQGGWTQPRNRRDDAQRHRLEAPRKECVIPGEAAAGTHRQESANLELVAEGHVTHLS

SEQ ID NO: 1011073 - protein, 199 aa, Homo sapiens
RNCRGRVAGRTGRQAAAQRLNPLRAAGRPSHPRLCVSPASAFSDFPAPLLPSSLVLGVSPPAQRSPRPSRVKPLSAGRSPPRLRHSFSLWLVSQTALLAPGKTRLRPLNGTILSQEPVTSARGPSPGTNPGGLGPSAPALRRTQSAPRPRAGRTRTALLACRRSEPEPDRMDPDAMTARTARVTCLRSPSLGVRGAPTD

SEQ ID NO: 1011074 - protein, 222 aa, Homo sapiens
SGAGNGFYAAGSSRIRCPCPGSAWQIAEAAGRAVGACCCNQWPWDVTVYSAPGWRAPQGEPCCCGCRALGILLRGLLLWLIDYDDTASDRLCTFAMQVSLRCDKALPPVECLSSLWAMVPVGSPTCAMDTSTVLIDDTVLLCGRACNDADRGPAMCSMPLTSIRTIGSNPDVSGTCSWGPGDGTIHGCVLGEDHVHFWWATSRQVGLYCPDDYCDEARYQHP

SEQ ID NO: 1011075 - protein, 140 aa, Homo sapiens
MRLCLGFHREYKAGRLRGWRKETDVACNLIGPIATAEMGLQFAKNAGKKARRHMRPVHVRRVRRLVRKSQHLNSLYVFHSICGVDKNSAGGNSGSHPFNQNRYTDESIYAFAKPGILIWCRKKRIALDTIVPWDGNWNDR

SEQ ID NO: 1011076 - protein, 245 aa, Homo sapiens
RAVGARAVAGPAPWARSAVRTVVPEGRGLGRRERVGVARAVGRGMVGADAQLQLATLEGTIACSGATRGLLCLEQRRRQDPRDRERYGRDSVYDDVWHGIALRYETKDIIRTLRRHYKSVGDLGSRDYRTAGDRPGGTTGWGRVATTRQAPGGRALKGGAVEVSTRYVNDRLRPKRERSEAPYGGPTRKGTGRLPRAFKLTIGDGAAGRNGRSRRFARSPPAAYSGNHGPRFGGRLEPKIGPEED

SEQ ID NO: 1011077 - protein, 48 aa, Homo sapiens
MGARVEATSFLPWAWYVDVSRRLGHSAPGVAIRNPFGPPVRATAKFDG

SEQ ID NO: 1011078 - protein, 112 aa, Homo sapiens
MRNLGKLHHINIACGISQGLADNAPLTCLRGTLTVRAEDPWEQTVWEQTGNWYRWETFFKTLTGMSDKLQSRCSLQGTSNIAFSIHGLKANERRSPNGWHCLNDYGTRRNNK

SEQ ID NO: 1011079 - protein, 253 aa, Homo sapiens
AGWRLEEGERTCCTWVPPGVIDITSRGSLPKNGFLFSFSSTAYMGASIQSTEAQIEVTNELPLLRDPGDPYSDLKALLPLSLAHGTRRPWDSGPAIVTYPGQGGKGSTGDRTPGRSGTYRDVTFRPGLAKVTRLRMARGGRYGGYGSIVGRRRDVGRPEELKATEAIPQQFPGTDGNLEHLAEYPGKLKPGQDRDQREAQNTRHTGLRRPPSGKLNNQGMYPAYHERTVEALERFPCTLIGLPYRLYIRSSNI

SEQ ID NO: 1011080 - protein, 56 aa, Homo sapiens
MKRPCGVDNLVEEEKTIVPNKGDKNLESKTEESTYKFMKKTITPLGEAKPPIDEFI

SEQ ID NO: 1011081 - protein, 109 aa, Homo sapiens
RASVRRLVPRLEDAAGSRVLWRGRWARWATHMRGLSAVRRSSLANMLVAPESAKAEVSSTTVCAGSQRCLSLMKNEHKLGFSLVIYSSGCSYLILSLQTEGICRKSCDY

SEQ ID NO: 1011082 - protein, 140 aa, Homo sapiens
MLPRSKAVLGPHWNDHRGAKVLSPFQLRWPNVELDRSLHVQQRVKIDELWNNGQGPVFERITRHDRATFAPFPHVVKVRVKDVKGEAAEINEVAERPGGISGRPCAFKYSMKQRTGLAYHPENSADPQELPNCFRKVLPP

SEQ ID NO: 1011083 - protein, 133 aa, Homo sapiens
REQTPTGEEEWRAAVVDIAVGGGSRRRPAELGRVRPGRRCSDACVPPFVRAGTLVLPDRPQPASAQTGLQVTECLAVYAAIRPEMLAEAGGAHAPIVSYGTPPRTTSTFHETHDPSSVIPETSLQGPSGRTVV

SEQ ID NO: 1011084 - protein, 233 aa, Homo sapiens
MGGLFRSEEDDTGPAFSTVQRLLIVCVSELGELGKVHVLVTEYPDVNVVPSGKFGEMKLRRCEGNWIDRASTLLRKREENAKHSDYGQPVIEPCRFPSPRDMHLLRGRILSKIDKVNCKEDLNDKTRKALKRRLPGTEQNLEFILRRTQQSWMRWRIRDLLEESSIPLGANVDGKRLAPLRLGFVAGVINRERILLLSACFGGYAGEHVFLRQAEIGETRGGSCGIGTTVPKS

SEQ ID NO: 1011085 - protein, 419 aa, Homo sapiens
MSWSRRALTRRAGAGRGGRGAEKSGRAAERPGRGPGLCFAHRRPDGAQRALRPERPAALSPGGAWGLQREAQPESPRCVRPGRNTCTGRREGGKKTAAPHRYRPPEGQALKSDGGGGAVEGGRGHQEGTGRLGETCTIGTRRPGTYQWLQRITQMMPQGDPFTWRYHSGTMEKEGDIIGTHTNFQSTGNQGEEVPFSSSKGDHRLSKDTRRVGPCGGGAYFKGGKVSPKGCAQFTTDCRSEKSARSISQSRKVAALAEGAISTTKNAKRVGARPPVTESNGQEAPKLGEYQYTDQEGNRWKREKEGGSKGSPRREEYAEYRQRGGYPRYRKEALYRKAHRQKSKSKTADITEKEGHRLTPKEIVIAGRHRGRQKKTPRREWHHERAIRPDVAEIDRTSQSKQYSRSRSTKRTERPRADP

SEQ ID NO: 1011086 - protein, 116 aa, Homo sapiens
MGIFPQCGSRPDALAMGGICDLRRLGLRIPSMHTSVNKWHHFEETIPWGMRPYRMSPLRVFHYGVYQPCRLYGHRVLVCAAGTTVPFVWHLNSVADTPSTLGVSHFTIVPGSAQLF

SEQ ID NO: 1011087 - protein, 84 aa, Homo sapiens
RKVVQCDYKLPGIESGCRLRFRSLYQSLSLSVNEISVVGSRNLPEISDNSSSRQDLARPKERYVSSRELLDPVLGRWKRRAKRW

SEQ ID NO: 1011088 - protein, 133 aa, Homo sapiens
MLTYARDKVMVIQPNISEDAAFKVLSWNAETVPSTRVQNLLSNLIFHFNLHSRNCFRIRMKLASYNEVRDSAMKIWCRDSDRRTSLKEIKSPVYVLDVRSSAEEIQLADLRSSGATSPKKRSHRVIEIRNSFI

SEQ ID NO: 1011089 - protein, 191 aa, Homo sapiens
  misc_feature (118)..(118): Xaa can be any naturally occurring amino acid
  misc_feature (158)..(158): Xaa can be any naturally occurring amino acid
MVATAVAGTAGAAVRCQRGASEYTGSTRGVESIIMQVCPSYAWPMRQSESTSGVKMNRRQFRLCRVKDHYDSVVSGNTIVVWSSSEMIEEPSAPPYYCDEKYVNTYKTNYCAFIRRDXHSLLLYLVDLESYAPANAWMVAEDQASHEKMQTESRANSXVNNTCVVQDNASVVLLDEGGKSYSEVTLLITEC

SEQ ID NO: 1011090 - protein, 162 aa, Homo sapiens
SGFLGPRSGDGVNGGGTTVGDVRLSSRDCEHASRAAVPRAAVNGSRGRRAQSGGLYSFPMYQGFQLAIAYGGTQGHCSHRRKIRGDSIRDTYLQRYEAGTGRSNEQRDRGERHTRDALKSAKPEEKREGPKSPSDADELSAGHDDPFTRKGTEARKQCHHHT

SEQ ID NO: 1011091 - protein, 109 aa, Homo sapiens
RIFIQAPWPQPAGRGAAGYCLLLGLHLFLLTAGPDLGWKHPGQNVACADVKALYPPTSDRLYHLSARLDPIPAVESVVGGTTLVVMLIPQKSYVCHNKGWDGYDVAVGM

SEQ ID NO: 1011092 - protein, 271 aa, Homo sapiens
SAGVVSARRASARGARLASWPDAHPGSAGCARAAAPDAHWPRAGRRALHAPRPTLACILHCTRTPAGGNSQRHPGQTHCAGPRSGLPGPPTPRPLRHDAWHRDRAPLSPRSSPCPHLHTLRTASPRRLCPHVGPPWPHGPGQALGRAGPSDALLVLLALAPSKPIQPVGCNVRRRHTRGPHLLGPVCPRPTPPPVSAFRYHPSRCHTLPLPPWLPCLRNCNPLRPHTRHRPLRAGRPSPCSQVHKPRSPLRHLCTSQHGQPTLAGTALSPL

SEQ ID NO: 1011093 - protein, 72 aa, Homo sapiens
RGGVWSAVARERPVVTPSLLTAATAARRSCGGLVRRVVSVMLCSVVMVQVVTKSACLSVKVPCASIGGQSML

SEQ ID NO: 1011094 - protein, 250 aa, Homo sapiens
SGLACEPGGDDGNMALNGSCKSDRLLRGRPPIEAETKVLQARRERQDRISRAHGADYLRAQVSPTCRGRDSDADLQGRSYLLKSNQSEESTSVCSVSEPRSQYVDIRYIPVAECASAAHHPTARDCSTDGLMPQMLPPGTLDPAPQAPKYLRPRALVRGACSIDSQAAPGATCYLHVPPIYKIVMACTQNSPHLQNADLVPLRELGSSTLPWRLDIQLCGLIRAYAEALRRPAAGYSTKSKPLRTKPSRK

SEQ ID NO: 1011095 - protein, 121 aa, Homo sapiens
MAGPLRATSDSLLVILAGGPWNVAADGLASSPGRSRARRGGDVSHWMPGVEDAQCLCGMHLDFCRQDGYNESQANRHVTNSSALLKGWCVDPASRVVAGGELDLGPVELVPKHSVPRTSPN

SEQ ID NO: 1011096 - protein, 184 aa, Homo sapiens
MASLHYFYFGIHFEVAGPVWCWWIAGVQAVWRLTFCSPGSSVPQSWLPCAWGFTTSRVLLLLRKRCEGTAYPGGTEAGLGWVRRTCKTQSGGSKPGDRSVDPFPCPESRTYSVIAINLGSKWCWFILSVQREIIHHSERKARGGEKVYLGKPKNSLVTTDSPNSTMVKVVNIEVEPISKDQFAG

SEQ ID NO: 1011097 - protein, 189 aa, Homo sapiens
SGEAEGALRRRRRRRGWPWELSTGEDSLSREAGSRAGQDGSPPAGDWALPGASSVKRITQNHRRIVAATYFKTQSPQIVQAASSAPALDTDSSPPPYSSITVEVPTTSDQKFTGEFVVPCQLPIGDATSLPTYDEAEKAKAAAMAAAAGETSQRIQEEECPPSRCTSVTADQLRLAECWLFVLAFVMAF

SEQ ID NO: 1011098 - protein, 103 aa, Homo sapiens
MEDFPKRHQTIILRASLGGKLKLLIQTIVPKGAIGRQPFTERKINCSEAARDKENGMQWGNIEFPVEQKIVNTGINSGQEGAVPPDGSTEREPEAYRHYPVEG

SEQ ID NO: 1011099 - protein, 158 aa, Homo sapiens
SGGGREVLGPLKRPPSRPSAGLAPTLSRLADWTTPTLAGRRVPLDTQADSGAAKPNEGRAPGRTVLTRRKLHGHTTRSRRIKSGIKESIQEEYKLKHTSTSSKSKMGPDYKRPHTMTNGTMPCTKLIKNHNLQFPISRTPEPSPRGSDEPYTYQYGTE

SEQ ID NO: 1011100 - protein, 142 aa, Homo sapiens
MNVPLDGAAVVQSSTLSNCMALITCPSILGLKMRGGTRKQSGRQLEVAVVVNKLALNHLAWGSLCTRGPPLINPTRGHGLQRELHNGDSGGRKLGGTTWLTAMCSNALLAFYWQKMNQGEFLKLLIGPLVREGYRRPLKVAP

SEQ ID NO: 1011101 - protein, 276 aa, Homo sapiens
RVSWVSGGAHEGGSAGFRWVRRLRDPGCENSLCGSCRPAQGLVTQDTCLVGDVTCADVRLCERTVRVGPVRAAQMWRLAAWCPRGSWLRLQRAIRCKTLPGWSHSCRGRQTITLKHGSWHYQLVLARLIRERIAMMYVEVNNRRVMYCIGEGLHNDRLSVVFRGSVWQVVYSGYQDAIGTQMGTELATVPPGIGQSNVHLDACMENNLLVVWERTGHPISGRELLVMHVQCCVTVERIPRWRVGIQHVGGKEDRVCAIMDRAMAIITGIPVVSCGG

SEQ ID NO: 1011102 - protein, 219 aa, Homo sapiens
  misc_feature (193)..(193): Xaa can be any naturally occurring amino acid
MKCRKADSRSESPTCKFRVSLSFPLQPLVAVGVYTALPEEELRCRALPERGEPEGPGVRRWWTQSGRRERLREHMRRISARLLGWSTGDSPVLFPSSQSAVGQGKNLTANSSALFECADENIGRTWAFTASHAGISERSLRIHTDREGSTLKEITRSSLLGTEHVPLKLNVKAHEGKDSGIWADDNEEQPYSXFFLVILRGVPFMENAYDRSRRTEKGE

SEQ ID NO: 1011103 - protein, 138 aa, Homo sapiens
MGHDLRSFIAYPTSCGRTVELEEACLYDGVEREGGKLSWLVDLAGKHYVSRLAWGPGLPWVGWAGGRMARWHPSAQCKQVRGEPFKYQNMKHHWIGACTTDWGRCVCVEPLRGATDEWRGMWPLKRGPPSYHYRADDY

SEQ ID NO: 1011104 - protein, 112 aa, Homo sapiens
MGRAVKVLQLFKTLHRTRQQRFLNNDASSHYEAAQTLKHNMQELSNKYINHADNLLSYTNTQQAALTAHNYGSPALLGTPLLYPPNAHPFPGSKYPHAQITFQPPNGNPTDN

SEQ ID NO: 1011105 - protein, 229 aa, Homo sapiens
MSTLRICDIPYLNKGYIVVMRLPSSPDTTGCTVITEGDKITERLWAFYGTLKNDFLQNDKRQVGPVVLRSDSYFLGKESHCIIVIMNYIIGTSWACTHRSCNHPINLLRDLTSSQWPRATDDAELHLSQPPTWPSEEWLNICYQSWSETREIACFSDELIDSSEPAASKTYDASDRTPVSTRRQLSLLPKELALYVLSFLEPKRPATSSSDMSLLEKFGCRQASLEQRH

SEQ ID NO: 1011106 - protein, 73 aa, Homo sapiens
AACVMAQGFNAYFKEFIIKSVIVYRYVSSKATQGALHLIPTVLYHWEYFYIIPLDQRTPEVTIYETTTKSIDV

SEQ ID NO: 1011107 - protein, 313 aa, Homo sapiens
  misc_feature (297)..(297): Xaa can be any naturally occurring amino acid
MTRAMRLLRRWCVRGSVCCRCSPGPGLEEPTGPAWYARAMRGAVRPQLSEALASPVRSRKPQPPLGELVGELPRGKEVRRARERGTQGSARSQQVARLLQSWATERVLRSVATRVMSYNFNTGSCERETTSVPSSIAILWSAHVQPIEGSKHKTTAPGALEKTHTCERMPWGDMRTCGVHTRRIVPLLLRITSSQHLSHGMTSQLGGASSRLEKHLDLTFCWTRPNVRMWLGAPFVGWMTLVPWGRPVSGATNRSISYAVNPRCIHIPARNSSSILGTLQRGKPQVALSYGSRISCXLASRFSGSTYPRYPGA

SEQ ID NO: 1011108 - protein, 102 aa, Homo sapiens
ERGREVMAAAPARGGGGWSAEADGGCSGSGSSASRGYYINDRSCRLRPASPGRLLGAENPYGRRSREASLACVRVALSMGIFPGIDERRRAMRVICQLEHFS

SEQ ID NO: 1011109 - protein, 282 aa, Homo sapiens
SGFLEKLQCGDALDRVLPPVSFHLSSCSSGSVHAAVSSGNYEACTPEASPAGMERQPEKEGYGSPDRGSVYRMEGEPDWEPDCMGPGEYTIPNELDPYMRTNSAAYIDQYGDKIGRRFSMTLDASSDDEGVLELVEPTSDPWFQQRECSRTVRPDPDDSLGTHHMREGTRCAGLLYRTGRTDKEDRETSCVRDREHGAGCDDKDHGAYAVLERERERGRRSHPCRRVPQDENSADGEPRDMKSEAHRKQGTEGRGDGEQAQRQTPATRGDTRLEPCSASAPP

SEQ ID NO: 1011110 - protein, 42 aa, Homo sapiens
MRSGAVDNGRHQRRASRATLGWSDAPGIRRPRGFRRQGQSKR

SEQ ID NO: 1011111 - protein, 222 aa, Homo sapiens
ADWGLRRHGEEEGAGSLLVRMDACHRRMPAAAGGQTPIHKTHRDRWQPWREAAAVGRGAREGRLGQVDPGSSSAGVTLQAFLQALPALGRIYPPCLLTSAGTHSWAAQSCCSLLMSTVGGFEMHTSGRSAFLPRLPFPHWQTSALGVRSEVHIAPYILMGGSRSLTAADEYLTPSSICVAVGAGTEALDASTWTTRAVLPGWQEGSRWEAGGGACSTGTPGF

SEQ ID NO: 1011112 - protein, 117 aa, Homo sapiens
SGLSPPDPSMTMRIPTAGEDPGGGRCGHERVDMSPSPPAQSPRVLGCDQCSLLTCGRSCTLPCNFPTAAERWMFGCLTRLEALLRHAGHIGRNGSSAVSGSSCAAKREGSAGISLLY

SEQ ID NO: 1011113 - protein, 88 aa, Homo sapiens
SGSAACESSAVSHRLGLPAGVKKKMTLQWAACGNRLLYAEIGLILSLSAYLIDYLHRRDGKDKIIVMTGVKLQLVGTRHILDQLSSYG

SEQ ID NO: 1011114 - protein, 107 aa, Homo sapiens
SGRSSVAPPCALGLARLLRQAGRWAGRSAGCAERLVPSVIVWAGVRLWQSGGLRPGAVQADCSRPVARERNSVVATTHATFRQLTRMTERYAYCRVRSYTLQPTEQC

SEQ ID NO: 1011115 - protein, 230 aa, Homo sapiens
MRILLRLCSRSPPAQAGRLEERRESGAKPSRVHVRSSDARGGSREEAREADGRGRFPGKVLGLEENEARGTWARVGSCWPGVPPSGLYVFSQCHPGLRSPLIGPSGDQPKVGLVRAWTDWEIDRRTCKGKLSGIALPPWTWRNRDADGHCRKKCSTVRLQWKRDSYEHEGTQTPDLGEHPRLRDVGYTGGAQIAGPGTAKSVGVGIYEGYQGQVHLTPLVPHLFNGHKPE

SEQ ID NO: 1011116 - protein, 166 aa, Homo sapiens
MVSSDIQVKKKLVEALRSEPRLFDADVSDSSAEEMKSVAHDISPRWPAPEGEQVIVAPGSEYLSVQGTLENAVQRAGRRKVPDEELRGLVTSELACRTPSTHADIRRCLLGEASRRGEAESHFMVQTLAERGRLTTSRILEMLRVNMMNSDGGQKIGVPEVGERLG

SEQ ID NO: 1011117 - protein, 120 aa, Homo sapiens
MRVSVNTVVKAINRLLLMRYQGSNFQQKTCNACRGKTLAVHLTASRRPTCAVSYMTHTYIRFTSKSQDTVTDYVRCASDRRNIIIVSESALYARCIRRRAYRIGSLRRADNATTETMPIK

SEQ ID NO: 1011118 - protein, 161 aa, Homo sapiens
MTFVLAQIVAARVVAAPRRQKVTPCRLRREHVQERRLSDRLPGEKRTRKAQMRAEGSCEGERGRDDNEEPRRNSNVPSAEAQIMRDERRTFERRHGEQCRNVEPTISGELGRMTNRGGEQYGCATLGTFGERKVYATLEMNVLVENRHESEENPACTRRER

SEQ ID NO: 1011119 - protein, 142 aa, Homo sapiens
AEGQALVPILAGRCPPALPVPTERPAALTVASRSSTLRHHSCPVQVHQTICGCMGNEGDTIPTRYKPGQTGHNPHVYPGRRSPCTEVVSGKLQSLTCDGWKRRISHVVHVLSVVLCTVRMIRTESTVIVEMFDVSEMGSNGT

SEQ ID NO: 1011120 - protein, 83 aa, Homo sapiens
MESQAQTILQKRRDCEFWPSLPQGISTAFVALLGKEGNKETPVVQRIFRNLSVTGSCPKGASWLLMKACALVALIQGFYNSPT

SEQ ID NO: 1011121 - protein, 222 aa, Homo sapiens
AERADEQRAGRHLEIRTVPGPARAGGRGHQVCPHRRLGPRQTDLPPMIWRLIHSTNQQGVEVLIFPKSTDDDDSASERYVGMLIVEVQSLIQDPGQSACDSALIYKHRLDDTAFFHSLDAVLHQFGLDTSRAPKTDTAQTGVATGSFDIHSINDLCVYLCIRAALSFGQRITLMELTVNDTEFCSLQYYSSPAWDVTYFLRSSVGFTPKQANFALMEREPPA

SEQ ID NO: 1011122 - protein, 223 aa, Homo sapiens
SGFGSGVEMYVLRRFFRYVFSTERRDIYGSSFPRVTALYASFHDEVAAVEKTGRRLEEQGEAEPRCVARARKRVRALVVLAFRLPGQLRLDVILAWLTKIRTYWSLLVQEYVEYTRAPQQWGTSLLDYRYLLMMGKCVPPESITLRASWHLVQTFRDYIKTCVTMHWVTVGIMLSMTEPARHIAIYRGKPIWVTIKVYLFVLRGLPSVALDTVPVVLSFTVRD

SEQ ID NO: 1011123 - protein, 108 aa, Homo sapiens
MSKLVKSTPSRPEDKRSSHCHNHIAPLTASGQVARRDSLDCIRRCSSDRGANGVVTALTQDDRKFVIGGHWDCSATLAISSSEESHKTYNWFHRNLRIVVERASSRGR

SEQ ID NO: 1011124 - protein, 176 aa, Homo sapiens
AESEEGGWERPRYPSTLNQQSATKQTIQPATIGVRVPPDLGLSRVLCKHVWLSGPPFASLVSTWIVFLLGWRLYCGCGHVSPSLAQKERNLRPYYSNQRTKTYGVSHQMLIHALSRYVIYGTCLFLLPLWVPSMLAEGVLRSPAQVQARSFVRRTQTTDRAGIGPLSVNRVNRGEP

SEQ ID NO: 1011125 - protein, 224 aa, Homo sapiens
MESTGPLTASEARVRLWARTGDGDGTPGPARRLRPLRSDMSSGPCGRPGPMSGRGRVRASLTPVLRCGSFPQFSGSGLSALRCPARARGCRLPQTRRTGLAQLRARGSRGADYLRPALRPPAPSAVCPRGARPLAGGGMTFDVHAQRGSRWDHGGLRACVFRRVHGHPCQDQTLTLGTRTPTFQPHVYYHFTNHGNPWFDSKLSTPITLGCWANKGNSVTTYFF

SEQ ID NO: 1011126 - protein, 190 aa, Homo sapiens
MLLPLLLLLSMWLLSVRMCQDVARGVCPSATSVMFYRLKFLTYSPVWIGSVPTYIDFRCTITIANWLSTGLVMEPVLRRCAVPSHWPASCVHASCVGLIMPRVDTPLSRSGVQTKWVLLEQLTWLQWNTMELNILDSRLAVRSLLNRLLMTREHVTWTRLREEPRNSLAERAWIGMINRAKVGSVHEGKI

SEQ ID NO: 1011127 - protein, 170 aa, Homo sapiens
MHIHAGPTIRTGGSSPHDQVTSADDNTLVRIAQKRQDARTPGTQSKGRTIGQTDGMERSRIKTAGEHNAHNITYQNDHMRKMTKDKRKAPEDHGIHGAADGTHTTIGEWRRPPRITGTSLAVLSTGSPAQGTRNSRRDPRQDTWELLGWHTSQNITCIEIREDLRRQTVM

SEQ ID NO: 1011128 - protein, 259 aa, Homo sapiens
RVEGWKVPTSRCRSLLARVLGYLVVMAGGIDRNELDEEEQLPENGIAKRMKEFALPDIHGHDMNAVPKNDKKRKDSSLTERLWPQLDKTNTGHTTITIETRTWQQLDTSDYLPEELTHYDFDSLLNTFTTSGRSDDTHASLGILPHATSPHDADPTTTHALGNNRQRRNEPNYACTTCTLARNFTTRDARHAYCATRRRQPVRLHNLLWRHGVTTQALQTSLHTKELHNPRTGPNLVIVPQPAHLVHELRPGHSTIRDY

SEQ ID NO: 1011129 - protein, 175 aa, Homo sapiens
MPKRRAAESSNACRTSAFPKSSPDATKGWRRDWSALTHVLRCFGMWPCVAMRSVSDPETGRPSSKSLNNDSHFLATFLYSPVGTRDDAVHSAPLIDDTYQCLLAVAGTPRGPQDLIAGGTVSAPMPGIPGGTAMALTKALALLVVLLAAAETQCLERKAEPDLLGRVAGLSEDSR

SEQ ID NO: 1011130 - protein, 74 aa, Homo sapiens
RAARGLASGFRELWCMSPSVDARPLAPWMPRPRSQLCVACNSPTILRGEALAQHLPPRMSLASESALGHLSHRS

SEQ ID NO: 1011131 - protein, 135 aa, Homo sapiens
THRRKCIDSYGRTGPLDAGVYNSDYPNGLLQVHRELETHVSGSRQYNTCCNRHNQTLMLDPRAVGPHGLKHTEHMPHEARYSLRSAWAKVALVGTWSGFYRVIHASLLFPESMPECGFPFNMVAVHQENAMGQPP

SEQ ID NO: 1011132 - protein, 190 aa, Homo sapiens
MPKKKPEDHRQSEKQREYSTRDRETKQRKDQRKEQTSTQKEGNQETKTKKTETRGRESPGNQDREQAEEDTRHTQTTTAKQNRQNGTDSSDDQEETPAHTEARHARRNGTSKTKQATKTKHAEPTTPNRPTEQRNRSTDRKRTPHTTEATASRQEQEQTNTRTYKRRHNTRRATKDTETRHTERQERKTT

SEQ ID NO: 1011133 - protein, 151 aa, Homo sapiens
AGSRQRLGAGGGGAEGGAAAASAIPGPGGPHSEELEHERTATPQQITTTNTARTTNSTKNNHIHTNHHKQPPNNKKPTPTQTHRKRHKTTTQKKHRYESRERTTGEKQKESGETQKRRQGKKSNREAERRKDNATHDTNQKEKDTKDTTKK

SEQ ID NO: 1011134 - protein, 305 aa, Homo sapiens
RAASCQAGPGRCRAPGAAGDAWILPPPSAGCLVPRGGCMSPRPWVPSRRTWNLGATPSRVVGPCGEWAGLPRCPDAGDGSPRRPALLAMTVPDRPFPAHQARGRLRNMRRGTDIPSLQGCRVELRAGQLEVAKRSPQALYASSCPKASFRELGALRLVTSCEGPPIGGYLLENHLTRVRKHLTGERTDSYFKGPSGPKDIVNVAELQKSCTLARVGDRDLGTERSTRVEPLACSWRLGSNWAADLEEPEQDDLPAALVEEPRNTYAIEPIAGHQKCPEQWFPMGPIWFGARTHAHGERKRPRFPG

SEQ ID NO: 1011135 - protein, 194 aa, Homo sapiens
MLGMMDVVRGMIFQFLVSNPGVLPDSASVASVALAPRAQMYSAFDFNCPCAVGLLVRAYSAGILLAPPLVLFLLGLVMELDNVSYAVIESSANAAYSVPACVPNVDPSVVLDAYHLFLHPNGPQLLPLDALPVSSGLAFTATLMAECFLCGLAATAVPCESHWANGSLCTLAFLAPGARSACLALGALPLRIYG

SEQ ID NO: 1011136 - protein, 68 aa, Homo sapiens
SGRYARGMKDNGNQDNSKSGLAQYQMPTSFIICKRTVGVNVLGSGKTGMGWAAWNFLATHCVKDLVTC

SEQ ID NO: 1011137 - protein, 97 aa, Homo sapiens
MEGVVAMISPSSRSSGVGGPPGDPRAVFVVPARVGGVRGGFILSPERPLGRVYRSQVGVPYARCGPPRAWVQHPVMQPRRCSPIMGRPAADDICRAP

SEQ ID NO: 1011138 - protein, 151 aa, Homo sapiens
MKTKEDVPQRSTRNKQNDRRRRKKTKDGKQQHRDTPKKKHNKRRAKDTEDEKKNQEEKKYDAISESSEDKDDKAENAEGTDERGKQRRRNTRETQRTMQKRTDERKKGEDEKQSERGQKEKNQEKKKGEEKKRTQQTPAGEPGYKDRPEKY

SEQ ID NO: 1011139 - protein, 91 aa, Homo sapiens
RAGGARCRLWHRRSRLRLLAARSWRASRADSCPERDMRCREAMRFLSDQIGHVRGLQEIVQVIRHVSRDGQDERVDKSQYAGHVMAQLFSG

SEQ ID NO: 1011140 - protein, 76 aa, Homo sapiens
RVPASRGGGGVVMSLRRRRGVAPRAVVSGCKITWQPRRITQETFDAVLQEQMPKDITWMPVVRLEAKLFSLKLKIS

SEQ ID NO: 1011141 - protein, 174 aa, Homo sapiens
SGLAWALLAPAAHRWSHTECSQARSSVASFSLPWLPPAVSCATCPVASDLRDSFEIDQGPCGWCACGCACRGVVLLPAASRSLDVQMFMSLPLMASRAPVFDAKGPSLAESSFWLCNQIPKTVINLWMTAICSRSELCRVTEPTTEEEVLFFDNTVSPEETAKFTLFKSYIEYV

SEQ ID NO: 1011142 - protein, 111 aa, Homo sapiens
MTGVDDLDFFIGDEAIEKPYICKKVANPPWYTLKIADLVERFMEHVIFKIFKGQNLKTHYLFRLKPPIEYSRRTGEYTCEIMFESFNVPGLVALLVPGLVLCLRLHLGSLQ

SEQ ID NO: 1011143 - protein, 82 aa, Homo sapiens
SGLALPAAAAATAVLGPPPPPPTSTRQEEQREDDKKIEEAELQKDKQDLSGARHRLLLLVVLENLVGRHHGERKMRIDLTFD

SEQ ID NO: 1011144 - protein, 176 aa, Homo sapiens
MLLALAFQANRQQGMQEYACPMKQSLTYVWSRTPWRKPPRWRTQTRLLGQTEKPLGVFDGANSVHKLTSRGGGKCRKASRLVCLGVLKFRVIFRTKNFHEKARLANVTCVRYPLRRRRGFLQGGRKRLHTQPGNSRVGDGETKIVAPRLGQAIKCRERLRVRLQPGNKRYLGAHFD

SEQ ID NO: 1011145 - protein, 129 aa, Homo sapiens
SGGVRAALPVPIHRAATGGGAHCVRRQRPAARNESECLLQKNDRRLSSCVACIEYSRDVLKLDVLYEELGTGRTGYCLISKHTETSLVWLYQPSNLVCAMLRNMAQETNHSQVPMLWFQLAVEFHWKPS

SEQ ID NO: 1011146 - protein, 131 aa, Homo sapiens
IGVAGGAALKPTYCSVADVLAPVIYAGDDKRLTFGISIEDLGVTGRSTSNTPVYLIEKSEPLLADKLEETVHIMISPAHLQCNNSDNFEIAAELKLGMVVNAASCSMSPSPRSPRRKLAIRIVLDLALALN

SEQ ID NO: 1011147 - protein, 230 aa, Homo sapiens
MIRKAWKAPMPSLCWWNMLSTRVIAIDKSRAHGKYEQGFNMDEVLQDEKLNDLQTLLPINDQYEATLRDKTLRLSAYHNFGPTHMRQVGLPCWKQTGGNPNWEKGVTIGRPNDRLPNTLTTLEGLEAIEEDAKIIISLTVDQEDRFKKIKIIAQIKNTPKQGKSFGKNRLKSIVEIPVLKPDITRGTYITVQRKFRRAMDCKRPIETSRNSFGAQYLKTKLIGRRNQITR

SEQ ID NO: 1011148 - protein, 259 aa, Homo sapiens
MTSRLRSCRRAPVGRERVRGAGAGAGAGAGACGLQPGGGGGDGDGGGMAESEAWTPSTPGEYESKYFEFHGVRLPPFCRGKDGGDRQLPGAASDVWIVTYPLRHQLAARKVVYLVKPGLLDPDEIGLMKHRRAAPGPGSTPQPGLDIIKGAEPSPTAHHDANLPLTAFVPSDLQTMENSKGHLYGSQTPRIWWCLIIRFQRFSADHEATEGHLHWNFCRRFMNDKLGLGSWLSTCRSSGSTRMDSQRSYLQRIEDMPSG

SEQ ID NO: 1011149 - protein, 201 aa, Homo sapiens
  misc_feature (99)..(99): Xaa can be any naturally occurring amino acid
SGCFPGRTWVVWGLLGPGARRHLRTRGDSMGELGSGADEALGCFRLAVVVVLRVLAGQMSLGPGRGSDSLVGVPPTPRAAGGVACPSPTDGQDMRVLPXWSVKVCSFSDDYMHDGTSAAMFHDQRSLAVGWRTGLIGSSLKETVRTLNKPLVQESRRSSAASHISKVVGLFTRHIPIFLLHWKLIMTKVLKKVSKIHSRAE

SEQ ID NO: 1011150 - protein, 121 aa, Homo sapiens
MAAVAVAAAGARLRRGDASPVRPRVRPTRSVRSSRSRLPPRARPWRTPSSCPDVPVPLIESDAVASLIARYLSAGPVSESGPVCWCRSLERVDRVVCRNEMWTVDVAIEHNRSYEESVSSN

SEQ ID NO: 1011151 - protein, 39 aa, Homo sapiens
MHSAHLVDPGGMRRYPTYLRTLKITTHKFVYVKEFGTNP

SEQ ID NO: 1011152 - protein, 312 aa, Homo sapiens
SGGATGVASVTLPRSGRLPERWYTICFILHRAYGPILEPACRAWRPRVGERAVRESDEGLWEMRACCLYTRVFLAFLSIASMRVACLHQYAGPLAVLLLARRGLRQGSSEASWSLVLTGTITLARFGRTQEAHVPSLCTRGQPASQLVVVVTEMHAGVPSVGCPPLEGEELTGGYAYAIVGPECLLMERASIRLVGSKGARVDKGHDEELPGLCVDVAPSNLLWSEPNAPSVAPRPRLPGTGCLRVRGMERSCGCLWIVPFALVSVDELKGIERIAKKTPGTNLGKHYGTDFYENPLEHLVKTSLRMFEPPL

SEQ ID NO: 1011153 - protein, 207 aa, Homo sapiens
MPAPPSPAGSPAPAAQAGRDVPDVAGSGSQPSPLLPVLCEISPDQISTARTRGLAHGPYHGPGVLMPPNAPSPEKPTSMQPRTCGRKRASVRTWASAEPQKGPRKAGGPNNGPKPTAMEILLWMGTGNSCHDPQEPMKRQSELDPCAAKPGGATPPGGMRDDPEGEPEENEGPRMGKAPVSDNTGQSFLVRNQIGSTQSLQSVANFR

SEQ ID NO: 1011154 - protein, 521 aa, Homo sapiens
  misc_feature (265)..(265): Xaa can be any naturally occurring amino acid
AETLPPEREHSLVGSGVYGLGARGTFAPPRPVLRSRAAASMPRGPGDRRGALPYGTPAGHAASRLAAPPCLDTGVERLLTHVTPINATLAYTATLLPPPSTRRHHTRSPTCATLNHPSGNIERTPRHRSATQLAHPPTPPPATTPPLHTDLPGPRTHHLPTTPYARLPHPPSLDHATPCLLPPTPSPLLHCLTTPSRRLPLAPPTISTTLQRTAPAPRTLLPTHTRSDTPTLNTTHLHPAPPKPPPTLETRTRPTHLHFATATAXGPRPHARTHQPQGPKPTHTPATIPRDTHDRPRTPHLTPDPPTEPPAHRDPERRPTHINARRTPTRPTRPRREHQQADTYGTEHAHTTTTRADPPALSPQTTNSAHTARYNSRDHNNCARHCAPYRLAPIRTLNASGTRTATPTHDARSTTTRPRSPHDIPRTPHVNQRREAPDRNSAETHHGEPADGTTTETVQPNRRGHFAGPRDSEHAGAAARPVRDTRGQTRGNDSMKHTGHQTTYEHVAGAHRSLTDCSDAP

SEQ ID NO: 1011155 - protein, 184 aa, Homo sapiens
  misc_feature (73)..(73): Xaa can be any naturally occurring amino acid
SGGDLGRMDLEERRASGQRVLLIALLCLVGRTMCEIRRGGYRHVVLLRTPAPATPGCKPKSHSSTVMKAFDLXRGPDPLTLVERNLLERQPRKRTGITTTTGRYRRVPDITECKGGGPSCCMYEAEMQWKRDYKCQTKNIINIMQDRLKACQQREGQNYQQNCIKEVEQFTQVAKAYQGPLSGP

SEQ ID NO: 1011156 - protein, 145 aa, Homo sapiens
MTVKTVSRKAYDAGEYNAGKRNLEQEGTFDRPTFERANRLVKSVQRILEITGVRRQLGERIRGASLGSPVAVFNTTACLGPVLNLQVVLRCKPGEIGNQRENLGIAPGISNEAIPPHKGVPRSPFTYTGEPRNRPETRIPVGVEL

SEQ ID NO: 1011157 - protein, 103 aa, Homo sapiens
MWPLVAALLLGSLVLRISSATIEVKQNLKNSRCCNDTVVIPCFVTTYGVHKTLLNVYVTCGTFKGRDIYTFDGRSKQVQLCPLTFRYCKEIEVSQVTNRRCLF

SEQ ID NO: 1011158 - protein, 101 aa, Homo sapiens
AGGRLWRIGGLRSAGAGRGVGGGDVWSVRDPLLLEERSGRTSSTTGFSSVWQIWNTGMMETVFSYKVAQQKNLEGYVGLCQSPKSGIQKIGEERLCIHAYG

SEQ ID NO: 1011159 - protein, 78 aa, Homo sapiens
RDSFTSRVTELLWPSPGRNHEVEGHKIKDKACQLLCANFRHKGIKVVGKWKEVKIDPNMLADGQMDDLVCLEELTDYQ

SEQ ID NO: 1011160 - protein, 177 aa, Homo sapiens
AGAQAQAGKMAGGWELASEAGGIVLCCVRTLPTCPPGEVVSGLRTSDFLSLRQVDDHYMTRSLETWRSSLTRTVLNHMLGTWYLVVGSDAVVAWHCRVKHVPGISRRCESKHKGGAQDYDREWPQGFINTTSLESLWLCFTAILFVPFPRTFHYTSPNVDNHGAFATQVAKRNRGVT

SEQ ID NO: 1011161 - protein, 114 aa, Homo sapiens
MASTAELFEEPFRGQDELILKRLVVDEPQGGVLYEVDLKTFAPTKIDSEGSLKTQYSGTSQIDGLNMAFSMNVEKLEQQLSDEAKEFAKKVQELLEEAIRLPSNDFQELDEHIS

SEQ ID NO: 1011162 - protein, 255 aa, Homo sapiens
MPNEDKWSIHFLRNMVYVCDIGTRALWFYTSKERLYGYRTSVGRPGSPKEAMKCASGVVCMGRVSVTVRSLACIVREMYEACTIEETCLSWMYVKDGSGLRKNACTNLSMAVWESSSASDDGQCASIGSTENCARAKCTYDRLPSVCLGPSNLSPEVVDVGRIGSWVTLWVPGLFELRNRDRRNYFRGVSAQVHVLYGVLGKRKSGVAAQRIAGGNGKRNCSRGNICQLEPPVRRSWRMFGTVDRWTNCKGWRSK

SEQ ID NO: 1011163 - protein, 220 aa, Homo sapiens
RRGSEWQSELYPYETVERPGVLRSRGAGSAKLDKQRLPHPGPRARRRGGGIGGEEAEEAGVQVPVMEGRGRRPWTPEADAEKSELRMGLAPDREDVFVSDVASRTAAVFTDSNHCREEAALSVLGAFDLTGNRTKRRLDDEVPLMSRPYEDGSKSIEVWPVLVFLLLERDVMHKENGEVDYASVHGSSYDKIHWQGFLDSSWVERTCDFQGVMYLGYVRG

SEQ ID NO: 1011164 - protein, 70 aa, Homo sapiens
RISLAQQKSMHGATLHFQRPSTCNSFYPASPTGLRPGAYLPSCVAWSIMHAIKLYPIVIEKEYIRSNATL

SEQ ID NO: 1011165 - protein, 204 aa, Homo sapiens
MELHRGNPSGGWHVAIGSRKTIRGWYGIQSYSNLQIVGDTSGSPRQLDSGSIPLSLMRTVTVECVPRVESINPLDCYVNDSSLYLRKVPYRLENRVTAVGSCHRCKIWTRLSGRSLINRFNQKTSRCVGATSNVWRQPSHTQGNGCVGTKPILTSPYGKVLATELPHEGVIPRYLLGIELTAGSIGKHDPTSNTGIVGHGRFPS

SEQ ID NO: 1011166 - protein, 81 aa, Homo sapiens
AAVELYEYGFRLSSFYPMAAVGSSGSEPKSLGKSYSSTKYYDVDNLFKMCMRRADGGYLRRSKVTFQTVMAYVQRSLCRTA

SEQ ID NO: 1011167 - protein, 210 aa, Homo sapiens
SAVAGRAERPQKGPDFRRRRILMAGTLISGGHGVQVTMRAIVPDVGASNMTFVNVILHRSLWSGAVHLHSLRYRWNPSYGAWSSLTLGNWQAATWSSEPLDAVPTSGDGTATRDEQSRAPVITSLPKIYVRARARCSEAPGHCSTSLPLETTLPNCGPFCQSDFLGTWRGLNRRPLQPHGQVIARVIASMRRFLGPCSPWVSWANMAETN

SEQ ID NO: 1011168 - protein, 89 aa, Homo sapiens
SGGEHATLRPLRDAPPTYWSCEKSIFGNHNSCQRNLVQTLYDNYEWFESSLFLNVGYYREDADKSMVMMHRGPYYFVNRILPLHEVHNT

SEQ ID NO: 1011169 - protein, 271 aa, Homo sapiens
RGPERCEGGRAAGRAGPGRARGVGRQEDVRTWGCCSRRARWDSDPHVAGPCCVLVDICNNCSACPGSTVRGNACYPRVTEELCAVLSLSTHQAQAPRDSVSPRRTRGIYRPPVAARCSCMVLSRWHYTGRSIGARHNRSFNRGAWVQCTRALARSSGDATPHAICGVGSLQKLGPGRGRFSVSRPMCPHVPLWPFHALFNHHPGFKVALFGAGLWKDRMTGSTPLGKLFFSLGVVVTKRNKLGAPGLRRVVPEFDKFGLMREIAHRRTVAL

SEQ ID NO: 1011170 - protein, 273 aa, Homo sapiens
RAQPGLRWRGPGSRPLPAGPPSGRRDGSRLHVCPSAPRGGRVAKRACDPASGRAGEDARSHEAPACEGGGAAARAALGVHRSPKSMRVFDGLYPTYYICRSYEDLLWLPGACVAGPSSILMAVDFWFLLMMGVLSAAEPEFFIRSAHVPPVADRGGQPSMCPYTMAAPEISGQEPQQAGAARITPTQEDRDEPCREYHGNWFQVPPKSPQGSVACQRLSLVQQPRPRRIVCDGPVTGVLPTFDMEKTFSRAVSPCGFQARDEVGLTGTGARGC

SEQ ID NO: 1011171 - protein, 51 aa, Homo sapiens
MYEFGAHCEKAHSREYACWEVPDAPVQIAEVPVLVTTLRNDGPFGRSPSET

SEQ ID NO: 1011172 - protein, 216 aa, Homo sapiens
RGDEACCCVTAEGYENGAVGPGAVTPDSTAASDSPGDVRLQEPPQWSAAALLLVQHACELQISVAVEGERGVLEGSVVLQWCTVPTDCMLETETMYSRSWSRYLGQWQPYGYRHSSAIAQWRTWLMNKFARSTNACATKCACGDDVPSRRPVPCPGRLKCSVRTLEGQLRYCGYTLTVLVFPNTDGELCGCAFARSLLYGILAGGLVLPIAPDWPT

SEQ ID NO: 1011173 - protein, 180 aa, Homo sapiens
AETLQRHEALVDQFRMVLWTVYRVPPRSPPYPPFLLLPPLPESEPSGRETAGNAAKEEECRQYVQMEPKIPTFVYMISEHTDSSDSEWHIPTICSSHPAPSVLRLGPRVLKDSSPVRNLQSFGTEESCLLYLEDVTPYQQHAYPSDSEINTLFGRLVHLVQKLSKWLIFHDRDTNNTADH

SEQ ID NO: 1011174 - protein, 214 aa, Homo sapiens
RSRAFVAKARGRGAAVLERGCDRTLRAGRRMETVASVVHTGWWLLREKVCGVRHHALLAEGWAVVDESWLGDSPRSLGSLKSQGSRDPWDQVDAGLCACSLAQRACSIAQAGGRGCHVAWGALLVAGYGSGPRVEYRIACSGHIGIPVNFVTGACQPEAVNAEKHMGASLRDVPDHPLNSVMTGSEGMTGRDGGEPKQSGRPTVQTDTPSRGTA

SEQ ID NO: 1011175 - protein, 66 aa, Homo sapiens
RCFREEPRRNGLRVEAGKDVPGLVEKEELGVWLRLEIRIRAWTRAFPEDAEGKKSWLTSAAEGECL

SEQ ID NO: 1011176 - protein, 35 aa, Homo sapiens
MGSWGAVCELAIIGTYQIYYALPAHTLKPEYSSSF

SEQ ID NO: 1011177 - protein, 136 aa, Homo sapiens
RRSRRPSLQGLSALSPPVLRPPLYPRSLSGPQEFHTLDNLLTEDRSTVGGPVLPGLLPARSSGGALDESLKIYAPLYLILGDSSTHATPGFGAWSAKDAYVAPSPLQRKKREERAARHIYMADLADRRHYSRMGCS

SEQ ID NO: 1011178 - protein, 174 aa, Homo sapiens
RDAGGCTLTAPSSGVIRHPRVSPSARHASGAEGGKLRRGPDKSPPPTACPPSDRDARRGQSLSAGGWGGRRRMLAVPVHELAAVVGAAAQTAIPIPVLRCPVLSRRGRIGVYMVVRFPSLLVLLVFPSSCLAFRSSLSVFKRFKETTRPFSNECLGTTRPVVPIDSSDLHWIFV

SEQ ID NO: 1011179 - protein, 148 aa, Homo sapiens
MIMIYFRFLLRLWGKKWGVLNLRVVHPPRGFGELCAMWARARAPRGSHAVGGTPPLGGALHPGDVSKGATEFSTSGGPLLTKAQPRPPAKKDVGGHIVATNLRGPMARWWTLPPRGIFTPQITPPHIGGPDKNSFVPKQAGRAQCFFL

SEQ ID NO: 1011180 - protein, 285 aa, Homo sapiens
SGGRRRGSLVAGAAYPSPLAPARAPSARTLWCSHPMLSVEVCARLAPDECPDVVLPGRIGDLACGYSTRFPGSHTSWLRNRGPRTGPLGSRKVFDRSPTNIAAPGLARVHRTCNMTSFKYRAKVATKLVEQYPTVCLAYEIVRQSIKPGGKFAPVEVEETVEIVKGLTTELTGYRYGDEKKNVSIPEELAERFAKRHSLEKGEHRWNPGWVYNAARVQIPGKCDHTIEETIPGGLPGEPPRKQKPCIGNRIVPIRKVNLKSLNRKRGVREKAQKLTELAPNIPEV

SEQ ID NO: 1011181 - protein, 304 aa, Homo sapiens
SGLPVLLRTRARRVITRVWAARKPGLRAVFDSMSRPIGAWKCSHEKREAARRGRLAAVLKAQLDVAVPEMLPQDPGATDFEPQVLNNRVTAWRPAGTNLVFQANTVSGALIQHVNAMIENDNWNHLITGLKTSTRTMTQSRSATYHTAPFFLGYTVQMLISSGIRETIRYLVAAQHGGRSWVITAERTWTEDLIKCLARIILGRDLASGGRSSGSNGINSDRKSGGLPNDELRASCEDWLMRNSGARWLMAAGTPEGGKAVTPSKMNARLGQRIRNPKSAYYWAPKKHIPVFESALYPKVSVPN

SEQ ID NO: 1011182 - protein, 201 aa, Homo sapiens
  misc_feature (32)..(32): Xaa can be any naturally occurring amino acid
MHATEPYRVRHLIRTAVGYIHTAPPETLSTEXSQLSTHPVLHTLFTHDDPVGTTATTIWLHSTLHFTFTYPPVKIKLNYTYLNTNPHKSDQPTNVAAQHNTSRFTRITQLHSQTIPTDHHQHMSVSPSATTALHHIVIVHTGQQSTIMLTQQASIGAETHYNSRTRLIGAIMPLTSSHINAVTKLLLYPTYSRLSSAQRPR

SEQ ID NO: 1011183 - protein, 313 aa, Homo sapiens
  misc_feature (124)..(124): Xaa can be any naturally occurring amino acid
AKRVHFIKWNESDQAVTFAGNDFLFIRKSERGKRKLNSYPIFGSQLPEKRCRNSLCVNCWRVRTNTHAVSYYACDEDQIARRSGPDASLSQQGQISIVLLTRGAVLTRDLRNDESFGALERYSXEMGEMVRICGKSVHVGFTTEFEETRVEGSNPWRKRLLSEGRPWGTWFPPTALVNGLGPQYSPQSYNYPDCGHPQSCGRVDSAHKAVGLPTEVVENSPRHSGNTYESAIEGLPERFACAANFPKVSGNTGRTRYWQMGSPAINPGRSVSANRSGQNPNFFLRKTILQEGYGPGVIPRKVDVCRPTTIRQM

SEQ ID NO: 1011184 - protein, 214 aa, Homo sapiens
  misc_feature (206)..(206): Xaa can be any naturally occurring amino acid
AGQTRCDGCLKLLSLGAPALVVVVSGGAAWIGLLSTCRRLPVGGFHGWPGAEVELACVSARSFMGSFARAQQNGSLLRPPLANLDRGLIPSVPWALTADVESDAPGRNGSFSEEVQTLDITTPMEKGPVTVPLCGKTETVGEKKEETHPKCTCFSMTRNLQSASSLLAHRIGFSTTYVVKCFVQSKRGRDTRIMLVVWWKHDVELXNVDRNTGK

SEQ ID NO: 1011185 - protein, 214 aa, Homo sapiens
MRSDGCSACWHTPSSVRKPSRYPGKRQTWLDASCWPSNEYFPYRSTGDRGRVRLPGWHATLAARTCLACEVHLSDDVLEDYLSDLTLYTAMQTIACHSGWPMSSLVLTPELERHGLYTVPKLGMVRRYPRNECVEWTTHNIEDLATNGKGAHKRPGSSAIIQFIPRKGELVSLRCGDMRLNHMKVAQLVKIPMCQGMVGIYYGVNEIQKVAVLN

SEQ ID NO: 1011186 - protein, 278 aa, Homo sapiens
SGGGAARGVAEEQVGDARRGAGGCRWDRHQEPGVLPAFGGISDLFALRVTVGHLPAERGNGAEKPGSTHKCSPHLGGQEEVKEGGARVDTNLELQKTLGRRSRHPSPKRGAEQSGHDPTLQLRGVDSDGDERKPVQYRRWESWKRPSESKKKGQDRETKHRDKTRINTRNPKRSAQLGDKGGKKGGNKRRKRKEYGPNIEKNGQNNKVNITKEEDARPYPQRSTKGDRQTYHYHSENAPSRQSRTTQAREKTRKDGKDKEKQRGKTKKKRENKDKERE

SEQ ID NO: 1011187 - protein, 336 aa, Homo sapiens
RSSRRAAGWWAQRRRRHWEMTLPGGPNGHCCGLGWLAVGLVQTSGLELGPCCLECLVEACALRLRVRACAGGSLTRLCADGGASRESPSPACRSCVCWGHDGSTRRGLSPSLASTADLAGVSASKHALWWIHVSGGRTRSCASPFIQKPLGGPGSVDVCGEARGSVVRFAQGHRQRVSLCCNPFGGVMSLVWPGALYSRPFRSVSSLAGVGRSPPFRPGLAEGEPFPAHGELAPPLTFEAPAFAGLQWNRRNGNAPCWAMRSLARQQALAHKAMSRRRRQTRSVWIHGYAEMSPPSCPKYRGIRRRNPHFGSNRYLLTTRSNLIARPSLRNDTAVP

SEQ ID NO: 1011188 - protein, 130 aa, Homo sapiens
MRTARESRALSPVLLPRAAVALRPLEKTLPLFPSASSFVAPCPHAAGLWPARPRSLNPISARAVRMQLPGLGLGIEREEEEERRRLGGMRWGTAAGRSASDCFARKRGGCSEEAAAEDPSILEHAQEVST

SEQ ID NO: 1011189 - protein, 107 aa, Homo sapiens
MAWIWVRTPWICCLLFSNAGTPNTPKDEAHTERRRDTMNPKRELQNIWLTFANGLACQKQSRALGLRSIQIRKGLLSQIELDPPNHYVCRKTQRSEEVGLHKNYSGM

SEQ ID NO: 1011190 - protein, 71 aa, Homo sapiens
MSLRSFVVALCVGPTLCPLTLLNFYKLAAGAFVPVADPLVVGNQWWVPPFSGSPAEGPCGVHRRSLPVVSP

SEQ ID NO: 1011191 - protein, 126 aa, Homo sapiens
SGDSTSPRVVGVSCFNSACDGIPGVSFPTPVRPSIASPPYSLFDRTRRYMSHRPPSTAPVAGQSPTLGADVVRYLAAIDDRVHPRQVRRELTTRIVRGAQSNSHRNQTWSIVRPSYVYLIHVCYLL

SEQ ID NO: 1011192 - protein, 95 aa, Homo sapiens
  misc_feature (53)..(53): Xaa can be any naturally occurring amino acid
RVLVTGGGGGERLLDGLEESCKKCLSDPSLEDLNGDKGRFDGLNTVALCICKXPGRIARHIEYRSFCSVSLTSGNLYPKLYPKTLSIYWRHEDLE

SEQ ID NO: 1011193 - protein, 339 aa, Homo sapiens
MQCDASVCQTLHAMPLESLRHELSMILWTLLSSSPRNLSRAPVTLTYKRQVRNPRTRTHGTERRNLSVKREVKPSENLENRPSAQGHWLVSFIDQELSSSLHTARPQGTGTWFRTKKTMAQTQALSTIPLEFWRGNWAHISLELGGRGTPQIGYKKRPPSQAPVNCNLGPRGPGIGGVGNPPFYHTRTPAFNVGSALTPTGKANEISMGEVQGTAKNLSLGLHAWHNDCAQPTPLLTLPLNIRNENSQSPLGGNASASTRHMPKRGYHTLWSPDTLRRTCDFPSERTVKSHTPSGPCGHTRAGHELPFNRHRPNAALGTRLEPVNLTPLALGKLQGVIS

SEQ ID NO: 1011194 - protein, 178 aa, Homo sapiens
SGKGRSKWWDSLSLAAGDVKLSRLLPRAGRRSPSLSYDPPTRPRPWPPAPDHRHKTELYPRKAKLCRSTCVALRSDMATVSLTGSDRMQRATGACPPEGGAHLRRRGSPVRKKRLRLVGCRAVSLPIANRVIILRSIHERTKRYPEEAFRSSEKLLVAGRCIDVDLYFRDANWLGGTQ

SEQ ID NO: 1011195 - protein, 113 aa, Homo sapiens
  misc_feature (110)..(110): Xaa can be any naturally occurring amino acid
SGRRGGAMCDYHGEESLSGVPGFRKPYYLQRSLLICADEISIASLPELVVFRSEARIIYCAVYSTYTEFNARRYIGTVEGNTRVCEQRYEGLCSYYDVACCVIIAFDASXKLV

SEQ ID NO: 1011196 - protein, 95 aa, Homo sapiens
RGRDSVSDLRCGEHQDVRELNAFTVLGLLRLLHGREMQTVDCTGMLIGRDESPCEIVQSALARGDGDGTNIQIVMALQVLGANGACPIDNVANMV

SEQ ID NO: 1011197 - protein, 222 aa, Homo sapiens
RLSGPGRRHDGAIMGVDIRHNKDRKVRCKEPKIQDIYLRLLDQAYTGYLVQKNHTPHSSQGCVEEEIYESHTTRGRTTVPFPDDPGKMKLPGRENKTDRWISGDPITDDVRVHRRYPMLKVCALSVTSRAPLARYARGLGGNDSSSFRSDWLLDPTEGSVGTCPVVSGSSLKRPKRVYRAIIERRPPGSPATAITKALRPFQGPEVRACQRSDGTSPSATKS

SEQ ID NO: 1011198 - protein, 326 aa, Homo sapiens
MKKGRRRDEMPDGITSIGAFCTFPFGATQAQRPVELIRVENRDSVNHHLAPYSASTNGFFCRRQKAKSIPGARITNWTGPGKPPGARHIAQDEQALYAVTHPEYDACKLIACPGRLGKAGNAHIHPTAAPPFRGHSCGLPREPQQAHHSAQATLTARAHYTQNRNPPHAGPTRNTHTGGDALRTCHLTPPIHQSPAANTAPHPDPTIPSRSTHTANPIHSRPPTTHTRLHPVWPHSATAGHPKEPLSQRSLSPNHTNQQLQPCSNRPLPSPQRTQRPHPQYTKCLGPPTITPRWAQHKQGRTRRAEATSDCPLPAMARHITQHNLT

SEQ ID NO: 1011199 - protein, 81 aa, Homo sapiens
MEPGPEGNVFAKRIAFWAPALRKGLGLRKQHAQQTLKTALINRFVHRGLANHFGDKVPGGTTKAKGGQPPFDGLSLCDTVT

SEQ ID NO: 1011200 - protein, 119 aa, Homo sapiens
MELGTPVYVTTAGKQLDRATLKRLEVRPVPRVSASGQGPYDPDLQESQSSRSRSIANDPIVEADIGNAPGGEPNIKHITDGLSAHYFKTDSPGVHKDEEYSGEGSIVRDGRMPAWWHMT

SEQ ID NO: 1011201 - protein, 285 aa, Homo sapiens
RGGRSRRGWRRWLRLRDRWPSARPAPCTQLVVLSYTAGAACAQPAACQARAQCCQGERLPTMLFTGGLSMDQRMTVVLATSWVLHSGPFPACFTFPCKNADKGVVPTRGSQLPFLASDRDLGQRGGKPCRGFDKFTWRAHGLGSPGAVPQVNASREGTWREGTRAQQCEEPTSISGAKEETRTLENGRYTGGDYDNEADEDTYETPAVEDTANRESEDYNTSGVRGIRRQTQWANHQWGGQQVREKDKAASNGYEATLFEKPRAKEPRNKEYPNRERNNAKWLDS

SEQ ID NO: 1011202 - protein, 181 aa, Homo sapiens
MAQRDLGQRRESRRSEAGTRWWMPQPGRLDDQNTDDTSGPTWEKVESQRRPDVDEKAWHRKAYIVAENEPGGVRRFPPRGNNTSLYREADERPYIRGHEIGASKPQGTCGLEAHNFGRAQISRRTRGAEPKDHRRYLHGKRGKGRPVWRHRDPIEGDSGAPNIPGGRPRGAAQKQKEGGAK

SEQ ID NO: 1011203 - protein, 43 aa, Homo sapiens
MALSLIPPSWYVDREHRWVHGYELGNCNFMKAIDGDNDRQYSP

SEQ ID NO: 1011204 - protein, 173 aa, Homo sapiens
RALTVTAALCVGGPRRPERHRAPSSPVGPRGPQKPGRTEPDGAGTMNNVTGKSLRRRKPRLIVPEGGRARTSGRADEDAVAEGHVQATRSGYLGHVEVEGVAGELQNVCERMRVNREAERADWGARTGARESRVCLLRGCSVHDLGGVRRWVEPTGNPEEVSREVEPGNPGRQ

SEQ ID NO: 1011205 - protein, 70 aa, Homo sapiens
SGYVCFLVAAVSEPVSGRSLCSMAGRVCGRVEVLGLGTDPDWPSFLCAHRSKVVQLDEMDCYESYRLVQY

SEQ ID NO: 1011206 - protein, 208 aa, Homo sapiens
MSEADVNPIGLCPLPMRTRLTKKPSGLSIHATNCNIVSSFWTTGSLSDGHREIVSSTEAPLGEVSLGRWLHDVAQAHWGVIHFVCERVYLRALAVWRVMRGSNGGSVIGCYAGWRASQSSSVSLVVLTKASLLASWCVLQGVVLLWSKLLVAMALSCGLPYTSYVVEDIGIRGAIAGPQYAPWVRCITHLDLARIRLPLQLTFLPRVA

SEQ ID NO: 1011207 - protein, 104 aa, Homo sapiens
SGCYQRAGTGRRGHGAGKNQSAENPGEVNWVHKDQVEEYVGAVRMLEGRVRMQAPGLRNWGALAWEQEQVGRGLEQEQGRGPGELGETQVQYPKAPWGRTPELK

SEQ ID NO: 1011208 - protein, 108 aa, Homo sapiens
SGRVPVVSGDGGCSGGCRLATRLWAAGADGALAVGFLARWLCAVALLQHLPKYCPRMLRLAGGQVWLHFYLSMRRSGEHRRIDTEARYSMDKSRHSIFRRSCYTNCRA

SEQ ID NO: 1011209 - protein, 76 aa, Homo sapiens
MNVDKGNSSGEASDTDVSRTTWHFIQWFTKFYDANYDGNWSMILYRHDNGPDAIPPPDPGEQIFNCQKKSHHATRP

SEQ ID NO: 1011210 - protein, 92 aa, Homo sapiens
MQLRITRTTQHHTGILLNWLVENSAFTNVHCDKGQFGAQRIFVTFRAGHIFNITTKASSHKAGFPRTTRIIYDRGHDIADPGNLQVEPPLRP

SEQ ID NO: 1011211 - protein, 75 aa, Homo sapiens
SGGSKNESKQELLRGTAFAEYPESVLQAQKLLDRREHFITRELCPSVITTEHKVLPFCRKAVCDLESGAEIYADA

SEQ ID NO: 1011212 - protein, 186 aa, Homo sapiens
SGGALVLAEDASFLYAPIFPILPLERARLLALVCSIGLHSPLPAELHIELSLTVCTSSSSESSRSVRGASVMRLRPSLGVRCSSAYGAKRMNDKNHATYVAEYAEEVVRLLDARVSIAERNKMPTPIAPMAPSIPLPPPRREVCGAQRLGSLSVSRSAAGSCWAIAAESVPRLCCRSLVTVCLVFL

SEQ ID NO: 1011213 - protein, 584 aa, Homo sapiens
SGGERCGSGACADRGQSRTNGAGAPPQGPATHLPGARAAASRSTATHDRQRHSPTAAARLHALGPSTHTWRAKHTLAVDRAPHGQALLRGSPTRRLHSCQVSGPRSTRPCHTALRTRPRNSLRHCPAHGLRSPPSYRARGLSATATPVLLLLSSSSPVLIASIPLVASLALSPRRPRTRIIRDSSVTAAATHARSPPQGLAPDDSAPTPVSPASLPPSYFPPGLGPTATRLPVPPLYGDSGSCRQVFPLSAVTAPLLRVATARFNRSLRTDSADTSLREGWTAPRPVVLAVVLFFLSWSEWRTRVVLCPSRGTTSEPCAGHNVINNEVHLSTDTVTHGNMCRNRPDRLHRTLPIVWYLNPPPPIIYTAGRFQMESREPIAVLIPDRGTLEDLPNNPLPPRVLLTITGAAGAAMYSSGSPGVPKFPPALGIRARPGSLATRVWARSRERPPPRGPTLAVYYPRLNASPRTTARDHVVRQHAPHGRRRGYKPPGPLGPPPSSHLERRCGRVPRRCIFPRITNLPVFPATTTSSSRSVPANPAALYPRTRHPHLFTPRSKARTTTLLPTNGRLVVCPRIQANSRSCA

SEQ ID NO: 1011214 - protein, 144 aa, Homo sapiens
SGCLRGCGSVVSGAVSAPSGRPAQRLPRADPGLIPVGAPALPCACGVRLRASSSRSLCFSCLPVCAMCVGCWRSLSWRSSRPAAAGTSSCRMQEQSGEPEQAAELMLHPPYSSISAESAAYFDYKDESGFSKAPILQCSYNTAQ

SEQ ID NO: 1011215 - protein, 125 aa, Homo sapiens
MGYPLVYGTFAFVYIAALVSRPRGPLPVAYASMTAARRGILDTSVVSLRHIRQFRIQCPLEGSTVRIRRSILEPLNGPHSDVSADTILPPIHPVPQPLEMNCGIDWQPRLVLLGISQGGATGLPA

SEQ ID NO: 1011216 - protein, 308 aa, Homo sapiens
SGVGSLGGAADRACDSVSPDAERRPDVLVAAAMAEQESARNGCRNMSGGSPGVWRWHSCAPSGLAMAITYDAHHMYLDPVSFIVHVLSSKATRESPGDASLYVGVTPLPRSFKLMARQYHRCSQDLCSSAWSVDVPLEMNGGKVDRGMTEAWLDTIWSYTGVPDLSWIAPSFSVILREPLWWSRTSPGPVFPYGALREACGPSPGVASMTAGTLTTLWKRSKTIGESRVSLCMQLKADWGGRLCLTLAGWTLFPAFRAASRTRPVGHWFRGPVPVAYSFLWFPGDPTLRHSVVLPDVRPRKPPSIEDG

SEQ ID NO: 1011217 - protein, 279 aa, Homo sapiens
AGTRGCGVSLLRGLGSGSWLARLSPSAPLATLCAQCPQAACPALWPAPDAVPGACWPAAPVARVSRLTCSLALPPMGPRLDGAPARPPARERPPMLAPDGKPVLAGASPIKPYTSLAEGPITTSQQRAAIPRTKPWVGPARTESPGQEACDSRMTEAASTQNRGMRTALSSNPRKQPKGSGHNHTRGPKCTDRTRDSSGRPWSGRGPNGAGEDGGNEHKNSPKNKKTHPLRRDQTNQVRTPAEKPRHTEPTSERTKRPRNIHDEAPRIKSAADQMQEPR

SEQ ID NO: 1011218 - protein, 256 aa, Homo sapiens
RGAGRGRALCELDVQAAGAAGPPGCWFAGSRLPRVSKRHDHRLVDSWTHLAALDRQSAEPRGGPRGHSERHGVARVVEDTLTQLSEAQGRGTDESHLHRILSMFRAAGTQAYCESGPGLMLCYYAHSANVVSISRQRSIGPWSTPLPVPGQSCAPARQLEWDERIVAWIIVAQIYHSREAFLMSIIGTAHIPIHYCGLPYKMVAKTNAPRFFSPELIQGRRPKMLEANNCERSPFIPMCVTHGPGQEGRMDRLWHR

SEQ ID NO: 1011219 - protein, 217 aa, Homo sapiens
RGRRRWLRGQSKDTVDPTRTAAHSCAPCRVAMLPGLALLLSGRLDGSCAGVYPLMVMLACWLNPRLPCSVAALKHAHDCPEWEVGFRSIRDQKPALIPEEGILQYLPRKSTLNCVISNCGRMPSNHGDHPRTGAIRWPQGSARAISHFVDSLPAAYVGEIVSDALLIPDKVQHFLHPGLGWHVVRIVIFIWHTVAKETCSEKSTNLLDYGHVLTCRN

SEQ ID NO: 1011220 - protein, 113 aa, Homo sapiens
  misc_feature (17)..(17): Xaa can be any naturally occurring amino acid
MQRLMRALARSALDLIXGLRLYIKVEHTNSPSTLMYMILEISPEPAVQVVDAMMELNAIYRCHRMLRHSSANREIIPVSYLPDLSRYTMRRILSGLTALLEGGILPHSHVCGP

SEQ ID NO: 1011221 - protein, 213 aa, Homo sapiens
IGARGRRGLLVASACILWGTDFTAGLVLEVDLRQGIVRALLLDLLVCGWSLCSEWMGFNLSSTLPQGISSVRPRISTGCLAISAGVPRDSYGLSRGPRAGVGLRRPPGPRLLVVLLLARVRLLGGHAPLACCKTPVGVGRCMAVPNRSVRGHGQCLGAVNLPMHKVFRGHEETPSLQGGLRFLIWRHYHCLVHGPLSLPVWKFMLHNIKRAHQ

SEQ ID NO: 1011222 - protein, 122 aa, Homo sapiens
MGANRNAFNSSSCLWVPHSNVLAKTEQRQMAIYNTTGVPIEKSGDKRWLHHTQPTVVNASNPSLLITTVGWVRPQMTHSSLVQLLTVLQTGACPNHTQLQRDTKLGGKIPPRSNVHYPMCPK

SEQ ID NO: 1011223 - protein, 132 aa, Homo sapiens
RRRRRSRSGSRALGRRRPGRNTCVWLHFQGCYHELKAVTWVLPINEPVLQQAVTLMNVLSLLTGSRFCYELAIATLRYRFDVSPITNILPFCRQTFTSARHVETCRGKHLCVFFHLPYHCAFSQSLRRFGVI

SEQ ID NO: 1011224 - protein, 370 aa, Homo sapiens
  misc_feature (46)..(46): Xaa can be any naturally occurring amino acid
MARSEAIEAFAGHSFVAHRLNATKRNQGPLWFGPQIPPNKPLDPSXDAEIMNGYLPTFFPIGTRRSSPEVAWKPRDKEAPILWEHQRLRSQPWESSVSSWGATILFPGAPEYKAKLGHSLLAITNILAPVFRHRVQKVRWSKLAHTYGGEMFVSAPTVIIAKRLYGLVWSGNRVDLISPAFGVALHRDVEYNAFFHNRVGKPVSLSTPWKLYYSLSDYQRPYVPNFPSRTPWVSQRIARYNMIGHEGHMPHSQDDDTLFDTRNTGLTKGCHSNSSGLVQGKVPLTSRLGAPPIFESKFTKHISQGRLKKFPSYESIPPDSEHSLRRESSDEPPLLSSTRVQNVTLPIAPGEKFPAKLILYRENSAKAQHV

SEQ ID NO: 1011225 - protein, 62 aa, Homo sapiens
MIPVGSYANVLEALNGEDGGGSKVRGSTYVLKGLEAVNVRTISKEKAGAQGIRILTVCALKQ

SEQ ID NO: 1011226 - protein, 243 aa, Homo sapiens
  misc_feature (85)..(85): Xaa can be any naturally occurring amino acid
MLPRARSGSTELTPPWFASICCQPCVGRHLTLSLLLGSHCTTLSTDGRSIPLSAGEASDPRSRRWISRRLGAQEFRRFDPCKAVXGRALCLVTEGMHSTQVAFPPALRHWAPGPNGGIPNPRAPQEPLTVVLHTGTPETAFPANANTAHRMSSFYIAQEPQRRQPSKQSLKPGSITVLCLSPLIEGNYLPFVMDCLKHRTSSPVNLLLDQVSSGELVDGLVRIEWEAPWGFDCIVDRGHASGP

SEQ ID NO: 1011227 - protein, 239 aa, Homo sapiens
MEAVKAEAWEGAAVAQDLLALGYGGVPGGGVTGRLYAQDFTWLCVRLAAELATLVRPLARSYDGVAAVTVLSAGEGPGAEEELSAAVGQPAAGAVLAGSCALRAGDGASALREAGAGLRLLRFLCSELQATRAPVPPLSAEIRVLSHPLVKGYVEGAGMVQELDLSLQALGLSRAAPGTTDRQLLQEICMLKISELQPSLPPGSLKAPPQLLRRCTQMGKRGRLCPKSLRDQYRCCADF

SEQ ID NO: 1011228 - protein, 66 aa, Homo sapiens
AGWRRSLLLRLRFRCCPRNQDLGVAYGVMVTNAVMRAEMATAQCRASSILEQKDSPGPVMVCVKHY

SEQ ID NO: 1011229 - protein, 215 aa, Homo sapiens
MGQAEAPKHPLRTSSTCHHTTINPHPGVPPTGHTHTRLNHKEATLSHNTHQYRQLKDKNPPIAVAKTQNDPQTEYTLMSHSTYGKVENNTVPINNEQKAYKTSTMWGFASHTDNTPFQPHMTCETRQRDTTPKIRTTTGKNTEDTTERCAVKPDNNQHDAVKIIKGTKQRTIQHSYPNDRQQKKQPSVERTKSSRTRNTIQHKPSPHVEQNTRSL

SEQ ID NO: 1011230 - protein, 307 aa, Homo sapiens
  misc_feature (208)..(208): Xaa can be any naturally occurring amino acid
SGSGTGAVQTSRCLNTPEVLVIQHYHVCGPLRRAHPGRRALLYMSREDLSPCLMHAARVVKIPSRHARLVQGQERTEPQELHGDVMQCPDIDMRGPRPVWVRKEGLAGDGLRIDLGRREREVSRTRMFSGSMYPTWTCSSVLLLARDMELARWEDPTLALFADQRLCPVGNTPVRDGLNLAFGFWNVRCCPAGETLPCIPSEATPVVXPSETCHVPADEHGASRQTRSVLALGCCVALVRGLGLCRSWPIELSRRVHHRFVARVENEYFKGRKLTVRREKTRWYFAKNRNGCLGANGLAYVRGGIRL

SEQ ID NO: 1011231 - protein, 104 aa, Homo sapiens
MPMLVPGHGPMLRGAKVSHCAETCEELRKSDEERTVPCGRVRNELLELYSSDTDALTEETGCLALGGESNSLQSISWAEKLLTTLILKELLALRWRLQLERPIC

SEQ ID NO: 1011232 - protein, 152 aa, Homo sapiens
SGVSRGAAGGAGCGRSPGDVLGPGDGQAVHRGPLPGNRRSPESRPRGLQPGDGPGKPPSKLPEGGEGHSRWRHGIGTSRPMGLALDSRAPIGVLPVSGPGAGVGPVLVQMRTRRGRPGPEETLRFAAASCTCACLMGPPWDLLIAPMVAPNM

SEQ ID NO: 1011233 - protein, 153 aa, Homo sapiens
MPRYPGRYRVMGPLRACERDRQLTRAARRPGTWRVVAWLVTHAIDRCLFIECCCIVLSNGSEFVCSAEIASSTHASGLQLPRAKTHTFLVKLLDSLFRDCCQSEAPLIPSPLRVFKLLPHKDHSKKGDNVNCIKELPGEHLEGKTGTRRYAPD

SEQ ID NO: 1011234 - protein, 263 aa, Homo sapiens
RTDAGSGRGDVISSDLRPAVCCERSTTRLSQLWSPGTQLVADSQNTEFLPPGWGNQSSNACARRSCRTCWKAQTLQSMRVQDNGYYTRLLEQTAPVDTLFKWKSLEKIYGQLLPLWGCFQHLQRHVFRTFDAYGDGTIDFREFSHLSLSVTSRGKLEQKLNWAFSMYDLDGNGYISKAEMLEIVQAIYKMVAVCNEEWLKMSLPQRNEQYKIFRQMDSNRDGKLSMEKSPSEEPKAIRPLCASCECEPSSAGQFWSPEANHRM

SEQ ID NO: 1011235 - protein, 236 aa, Homo sapiens
SGRKRKMAAAAWEACEESGGCEGGRWRPGGALVTLAGSVRCCDCWRGMSGALWMPCSSWGPVPNRLAAGWPWPHAARAFAPHKSQTPNPHHRTCSDLAHSTALVLQRWRVTIFAGSSRPDLPHVSSRFFVLRQGTMFVLFVLAYIHIVFSRSPINCLELCVTSGRSEGILRVEVRHNSSRAPVFLQFCDSGGRGSFPGLAVEPGSNLDMEDEEEEELTMEMYGNSSIKIELDIEPK

SEQ ID NO: 1011236 - protein, 172 aa, Homo sapiens
RIGGETSESSVRLAVARCQTAGAFVRPVQAMGESPVWTEKRSMPDTGSVDAFAMSTGFRHTQSLVASGGIFGYVKRRQCCQSLGCRAALVDSLAGLGAYHACLMDPRNVRVFLGYIWYLGWPSGNEVLTTLDSSCLQVYLQGAMLLLDGLPKSGAKYVQQNPIRRSHGSSLD

SEQ ID NO: 1011237 - protein, 124 aa, Homo sapiens
MPGGVPSLPMAYLTRAWTVASSETREPISQCSRHVESEIKHGSTWNLHLSPLGNLDVRYVMRSISRDVTILVVREELLGIMRDLPPGAVKWSEGTLCQRCSDMTTISCLRDQHRFLRTGKRALE

SEQ ID NO: 1011238 - protein, 471 aa, Homo sapiens
  misc_feature (69)..(69): Xaa can be any naturally occurring amino acid
RVAAPMMQGLDDGPDFLSEEDLRERDSMLCRYALEVHVVRTIALYVANSLASTSLRMHSRLCLMTRPPXSYGTYRVHGLPLPQLIFSLQRLDGRSCQPSVWAQGWVLESPVTYTVNRTSSRQRVPHHGAWGVDQGLVRPNKFDRMAYQTFTEATKMIRNAYQQLELTCLPCQDVRTGSPETALRYVVNAGVLNYAYTKSHLAFIQLTRNGFHFVPTKLFSQTREQAEGLLPRILLVLGPNNPFGNARKLFGFFCAPVPHWQFLRFMLFRHILVATVTPFLVPRGLNVRFHFSPRPKARTLDHKKRPPGNLALELAFPTGADIGKPLIERNTCAFAMLDPADTQQRGGSQYWNSQNADSGTLFHLGRGECDRRPIAERPFGEKKPRQGLREHINQPTENNLLWGRFYNFSFNTTGFKTISQFPFSLAHFPYSLVLRNYELLFSHLLDDFAYLNRLVNARDTDISPTTLFFSH

SEQ ID NO: 1011239 - protein, 33 aa, Homo sapiens
MTPVDYRLTSQKYHTGEWPTTCEVSKKPVTAKK

SEQ ID NO: 1011240 - protein, 116 aa, Homo sapiens
RGFRVVLLHGVRLRRFGSGVFRTPWRTETVASSPVRACWRSDNDGPCAEPVGLASRVASPDVGGLCVTTDTSHSEDQVLVKCRLHPKLHEAQCKKGKLDLSMNLIHNIRAIDCYRH

SEQ ID NO: 1011241 - protein, 86 aa, Homo sapiens
MACGPSTWSGHCMPRPSALAAVLHCRHAHASGRSLRKKRPEDFKFGKSLGKALFATVVLARELATSREYAIKILEKRHIITREQGP

SEQ ID NO: 1011242 - protein, 85 aa, Homo sapiens
MTSRRGLDPGSCVLPLSACRGVWGFSLRTGPGGRRAGQSMRSLLGDHVWHTADTRRGTCVFLRSADVLQLELCGTLGPGRRSGDG

SEQ ID NO: 1011243 - protein, 301 aa, Homo sapiens
RRGGAGGERGRERCVPGIEGHSQCACHGSTGSDLTPFVALNEVCAGDTLAIQPYRLAQDWLNSSILHCVFTYDHVTCHPTVFGLSCDTLRQLRCPAGPAGKRVVLDLGPVWGPGLLLVWPARDRGEPRNHRWRAASWSVSTAAGLGIMCDVAPPGSVARPMPVPSCRSFLGVSWPTEDSRPVPSCAQVSLLVSLQRGSGARPRLFRPPDYWALPQIPPRGFSHSWSQAVLAYPHIDAFAKPAPCLVDPPVLSPGCSAPCPGAGKPGSDLREGPGVLHQQAGDEFLCRKNWPGRAAPVASLP

SEQ ID NO: 1011244 - protein, 204 aa, Homo sapiens
MEPPHRPQSGPHSVNLSPLLCGPYFPLVLAALGLQPVRALFVSPSFLWRRLGVGAIVGASREGCPLGPDGSRSRQGPSVLLHKNFFIRCDESFCGPSPIWGPRFERGSNPSATVCVSQEPFPKVGFRHAHWGVERYALCTYLVGRAAWGAPLVPSTPCVDFCHLARVCFFPLVVPPGLGRLCGVPPLSPFFRAGLEARPVGPPL

SEQ ID NO: 1011245 - protein, 138 aa, Homo sapiens
MDRNPSPPPPGRDKEDEEEVAGGDCIGSTVYSYNTGLFGVLSGLIQDESALTNTKSSSDDEEQTDGGLMNDNARTEDYARSYGSSVKWHEDVRCYFVQEVYMLREYVVSVGRYWPKGSQDVPRIEGIFPCQTVDPDID

SEQ ID NO: 1011246 - protein, 108 aa, Homo sapiens
SGGASGVTDVLSEGFWVCELESRALDSDPDDGLAGTVDRRPPTLHGLSAPDLLLTGWWSHRRRDSVDAWAWTLITLWGLLSRPGWPGDLRSFIAWIAWKRLQIVLHSG

SEQ ID NO: 1011247 - protein, 251 aa, Homo sapiens
AGLVARVDSSDGGGRTGLEQLPECDGAAAPSRCAGGRRPSRITGPSVVLTHGSWTFLSRKSPSHSVQCLSAEVNVTGQKHGAIVCSIANDLAKGAQGLDAMSYITDQRDLERDRLRCCIRCCRRKPAGTMCPYCVRRRWTEQLEAFDLHNLSELSQQAVWALCGQHDVLELNLDWKSPEKSVPHDYTRSGLNKKLERSDTPLIVGRPVALPRVNEALVQVASQGFDFTVNRAGHPSGQGPQVPIARNPAGM

SEQ ID NO: 1011248 - protein, 243 aa, Homo sapiens
MRRRRDAEPGAGVLPSRAGGGATATDAGGQVVRVGGGRGAQGARAGGRGANGQPGMEELIPLSTTAGAFSSIGQSWHLDHGADRCSGRQSAARARCWRTSVGPGLPSPAVSGIVSRGPLILQLIFSKREHAEGFALKSRSSDFELSPGWRLKPDDRQGHGDQQRHYAKCPFKLRVTRPDVLTLTPHELPVLARCLWATGSRHRVTRSGHILQVIRRKGSLIVVAGPANLTWQLRRLQLGQEVD

SEQ ID NO: 1011249 - protein, 81 aa, Homo sapiens
AAFLVKMAGHTHVPFSASGNVRVASYYKMAITMLQDSTPLGFLRDDTLVQRMQDVETIAIRRLPENLYNDRMFRIEEGTGS

SEQ ID NO: 1011250 - protein, 110 aa, Homo sapiens
  misc_feature (67)..(67): Xaa can be any naturally occurring amino acid
MQPAPRGRTTLMLRERTRSVTRNDFECRLSDSVSVLYGMRVQLEKLRDERGALLYSFVRITPVDRNXIQTTDYAQNLAEGRSQLNLGSGIGTKALKPAFSGDLMGTTYEQ

SEQ ID NO: 1011251 - protein, 76 aa, Homo sapiens
MPVIFEHEYDGYISRESECEQNYMYMHMLGYPWLTFWNKLAVPQAYCLSRIYKTNALGYLGAMLLLDEDKMSISHD

SEQ ID NO: 1011252 - protein, 93 aa, Homo sapiens
RRRAGGGGERWRSARATAAGEWRGHRCGATEKWRPRMSGKLLFLCGRPVECATLAVHRVMCQRLRLCQVRAAEDASIVHDIGLPKAMGRRVSI

SEQ ID NO: 1011253 - protein, 105 aa, Homo sapiens [sequence omitted]

SEQ ID NO: 1011254 - protein, 221 aa, Homo sapiens
AERRGGVETGGAAWAPMWTEWTLRESEGRYELWPTMNTRLTHIHTTIPGNRTERGRLISTDIEMEGKNEISMQQKDHACVMITNNRKWKAYLGHKKAMDHEEEGETDNSDRTQGRTRTDGHAADDQSLVESMAKYRDKGKLGRVNPVEKRTEFTPGLHNNEDTRYEGEQSAVEIGHNKGELHDIVTKERQIKNSKVKQKSTCNVRNPQYETIVNDTCETEH

SEQ ID NO: 1011255 - protein, 83 aa, Homo sapiens
AGRRRSGIMALWWAYQLVPWARHRVRKYTVLTDWVPAWAWVTSYLTASWWRGVGSARNIREEALVLVYQWCSRGLSGFVDLCW

SEQ ID NO: 1011256 - protein, 102 aa, Homo sapiens
RAARRLRTVCADGNVNAPAMRLQRGREEHASGRRRLSRVSMLGRAGTGAEHLHGLLVRVPIMAIRNEKHQVAPQLLSHEFVLQNHADIVSCVAMVFLLGLHV

SEQ ID NO: 1011257 - protein, 109 aa, Homo sapiens
  misc_feature (73)..(73): Xaa can be any naturally occurring amino acid
  misc_feature (81)..(81): Xaa can be any naturally occurring amino acid
MFSMTDYDGVTWSNINSCESACKAQMCLTTEDVENAHLNARTARASAYRSGSRPHERCMGDIKRNVKIVRIVXIERSYNGXFLGHGICQLKDQEGEESEDSVGKKLLSL

SEQ ID NO: 1011258 - protein, 273 aa, Homo sapiens
RGGAYGTSIIPCSIIVIYVTKIIKGGAAHKDGRLQIGDIDPGGQQCGAESDVMHEDSVAALNNTYDVVYLKVGNAQQVPYLMDSVLSPLADESSTFVIPKHAWTSEESVTWSYLGTDYAIAMDPTSPRRYSPVAKVPARGGMTFPENRGDIVIHRGSTGLGFNIVGGEEVQGIFISFILAGGPADLSGELRKGDQILRVTGVDLRNASHEQAAIALEECGSDGHTIHSLSINPERVTADRRAKNPQTFRGTSSIEPCQPWASRGTWRPLRDAT

SEQ ID NO: 1011259 - protein, 283 aa, Homo sapiens
AGGGAGGARARAWALLGCERRRRQGGYYRRESGREPPPSSPLFVLLLARQRLVSGGPLGGSMASACVLCTSVPPGQLHVVETDGACIGFHFQIWMGWTHHVRTLLSPKWSWSLPGKPFYCLSSEDLRKNHSACYTDYCQQGSTGGCPSGSPFNGSPEAPRSMLREPWVNILVKGNFNLPLPRLFHPMVSHHSIHSFGYTFGSMSPKSIPRRLVLVTQSRSRIATWGTFWYKYVPFQCVDALVVPSSPMRNHSTRHTKGNFVGFRTGPLLPNARKGSLAFRVLT

SEQ ID NO: 1011260 - protein, 222 aa, Homo sapiens
MRTWNPSFGNWQCLWPDPYETMIVIHPLPSTHPLRLSWYRSGKGLGWSRRSSRVGVYWRVAHGSDGVNCNAQTVGSQTLEEEGVECFQRSGNSSVVRSRDLVCCTGHPAGIEMPRPLTGVERSKRLKAASWDGPSWGPNKASVHSPEPEDEGEPGRSGLELEPEEPPGWRELVPPDTLQQLPKSQVKRQEVISELLVTEAATLRMLRVLHELFFQPWQNACS

SEQ ID NO: 1011261 - protein, 120 aa, Homo sapiens
AECGSGLDEWLALRSRRSETRLWCGSSSSPRSGRALTRIDLEADCLCRAWCLCALILLFGARLLQLPDGLTGEPDATMGRVSADYAQHCDADCIVVRCEREHGRLQWTLGEELDLPRCLN

SEQ ID NO: 1011262 - protein, 172 aa, Homo sapiens
MGLSWRFLYDWDLCMGYGIHDYSESTCALNKMKTSLWDERNDHRGISVVALRRARDSQKVIGGSVAAKNVCQASVLSYIHTVFDATIEEFGTATVGLNADSAQESTLAQGSMSRTRKETVPYREKLAILCARPCTPEDLRGNALLSEALPFFPFSNRNSKKAPPQKYFPWWG

SEQ ID NO: 1011263 - protein, 234 aa, Homo sapiens
AEFRARARNRRRQPWQTCQAEPGTHCWDAGCMGRPKPSPLCLLFRLALYLCAPLPEDLTGPNPRAALERQQLRLRERQKFFEDILQPETELSFLCPICISSRRDPTIGSISSMEVNVDTLERSRTDRPWGPGCSRCVLALAKILQTNPPDLSGVDKHLEELSLPVAYIRQDPHLGPPPPSSSEFLQSNLHKPNIQVMMEANTPLAQLGGQKEDKRLMRRGQSLDDLQHTHGALD

SEQ ID NO: 1011264 - protein, 146 aa, Homo sapiens
MACALGSACCSYEAGRWGPAVALSRLSPPPVGPGDGRRREMGAGARAVAGGVDGDRGSGVLAALLRCSRNPQSGSGLPNGNDTCAFSLKDAGTHAGSDARVTRGVTHALRRMIPNGADSSCRGTRLKEDFEIRIGIARSVATHGPV

SEQ ID NO: 1011265 - protein, 110 aa, Homo sapiens
SGGAETSGVRAAASMILVLHHILDSTVVSHLPCRSGGHYRSFFNGAGAEARTASDRRRQCRPDHLCGGNWLRLPIWMGVVPYLGVVFEPHSMIDLGPRSGKSRGKAIYLP

SEQ ID NO: 1011266 - protein, 114 aa, Homo sapiens
SGLRAREPSWSWFDPSVSYNARACVLGLLIDFRRRGSLCRDESADRWRLGRRILLELRNRTPSDVDKELVLDNSRSQMTVHNSKASQMNLKNWNSYGIKSTVESSPQSQDLPKC

SEQ ID NO: 1011267 - protein, 98 aa, Homo sapiens
SGPEEEVVRLLLLQRLSLALGAQRGAAVSAAASSSLAVPSMFPGATTPLPKGALTPGSMEVWKDPSTGHQQSRRAERLLAARNTKRLFLVPKSCGISF

SEQ ID NO: 1011268 - protein, 245 aa, Homo sapiens
SGRKRKMAAAAVEAVRRAAAARAADGGREAPSDTCWVVSGSDAGSACLEHCGALHSPGALGPYVRRRRARPPRRGPRTPNLKPQTPHRDVRDRLFHALVLQEWLSPYSRALPARLPAALVRSFFVLLKAPVCALRPGLHPASSSPGSPINCLEHVRDIVARVSGILRAGQCGTTRVLRARTSYMILCHAAAAGSFPGLAVEPGSNLDMEDEEAEELTMEMCGNSSIKLTLDIEPRCQSRQVAQRP

SEQ ID NO: 1011269 - protein, 155 aa, Homo sapiens
RKGQYPMRAILTWREVCFLIGPEPAWLCGWWDAYPTDEAIVAQKLDRILTRSRRSARNCFECQVQVGGPRRGGGGGGGRWAVVGPMDEAVSCRAWMLHFLWLSLLPSFAWDGRFRGRSRMDPDICADGSYSVGLIRVLGSVARFAESIYHVIRIL

SEQ ID NO: 1011270 - protein, 91 aa, Homo sapiens
MSWIQKAQSWWPEAGASAYDDMCTWIKAVSATGAQTVPREERTVLCVPNRAWSGGRCAGWRVISYIEQKNDTSDKKSAVIKTIGRKWSRVR

SEQ ID NO: 1011271 - protein, 72 aa, Homo sapiens
  misc_feature (62)..(62): Xaa can be any naturally occurring amino acid
SGHGERAGACCSAEGCGNAVTLRAVRTDSHRLTPASLLSRHTIVAVTAPGHGLQVKLSSFFXCTSVVLIRDF

SEQ ID NO: 1011272 - protein, 306 aa, Homo sapiens
  misc_feature (107)..(107): Xaa can be any naturally occurring amino acid
  misc_feature (225)..(225): Xaa can be any naturally occurring amino acid
MAIADDWTSEKRKDEIRRARPWTGHKQIVDQKGDGTSVSNRALSESYSMDHKDPDTAGTRLSSILRSGCQHGRHQLGAADSSHCLEPRRENRVTASETIYRNRAVGXPQKAQSKLICIHCENFIQVGGTASRRDKKANGMAWKPVRSMSRIVALTECKCRHSLIERKVCALRTYAYAQTSGWYVIRKSKGFAYASLCVGHWERPLSEKGVVSTPDDYVPLLEAFXISCVNPIEGAPWDRRRLRQAFIGENCPAVNGKLLRRNLHVKLQCKRNKVHNLGLGASRFNTGTGPGLDPWDLVGFARVLPL

SEQ ID NO: 1011273 - protein, 77 aa, Homo sapiens
SGGLAGERLGRDGILLTAHVLWAEWAELPGSVGPSVPALRLSGAGNPLFSPRASKAERHYSPYEVIVCLRNANTVYV

SEQ ID NO: 1011274 - protein, 123 aa, Homo sapiens
RWKSVWRFLRDLELEIPFDPAIPLLGIYRKDYKSCCCKDTCTRMFIAALFTKAKTWNQAKCPTMIDWINKMWHIYTMEYYAAIKNDEFMSFVGTWMKLETIILGKLSQGQKNKHHMFSLIGGN

SEQ ID NO: 1011275 - protein, 69 aa, Homo sapiens
MREIVHLLAGQRETKVGSQGLREVISDEHGIDPTGTYHGDEQTCSMVTHSACTTTEATGGQRYVPRAVL

SEQ ID NO: 1011276 - protein, 67 aa, Homo sapiens
MRLRLPLCPIPGAHMSCFVEIQCGFPAGRTDSNCGDWVGACVGLPLRSLITPTFQFIEQTAGRMGDS

SEQ ID NO: 1011277 - protein, 158 aa, Homo sapiens
AGFSRAAVRAPASPPQRRSPRRCQSRSGEPGCVRPAAEQKSGPGPGAGKRHEGSLARAGSMPARDYCCNGASSVEPPRPGLRTARGIAWSRALPCVPGWLRHVPFAQECGCFKQKLVLFVKKNPPGMFTGHTEKEPQSVLGFGHGLTAESSYLRRTLG

SEQ ID NO: 1011278 - protein, 42 aa, Homo sapiens
MAMQLKSVKKDEVRSEQREWDLAVRQNLMIDEMNGVDWVCIT

SEQ ID NO: 1011279 - protein, 61 aa, Homo sapiens
MCSIAPFVLACANSSCAHELVSQPSSTCGHGSLDFHVRSCRRCRQFQPCCFTQCGPLVQRG

SEQ ID NO: 1011280 - protein, 145 aa, Homo sapiens
MRPPRSSLTPVASPDRRRRMTGNMPEHREKPATKAPNDQGGGTTIRGVTTNRQSRQHCQGPPGDPVGIEQKPRDKERDQGEWQNEENSTKGDGRPQGNSNNVQEEKQEKPKEEHLVGLEMMHPGPECGTHTKQLGARRHEYQYWA

SEQ ID NO: 1011281 - protein, 304 aa, Homo sapiens
SGSRGRRRGAWLSPVQRSPESPRPELLPSLDSSLGFSCRQPYCCCCCSLSLAQGLRPSSSTSTVPEEHIPGVCWEPHHLHRGPRGETLWGPPVPRTTSVELCDFRVPGGDPPCVIIIPPVISHFPTGTHACCPWGCFSTCSTSRRVSTGAKPRPLGDSFNRLASAPLPVGTGVFVRGATLLPGATAHNLWSQGAPGVSVYVILSSSRELSCAARVRGRLLCVVPGRASEQNLFPHNRVSPVHRVFVPSFTYTGFSTAGVCGGAGGVSALGPCHCGLRPQSPNPVQLKALWLWRCSGCQLELALS

SEQ ID NO: 1011282 - protein, 249 aa, Homo sapiens
RGRLAPGPAGRSSSRLLRGGLRLKVLCLCAGRSVVRRLWACQSAPLRRPVSGPPQCPPPFSGQTQRPRKMAGPGSKLVQRSPALAEQAERYDDDGRGQCKNVTELNEPLSKEERNLLSVAYKNVVGGIADSSWRVISSIRAEDICYGNEKTIEMVRAYREQDRPRSEEAVCQDVLSLLDNYLIKELQSETQYESKVSTVKHARGTRYRYLAEVATGEKRATAVESSEKGLQRKPTRYSKEHMQPHHPCD

SEQ ID NO: 1011283 - protein, 154 aa, Homo sapiens
MAALPRAAACPGPVPGLALLLSSCAVGPQVGIKWKYNPADASKTRKHPVSQTYRHNKVWPWSREIKGHKENFPLCETCRSGPEKRGERCVGPGHLRPRGCDARLGDPTRRCFLFITCGASLEAQKGEILERVVAILPYIGRLNQEEVCKNGDHL

SEQ ID NO: 1011284 - protein, 326 aa, Homo sapiens
SGSCPRPHSNAHSCRIRKISLVPARVQGLCVEPFLDHLRASPLYMADSEKDQGPARAYARSVRMGPDASGPQEVSGREGQVAAGGGMSCDQTAARKVGHREPRRQCHGLEEMGIAVDDHTKDPRVPGSKSAAEEASALTIRSSLVPEVRPIVPLQLREDRKHYAREVRIGGHPCEKKRPCAKRNGRNWREEEGITEKAQIECIEVHGDIWFHGTYVGERDKHRKFKLVTLRKKKVPPLEHTAAYRKVHQKLSVVASTAVRNSKVWHAGGVGMDTLWESHLGERGGGGKRQAERRTSVHRQRENGIPGTEGTLESRNGALGNGRGGN

SEQ ID NO: 1011285 - protein, 104 aa, Homo sapiens
RKEVASSAALEHRQSAPPGVGGVALAFPASLEKPGGERGLRAGAALPHTPRRDFSVGPTWRVAAGALIRAPGRWIAAGGGRQAPRRPAPPETAAGSSPIDRLQM

SEQ ID NO: 1011286 - protein, 176 aa, Homo sapiens
AEESGGDALRQGNLVGSPDLETWAELTAFKPEGRDPSQPESAGYNALHYARRMGTYACGGRYAAVEKRETQMLSGQKPRGVPLVWRPKPGYMRGTQKFRRGPEYHTVVHTPKGGWDDDRAEPRLAIKLTEKRGPPRGHLARILPGNTDQSLKEEDYRGDGKGSGVDTVTLRALPKK

SEQ ID NO: 1011287 - protein, 302 aa, Homo sapiens
MTKKTRDLFYTLRKAVMDHVSDSFLETKCTTLGTDEKLQRMELTKEVKEYAQVYREHANKWIEVANLGLYQSQITEEGVTACPNVCKPVRKPSVPRGYINAALAFSQQSTTRVNWPKENMDAIDTGTMGQTSSESHTDELTMTLTLPMTDFLGWPHENHMAGRCDTKWCPMGYSQENQKLRWASDPRQPWRALRRPGDMTRGTLPRYSTLRTTGTIYEPKERFLTTTRSEQSVEKKKAPTIALATYKTREPMTTHNHLGDERAKATSDGNDPTKAHSKRLTQRPLGITNKGYTEELTARAVI

SEQ ID NO: 1011288 - protein, 147 aa, Homo sapiens
  misc_feature (46)..(46): Xaa can be any naturally occurring amino acid
MQRDEKSEARTSYCRRNDNFSVQCHMRVTRKANRTWSLHIYTTAVXLKTVCVLRSCMLVEARTRKPAESLVAMLTYLHQLEQAILPIGVHIDRVRLGPKGNKLTRKGLNSCKSVFVAVHEYTRDRRLRTRRLVGIMDIAQLDAMPRT

SEQ ID NO: 1011289 - protein, 316 aa, Homo sapiens
RAKGPGGGSRGNGGWWLWAECKALRQEDCWMPIGLPVEKMSVLRLCDLQRPRQEQKLASTHWGQHTGVTGQARPREEANGAQGLKRGNRVYVARSPNKVGYTGVSEEKTIPCKSKIQRKKRATTSRLVAYYRPEETSQGRKPLSETSNRHQDVAESKEKDKPTGEKRVPKRGTTWEGKTQEKGRNDNPRGEAGNECRHHRTYHQDPKAAHIEKNAKGETGKMHKDQSGVIDSIVISTRKGQLGPEDRREKENDGKGNSELGGGLALVVQTHTSNIIFRLARSRTEPEIKAHNQNAKQEDRTKPANTNDSERSTMKA

SEQ ID NO: 1011290 - protein, 114 aa, Homo sapiens
MHPFSDLAKDQKDKTGRKENPKVPFRGQLSLRPLHSLRLLANKLVVPEEQQDVRVCMCCNQQNMSQHDDTGAGTIDGFIKRIAVTEPQCAIREMESNKLRGKYIGRDKSSKLGC

SEQ ID NO: 1011291 - protein, 254 aa, Homo sapiens
REEEGLGGRMGLLSMWRKLKSAPDQEVRILLLGLDNAGKTTSSEAAASEDISHITSYTRVSTSTVYNHKVCKLNVWDIGGQRKNQTDTGRIYLENTDILIYVIDELQTRKKIVNETGQELAVIDLEEEKLSSVPVLIFANKQELAHSQALGSEIGRRTEAWHTIRDRVWQIQILAQSLTGEGVTGWHERGSGRICQCKRMTLTSRRMEMQELPESPTFGPAKTLIGLLSDPNCYSICVQLQLFEETGPTRLHTE

SEQ ID NO: 1011292 - protein, 112 aa, Homo sapiens
SGSHRVDIPVFVRGSVRPLAPGGQNITMILCGSKEDQCMAGRKNLRKDLPRNKRLIMIMHYDRYGSRDSDEAPGTWDGMSIQIIQDETEEDENIEYFRAEKVRSPRVTSTLG

SEQ ID NO: 1011293 - protein, 31 aa, Homo sapiens
RRQICLLRVETHERRPPAVFRTANRTLWLTA

SEQ ID NO: 1011294 - protein, 102 aa, Homo sapiens
MGHSFSFVPFLLLTVHKYKTQYKDLPSGQYTHGVFGLFPKFALTLIWRSTGWHPFLHSLGGRIFQHQILVCCLALNRGPASFIPHSAGAAGRILLILGMNHG

SEQ ID NO: 1011295 - protein, 286 aa, Homo sapiens
RSRLRQPASQACSRVARLGYSAGRRRARGGGGSGRHPRAEDAEMCCTAGRARGLRRPAGPSRRVMGPSRFDAGHSRAPCARWLFRAGPRDWQAPVRRRLQCRVGSALAVGRCRVLAGPGLDCGLGGQMSELRRRARSPRIRRCSSGLLVFRTHCYVDLRSVVALERCGTGAKMVDSKKLTYGRDLSSNWHTNISNEMRGHVAGSYKEDSPRETEPYPWVLETHAPLKAAPRQAVSLEDTHEWGASMCHLGLTCAVTTRVEDRKSRLFASCTPRWNMERASNSHLEA

SEQ ID NO: 1011296 - protein, 170 aa, Homo sapiens
  misc_feature (133)..(134): Xaa can be any naturally occurring amino acid
MKDRHLSILSQGAWGHVKVSGCTKKMRPLEGDEAPTERPVETREHGADVSPTGKTPVVGLYHRGAQSPHGGTARERRNNHWPCRECYTGRSGACGVHISTEPHGANFQRPTPRSEHVGRPGAHVTVQLFCGPXXNLNPFPVRGRGGDPRRTTGAVGACVCAQEEGSPTVY

SEQ ID NO: 1011297 - protein, 227 aa, Homo sapiens
ASGKGTQRPVARSLVIALAAAANITDTASLPDCGRDGWSSNGRRYRRRGEAGGSQLGIQVMSEYPRRSGGSMRRKKAAHEHRNKRINRIMGLSQSPGIGADSKTQSHQRSEAGRTGDRLNSLSVPSDSKRVVAEVIQSGPREQLTSSGGDGRGKRGPNRETNGTRSLNQLSAEVMYNLEAPASGHRGDLTAGPSGPKKGGTPGPHGGLRKPDNHFPEIPKDRQVDRR

SEQ ID NO: 1011298 - protein, 229 aa, Homo sapiens
MGRRSSLVLGAGSGTFAEEPGKGSSFATPEKPPLGSFSRCRGARRPGGFPGGVSRVMPRQSQSSLVGSVIPKHQVCRRGGPPQPTTVLLLEKSPLSRRAKTTGRVLPNKNKTCRHCLPHGLGLEAPWASSDDSLALGVLHSAWGVTTELCKSSPCRRAGRSFHATTVKFGCRRYLRGGWGGHMVVHIYLITPFLNKKFYRETCGALNYWVWGSGRYTPSYRAGDPRTYS

SEQ ID NO: 1011299 - protein, 131 aa, Homo sapiens
MSCGCLIRIAQIGSLLSLNSIDGQLCAPCHWRIGSHWEAVLYHGAREVGVPAVPTMIFKDPVTRRITGAHGLMHCATLPHIYLHCAYVPELNGLPCCGRSPDLLTLYAPMVAGALVRLGTVTVIRPLGAYA

SEQ ID NO: 1011300 - protein, 32 aa, Homo sapiens
MGCQASRAACELTSCVRGAIRQIALGGVGYQS

SEQ ID NO: 1011301 - protein, 102 aa, Homo sapiens
MQLPVGVTRPGAGELQGRGSAAESVKLCLSFTPILYSDATGRRGMGLNIGEQLYKAYETLSGKHAWVEILQYKNFSRKTVNYEHENTVYNTGQAVDFLQTIF

SEQ ID NO: 1011302 - protein, 209 aa, Homo sapiens
  misc_feature (129)..(129): Xaa can be any naturally occurring amino acid
MTYCCFLDRAAARRRSGCWPSLLPCCAVTVCVELALASQSVLGVAGRSHRSGEALEPGRLEIEKSTLRPIEGADRFVVILTHVTGKRKIPMNEEAERHKAPEDAWDCRSSLGFHSTLASPPGHARLHVXHWSQVASEQNGNVTIDPEIMYIPKCHACLATYRAYVGFPPMRRENHSIQRIMEPEKKMIGSIKTGLRQRWIMTYKGGKQT

SEQ ID NO: 1011303 - protein, 152 aa, Homo sapiens
  misc_feature (96)..(96): Xaa can be any naturally occurring amino acid
MIIYREPHQPRMQMFSAHLQRSGEIAAGIVPGGGSGKTGQYGTRTVNIDLLVVSWVEDACPLRGSRGLNWYLTWHDVHQLECSILVSETISLHGNXVSSKREPIKKLQSLRITSESQIIRELLNEQDDQEDDVKTFYEQGACRTSVHSIILA

SEQ ID NO: 1011304 - protein, 38 aa, Homo sapiens
MTGEIKHAGATGWALVGAPGAVSGTVPDGYYRCKGDTP

SEQ ID NO: 1011305 - protein, 249 aa, Homo sapiens
MGAPRIEATEIDYQTSQKDFCVILSRWLPIELKKYLALLHSCDSCLRKSVVVYYALGMEGMAMLMQKTSAHGLYGLYGKSNIVWIILLVQPYTPGVIGTVWDNLKDQGMTFGASAAMAPSSGGLHSRSSGLSVHPGVGPPGRLYNLPKKSCEEVLGHWRIAICCLDPCIVVVGSGVQPNRSLPRVPWGPRSSLMEGVLYPHETSPGLGEAIVTRLSFWGLEGKQGKLAGENWKGKPKQARPNKVHERLG

SEQ ID NO: 1011306 - protein, 255 aa, Homo sapiens
  misc_feature (154)..(154): Xaa can be any naturally occurring amino acid
SGLAEPVRPGCRSLPGALRTWRCLAPLLPTRRNFPVAPWILSESPRLLLRFLALCPPRERLRILGPLLRFLGAYGWSGPLAVRAHSERGSPEPHVDCDVEGELVECRKGGRYESQEPTMFNLSLLSFKCEDLNSFLAKVATCYTALTIIGGYFXREVEGATCHSDPKVLRYALYRSGIQSSELIARKETCGLNTFAIGSPKGVDSPLTVETPQERFSGCRAPLRSRPRQAPSTDSPLEVARCSPLVKFVKFLRVP

SEQ ID NO: 1011307 - protein, 335 aa, Homo sapiens
  misc_feature (288)..(288): Xaa can be any naturally occurring amino acid
SGGGDGAPAQHLGELPPRPCFALASPPGEGARGPWHRGAKARWMALEGLRGPRRTEGPSRDPRDGVLGLPRRGWGGHRAGGRSGRASGCERSFVQSHPWVWGRCSQESVLSRTWVWGVMKLYLPCARFSVKTLLGKYTAEPIDDSLGGVCRFLRALLEQYLSTAFKVPRELGFTLTTGTRGVWDYIRRWAVSEKCPTTVCSTHLRTLENISTGRGKGRGMGYPGWVNGEKRMSEYIHPRGLRDTREHQTGSMTLEAIMLRDEATIPHRNADSGLEARIGTSGFLVVRXGKMPGTGKNPRGAIGLNRPTKSYAEVQYLTTEEEAESQETSEGNRRD

SEQ ID NO: 1011308 - protein, 41 aa, Homo sapiens
MSLRQAWRGSYTRHMCEVGMAYRCAETETPRHDLVDMKVTT

SEQ ID NO: 1011309 - protein, 159 aa, Homo sapiens
MHGGTWSLLWVEFVRAEQAELTDNLREVKASACHSVRKAVTWNVLEAVRYGCMQQVDLDCDRALTRGDTSTGEARAASYSVSWASFKCVLLSQLECTQNKDLAKCKSLCCTGRDWVQCDPYRPEDSNCRCSWKLDDNVTLRQTSHHIMASRRKPDSEFL

SEQ ID NO: 1011310 - protein, 32 aa, Homo sapiens
MSVASLGTNEFHSGEDVKSAQGSDEMDKMLCN

SEQ ID NO: 1011311 - protein, 160 aa, Homo sapiens
  misc_feature (90)..(90): Xaa can be any naturally occurring amino acid
  misc_feature (111)..(111): Xaa can be any naturally occurring amino acid
  misc_feature (137)..(137): Xaa can be any naturally occurring amino acid
MVLHSDEFHPFIEALLPHVRAIAYTWFNLQARKRKYFKKHGEANVQGGRKSQSKMSFSVEKPGNQTEGGHPRLLVQTGAKDIRPGSIEQXLWCSTGGLCKKGTRCWCSYPXPEPERVTIRRHRLGCRQGRHKSWRLXSKSWLILVPKASRLDKYPMESGS

SEQ ID NO: 1011312 - protein, 108 aa, Homo sapiens
AELTLLKGWEAHPVGSWARSGNGVRMDEDVLTTLKILSLLGESGVGKSSSELEVTHDDYVLSAQTCSEHIVCRRFSVMDYFHVGCWHLWVKLCPTGEYVGGGDKRRVV

SEQ ID NO: 1011313 - protein, 149 aa, Homo sapiens
RLFPSQVAAAKGAVVHVCVICNGWSCGRCSSFLIRMEVTQTYSTEPNNLKARNSFRYNGLIHRKTVGVEPGADGQGVLVVINAEILASGSAANVLLLRTIHATENCSSQAQEGLEHIDPVRTKYRPELQHVSQSARAQRRIACADHEGL

SEQ ID NO: 1011314 - protein, 328 aa, Homo sapiens
RAELLVLPVVAWFEVAVILISAEFDLPGFCRSYTSLALFEDRRMSARVGRNIVDRPGHHLFVASRGSYHSNEPEDGGSSVQLDRRASRIHAPSLTVVPFDGTVRRQPYVVRNDSAESNPVFEAIETLDLTIYHFGTAQEVPEFGYRQIYVMVMLIKLEHFSNYCKSKLRYPSCRVDVEWQCREEEAAHTVTSNEDVLTNTCKKLLTYKGASTIPQKEIPYYLYSLEKGRENTLPIPNVGIPVKPAFRANFKHGYRISDGSQCLITTCVGGALKSGMPAKGRSESPNSTREFLYVDPGNSLQYRTSFDVSPNPGEPDAQYCNRQGGNRS

SEQ ID NO: 1011315 - protein, 143 aa, Homo sapiens
ADYVRGGFPPTGTHTCGQEAGRPAPCLGSCRGRRGWLDRACPVEVVGHGGWAWCGTLRMGGPGGRARICGGRPDHFPPRFLGDWGRGTSGNVGRLGKRREPCVRSPRFPRYYSSPAGLLHRGVPRRTGDNLFFEVEKFSPWGF

SEQ ID NO: 1011316 - protein, 78 aa, Homo sapiens
  misc_feature (60)..(60): Xaa can be any naturally occurring amino acid
MSMPCGTWNRCLCGRRDEGTYQPLANYQWDWKEWDELGCRASASPALPANKVSNGPPYRXTRIPIYGTPKFLQVPVAP

SEQ ID NO: 1011317 - protein, 55 aa, Homo sapiens
MCERHWFDTGSGRPPMGWVRNAFESWYNFGSTSGVHPKFTPTLPKFEIIGGGWET

SEQ ID NO: 1011318 - protein, 156 aa, Homo sapiens
MRTVRKVDSTSSVLQTLSSKPQDLRRAARWPKRCLQVDGRGTSRRNPGSAHCWTYGPLAVENRAPVINAVSNRHGGQCLCSNRDNHTYGQSLSHGGYCGAPRDRSSHCCSALRAKSSTTDSIGPPDEALERTVVELYESCLRTRRKKISFDVGRDG

SEQ ID NO: 1011319 - protein, 105 aa, Homo sapiens
MNCLAGANCEKRHLPFRYVDLLINEDCGKKVGEYAKFPTEMEQGGAAKANRTEEEVDQTFGYPPDKFQIKKMLPGKTRGRGTNHRVIQGLTTGVHNIGYRNRGKI

SEQ ID NO: 1011320 - protein, 248 aa, Homo sapiens
AVNIAKAYGIKETKSRIQIFPMEKRKKKKSQVKLVPTMITKKERHNCPGSMLTASREEDDSQSDDILEESGSSKFQLGQMAGRMEFDAGLTREPGRLLQVQQMEEGNAIRTFHKHIQETEWQRSRRVKKLGKKADQANHHKTTEEKTVSEGSASWEPTDDGDTTAQKSMELMMHGDDDGDDGGTDGPRHSASDDYFIPSQAFLEAERAQSIGYHLLKLRSQEKKYMTDESIGTTEPGEHQEAKKAENS

SEQ ID NO: 1011321 - protein, 314 aa, Homo sapiens
RIIGWGIPWKVNAGEEGRCPPGGVGVRYQIQPIGAPMPLFSESGCCGLRSRFLNRVGSGCPRDDILAFPRGFEWDRCPLAMRFSGFLWGLRDSSPNYPNLCWIGRNPVPERAHKGLNGHALGKTVSVLSHPGASFPGLQRLDGRREPSEALIQDGPIYLVVLNGAWGHAQCRVTFVSGFLRIRKLPPTLPSDISAEPNSFPYYLPHLHGPVPSSNRLHSGLPQTCLALRCTFWGGPAQLEPDGSLSLSAGPDVQTAQHGWETPETQEPAQCEGPSENTWARTHTQARNTGKTHPRGAKPEDTAAAHSELATQQP

SEQ ID NO: 1011322 - protein, 445 aa, Homo sapiens
MPGCARVTREGPCYSEVSNPGRETQPRATEKTIERETQNEKSIRLNDTAQRTMVEHNTPHVVRKGSDRARHNRGRNGTRTTEYLRRGKGMATNMPEHGATVTHQDNTGRDPGCDAPAAHHRDPPPHKNARETKTTTQHNDATIQGQAENSITRAEPHTQTRACKQPGDRPNRPKHRQTDRAPNQQSAARATRQATVSEDNTHPNPPANPTTPSHHTRNVRVRSHASTGQPQANTAKGPTHDAQHGDAPRQLKTHPAVAVNSTPPAIHQIRARQAQMNNIETEETPRPQNAAPQRINHNTRNTVTPAAQQAVNTPGRPRRTDNSQLNSARGNQHNNCKQAHMTHHIARRTDTTYQDPRPQHTLGPKHRTPQRLGTRKHHEPSVPPSAQERNLRGTPPPTRSLHQLRPHQQRHCTYYSPIATDHVLRQNRKLLTESDPQPPPPRPHR

SEQ ID NO: 1011323 - protein, 93 aa, Homo sapiens
MPVSLAMSLEFRSPSNPRGSAAVGVEPWHLHCARWRRLESHVTYRASSTLMRPRRWAADRRHGDGLRNTPPDREVHGEGHSGASVRVDKRTAR

SEQ ID NO: 1011324 - protein, 248 aa, Homo sapiens
MRAAVATHASLRGLRWLHVFALTRDNDLETRKTTSVIMTPYGSDHAVRHAEIYMGHTAWPDRRSGRCGAVRRDAAGLGTPENTRGDCIGSALTNGSRFAGEEINYSDRSFPSAGVPDRRSRALTYSQVSPRDTSRNRLKEPEMNRCQVEEIQIIFRADGAEEPGPHLHMEVLGQRFQRMGSPVVPILGFHLGTFEGGPGGNQIEIQTLGALPCTVVPRMSSACDWLTPGHSRKEGPERILRCQPRSDF

SEQ ID NO: 1011325 - protein, 88 aa, Homo sapiens
RSLRSGCRRRWRVSIGVKVPRPCRLSEELVRRTGTRSTRLHGTRYRWGLVEMMKEVDTIQGWTMADEYHSVPSPRHEHYEKTSNDTKP

SEQ ID NO: 1011326 - protein, 177 aa, Homo sapiens
SGAVAEKAAGRLVRLCGCCVLWRPQSGSWLRPQPHHGDACLNCWCSWPALLATVSGYFVSIDAHAEECFFELGHLGHQDGPHLREWQEGSRFLDIRPWRCEARLHQQLRAWSTMATRGIGGNLGPRRGGLDDEGVWLGEKILLVAEDHLGKKGHEGPGTEAEVKDWNAPRGAKETDA

SEQ ID NO: 1011327 - protein, 73 aa, Homo sapiens
MKHEHNTPLTHAETTGEETAEAHATKLRGAAEAARHQEVSTRQPTPGKHHNKNRRPETQNTRNTHTHSKETNQ

SEQ ID NO: 1011328 - protein, 200 aa, Homo sapiens
RRSKKESMRRAPDRVRAVFSGTERRCCHAIYTLRHARPEARMVQLEARVWTRVSDRDEKEGEYITQSLGPDSSEIHFKVKNDNTSQETQRIILSKTRVFRMNSLRFLSERVSRIADNSYSNKNLGMAEEDVIEVYQEQPGGSFNSSDNSVLKSGAFSLKSVVAIVLNKVGRSRTVVLSKQEIEPDLATPIVSRNTSGSTS

SEQ ID NO: 1011329 - protein, 35 aa, Homo sapiens
MEIDFREQQSVIFRKKLAARVKVRGKEGREESEET

SEQ ID NO: 1011330 - protein, 423 aa, Homo sapiens
AASLPEEPRGRHTRPPTPARAHSHSHPGRRRQGGTGPHREHTNERTQDTGERMRTHADLACPKNQNNRGQPQDKKRNHHATRRHSTSGKAKAASRQHRGQGERDQNHQTWHHTRKRKDTEQEREGEKRTNKRGRNPAENKSPNPHGHPTKPRHNSRVTTTRAPREPRDHATRGAPKPERAQRTEAPATPQRHTAPQGHSEGQTPSAKHPEAQTGTRTRRPATEHAPAATPPSPPPQPPQTGAHHPRTTTHTTADTAPRTPEPPRLAPPPRHQPHPPRTPSRHTNQQAAPRSATATHRTATQGTTSAQNEEDTHTQASKPIPHAKTESSRAHGRPDRKRRRRRSDQHVNDKEGRRDQPRKRTRDTTRHRRHKSDDDDQRTRRDDRQPQDERDRAPHDRPTQQSTQTLAATTTSERATRRYHQTR

SEQ ID NO: 1011331 - protein, 215 aa, Homo sapiens
SGGRALQARREPAGASESRRSAELAGVPAWARSRLPGGLPGFSSARLRPPSHTRRHRVAWDERQRYCALARSDARPPDSRAPKSSRRGSAVPMLPRLLMEKGARMTSPGPWSITRGHLGERVNFALQSVAVSVLHASSSYYLLARKERVRRRTGGGTRIRRTLANCPSLESKREELVLTKQGTELVTDQTASKLLTARKSPGKDRRPLGRRMLPH

SEQ ID NO: 1011332 - protein, 72 aa, Homo sapiens
SGGAEARPEREPCACAQDRARAFVRASVPPSTCPRDKLDVCWTASTRMDDIMCQRSHLNEQALSIEVRPTDY

SEQ ID NO: 1011333 - protein, 126 aa, Homo sapiens
MGIRKMGGMRMRYRTQQSMVEQIKERVGAETHGHRHQKANNTRMSLNKLADKENSNTQSIPRPQAELTRYDANQIETPAVWGPITVCKTHTRTKIISQKHTKRHGHRKTDNSANHNDEATTSKTNP

SEQ ID NO: 1011334 - protein, 213 aa, Homo sapiens
MACARQLISDVLRKRGSHLAEMSLLPACSHRLLFDQIIVKLVNAQLRKNDQTARMLISWNYQDSVTTSDLSLGEYWQMRVELQFPEFEGGGTTCICARVLFWKHVSLEARNVGNQANKLAADCHFERGETSRLQIIHDNDPFLFSYSLGARSFKLRVSHPRWGRIVLKCAHSASLKKKGYPLEKVSLFGNNGRKDFTPMTDRYNEEIQVDSSL

SEQ ID NO: 1011335 - protein, 280 aa, Homo sapiens
RSVDLDSNPVADSRSRLLLRGFFPALPGALTCGFFPGLICQPGGLPYEGAMRAAWVRCWAAGGVAWSCVRQCGLWTCSAAVLPWRCMLTLVMPGHVKVQDPASLVPRRKRDNVPLGLHAQGAHPGAAALIVPVPDGRHSCYSVLRYVGIMTRPVLPLPRPTWTVLEQPFPGAVPSPAALLRRCLAGPALRHACSCSPLTSSRWRPVREDSFLRPARLLRPASFYMIPPIFFACPTCAFYGGLGFARRSAELHLSDRALSAYHRGPPNARGRKAGPGVHCP

SEQ ID NO: 1011336 - protein, 46 aa, Homo sapiens
MFGITPRHYLGGCLFLCVTQVQSIKGTQYRSHQATPSWLVIHEERI

SEQ ID NO: 1011337 - protein, 105 aa, Homo sapiens
MTIACAPCIGEQVPRDPVVHLAIVSSSYLYNAFERPDENRVFTLQFFLSCLLKMDPWCYKNLVMGVHTLHEFSHCFQCDENRNDERDHRRNYPLTYLRICLDKQA

SEQ ID NO: 1011338 - protein, 315 aa, Homo sapiens
ERGHTVTGCLKLVSRGCRALVVGSVPRADSARYLDAALVAFRLDGGRVSPWFAGFLGSFEQPLMSDLHPRTNQDPAYTNCAPVVRTEGCAGGKRFRKSGLLTKDKVVVAGLPAGRCHAQGAFEVETLHGSIRTSSVYVSQCFSEQGLQVCPKTYGREFVHSSCVYCRHQGQFAPRTTVRQTSVDNVRGTYFGIGYSVCTHTAPHAAFFHGEFEKATNCYASIANYDFVSAQRSVFTAVCTPICAPELIFGVGGKCNQYQCARLQYSALGNPPYTRQANAMLANPPVRELSRFIICGAGNGICPYIGERCVQQHSA

SEQ ID NO: 1011339 - protein, 116 aa, Homo sapiens
AGWSELELGEGSERAGGSTVRAEHGDATREDAATFLTSQPTAVCSPFSGVRQVPGSDPKPCPQSGENEQSTSSRITNGYHHSFPEAAHVRGERSYSWRNGGQCVFYLDNPRDYEQT

SEQ ID NO: 1011340 - protein, 192 aa, Homo sapiens
MAPCMCKAGFCWVTYCSPEPCFLPSLAVVPITTRVVMVGDGPEGLLRWATRPSSKRVHPDPEVPRLMHGRSSPTGTHMVEVSGIQQPSTSELRRGPGGAPSAADPESPLEPRMDQQTRQMTHDSVLDLHSILRPLYVAIQGRAVPSIASAVALTGIVHGSLEDLGSPTQVSHLRMGYALPHAILQSGPGMAV

SEQ ID NO: 1011341 - protein, 120 aa, Homo sapiens
MSAVLLQAYRREQLVRLVVSTASSACVLMEQLVGFSYSAVVKEILDETEDHLVLRSLPHAWCGMQPWHCETHAPVHLAVCPAFHSLLCLPASSCGRGTVVAEVVHGLCSRLGALDCGSDQ

SEQ ID NO: 1011342 - protein, 160 aa, Homo sapiens
MTTSLGKKVAQWGVFFCLSVVAGSLKTVQLSRRTLTVRETYTLQGPVVHGLVIDRQRMIPRYTTHAMPQARRSLWGLNPGEALSVGIPAANRHAKLSNRSVTRFRNRATSYGSERSLSSPTRCLQTVHRNVELPSGSDANRQWINRLGLVSYEEDENVDP

SEQ ID NO: 1011343 - protein, 106 aa, Homo sapiens
MEAWAACGARSRNARTADGADRREPVRRRNWYPGVCVWSPDSWETIADEHGAVRCANYTVSAFRRLTLLIGGASPSGMLQFEPPGLQETTDASRLRDLRRSRGIIA

SEQ ID NO: 1011344 - protein, 100 aa, Homo sapiens
SGVLVQYVPAWGVVSDPSFSRRLKRKTLSLKRSRSSEGPSESGSPTDECNADRLACSLMLKNQRGQLGRKKQDLLIKCLECPYTSTVKILSANDVGLLLT

SEQ ID NO: 1011345 - protein, 102 aa, Homo sapiens
AERRGVFMAELQLLSVVAGRLVESMVKESEREQNIRTMQDLMFRCQAPAVVRTSQASMKQVHHCINGCHVPLASSPGFGQPDDAVITVPGAGMGPDAPCSVR

SEQ ID NO: 1011346 - protein, 152 aa, Homo sapiens
MQRVIHPNAMWYPSRNLNENGDVYYYFVDAVLGIPLLKRAQLYFSRVNPHYVFPRCTEEVAYSDDVFPNLMGHYDQSIAAVEMEQFVFLSQNLECSPIHCKLSSAHRICTNPAVEQIQCGSNLVVNFVRKYILIATTLVDTFGIRWPEELDL

SEQ ID NO: 1011347 - protein, 277 aa, Homo sapiens
KRTWPVRLTLRAVRSICPPNVINSKVLSRLICEVLMSSGTAYTGVLSIEIEREVVAHAMVRSGFKQTFSAQCHTCAIESSVLDAKGVASRSPCYCSRARIIALCIAAHCCAMCRVVQRVPWTWARQSLKSVFIGARHLERDAFHEELAYIVVFGPGGLMRPIITFPVKNHEYSPRSAAVRAFLQKLLAVMDWCVYPYLREVRGDFTPQCPLLLEPGESSNARYGVCVLKQYFTTTLIGSGAGAAIYLSFSAINTRRKTYPSTFMTGAQRASSFEEWV

SEQ ID NO: 1011348 - protein, 182 aa, Homo sapiens
MGNFPFFAVFPPVSPPVFFFLPPPPQPPPQLFGAVTACFFICPPKVVFRPPRLFIFNAVSGGRGCVVLPLPSRIFYRGGLCDLLRERGGGASPPPVVVSFLPTIVFYILLPLFSPPSVRAFLLFVGPLSYSSRGVILCCRPPLSAAQDHLWRITRWCICVPHPPHFLFWCVSYAALVPLDLA

SEQ ID NO: 1011349 - protein, 278 aa, Homo sapiens
  misc_feature (238)..(238): Xaa can be any naturally occurring amino acid
RSERADMMQLNVPLSHVYFEKVLLPVTGETKALAAELNQLRAMVAHSIWHVRLPALELRELRAAAQIKLTANERPGWRFDRDYLADRTWSTVSAERSRIDPDLEAAEPMNYPVLPIIQCYADDMPSTGPVCSLGEDEIDVAVRTEIRVPCCEDLRNGRRFRETLSEQVGPRGVCVPCGRLDVGPYAMMLVAQTPENHGSVTASYRVRHWRYHRISCMHSSEDVAYRFARLGETMTDGXLPSNAEHVPARPSTKPTTTRRQLLVLTCDLAVSVADTNRV

SEQ ID NO: 1011350 - protein, 286 aa, Homo sapiens
MGARSRRYGRVTNISLLVDTRGCGKAASKWRDKSNYTRNQFIRGSIIAPQMWAGTQKAFTTPAKKTRGRRQGRSYKEEGPSWGTTWQWHMLAVPRSTERRRSKHRDGYIVYKAWPDKTKLTGKTGTRPPAAHVHHHPRGVDRQSGVYHTKGGPQKRGKHMREDRTLGTDFPTRKGDTKPAGRQKQDKTIVYDKRTIQYRTTEEQRSRTTQWRSDPTRYKHVARRTENTRRARNAREAKRVYTAEEKDNEHTGRAHKRARWTPRRGDTTKGDGTVASGKIAIVGDIT

SEQ ID NO: 1011351 - protein, 115 aa, Homo sapiens
SGQDAGDLRHKKEKLSSRDPGIASLRFYFSKTGMSDFVQLIEREVAGSYRVSLTTTDIFGCNFPPSSSDSPTICHVRTREKWRMAEGGMPAPSDDRCLRSLDASDPRTEAHSRQA

SEQ ID NO: 1011352 - protein, 142 aa, Homo sapiens
MARATLQQRRLLEQALGEPCDLDAALLTDIEGEVARWVQGLRANGLVRPKGGRMIAGCHWHCTFERHASALSINQGLVTSLRLFEPTRMLRSWGRWASRSLPVRRYRAPSGTLVSTSCHRLSSSLCSLPERAAGSALSRVPF

SEQ ID NO: 1011353 - protein, 108 aa, Homo sapiens
MAAPILKDVVAYCVKCGHPSGTERLFNDIYNTACGYGGTGFQRLLTNKNSRSSSKMATQSTWDKAPEERRKARFGAPGLKECQDSCEHTIDESLSLAAEYEWTHLSSL

SEQ ID NO: 1011354 - protein, 323 aa, Homo sapiens
QRRPSTDPSPSFTIARHRHPISRNLQTFDLFPLLSVRSPPTTYDASGAEDESTALAALSAPLSPIRGKLRAPGKRVPDECQAPVTWLQLSSVLFIARQCSPAKEYAVDPLRRNGHLGTKAFAEAWCLRNPSGTDIETKHNTTHSLIPDKAPHAFLTHATCKGAFQSWYLHRGCEEHWPPMGTLIHQCRWPDPPTCRSCKSALRLHGDNSYWNTQSKRIPQVSHKPKTVIATMHTIINCTPKQGPHKGLQLGHTSKDRKDMKRMLEMATTTKGDEGPRRYSHTLTHTTPHDATVRSTDWTLNKERRRQTQRKQATRRTSPRNTD

SEQ ID NO: 1011355 - protein, 216 aa, Homo sapiens
  misc_feature (1)..(1): Xaa can be any naturally occurring amino acid
  misc_feature (174)..(174): Xaa can be any naturally occurring amino acid
XVAHSNSPSLLRKAKGKQQEVAIRRHVVPENGRTGEEDAGDGPTVWTHRGSEVRLLEMAVTCDNSSRGREKPSGVLRKREGGPGPSADERTLAVSITVAGLGRQKSMDFTFHVYRDFLTLGTAPRYAQANRRVSEELRAKGAELAEGLGNGPSRTGDFEAFCNVPGKVDRTFLXRIVAKPRMSWNVTPDKVGIFSQNEQASDGVRKDLGAAGLFYL

SEQ ID NO: 1011356 - protein, 246 aa, Homo sapiens
MSARTRNPNERTKQRGQPPVPRAQIGDKVNRNELRLLRAQNGRPKKGRGRKKRRSAERYNQYRHTGTARNRRVGLAKGPNENRLDGIHKKYGAQSKESKAPEHGYRDVRNSMSQRRGNRSERAHVDETSRHKLRVASTSTLQRHEDAQLRCGDNHETSYRLDRRTQTEVLNRHQRDMGTHGMAIKPYTSLRLVGKNEGQKNRRKSTIRRELWATWVRAWRHEKREGERRLARTMRTGDNGQYPTKA

SEQ ID NO: 1011357 - protein, 139 aa, Homo sapiens
RTVPITSHPSKCQAVRAFYPIFHYLPPRAAFAPRARLLLHAARLIARASAAFAAFYPRCRCFCGFCQRHRCFCPRAPAFCPRAAAFCSQPSRLFAAAAFCVFSPPTLRLFAAATFSTAAAASSPAASFCPPRDLFPRVC

SEQ ID NO: 1011358 - protein, 147 aa, Homo sapiens
AEGSGVGRGAHAEVSYRALCQSDCEDLDSDPRWRYGKRTAGGRSQHSCVITPESRRRLIRTRSITSRITSLYTHGCLAIVADRGDSPWRQPDVRPGGWISKPLRFGEWSLPSIISHRLVGYSITDETWHEREIGILTTNKNTSRTSQ

SEQ ID NO: 1011359 - protein, 343 aa, Homo sapiens
  misc_feature (136)..(136): Xaa can be any naturally occurring amino acid
RRRIPSPEGRGPAVVAGGGRFWRAEVHFDRRKAPGHRRNLVREPRSARHIEETRADWTGGERATRGEATVRDLTRNSRITLRRSPTCERVRRQHPASWKPSVSSMVAPHPWQAWTRLHRTERPDWHVCGMQPRAGXVARGFRVRENIASGTVQQNITAGRALQAKRSKHSVVSVGPGDGTPVEEALMPRVRAVVTGHVQRQALVLDYIAVARWVVDGSLLNGADQGIIAWVAAKHGKLTLGSKRDALRENFPKSMLIGGTTMWRDSCGHKDRLEKLLPFRNRARLTGEKPAQYLSPRSKCSRPLWVPRGCPVGAHVEIAAQGRTVDNLAEDSESQQGTSRPGS

SEQ ID NO: 1011360 - protein, 113 aa, Homo sapiens
  misc_feature (105)..(105): Xaa can be any naturally occurring amino acid
  misc_feature (109)..(109): Xaa can be any naturally occurring amino acid
RGSDHNPRRGCAVSYFSSLVGLSCICLCSLPAITRLEAKGIVETLNHCFLHWERPNEHPDNHWLGSVIFHSNSLFVSSSRRLSSCLFGSSVISPCLRYTISSGPXARPXLVDC

SEQ ID NO: 1011361 - protein, 257 aa, Homo sapiens
MAQCRWTFYSNVHPVLFPSPDFFFFFFGARGLALSAQAGAAVVRLSAHCKALPPGSHAVPPASASRVTWDMRAPTTRPGYLLPAAPGYNMGVPPCLRRRWLLDLRNLVNLPASASPGLLRHSHALTHHPWALPIPPEIPLHTRLTRITQELTQRAAHTASANKRHQLPPPSSEKHSAQEATTHYHTTLESYTRSPDHPMRTAQQRHNYTYTDIVPHNLTSHRAHTEMPHQLALHPHAALQQRDLSRTRPPPLGRGPS

SEQ ID NO: 1011362 - protein, 494 aa, Homo sapiens
MAEGVPVSLDGTSCHVLLLWRSVRAALPELKSVTMYAEIVGLEVEAASWKMTEEHGQMGSCPASNMLPTRARCAAYLLGDAPLDRVSFVRRHAPQVACWDRFVPFGRVLRLDLASRRSPRDVPHPWWAAVCLGRNRASVYAHGRIAPGPGTNDDRIRVRTGPSRRYWSAPGNNDSPPGDPIASIKAALVPVRRHTDHGAWVHLEKGLVSPSNQAIGGKARLQSTKPKAFWITERRMYQVQIVALGHTQITTQQPFGSAPLGARQVPYSPASEKHPFIATALTATREGGPPTIWGPLGRNLLAIWKFLTQQRTFRAFQYSSGFCGTQHHRGEDSAPQHNAEGDHGKTNSGTAKSNFPKEVAQIHHPQNPGFPHADIHKLCRRQNATQALGASAPGEPTPAAVYPPCSWCVPPGAYCDPIDRSGPCRVICDATGMCRRLHHLEAPLVANAAQPVCLPHGQTVGVSALSCVPALIRCALPGPGTHRPCPPRVTGRQN

SEQ ID NO: 1011363 - protein, 82 aa, Homo sapiens
MAKNIQNSYRTTLALRTIIPTFDAGEIPTQVYFCAFYSKPLVVRFPTQRLLKRLGNPTTPLCRGSRTKSVDIGATLGELSCV

SEQ ID NO: 1011364 - protein, 134 aa, Homo sapiens
MAAAPPSYCTRCLPSKMLQDGLDGISGKIQPGPEMKVQEVVYIHRGADQRTGEQGGGSTYMSSRSKFRRTYAINDNAEPVWLWEKKKWEPMNMDLCSSHMKAINNERSQLARNRMPCWGMASGQAWDKKEGEQS

SEQ ID NO: 1011365 - protein, 77 aa, Homo sapiens
MQEQKHFDENPKTSKRQVAQQNHKTSGNEQVERAKRPDAKTWQQDEGHREYSDRRIVSATDHETTEHDKKEHEKINK

SEQ ID NO: 1011366 - protein, 72 aa, Homo sapiens
SGLSLPETMAGEAGTRCSHLLSHESREAPLCRVGGGRQYHNYHLAGTTEKATDQDIKDNWGDSDDVKRKKEK

SEQ ID NO: 1011367 - protein, 244 aa, Homo sapiens
  misc_feature (106)..(106): Xaa can be any naturally occurring amino acid
  misc_feature (139)..(139): Xaa can be any naturally occurring amino acid
SGGPPGPREAARARRRRRRARGPAFGNRVRNAKEPTATERKKRPPGRGQATQERNSRRAELAEEDTEPRSHTGTRQRLAGEPWGVGWERIFWCKKRIPYVWKAQIXEGYLGHLVGYGWLHRGRKGGALKREDPPGKGVXRKGEDANKPDMGVKDKGAKTQPRGLSTGSTNLQREPKPLVERGKEARNWRSPHIGCAARHIETTIPLVGGAPPPGGIALGGKTPPGGEKPQGSTEHVVDLLPFSR

SEQ ID NO: 1011368 - protein, 275 aa, Homo sapiens
RIQSGGGGRDHCLVAPRDYNREPWRTMGMDPDGVIEIGRWNDDGRLNFDDIEEFNTDGSAACVGNLVLVRVWMNAFSVFRPGDATDPTCYETRILDRDFWLRKRSAITSSIERKEHCTTTMSYSHRDFALHPTARDRFGGLSRRDEHHECPKDKLRPHQIKTEPWAATSDSPQTRRLPFPRAAYEEKLTKLVKAQALLLQVDPLAIKAVAKSQRNWSYQHTIGEIASTRHMCNGDLNKQRATMNMGKGIERTYPQAAGQEGYAVHLAKKLDRNGN

SEQ ID NO: 1011369 - protein, 68 aa, Homo sapiens
MDVLSLWAKVLDPQCFQAREQSLLFERVKGDYYRYLAEVAAGDDNERDCQISHSKHTKKLVKISEKRT

SEQ ID NO: 1011370 - protein, 253 aa, Homo sapiens
SEVAPWDAGSERSCVMPLCLRVGHRSDACVVLSFRTHIFRSSREGGMVKRAQTWLELEEMLPTKFAILVNPKASGQEDEWRGTGPSCARTARLADRNMSVTWDRMWTVVFSKRQRGSHALGHQLMREFKEGPWKKLDEQQIQGRRRKEEAYRMPICQLDGMAQEPSQAVGVTKCKKQWGAGRTGLTDHQQNTPGSHKEALRLRAAMVKGISRERHGQSWDEQVCYTLSALARTCQGTLPMAKGDRTVEGLGKN

SEQ ID NO: 1011371 - protein, 327 aa, Homo sapiens
RICHGGGRRVLLRLPPGPSRIHRPAAAALILLRVGALKEAHVAGCSVRSPWCVLVLMSLELILGNQCPDAMSYTINRELAGCCRELGLVNRHGAPLGVEVRCRRTSVHWAVSPTISRNGRANEKRCIARVECVKSDLLDHTWLYPVMHFDSSRPYTRIRGKPNAVFAGSHLRVQRWSHCVRTLRAASLVHSPGVVTTRVFANDTGRSPCWDWDCCRMALRLLSDNGDFVAEGIQHMRGPRLDEDMFPPSSSRPGVARDTPEQVVYSGINGPPKGPGGMRYAAKRKVRNGLSQVPQLGGPCERLGYTVGLAPVSSGGRKPIRGRHKTF

SEQ ID NO: 1011372 - protein, 321 aa, Homo sapiens
  misc_feature (101)..(101): Xaa can be any naturally occurring amino acid
MATRSLLLTLWVDELRQGLMSRPKSVAVANERKQVLSPCNAWMLVEPMASVPSVPTRCQGSASSLLLHAPRRYETGEQRGPRIRELNLCWISQFDGLQILXDAVRQPLVTRGPQGRRTEYSRRNRDLDCISGCLRPVALKPHETIKHKACIVLVDPFLSFSSSKRNGLMFRRSYWCVQEGAPFPRNPTGVKKIPEGKQIKARPMADVPLLVTFALPPIAVSPCQGHRESGTGPVLFVFVETAHDRAVHPTRTSRVTRHNAGWRVAVTIIGCTRHILGAISEGQLTREGPKWVMKRLLEMYTETLSERQERQRTLSPLVGKL

SEQ ID NO: 1011373 - protein, 79 aa, Homo sapiens
AEGPLCLPVIPRFSHLRQAEQEEKLPPEPKDSSFFDKFFMLDNGTGLKVPGDSQQEAKMGRASMTMVDEVPGLITGTSD

SEQ ID NO: 1011374 - protein, 95 aa, Homo sapiens
SGGAWRKLCLKRSFMRDARLSVLGKLRDITKLPGLSDELRKNGVESHQFFDVKAAYLESKEFQSNAASKASWMQEQEHALSLCVMLNVSPCDNLA

SEQ ID NO: 1011375 - protein, 68 aa, Homo sapiens
DPSLSELDEFFFRNNQTSSPWQDLVHEFDEKLNVCLRNYNAKTENLAPVKNQDRSKRRRENRVYRYEE

SEQ ID NO: 1011376 - protein, 143 aa, Homo sapiens
RGGGRRGLLAAPLSRRSPPRGSRRSLFALVSPLSRSCDLNVTGQEKPRRRPPPPLPGDTRPLAAGSSSTPAKRQEAAGRRGRTCTGPRLPKRRLLTQPPRRRRHRQTVSVSLETTDIQPDIFSYLLHLMYTGKMAPQLIDPVR

SEQ ID NO: 1011377 - protein, 215 aa, Homo sapiens
AGFTARPVARRGCGASVSTPSSAILARCSETRSRTTSTLNLSMMTLIGVHPSMGPTNRVLEISPVIAVSNSRSCPRETGSVFRPSSMIKGAQSSSIVVNTSLDAGGVDDRKRSGKFRQDCASCERVASHTYVLVMLRYLLKSASRLCASQGSSGVRKPVRSLVIVTYVVIATTSAMLWGRYRTWTVAVVVALLHRGPTRTDLVILESCEHEDYQS

SEQ ID NO: 1011378 - protein, 70 aa, Homo sapiens
RGGAVPGAIMDEDYYGSAAEWGDEADGGQQEDRFWRRRRMMLEVQRRTACINFLTSGSISMEPHPIFNDI

SEQ ID NO: 1011379 - protein, 49 aa, Homo sapiens
MSVGHDAARKQISSTGIESVEHTPGDRLWLRIDRTTHEDHSHLNGEISI

SEQ ID NO: 1011380 - protein, 129 aa, Homo sapiens
SGRIDPAIPPSRSVTVRHSRERTDQCYLSLVPAVAKCVCWSEASEIGHCMHAVNVALLIPGSLQSPVQLCMQPHVVLGWLVHMPPRAPSEDTKPETRPIKPSERKITGDAVRCRAGVHCRGRGGKLREQ

SEQ ID NO: 1011381 - protein, 227 aa, Homo sapiens
MHWLLQQMKLFTRCAHCSLFLLLSTLFPLSYPSSHGTPSSLAALLLRARFSALTHVFPPSQARPVLCPSVSPLMPRWSWPNPATTFWLGNPNRKLHWLVSWSSAFPSWGHPSSLLQQPQPHLLAPVALQACPWSRPLICGRIASLIYGLASAVLSHGRSTRPPPLRPARPSLGPLLPSFSQSCLAVGDLPLSLPSPLLPLCVLSPSPLGFLPVFFCSRLFPVPLCGL

SEQ ID NO: 1011382 - protein, 286 aa, Homo sapiens
SEEALEKDQERLEYEIQQLKQKIYEVMVFKQDHHGTLEGKVASSSLPVSAEKLHLVPLMDARINAYIEEEVQRRLQDLHRVISEELQYTLQTRCKDNEKLHNGTIQRKQTYERMAFLAPLGANPDDLKDPINNYVSHATSSAGKETDAHFESEVKLAALAISSKETISDTYRTEPCDLLSRRSSLTANYLRALLHACMLQSATSPLHINQSGTDSLETITIREFHPFFKTGVLDYSSHGTGAEPAVMAEPPTAVPSSSKRAPMQGQLPPARIRVCFLLPEDTTCSS

SEQ ID NO: 1011383 - protein, 100 aa, Homo sapiens
ADRSESDCARLLRRRTRQDEALDRWAATVGLRLSWGQCLAVPDTTVMMVCRCREHDGHLSARVSRDHMKQRHSIRLVPSAALVVNESLPYHCNCDSSGPM

SEQ ID NO: 1011384 - protein, 278 aa, Homo sapiens
REVRAEGRRCVPAMKGAAGPAAAACVAVAREPPASMQRQGRGATAMVAPVMPSGVRTYANDCVAVRRAPGRYMVGNMLHTRGARREGSHGSRERSRQEALASAVTHETPRTSGTSSPLRRTRADRLAGFAPWFRSAAATSPLCCECGPEEDGPAYSGVPLCQVGWKANGLRHWIPRDTSVFHLQYTSLSRVLRRFPSSLCVRNNVYFRSGRKRHLALITVKDVIREPCLSWFHKIPATPLGISPLALSTAIQTLEPWPGTAKQHIRHVSGTPKATYSL

SEQ ID NO: 1011385 - protein, 96 aa, Homo sapiens
RRRGDVWLTSSDGGFAEICVPGWQLVRGVQLRAERWVWGTVCEPVSTDGGQVPKLVVPHGKRAPVVVLQPDAHVNGFGCRWRPSVERHYMGGICEH

SEQ ID NO: 1011386 - protein, 227 aa, Homo sapiens
RFEELLLLGGGNCIEVVAALPAPGRSSLVGVAFQTSALSPPGAQRRTRASATMRCVTWSSVLQNGEHRRNNIAHVPRTASACQQPRARGKCLSEEIKQDDTLSLTRVALMSRTASHQGEKVAEAIHQASSGRREHDQDVIHGDHEGAKGAEWKPSKRNNGCARHRERSARNGASHDHVRPTRNVKGIQHGQRTLPYDRRAPREYLRCPKNKALPETTNCHIVARGGN

SEQ ID NO: 1011387 - protein, 111 aa, Homo sapiens
MFEPEYVRERGFIRERGLPVISGLRLKSWKRPCTDLHKTWASVHRDDLNARKFVLYSQSTDEEVQNKLDAVTLDCQKWTGKGDVMSYVPCGKLQDYVAPEVLAQKPYSKDR

SEQ ID NO: 1011388 - protein, 193 aa, Homo sapiens
MADSWSHGGLTAGKEMKGLKDGVKDGKRVEDLVRSRRVVRIVKMWPLTLERRKSKGGSATEGCSARIQCMKSCAGGAGDDEGDWSCEREQSDMGELTTKIPEKQPAGFMASYQGLRGRSERTGPDGPSRGNGSGKTPRKNPGTAKGAVIDQCSHKTMAGNVILGSHAASGEFPERKGNNLAQGGGNRYTKSGT

SEQ ID NO: 1011389 - protein, 296 aa, Homo sapiens
SGTAAVAAEGTGIASACRRYLQLASPPSYRPPPSRPSAVSELHRHRLRASPQERRSGCGLLPGFRSLAISPRAEKREQAGGRDTRAPRARAGQSGHRIIPGSGALRVSAGGSKDHQVEEYSKHEHPGTHKGKGREITGPRGRQPRSRRIVQGQVVHYRDKAGKEHARMGGASGSGLETPVSGGEDHHASFAPRRWGHHRREHEGAKDGGNYGHRPHFRRPVQGTKRRQTDGEKPNPRTSSVTARTVTSDHRCDRPAMQTAKEDGDKVAQGGTGGNDGRRKEPKATRTAPPMRRPSS

SEQ ID NO: 1011390 - protein, 170 aa, Homo sapiens
SGAGRRKMEPNAPRAGLGHLSRGCCMHIELSARLRQVDPAPLAAEWTTPQACLGDSIRCFFRIPEGPGAFDASQFTDRSDDTQARDRPQSNVMEVTLRSSGPHPHFSSASSFRAGMHGRHANHQNAGAPIKVSSYLHGRERQIDAEVDMAQGFPELVCDRTRVRIRTRMA

SEQ ID NO: 1011391 - protein, 159 aa, Homo sapiens
MATPAAVNPPEMASDIPWICDSCPLAPMAGAPDEVTDGGGHAMPVEESGVPEWTFDDEDDEGPSKCSRENHSEIERLQDGTQMTQYITELSDMVPYMQQQLSSEAETSSPVLRMASLAHEVHEGYREQVHRLVRTSLPFPHRAGTESISSLKQLMDFCT

SEQ ID NO: 1011392 - protein, 142 aa, Homo sapiens
AGGGISPRSSLPPTIPASLYPLCYLPSFPLRPSSYSLPKHISHPSSQSSPLCHLRIPAQSAPLSKMTIIKQKYHRERGSTRDVSTVRSVGPKVHADVPRDHREAWRPHAGERTEGKAQSSSRTSSRKRPSATNRGGGRRKDS

SEQ ID NO: 1011393 - protein, 94 aa, Homo sapiens
RGVCLWRLGPRALETSVLAPASLLALALALRTLPQRRAWVSPRVRSGWVCERACMLRSAGCLLRAFTWRDPGSAAGRPASSGIRIRSKVQQKDV

SEQ ID NO: 1011394 - protein, 94 aa, Homo sapiens
RGPDPFVACRNRPRSVPWPDTSIQLPSCGAVRSVPFKHETRSFDLETSDVLVQPPTVITDLIQHVRSIKVHGSWVPGVMRHCRDLLICALGHAE

SEQ ID NO: 1011395 - protein, 98 aa, Homo sapiens
SGRGSQDSDNIFDRRRGKVLLNSRQPQSPPACISFLTCRIPSCEYKMLQQGLATVCRLSCLQECELDMKHRLGYLLQKSDTCEHNSSHNKKDIVDYLP

SEQ ID NO: 1011396 - protein, 80 aa, Homo sapiens
SGPSPGSVPAVPGEEVPRHRRSPPPAALECRAGSSCDALGLHLIGSALDLRPWNRSKFALLCENLSMIFSPGGVDTLTSI

SEQ ID NO: 1011397 - protein, 99 aa, Homo sapiens
RLGPSVGKEGPPCSPAAPRLALVAAGEDEETVRGAKPPVEKVTVASDGLCALHATKHRTPCTARYRPVCGRPGPPELEGKHTTDAQYMGCYNNKHRWRK

SEQ ID NO: 1011398 - protein, 216 aa, Homo sapiens
MPSDRSLSSQRDVMLQRVPAVREVLVSILRTEHPSKIPVIIERYKGEKQLPVLDKTTFLVPDHVNMSELCQDHPAPPAAEPHAGLLPAGEPAQHGECVHAHRGHLSSRMKVLMTGFLYMVYASLGKPSASEPAVMGARPGSRGAPVRPCPEMLLVPELSCLYRGGLGRHVAPLGQRVPNPSTLPMGGSWAGRVRVCPSGCWLVGMAEGWGSSSPNP

SEQ ID NO: 1011399 - protein, 194 aa, Homo sapiens
MPASACAGPARVPGMPTRLCSSLLLTVLSCADRAGIRSASLRSVPRTSRSISEAEFLYQPGFSSPLTHTITLCSLMDPCRLHTLYVWRPGHHLRFIPVPSQGEQTREDCIGMVPEGSQNRTVRKYTARKEDELSAECVQILAIASASHLLTCGTFAVDPKCGVIECVQVPRRLKDLRSGRCDMSLRASSAVSQL

SEQ ID NO: 1011400 - protein, 126 aa, Homo sapiens
SVGLCYLELRVLLMGSAARWEGSSRESSAPFFSVAASATRGSTWTLSRTTFVPFFNLGAYTPPSDGSGVRGGPGMLAGEGPDVLGVQHWTIGGHLLDDKGEVQEGLIGQLSYPWLTGYGQEPNGRP

SEQ ID NO: 1011401 - protein, 147 aa, Homo sapiens
MVHPLWPLRQRRNAATLAAWCSPARLTLEKEDESLKGCELYVPGARDPAGSQRLYRAPLAFSKALNAAMKFLREHFEKLENGRKQADFGAGSKVNSSQSRLPMNAEVVAQAPHERLGRRTRPRERKRVTAGARTPTEEAVSYVQKGN

SEQ ID NO: 1011402 - protein, 106 aa, Homo sapiens
MSCGRYYPWMDVVAIPGLMHIAYTFDASMRLETVPEVEICTCELSAAVDQASDAIVSDIITWFHFGAGNSTSHSIVGDWGIPQNRGRVQQASLLTTTSPVLVEVSI

SEQ ID NO: 1011403 - protein, 186 aa, Homo sapiens
AGLSAWSPYCPRRCCCGLGILLVTISRLRSLSHSSRQDVAVRLAVIPTCATTARMGSANEPHGRRRNCDELTEASGGYGWTTELSLDELGLEYTKWTCPDVLTKQRVSVTVLRIEMGPMPVRRLAIPTNTPWSVGQSSDRASLIRAGSSIPCCWSWWSTPSCIAGTNGSSLTANGTDEPISRTIYI

SEQ ID NO: 1011404 - protein, 137 aa, Homo sapiens
SGALPRLCYPWLGASCDSGSFGQAPRSLEPAEEGVHVLLLALAKAVTTKQGSRTPIRRGSERRVKPLCMLLAYDVSHKDRVIEQLASVTLELASVEPELHESWYPASCDPLWYRRLTVPSEHGAFSLEVNWLARGWK

SEQ ID NO: 1011405 - protein, 159 aa, Homo sapiens
GVQSGSKEDDGGVPGSLCCWLRVVLLLLVSVSDRTPRGADHPCEKQQEEEDEILRREQIYEEFGVMIAVSSDPLAGMLWRPWISKKGGRSEAVEVAVRGVEAIVELCHWAVSVFPFGGTLEAAAQIVTPNVTGTAEVVPQGASRERVECRPKNRLILSL

SEQ ID NO: 1011406 - protein, 158 aa, Homo sapiens
RSGRSAVARERPGDPALLTGGDRGRRRARVSEAAPQQRPHGRAPGRERQHVADRQAVMPRGHGRSELSNRTRGTVIDRHGSGTLRSTGPGALVDQGRLAAQGKNAKRSRKPTIAHRLWDNITACDNLEYFVIKNVHWTQQQKSRKSPAADELAQYLGT

SEQ ID NO: 1011407 - protein, 139 aa, Homo sapiens
SGHGARPAGDPAAGARIIVELSKCCQSNQVIFLEKVDADGDLIAPIKIVNDLIKLARLLESGDYETRRRFWCWERPKYQFLSLTLGDVLIEDQCASPVVVESDFVKIQRAKFANRREWNPGRLHWAATVNLNLGGSKPV

SEQ ID NO: 1011408 - protein, 35 aa, Homo sapiens
  misc_feature (35)..(35): Xaa can be any naturally occurring amino acid
MRQLCLSHTVCREQKGLLWISVTRFLDYFPCMANX

SEQ ID NO: 1011409 - protein, 75 aa, Homo sapiens
MKRKKIQSQEAGKGKNLTREILLSVRKSSAMTREVKVFRIQESIHLHAFQFLPGLQEEDRTLGEMTLRRRKQNPD

SEQ ID NO: 1011410 - protein, 121 aa, Homo sapiens
AALFLLELSEDRSLIMNDTVIIRGDKVDDQPDLLQIGNTWSLMSFMPRGKPQCLTTEIAGKIKTQNCTIPHRDVICCIVGFRTHYLVVARQVGFVHDLLTSHGVNALDTLVNLGLAYDFAR

SEQ ID NO: 1011411 - protein, 143 aa, Homo sapiens
MAKHDLFQELELTSLNRLAVGNQAKILRGPFHMSSWTKLHEPFRIHAKIGNWHSEQWGIGILVKTSCRASYFFNLHSSGEKITVRTFTQEGWGHWNHISKKGNPLKEAPLLKGNPTLGHHFRLEKAQFTSFLLPYIGVVENKG

SEQ ID NO: 1011412 - protein, 236 aa, Homo sapiens
MPTPVTMVLTTKSPTQAKKTSETCRRRRVRDCRLSAAFRKHVLKPLECSICDVRKGTSRQKTSDQFSAGGHSYVAQAVCHPNTPVKTDDEGRKALKQRDQKRTPEKDGDSSPSVALERIATRKRQGRKSDSSEEILLVKQDSSTALQSATDEDQRNKITPQGPRLKPRGPEHLHSQGGSKLWATSTVMITDFNEEKLRSFIDILIHSDLQCMVQNGRTRASRGSERTNHGFLPFLT

SEQ ID NO: 1011413 - protein, 159 aa, Homo sapiens
AGGLHGSRARRRFGGQGPSEERRLAGRRTPSLGCSLLCAARPGARGAPIRVCSMRGPRDQPLLPAPGRCGAEAVAAALPPLREAGGPGRLREGTMEVNAGGCDMAYQFFQLSLKAMPLVTVRVLRIVSMSSSVFCSIFSKVALNADTNGNPKNGDLAKY

SEQ ID NO: 1011414 - protein, 105 aa, Homo sapiens
MEFLIERRGGSGKTPEKARYSPVKRTLGAGHVQHLAIDPQWAPVMREGDSSPSKHRAYLAHVLASYCHCFGQVHSRRTLSGERLARSRCVALAAEGGSHPKEGPG

SEQ ID NO: 1011415 - protein, 224 aa, Homo sapiens
  misc_feature (133)..(133): Xaa can be any naturally occurring amino acid
SGGGGCTRGAPGAAMRGSGPIPSADPEAQSAMPEPRDERPESRARAAELPVRLAATAGGGGGRGARSEAQGDAPGDIDLGAAAIQEEGAEERGDVLGGGLKCRPSREDEYLSQQFAPVRMRELVQDQAAWRDXSYFLGTLTRGAPRRLHGRAHTQKSKRRRVPVTLRLLQNRHGVLDVGKRVVENGRLKEVKAHDPRDGPDGPHARPLRRLGYHTFVPGACKAP

SEQ ID NO: 1011416 - protein, 132 aa, Homo sapiens
MAHDFNPSTFGEYPYDGRTHFEDREFDDQTWSKRNAHLYLRQHKHEPGVVANMTVIPSLIRSADGTEQVDLRHNTGAESKRSRGHEISRIRGSRRPGLTVRRALASASAQQNSFACITLTLHWWDGLEYGVS

SEQ ID NO: 1011417 - protein, 169 aa, Homo sapiens
MARGRLCAAACSVLASPGRGPGRVAPAVGSQYPVERPCPGADGPVDASVEGGGCACVHCDFDVGDVSRTRPATICNLEYSDATAGGSCARDADTYPWGELLLVTVELGHIPSVLPRDPRVQTWINVPQFHDLAYDLAPQGERFMLVSRDLRCCRCGMGHQMTCGRKVAP

SEQ ID NO: 1011418 - protein, 255 aa, Homo sapiens
RGRGSPPLSTGAMDDCGTVDCSSEARGGMLCHGMCRAEAELVSVRGPADILKRKFHVCEGTQARLSKITQFDVRLVPGAEQSYILTDIRKGIVLLEELLPKGSNGGTTRDYVFYLAVGNYRLNGIREGLNSTVRVVCCMTRRPTNQASAYTVTGSVLIDYGHEERWTRGHGHRGRHGPVVWRDWPDSSDLLCPSPTPEWRRGSPLENAPGGPCPSSLSFPCSPLPPVSILCGLQLISAPLRFVLSAHHVLWDECT

SEQ ID NO: 1011419 - protein, 103 aa, Homo sapiens
MSSRRTGRPPSPFGSARSSALARGSLYGTQQSPRCTTARLVLLLGSCVNEYTETFATMTVIPLDFTVCSPGTLVGSALTIPMQEHARKNVTLRVSGELHRCEE

SEQ ID NO: 1011420 - protein, 239 aa, Homo sapiens
MLGFPAGIIGQGPISLDSYITTRRRLYSRLALCEKATRGYKVHELKHEQAIGIKRLAAHVRVEGNKALYLATAERRCMALQYTPRLLQLPPNGSIVGSANGHNAHTWKFPARYSSNGTASPHRNVERLLGPLIDPQCNIPLNKRYSPPLTDRYTTNGGERTPPIGVIFLLLKKRYYRANFIRLTAWFNPIYRTRKDTLVNNKNFGLTAYEALQLIGYEGDITSTFKFYRHRHYSYKQYE

SEQ ID NO: 1011421 - protein, 116 aa, Homo sapiens
MELESDGHCFLGRAHGSFRRCSRFPGATKREQQRWGMPYREDANSRELAIRGEAGVCGAQEKYHLVKNFMIELVLQMAPRRSTPCGNTAVVERDRHRLDPRIRVQILWGNLTSKFL

SEQ ID NO: 1011422 - protein, 96 aa, Homo sapiens
SGQEPGRGQDGGRGGAARDLDHWAGTHDPTTTPGGRVSVRLGLGTGSFPARAPPFPAREAPRGGVTVPGGPAFRPNSAGAPRRPCPWVHEAGSPGS

SEQ ID NO: 1011423 - protein, 249 aa, Homo sapiens
MRAGGEPGDGGAGLPVLGPFSSPGILVACLSNTTSAPGAPDFPAVDGPFLGQAAVRLGPSLEVLGIRASAEPHLASHRSALAGPSVGRTLSTRKGASELELEEIAGPQEDVRQLTWRAGSRRRCFLPRPGYLVPQGLWLHRKSYQCPASQIGEGAEHGDEGVAMRLKFSAQNVLRIRGEDEAQKHRKLGEERRGSCGSESPRRTALRRKADQVRERPEAHLAEGGAKGSPEGWENPKDLTCGANESGAA

SEQ ID NO: 1011424 - protein, 358 aa, Homo sapiens
MGGPTEPNKNRPKTGRKPRNHRKTRPKTQEREHTQHPKRRAPKYRHALPPKNHTPAQGTPPRTKQRTQKGERDSENRGDNPRAKARIKKNTQRKHPKRRTPQENQRHRIPRERHTRTQEGKQEQQRPNQRKKQSTRTHKTGKSTARTDEQGNGKRNNKENNTAPRWQPGKSEKNTGDKRADDTHKQNRRAKTQPRDEAHETTKRHKENERNTNQKNTQKQAEGKQGKKSKQAQQEQKHPRTHKKRRRGAPAEWREYQRTNKTHPGETQTNQGGPRQEDHRARHKYTRRRPNNQATRATHKTNKRHHSKQRPHKGHPPPTSGDTQPDKRGNKRAKQRHGTTWETQTQWASAQPQPTNTP

SEQ ID NO: 1011425 - protein, 110 aa, Homo sapiens
AGSPSRLSQRLAPFPATSLRARAAGWACARVKDAASLSLLRRNGGGGGSRSGTAGGGGSSGVPDEKMLKVTVPSCSAIVLIFDQRQCGPRETQASSGLLIEGSNRDALRR

SEQ ID NO: 1011426 - protein, 97 aa, Homo sapiens
ADCESSPTPRKHPGAYAVRPLIQVGGLQETCVGSVAVTPSWAVYSQTPAEVGHMSSDFQDWVTIQDTVQRNAAYHVSGMSEHPSMWPWTTPRKSGDS

SEQ ID NO: 1011427 - protein, 80 aa, Homo sapiens
ERTLNEGEGRGAARKRGLREGGAAPQASGSVLELPPRASVYSRLIPRLAVLGSSVTSCSLAVSVILAVGGARELLVLRTL

SEQ ID NO: 1011428 - protein, 66 aa, Homo sapiens
MESHGSEIEQRSLLSPEGRCGTFYLGLHVHLEKGHRERPSIMVRGMDVSEGLFEVESDGEGRENYI

SEQ ID NO: 1011429 - protein, 196 aa, Homo sapiens
SGGWDGRRPGGLEPPANCIFSRRLDQQRERLCLRNDPRGSHPRMSMKETGRYTVTQSREQHEECDTLQARYPHLWTNSLVGSGSSLEDKRCAEKGENDICDVMADVLDMVKSKISEEHEAKVLYMSRVRYEDWRVTGVANISRTVTTKEDITHQNLKCSVPSDEGYANAWAWVGISERLDTGGEFWLKDCIIASVN

SEQ ID NO: 1011430 - protein, 122 aa, Homo sapiens
RTLRCGCWTDGRTGAAVLTASAVRGLGARGVFPRVARHGRGGGHARAVSPELRGSSTPQGLRVTSNVACCLVIIIVKLVCSVTLRKVLAITLSLNIWLSCDLQVTDGAELDKTYDVCSRQKT

SEQ ID NO: 1011431 - protein, 298 aa, Homo sapiens
ADGPLAPELRARQLELGAEHALLAGRCLARCSPGAGARLVDSWASGTLAGRAGATAVGGVAGPRSWLRWPREGWHSVCVSETGDIYIWGWNESGAAGTCPPGNLAEDGETVAQGRHMNWMNDGSQVKRTGGAEDGAPCPLHSCPALPGSYWISAMWLTMQSRQAVDPGRHSCGDTEQGELYIWGVGYYMDKLGHAGRRTSLDRSRRVELLVDSNSKYKAVTCGPWNTYVYAVAEREELDMWKMGITGFQENLLKLAFHRYPECWDHSPSGPEFIAGRNSTDTKGGYSVTVTIGGTQAS

SEQ ID NO: 1011432 - protein, 135 aa, Homo sapiens
MGPDPVGPETVGSWELPPRYFDHGTEVDHTLRVRGVGGYMIDRKVYYTVKLMFIRLRIRGVHPGLSQAHYRTGAWIGHGIPYCGHFHMEAIGAFVNEDISESALRALDECGALRCHDFSPIDRTSAKETYNEGLS

SEQ ID NO: 1011433 - protein, 137 aa, Homo sapiens
MFIEECHRCREDILDLARSMWEPDQAGITQQLRSRTRLPEAASSATARLYCALGYMRPINPLNYAKAKLERRRSSTISMNITGGPEFILGKNHKISKWWSYRYNKVGVPVKFEEIYKAQLLRRNADIPPKNDTPWKA

SEQ ID NO: 1011434 - protein, 205 aa, Homo sapiens
MGSGPRNCHGLDPRVPRLGGNRIFALPCVLEWVSMEGLGLALWVHSRQVVPWAARLQHGVFVNQPEEDGVVRLPECFSWTNPAVDRKDLVDDQGAYPSGCFARCSHLLSCHARVPSTLGTRTFHVLDMDTFVQGSNCYVPDRRKENGVCPDLIFGLRITFYFKYHVTTLEIIFLGNAQSGVGVRHDSRLKAEPLGEHPPSAYGEG

SEQ ID NO: 1011435 - protein, 358 aa, Homo sapiens
  misc_feature (23)..(23): Xaa can be any naturally occurring amino acid
MLRILTLILGQGSIFCISRRESXLYGRASYRRFTCETGLFRRLAVPTGASTGIYVGPSSSEWLMTGDLDYYGCHVVFSRGVSEHINENKLRLPWLAYEADRHQNIEDRLHKTDLIDDGWYREEDRDLKLSDANAHFWGVAPLAVLAKAEMSDSNKGGYPPVTDRHRCTMLSGNVLKVKSWSMSPGRFTLSTRTWSGLLIAEVNTGIGRMSVEFRMNPIPHVGWPGHNLRGQRPMAAIGGEKLVLTHHNPWNEIVQSSRSKVLGEKEWAPYNRGRDSELRECWLPRSIRLRTELNERGALGNLRLEELGVMWGKRPRAYSMELSGGSNPALGPRSPGIPKLLPRVPGKSTDPEHSSLPE

SEQ ID NO: 1011436 - protein, 131 aa, Homo sapiens
MPSVFIQVKPSRSCNLRLGLLVAIASIRLPQENSAPGISDHGFPWHYSRVMFPKQIKANTIRLEGLKLNGCELPELPGDTWVIRLVPNPVFILPKCLVGRNELGFLHCLGSMEYYTYVRAGTIINTTSGPP

SEQ ID NO: 1011437 - protein, 222 aa, Homo sapiens
RAASRFWQDGEGPMTLTMSLVHEMRDIHENTMETKNNSRKLVSNIVVELCEECTYLIYASMLGDDIWTHHMNRCMIAATYDVWIVRMTRAIGLSSELRKTGSLGQITESSRLTVHAVFEAIERSVWCCTILYVWDFTQNDPTNTAAEEQRIALTSSKNAQWDIYCVMAIFGETEMTLSANQIGLRSTNSKALAVELCRRSSPSMTSDYAKAALYVSTGTNDD

SEQ ID NO: 1011438 - protein, 282 aa, Homo sapiens
  misc_feature (106)..(106): Xaa can be any naturally occurring amino acid
  misc_feature (160)..(160): Xaa can be any naturally occurring amino acid
SGEEEEVRVKIADSRGRDLHHGGVLVARRKAVSNPIAEETVTSQTDLLTLHLLIATLGVHPTRHALLAHGIRWLRYPSNLHCKRPLLSIDSGHTIVSQVLTGASRXHGSVHTGGKLLAIAFVTNRLVGAPKERVGALTRGVYSGWITQLLPSFILSELMXAAMHRIIGAQATVSTQQWVEPVNLRRTGCEDGRELTDRCGKGWDSLVILRRVRMVLTCLSSYEVRLLHDSVSRMSLGIPWTERHRMALSLLQKRGHCCSVTGHLMTRPVYEDYIVSTGWENV

SEQ ID NO: 1011439 - protein, 177 aa, Homo sapiens
MLGERFSMLPIAPIQWEERNVIAIQGPGGYMCECIPSEAKESMWITNIDWRLTRPFEDPNSSRSPIYDIYWLRITFELYANVRRIVSLSTRPIIEPYSDVNSGDAIRGDSTEKDEYMCAIEACDESMEIVQSIKLITEGASYRIADFAFEVLPGTNHRSNVHGGATKPDMMLDVRWG

SEQ ID NO: 1011440 - protein, 256 aa, Homo sapiens
MAVLLLLLRALRRGPGPCPRALCGPSALAWESRVPRQARGGGVRTCASQASGGDRRSRLEASSAERYDGDCVTPTFEGINGLMLKRHFFRTPGHDSGDFEVVLSTFELPQWLKHEDKGRKGLVSTGERLPDQDEEERRRRERDEQMYQMSGCAPLLVIGGCVMSLRESARQHQRRQHFLERLGPEEMLAKGEVQAAVQVVPESGVDEKSYCSLGAGGVRGGPRIALMYEVQVDNVGSFAEQLRATEDGWIWGHARI

SEQ ID NO: 1011441 - protein, 260 aa, Homo sapiens
MDLDDREECFQILHAYELVEHGIRYCWLRDDMGWSLGYRLPLRRTSDYVHETSRGSLFCVGSIIQGSMTGDQMGYVMGELLANWWVPVWSMQGAIGRVMGDIQGEGSRQRIALDTLRTMQGGKAESVVPTSKGKRVPKRVAKSWSSRDENVKLPVGPTSEVYTEMAAIVDALFWGTGCVGQGTVKNPSRAPFGSYFVAQVIRCKTGGKQRRVNKPRDTTVRTPSTGHSSRGALNPVMKLGDRTTSALVVPHTVQPRKTGV

SEQ ID NO: 1011442 - protein, 207 aa, Homo sapiens
AECAKPGLLRCPGPWRLPCNMCQSLGDQPLGPKAAIPWKRCTEEELGTEYPMTSRLLVHCGPTSDVNEAGHLLCPTIYIVIFGPSVALPPERPAVFSHEAVASAWTVEASSAWSSSSMRILFMESGEVALPGSLKGKVSGVLGCLPPPGSLSRCSHAILTIRDHGLAQFWINKHVLSIHSATDGRVNQVNSVSGVSQFGKAHFLLIT

SEQ ID NO: 1011443 - protein, 126 aa, Homo sapiens
SGLESLRVRREPEQGQGREVLRLPTVASTVRSTHLSARDVRALTPDPCSPFAFAKPGSRGMGSEARPCGSSRWRACGGRLRAGGPGSCMLRRRLGATNSPPSWRGQRNPHACIEFSSRNRRRQAPM

SEQ ID NO: 1011444 - protein, 412 aa, Homo sapiens
SGVWGTGRGRGNRRPDSELLLSDQCPGPPIITAPRFLAPENLAFPVIAMMTWPRRLRLGSGPSTPRPVLRANSRSRATGRQEASVRRAAGLQAESAHAWQNAEPVGEITSGIRMIVLPQGCELEVTSQYGRSLLHESVILTGCLGTTDEIDVCVNALNECRTNVLAWLTNGLPTMRSRVVERIGLTHDPLPRGECMANFIQDQFFEDAGTCTSSRPNVLYPLDSCELSVRVSTPTSWGMDPLGTGLMEHRLTCPRWTAFQARGSNAPSPVMEPFVRPAGWADFRKTWECPLATMSEVARKKIKALYGSLTKESLGGKKPHVHFTSLRQMHHLGRHVWGYRLGKAGQRCGIRGGNLLSLSVHQPVLTGALSFTPGRVLQAVNSHTPGGGLCGPQVCGVLVLCAPGAYCAHLVP

SEQ ID NO: 1011445 - protein, 40 aa, Homo sapiens
MCPRNPYNDLDSLDILLGRSRASLTVATITCGIHLSWDST

SEQ ID NO: 1011446 - protein, 66 aa, Homo sapiens
RLWLEEGYGDPYGGGGGGGGGGGGGGGYRRYYRSINRLGYEVACVLYSRTSSETDRCFQNKPSSLR

SEQ ID NO: 1011447 - protein, 140 aa, Homo sapiens
MESLGKRQYSSEPLPQKNHEANVERRPRAQNNQETKEHKHRREQQRASERSNRKDTIDKQREEEKTTNQKSTREQTQDNQTTSRTGGRTNEETEKPAHNEPTGEECRTAETTQERNRKGNQKQNTHRRKNQPRTQIENRR

SEQ ID NO: 1011448 - protein, 135 aa, Homo sapiens
MGRARSSGGMQGTAPWSDLRGPGAAPMCSFQFRAGLRVASLRGQYASCRSFVLELAKRPACPSCEEGPGEDAAPVPRVRAPRPREGKEAMNEPKGHREAHGGPPRQYPGQATHSGGGSELNSAQRPNPSRRQKKP

SEQ ID NO: 1011449 - protein, 351 aa, Homo sapiens
AGCGAPGRGLREPAPHGPAAVRPSPGPPSSLRPRFQCAENLFASPGMLRDDLAFVLLVGGVRSLPAPLPPLSRIAVRVVHWRMEASSPAGLVLAAMPTAVIDADPGHSGAAVRRKSFSRTSVDLTVDRSIGTSRLLPELSYELSFHGNNEEYTCVMALKDVKELFRPRLTRLGVTLGLNYCDVVDLTWDEAIVHFPDLAGKSIGGFKHAISKHLDLQVFTKKVLSVVFHFLNAPQLLARHWTDELLALDTPRLDGLHVRKMETPSAFGPSSAERGVFETPWEFPLPRRPSGRTRFGHLLIGPTRLRKNRSQVKPGSTSGEIWVPLGTRKSVNYVGQLFASNRNYPFFMDLK

SEQ ID NO: 1011450 - protein, 333 aa, Homo sapiens
RGRLVLWLRKLRSFTLLVWCPVTMALAVLLGPAEPFPDLRSPPVRGMCCLPPGGALWPAAELGLVLVLRPCMVMSPAWAGAAGGMTMEGPDCVAPKSRVPGTCLQATWISRCSCMRHPGTGCSWGAGVRWLAGGAVRAPVRLALGTLLVHLVLAGLGLVTCEVGLIAWIDGLLEVDRSRVSRDSPVVLGLTRAALLGGCLVPRGDIGLACGLGVVTLGGAQNVLIREALVGPVESGPPSPQTQYVVSSILAGYWPQCVRTPGGSSKWKADFGKNSTLEEGRSQEALYSGSAPLRHPFPAVADMGPNVCFDPACPEEVSVRSTAYSSEQCKHLS

SEQ ID NO: 1011451 - protein, 89 aa, Homo sapiens
RGGRKQSPHAVSKRKEATSSQETVSVFAREEQFISEQPGRKPEYSVQVVGHGGQIVSINLPSMNPTEDYAARTMYYPWTWDLMTIMVIL

SEQ ID NO: 1011452 - protein, 216 aa, Homo sapiens
MACYFDEPRVPSHRTLQETLTNMLLELVRSLVNRMDFEDLGVGSEIGTYHLSPPAVMTVVENLPRTVIRGSQAELKCPVCLLGTYEERCETCLVDDVLVLSPFPFSMLHCCLWSVSNRVKFPVHLLPAIRLPLARMSDYVIRGKRHDGLVMAQKIKLRLGEHLNLEDSLQCEPVYYREVTVGGEVRGPSCVITLLARWGSLSLIRCSCIREQQDKN

SEQ ID NO: 1011453 - protein, 277 aa, Homo sapiens
GSRVAVKEEDGGVQEVSVLLLQCGAAAAVEREARTPEELTILGETQEEEDEIFHRNPTMRVWIMIAVSMTLTWQVLETMDNKKGRSILRRCSGMAGVVPVGVCTGLAGLSLWTFLCDSSPNSSSEWYRHRWRSAAQKGCLALSLLELLGFEPHLMSSWQSLLVLIETEWQPGSGIPEVNCYLNGVQVPGIVRLRTLLCKVLERCCTSVARRRSNEREGTCQLIPQVDPAAWTAMPYTSAPRSISDYAKNPVYPVAHISRKRQHEEEEMPPPGNGAAS

SEQ ID NO: 1011454 - protein, 103 aa, Homo sapiens
MIVIRFCREVHKDDKSYWKMIQMTARAHFFSKGDHLGPTYSGTLEYAITVKPCFRIEVDEVIDVYATKIFHRYIAVERRETYHELAGHHQNSSSANATSFQPT

SEQ ID NO: 1011455 - protein, 293 aa, Homo sapiens
SGVKLPREGSRSQRHRHKQSLLHHVCTMVVENFPDSSDLYSEIGAITRSAKVDFDQLQDNLCQMERRCKASWDHLKAIAKREMKPVLKQRMSEFLKDCAERIIILKIVHRRIINRFHSFLLFMGHPPYSNAGKWNIKQKTAEMIRSRTEHQEEYAQTEGKKRGIIEKQKRGQPSERLNKEPKESEHRIAEAEFSGSSPAPPSQPQGLGAMRRTPAEHENRWGLKRENRLRRTEEDGHPGQGVRTRRRSKPEGTTKFRDYGNWMIRPCPTRVPLMRHGRLARPHQVASRDLGGA

SEQ ID NO: 1011456 - protein, 124 aa, Homo sapiens
AASSKPRGRVLGLARSAARAAAVGVFLSSPPFCESRVPRLSLIRRSRCYYTVSYGERASWLTSCISSLYILIVRGSNFLIANLTRYLVLTPESCRPSFNNPYIDSGQETTTRASEILKPSYHKY

SEQ ID NO: 1011457 - protein, 85 aa, Homo sapiens
AGGAWKSETSRCDVTEIQQKLLSSLPKDSGRENLRMLSSEDSYEGTRAVLFEGLSVPGSRSLTGDVGLIRIRIYFPEHACCDLRS

SEQ ID NO: 1011458 - protein, 114 aa, Homo sapiens
MQSVEPSGDGNPRIPPACLAIESCDMPDIGDNAANGRTRLIVRWYGPQTEPDGGGLPIDLQAYQCNKSTSRIKPLTARVDATGGSYAGIKAGGLISSTRAGIGFGGSLSDFNDG

SEQ ID NO: 1011459 - protein, 171 aa, Homo sapiens
AGGAGGGSASWARVSAAAIGRERPRESSMSRRAAIQGSIHADQTKQGGDSGKSKNAARTRCSRRSKGAIYVGTKRHMHRQLRSDKGKALENEGGSRGERDQFSANLGTKFNEPTEQSQGEMASERMQRRRPISWIDELGKTAVEKDKKLAWFFAFAQSCLRIALGNRVKRS

SEQ ID NO: 1011460 - protein, 76 aa, Homo sapiens
RGRGLRGCHGGGGPAPELRAHRHLHYLQQVRAANVRRSKGIPSVMQQRKRARAEALVESPMIREMIAEADGTWDLQ

SEQ ID NO: 1011461 - protein, 99 aa, Homo sapiens
RACDIRGRTEWSETSTIARRRPSKKAGNTENCTLDNNKQTKSGNQDLENTKTDRSENKRTDNKQYTYQESIIKTKNPEQHKTMKKSKKKNTAKSNEIHN

SEQ ID NO: 1011462 - protein, 69 aa, Homo sapiens
MRSLESSPELTENEVRDPCMSAECIDAPRRGNGPLSESHLPECRVTGPMPPSTKEETRGNPPETPGLDP

SEQ ID NO: 1011463 - protein, 70 aa, Homo sapiens
AEKYRLRSNQQIYIPSARLIIRYHTRSYNKAMLLHLGNIIKIEQSIQYDKSNQSARRLATFESRKNEYTN

SEQ ID NO: 1011464 - protein, 114 aa, Homo sapiens
MKRRPSRQRRPETEKGDRTQDGIREEEEAGPPKYEAVNAGRKEPKLRMKEETEPGWNESVVQFECNHEESEKMPDEKRRVPRMQKITRNQGERNWRGKYHRADTSPPEWKAVQD

SEQ ID NO: 1011465 - protein, 162 aa, Homo sapiens
MTRLLDTKYLHTRVNEIWNRIESETMNAKGIINIEQQQLKQKIKPMKENQAKEADERSRKNKAMQEERREEQQYQLGKLIMSEIIFDYGLTIKFFINKMLKHYYGMLMIDAGTAHYNNRGFDMKRNLYEQHRLGKYTARLRLRANIFCIAGLYIAKGINSEW

SEQ ID NO: 1011466 - protein, 112 aa, Homo sapiens
  misc_feature (46)..(46): Xaa can be any naturally occurring amino acid
  misc_feature (109)..(109): Xaa can be any naturally occurring amino acid
MGAQLSTLGHMVLLSSIWVPSIKACYIKSLYPFASVACRSPYDYPXTNNLAPSTECLSEPGIRSDFRIWPRTLTYQDPLIAVNPPDCICDITDPLIPILSDLNLSIIVXRDI

SEQ ID NO: 1011467 - protein, 126 aa, Homo sapiens
SGFFFGTGPGGRSATKQATVLTERAPPCDRLMRRYTRALSPARDQGRKVVRAATERVKERILWLKARTKYWHEDWLKCAGCDCRWERLLWCNGKAALTCSKLIPAFEMVMRAMDNVYHLDCFGMSA

SEQ ID NO: 1011468 - protein, 91 aa, Homo sapiens
RGTRSAAGPAAICPCCAVCPGGPGGRASTAASAYADRWRRRGFCLDEDSQDDQPKNLFPRTVRSEVEYRPSITCMAMTTEVKSLRNWTDNY

SEQ ID NO: 1011469 - protein, 278 aa, Homo sapiens
SGGRISELLLLVLLWPPSLSRSALCPAGSETEAVGHSILSRADAGSDISGPVHAYAVRRSACQERRRAGRLRLVSHTGERRVGCAVTPAVSVPALLDIVDCSDRLIAGLSPCGRGTGADRERLWQIRSDRLMKFSFLAAVLQGGLTERLHIPLFDMTEHAWSFTNISTIKEWPEGSIVSLESHQFRPTCTYSQQVSMRAIPYSMTSLLDCMHGLRPPEENAVINQTSKATRRVRLSRGDWTFSEQRQESRDAGEIEHCRSEDLVCSWFHSGNVLRGKK

SEQ ID NO: 1011470 - protein, 110 aa, Homo sapiens
MATQSTKRRELVSQSWRIETTFRGVLEQENICTRLEEEIFHTEFVELPTLTCVQYRQRLRKDDYILDSIQAFYVYQSVQHMNDLEAKEGKIADTYNYALSGNMPDWQILS

SEQ ID NO: 1011471 - protein, 180 aa, Homo sapiens
MQTVLNQKVTLPPIRVDPPILPYCNHLIWPHMLCECALDSEGVEVSLLGDIIIAYAAPLFKTYWPTLRKCVPFRSLRARLPCLLESQGPRFFSRVPLCIVRALSMCLRRLVLAYPGREWPAPGLGVARCELYRGTPILCRGPAVVLEPPCNVAFVSFQARVVHCLLFGLALNTSSCAVPS

SEQ ID NO: 1011472 - protein, 279 aa, Homo sapiens
SGMDRSILTAEQSQPQMQTTSRLQLESESLNDMGLLSAVLGMSGTGPALLSLVATWIVVLLRVALFCGCVDIDEALSVAHDTYASLTTLVSRKTSPRLLSTPSFNCDPVSFEVCHLVELASFFCPFTGALAAGLERRSSRQPAPGLAGHALFASHFTDDLTQSLPGPNGGPEPVKLSYTGAGPEKPANGAVPKKAHILITLNFLIGKPRLLLDLLDGRKLGFRNIPGSKFRRGIALVCPDAVVRGLLGCLACLWMCPCVRFSFRGTLGAPCQSIWLSPV

SEQ ID NO: 1011473 - protein, 218 aa, Homo sapiens
MSLSGEKKYSTHHERSSSDQQDGQTCYMMYQSFYADIYMEDGLIKQIGEQSELCQDGSEDHARPTPGWCSPEEVDVHTRFQMPDQGLTSADWISSKVTKVGPELAGTHYDHWTTLFLSLGHACSLPLTSGAEWADSKSLLWLLFCLVASAEWHKGHPKKETGKRLVLKDHGVNFRFIVLHGLSKNRFQLDGLPDFMTYWRWNSGNLGAIAKSRQNATP

SEQ ID NO: 1011474 - protein, 288 aa, Homo sapiens
RVSRSLPGRQAAGVHRGKAGLGLAVRPPPETAREERAQKLLDAVGSKPAGVLLLGPPSRIVCARKMLLAVLGASLLSREARAEWVGQPSSRPNILWKSCARPSRCACSSGQEGWVLPKEGLLGAYLSSLAEEHLERIRRDVEKLASGTLLLSLTTCGPSALRSLETNLRVSVTTCGPSLALRPIGAGGDLGGLSKTVSRLCRVVCHNQVVELHVPQTIKSRRRVKYAEFAFVTVLRVGGRRNLEITPGCGIVAPRNFGGPRITRQVPQAEEELVSGPCPTCVGDSHNA

SEQ ID NO: 1011475 - protein, 400 aa, Homo sapiens
RSVPEELCSLSADASGPGRGNCEAEGDRGTDAFQTLLGYTWLHHHPCWLQGWCVSGHYPSRAPHPAFTQGLPLLLTESHHRKDIHMGPSKPPPSQGPIMPPAHPRHSATPALAQQLPTKLQQTASPANPSHAPTHYPTHFALRHRPSMGPAQRARRARLAWASAHQLLPHLIGPWAPRFNWTTLDALIRTTGLLHFGPSSNLSHSELPHFHLQTAHSLSTFQPARSSITVCKPTPLQPLPIHPHSQPRHPAIGPSHRTLSHCTPSSGSLCAVKHTLGRRTLRHAHWPRPARQLPSATRSNIPTIAPRTPQGPNTPSWPEAAQQFLRLRNGRRTEEHYSDNATYAAPTSQHSRDTDEEQTPWNLHGEAHLTRRATSTRPQTHSLPTRQKPTTRHHTRPPDP

SEQ ID NO: 1011476 - protein, 395 aa, Homo sapiens
SAAAQDPAAETDRLQSMETTEGVRQGRGCLSWRRPMVALIDVFHQYSAKGGRHSIKLKKSGILKELINNELSHFLEEIKEQRGLCDKVMETPGHNGDVRSVTSTEFHGLLVSHLVTTRLPPDSLDTLTVKTLTHTHAKTLSLLHQDDASMSSQKTRTSHRASDWALSSGRMISHSPLVHVASHLRQASASRPSARIAPTLQQHRPLPTHAPASNRACPPLLSAYYSQACVWIQACTLGPPGNSFFEPGKTFTARPGSSSSHLAVVPPAAKPRPPRPDWLRTPLKPPGAETRLPLPGNVTPRRGNPLKNLAQPNPPTHETTTTPAGYRPDQKGRAPRPATPGAHTGGARTVNKSEEPPRRRVAHPPITAGANTGAADTNRQTWGSRAKPVSRAPTN

SEQ ID NO: 1011477 - protein, 243 aa, Homo sapiens
MLLHAQNTSPLLTSHTTWPRRHQDKPPPSPAQQHRPLTQPRLIYNLASDPWIAHHIYPIINRYTLFGALEPFLVSLATWRNLPPYYSSHFKTHHNHTHLTHRHNRTRRTKPPLLLTTRTPPTPDNYPHRGSPAHPHDTQTHPPHTNNGPITHHFTHRPPPPRPPRPKRTPTLEPTRRLHPQHPGPTTQTTSARTRPATTTTKPRPEPSHIGRTVEPTPHAHRTRHNPTNPASHTRATRRARPP

SEQ ID NO: 1011478 - protein, 165 aa, Homo sapiens
MAEEFSEIPLGQPPLSLGYPERDFNNSNWASSAQVPELLWTTPKALETLGVTQVPTPRGAKEKAPPVLDQTQENSHCASGAIETCLPTANLPRGVPFTPARNLDDDPPRREELLAGTNAQRELPPSHRRGACKIRAPVPQEAHRRNPRTTWTPPNKRRHIPPNRQ

SEQ ID NO: 1011479 - protein, 245 aa, Homo sapiens
AESCYTSRGAHSGNPGVRGRAAGQEGPAEARGPRKRLPGRQGGNAGSGGGLGDGGGVLAINVRNAQVGGCLTRAAGMAEQRVGAAAGTGPAGPPLPPLRPLWGPCFPLPAGTLYSLAGATSASVGQARFPFPLHLLPGLDLNRAIPILPQRGRRHPARTFAWHSDRYSSTYDIQYIGVPGEPVHIGRQWLQAPHLTRMFRRQTCTLRKYEAQSPTGSRIRILHSPIDGHMGTTRQGIDHPYPQPE

SEQ ID NO: 1011480 - protein, 343 aa, Homo sapiens
SGESAAAAEAAAAVAAGSQRRRFRTRALGTGDSGRALRPEPLSSRGRSWLTYRDPSLARNLNQANRFTPLNRILANQGSNARPLPTATDDSTEADPSKLHATNPPLSLRQLGPWRLSGLSLRTEGPTSIPPRSLHAPNPFLRLTTSAKPTQSHSCKALVPPTPAPPCNPFTFHPYCRSGLCTHMPRQTAHPVGLAPLRTPPFRSLATRHPGTLTPLPATPIPQRSFTTPPRLYFPILITTTHPPYTHTIFPQHPLNLHLAFPLPTHTHPHPVLQPRTPPRKFHTSNPPPSRGPLSPAPPYSPGLSLTSPAPPLQSPPIMLLRHRRHKSPTATRKHPGLQADPP

SEQ ID NO: 1011481 - protein, 460 aa, Homo sapiens
RTVHLPAISPAPEPGSLCAAWRVVAACSVVVRRACVGRRALLVLRACSVRVSRTPLRSSAASLPRGQEPPLVLSAAISVPWLHTAAPRRFRRVRCPEVEAGAGGAVHVSLAREAAWSALLGLECARAVPSNAVVACVADEPLGRLDAIQAARRVQWMTGIAWQPSRGAAQRGIILSIAVLLGALARTEAPDGALGHAAMHSASGGFLDFRPPPALWHTRMAGTFLAKRSKAAWSPPRRAPCITPGPCRCTDFPVTRLCAPSVTTPTLESCPRAASAPTHALQAMAPVVATKRLRNEQFGDHATKIRAHRRRYTYRAKKGNSETKTAGQKNKHRRDNSPKGEERGNTQPHRYTRDCPTTPTDNNDTGSQTTDDRPERPPKDTDSTPPNERATDKTKRKRTATGESKNITAQTNTTLVDTPRQRDYEKTPTLATNPPPETTTNARDYPSEPDTDRPTTHTHN

SEQ ID NO: 1011482 - protein, 250 aa, Homo sapiens
AGGEAVAAFGGLSFIEGRGPARGTDWMAEAPRRMVGRPLLVLGCPRLCGCADLGLLRGLTSIACDHPLSARGACVPGVDLVHFDQAACGLSVAESGYYKEPCEAFNTIYHRILISGPFNGGTPQYLNSPSNGGRCSIPTACSPVGEPVSCAALTRRVVRGLLCTCWFFAGLTLVCLNGVTPCVVRWAPTCAPCNRNPSCGLTFASYLRWLACVGCLHEMDLGPVVPGGLGVVHLAPLRGFRAGFLPFPSF

SEQ ID NO: 1011483 - protein, 97 aa, Homo sapiens
  misc_feature (76)..(76): Xaa can be any naturally occurring amino acid
RSWSKCPWPEVSGRIPPSPGASSGRPTPLRISYPKARNKFVEATYDRDACTMAATLDRVNNHSGNLAENTRAEDFXHVKLLATPKQRHLTRISSCNR

SEQ ID NO: 1011484 - protein, 123 aa, Homo sapiens
MASSPCGGGGRQRAPRNGFGGQHGMQEVRVSVLTPLKLVGLLCIFLALCLDLWAGAEPGLGSHADHQYYLSFVGVLPDTRIAEDILALQIPRIQQAIWQIATLGFYSLREQLPIILIAFTESV

SEQ ID NO: 1011485 - protein, 63 aa, Homo sapiens
MGHLTHEEHVVDLDYAHVAEQRYPLATRRISFTRRGQYGRGVRNQAVACMAHSGGRANIAQTK

SEQ ID NO: 1011486 - protein, 121 aa, Homo sapiens
MNSQVPTFLELLYGNMGVIDHAWTSPKTDTLASPLGIVASQTSASIECPNGEGPNISVGRVSASQSLDMWPTGSQSSLHVGAKYKGWIGSSWAWAWVLYLVRVDLFLSFDQSSCARILRQK

SEQ ID NO: 1011487 - protein, 168 aa, Homo sapiens
AERTPAAPRAGRRAPLLRRSAPRLLLRRRCLPRPAGSPLQLGGPPSLKSGPARPPPPPDARSQSSRGLLGRLSVPGRDAEGAVGPAARHTPTDRAADRNGAREERWNSTILETPAARLPDIAKEKYPAVQLTADQDLPSLSSKTDDDYSPPSKRPKANELPEAASPGT

SEQ ID NO: 1011488 - protein, 95 aa, Homo sapiens
SGARLRRCWLQTALRYRDPVGMVLGYIFMLGFITRPFLTDSCPFLCSMVCPVYRLDIIYATLGASSPRLPEPHGVISFIPSMLGTCTLAGIVCSG

SEQ ID NO: 1011489 - protein, 160 aa, Homo sapiens
RGRGARGGVRRGGRGLCILGDLGLGRLDLTLGRIGSVSGRDMRTAASGKVRSQTVHQVQGALELTHFGDVIERNMGQGFEEVTGTNRQDGGVHGVSRTFTCEIQRMRHASNQSQSGDGKLEVRRDTWTMITNQGQNEEEEMYRRRHKTTVESTYRVTADR

SEQ ID NO: 1011490 - protein, 150 aa, Homo sapiens
SGDRVLTPVSFHLLLQQWLLEQQIAAGNLQAAPRDKSPGMVLQPKRGGYESHRKRVYVYGKAGRRSLETMLDGPVRQNTIAEQSITKKKHTKDRKMRRQHQKDRKRTPREEKTRTREARRKRKGGRTERQKKKNEKQSSQRNDNTKEDKE

SEQ ID NO: 1011491 - protein, 108 aa, Homo sapiens
MLGAAGPAAAACVPGAERMPLRAGEERGRRSAAVARVGVTGAARAKAASPSLGVVRWGAVREVRSEAGVGTMTLRSVASQGLVREPADTGYSTGSPGTLPMTDWVLVL

SEQ ID NO: 1011492 - protein, 133 aa, Homo sapiens
  misc_feature (31)..(31): Xaa can be any naturally occurring amino acid
MALARIATMGKIPTDTGTNLKRNGSEKTGAXHPLSRLSSFEAQGHTVQGTAKGLLPRRVIPKRQIPFTCELNRDTAKRETQSGVPFVVVWKPLPFEGFAHPWEENAELEKGRFFSTRRMLGSCIMRPENRKFR

SEQ ID NO: 1011493 - protein, 237 aa, Homo sapiens
AAYFAESPWRLGPWYTYSCKTGEAFKASHQLLRYSGAQVRVLSASTPLPSLAKASRSPLNFRPRNSPGRQGPSNGEGDDGVLCALSSNAHLLYYVEHMQELREKYSQRAAAPGECRWVSFADSDIAAPSPGTWVYPHLGHHAPQQTRPLRMQREEGEAEYWGCVECYTVKDELTFLVGERVDIGCTSHVVCTLLWLYKHGFYEPSFRQAFPNTNRWFLTCINQPQFRAVLGEVKLCE

SEQ ID NO: 1011494 - protein, 423 aa, Homo sapiens
  misc_feature (229)..(229): Xaa can be any naturally occurring amino acid
MAGWQDATCDNRECCEWSAATEARSLVGYCDATIPFWDSSRLWAVFHEHYANEKYDMIAQGRRPGHMRFVYTDTVYTSLAPGHDKLRPARSQTDKSSYRSNRSHFAGKLVGPSRGREKAVHRFGGDADSDTNIVARGPRTACLRAQAGYFVLSSRPTGGKKRTCVVPHGEAARHIKRQHTGIFESIRRLYISPSQSETCSFEIDRYTTSPLFAPMSLNPKGENPWIILXVQIENPRDTYKLSSNYDIAVTSINPYGKARLGIRPTDSCVPFLRRPYAFVSVTPCLRSWKFVPPWLFLAPRALWVPVSPRALGVRWVLQPPHGFSLLGFSTARSPPVLTPFGPQPTLRRFATARLAPSPWSLLVTAWDLSRVVHEFRAGRRTLRAPPFAPDYGVGARPVRTAPGLPSSCPSIYPLGAPFVVDHH

SEQ ID NO: 1011495 - protein, 126 aa, Homo sapiens
MSIGSDDRVRYVHGSIVEILVTISNGGTGVDAVKHSVSESDLVGCACARDDDNRSGSAKKLEARNHCVRRCCADHINAHQSQLPYYVGVEPFIWICGTRGMASHRRYPHTSITTLVYTKEVDIVNN

SEQ ID NO: 1011496 - protein, 142 aa, Homo sapiens
RGPHAVNTCYGVQVPSVVLDCHAEAHDAYRNRNGGAVYGFVGAWIRGTIRSHGWLQDRICSDVFIYLEPFWSIISMEITELERDLSRNPPGEDLRAKSQGHQTHHIAYLEGWTFEEVTHQSGSRMTDDADLEDLTRDTHDRQ

SEQ ID NO: 1011497 - protein, 181 aa, Homo sapiens
  misc_feature (127)..(127): Xaa can be any naturally occurring amino acid
AGRRRLTRREGATSSRREAGEPVEDRPSAEPGSRRTSPPTGRTSTGTSFMSDHLIASYLMRYSTKSNPLNHQLGGHIDFFYLWSHRITLKALGEKDEAGNVCVQMAAPKLLTPHCACCSEADLPEMXEGVEGALVAALSSSRECHKVRRGVAISHFSSCRKGKKVPIAQIVMPNPTYILLS

SEQ ID NO: 1011498 - protein, 68 aa, Homo sapiens
RREKSHLYLHPYDQWAELAHFFHMVDVMATGHEEMATFQFWTGFPEGPVLTECTLLPVKPSREFLAYP

SEQ ID NO: 1011499 - protein, 411 aa, Homo sapiens
SGVWRMGPALRHLMPRHGAKCLTEEHARYAVAMRGYRTADLDAQARECQSGPSDPRRIGMLTEIGRIRPLEDAMGPLVGISSGDLLGSYVVRQHRSELSQLNRIGVSLVGRANRFIQRGRVIFDEKRHLIVLTYGRLHLRVMVLESQVCSPRDLPGTSIRNEEKMQHPTESFEPWCMLGEGPFGLGSQDLTEGSGDPPCQRLLLNAGYEKTGKCSVTTGDWHSFRATLAIGLLLMLLYPSGVRTIVRVILVLGLFHLQGHFDGEPPFNLGALERVLSMEPILAGGPVSLWTPFPCFPPLEGNHARFLPCTFPGRWNPKALRLALFAFREGNSSWGVGRGTIENTYMFMPNWEPECLDVPAKSLCHPGSQGALRITGTFDGRKWVPPFTNRGHTEASSVPRVSFLGANIVAR

SEQ ID NO: 1011500 - protein, 180 aa, Homo sapiens
  misc_feature (91)..(91): Xaa can be any naturally occurring amino acid
RRGGGRAGSAVGLGVGRSRHVPVPQRPCGFAQGAAPSYHQGVAYESAMSRLCPSCTLAGPAFLDSSLFPVTAKEHHAGIGTCNVAPLKRPXADGGDKLLTLGWFGRCKALLARKDRLGVEIIAWTMLVNARTIVFLLTICCDIVPDSQRLKSWTDSMVSNPLCHKACANHEPSQWLPASR

SEQ ID NO: 1011501 - protein, 213 aa, Homo sapiens
AGARARTLHWGTARKSSGSMVEMLPGAEMSAASPTVISSLLVCLVDVRAAGILVIGWDTAPLLEASLTTPKPVKTVNTVSINHTICSHEGSAYLTIGPNVKRYMTGRSDTHAYQHIPSTPYIANPHNSLSLTSHTYTKPPTAITCHTTDTAPRPYLQLILLSHITRPQYALHSILLTTHSSTRKLHQLYTQTHTPHLYYDITRHQNTLTNYNT

SEQ ID NO: 1011502 - protein, 279 aa, Homo sapiens
AARSVPDGGEGACVVPRVAGRRHAWRAARRERAQGSFWSVFRSPSRTFIFCLGPQPGRQCRLSMARVYPSTWAVRRWAACAWGPLTWIIAMSSRDSAAPGLVRRVGNCTETDCTIGQGVMLVPRKLLGVDNCAANDEPAPGAFKTRGSMSRPPALAREIGPLLSRPYADCRSRRQRPRWLFPVPLPVGKQVLSERNLRYALDFGGGRDLPFQASLRRLLSRVYQVEPGLTAACGLEEGEHVRGSLARHESALTVPSPSGTPKLVSRTGLTARGDSAGNG

SEQ ID NO: 1011503 - protein, 170 aa, Homo sapiens
RVEENADGVDAVYEMSFLQDPRLSSPWGLCAPSVARSPGGAASLEHSLALRILSCRDLLFQVPRQRPWQYLEDIDLKNTGRRNQGLSDAKRAYAEYDNWTSCELVAVSRGRGWFHSGRRVNAAGLCPPCKSMLDPDWASPSMQLCIPEHIRTDSEGFAMALLVSTDEDLS

SEQ ID NO: 1011504 - protein, 121 aa, Homo sapiens
  misc_feature (76)..(76): Xaa can be any naturally occurring amino acid
MEICDIISETEKGQKDAIRALTKRLNGNLVNYRRGGAGIKQCWRHCSRMNCWPARIAKIHCVPNLRCSLRQVVAWXKRVISHRAMNQGLSHSMCSCELDVALVLTPCAMVLDAFLKAGPDL

SEQ ID NO: 1011505 - protein, 69 aa, Homo sapiens
AGPSAPSARLEGRELRAPIGPTDTLPFPPVRAPAAAAASPPSLESEPDQLRKRRENRKKNNLKIKIKQK

SEQ ID NO: 1011506 - protein, 38 aa, Homo sapiens
MRVFADGPDSIHAPSEIAGAGGLSGSLRLYCVEEGYDA

SEQ ID NO: 1011507 - protein, 69 aa, Homo sapiens
SGVSRCAVSAIGELSSSAKREAEYKFYAVVDSVFGLRPSGAFPRQYSMKPEWSSPTPSPLIPARPCEGP

SEQ ID NO: 1011508 - protein, 166 aa, Homo sapiens
SGRPGGAGAQRVAVRPPPRGCGKLGLSQDRQSPPLTLPFPLCVGPPSHPAPRSESRGGPSCPLRSLLRLHVAPTRDSSAPRESLRAGPPRSQIAGAWKKLSGNYWSCQAQTAAQEELLCESSVNVGKRKPELPADRLPNQENICRMDFLVLFLCYLASVLMGLVLI

SEQ ID NO: 1011509 - protein, 46 aa, Homo sapiens
MLAIVDLTPRQIGLSTSETSRYGPNLIGLCSVVRFVETFTTPNDPS

SEQ ID NO: 1011510 - protein, 161 aa, Homo sapiens
MYLMLVMNVGIGVIRMELLPLIHSNRCNISLFDNVSPVVTLIWWDEHVRLGSLYVIRHLVFPANLVRHQDDIPLTPTSHRHGQGEQVSDATTARRHHSHDAQWPPTGARERATTRPHGRHRPPDSSPTRPTHKLPGPSKAHSYTARARYATIAVHALRTLP

SEQ ID NO: 1011511 - protein, 104 aa, Homo sapiens
MTDLPADPTVRRQCAPDRRNERKSNPGRDADDPAERSKQDTHGPKERYTALRTKLNEAKATWPQYAKTSCEQTEAMEGLRDSLIDTKTLTKGALDVTFRPSRRH

SEQ ID NO: 1011512 - protein, 215 aa, Homo sapiens
  misc_feature (42)..(42): Xaa can be any naturally occurring amino acid
SGSCGRPGWAVTLLLGSEVSYPGLSAATGVPTFPLGYPTCRXRQVIICPPFWLEQSVYPRWHIPSKWERGCLTSTKVTKLAGLASERGRTTHCAWQDYARSSVDVLMRWVSAISRIGGWLHRYSSELSSTGKGVSEVALPRAGSIGMSSSSVLQHADAFSKSMIETDGPIASKGSNYRRWLFQWKRQDCRIVEVNSPGRGRNLTFTRLKVQGSSK

SEQ ID NO: 1011513 - protein, 408 aa, Homo sapiens
RRCGLALPVWRLEEPGGTQTGQGHGRMGGRREAQWLLAVAAGHLATIPWCPGAQAAADGRWPVVPCRLKCRLGVGSRCQALVVGRWECKASKSSRMLGVSSLSQRNQGCLVLDATHWPMIRRTPWMSQVLLASRLVGPQKPAKDSRGARCHGVVERLGPGKATQGCLLGTETRHTLRDGAWAEGCYLQLLPQVNRADGAKVGILDPGWFGPPARVGNHNCFVSPGELGRLPQNSGVDGPDKRGTERGVMKRSGYFKFRLRRDSIGNQVAEDPQERKNVLPKLNPVRRTKNLGSDTPIISRTRVSCDLCQTRSENTPQVGSVHRKVTWNGQSHPLETQGAQRFQGGDINPSNTRKRSAQATTALAQSRHAGKDKAQASTTIRANAYTPTTNGGGNPQTERHPHRTNPKR

SEQ ID NO: 1011514 - protein, 140 aa, Homo sapiens
MQASVLLETKISGCRKFRVSTSDGLSPNQCMERIGELTGTLKAMYRSIMAMGPYARESSKAEVQRLRASLELGRGHTFRRTTGAVKIGKFFAIPYWAQGIIEAIIPVRKTRRGAVSAGNTLCVFHTCEPHNKATRGFVNL

SEQ ID NO: 1011515 - protein, 175 aa, Homo sapiens
RVCWPLCLQMGGNGSGQPNTPSLPVLRAGLRYKESAIARTGMRARKRSSLEMREADTAQSRHQRIPTWTLGRDGEQRHWHETDREARAGGRGRHTDTEKHMQLRPDGTNERGTLDERGKCGRHQPQGDIYEPWSDTNEGIWNTTPKSIWESYQETGKRNIIRDDTQSHHDIRNEQ

SEQ ID NO: 1011516 - protein, 119 aa, Homo sapiens
MNSSKDIARGHLGGLDRPWDSETIVLNDPGGEFSQRGTPRSFLRLEHINSSARQASRSRTEDKNQQPKGIKDVMGRWVRGPQEKWPPYSIGLGSAFLARGCEPQVGNRASQVDKGRKHP

SEQ ID NO: 1011517 - protein, 170 aa, Homo sapiens
  misc_feature (80)..(80): Xaa can be any naturally occurring amino acid
MKRRMFWKESYCGKSGLAKQRSVPHEARACDCIVGRGVLCKSLLGSVRGKMSVYSNLACVKLNAMQCACICALRGCIVHXVSNHKKGQHCEWVGLRGVCCVSDTILEWNGCHGTSELTTAVTLCEAASRRRSGTLGPDAIGVGRYYGEVVGLAGEVVAMFDRPSVYLRIL

SEQ ID NO: 1011518 - protein, 196 aa, Homo sapiens
RAARAAAMLRPRLAGVPSGRLLAWELLGASCAADLLCVWLVRLAGPCGWEVWAAAGPQFLRQCAACCPASGDMTMDALLARFETSEYQMTLEKNIVKAGVDTCGPITSTTRFIFENTIGSGFTGRKEEGCLLSTTMRQVSPALKPGSPTKDFEASLKGTQVNQAGLSEDRDMGYRCGPESSRRGKLVTSKNLLGDP

SEQ ID NO: 1011519 - protein, 182 aa, Homo sapiens
  misc_feature (130)..(130): Xaa can be any naturally occurring amino acid
MSFLLCSEEFTTDLSVLIKHGIQKTTNKLKALTFSLDLPLVCLDSLDPVDLLALSRWTAHISDGCSLDYLSPVVVHETFGLRCLLTLLWTGLELSETVLSDVGVSAETPSIVEPSLLLVTPDVSYVMWYXQLFPTTNVTRTRVTGMYFYEIMSRLYRQDFHFTLREHSNCSHQESISGHSGD

SEQ ID NO: 1011520 - protein, 177 aa, Homo sapiens
SGVVSVRPMCPPGEGPGSGACRGHAAAGAWCKWGHAGAARCGAASEPEPAPGAGGLWGARCGGPGLARGGGRAECDAARCGSRQNGRAVGFIIAGHSHLHVGLRETITRSIQTRFGIHNQEIPREEHRGKHLHRKSGPKDPKDHTNIEGHHIRAAGAPPQRGSQARRKIQHGSRMTQ

SEQ ID NO: 1011521 - protein, 217 aa, Homo sapiens
MTPPPILTSPEAYAFSCFGTGNWEGLPLRPSYRGISAALGPARFYTRRPRTDVSYNAAGGPQTNGYEELRHYPAFWGPPPFSLVPRGPLRVFSHLYTPLLLVPPCHNRRQAPAGERDLKTRRPLIGSGVPTVTVNFPFYAVFETTLLRPLETHSAPYGLAARTLDTAVRPGHRALALAYGLSLTSRFLAWHPVSNLVCLYVERRIRAPALALRLSLF

SEQ ID NO: 1011522 - protein, 108 aa, Homo sapiens
MQKDRLVAEFHRTSLLTRLPRRSRGRAAELSRKEFVARVRASSRVSGSFPEDSSYRKEVVVSWESQTQAQVPVQDEEDHTRMTSVLFMRENLVSGNLKRDIMDINETI

SEQ ID NO: 1011523 - protein, 159 aa, Homo sapiens
AEGPASAGRLQPWSGELNLLLYLALFFFLLFSYFSSCLFVVITQLKTLRWPDDVPRALQPGLPLGCTASLGASPDEQGGVIPQCWALGGRAPSCAGAGLGLRLDSPCSRAPSFQSRAAALDWCSGDHSCNDSLASCRKEWLEQREYGQLSANCSTTWYP

SEQ ID NO: 1011524 - protein, 173 aa, Homo sapiens
  misc_feature (88)..(88): Xaa can be any naturally occurring amino acid
MVFVAVPYLCCYKLRTCVADSCCPRALDIRRLAVAVHRHSEGEGSLEDAVGRTRDAQALCQALYCCRCARKHLAWHLTSPVGVDVVVXVARFRCASWSTWARYGQEFSRMGCRCGPSRRGIYHRCTIPDAPNAHARCATVFLDGGARGAPFAGLAALDSPCKRSFPPMQSVKR

SEQ ID NO: 1011525 - protein, 330 aa, Homo sapiens
AGWSLPQPTHCDAAGLNCSSCALALMTGTSCGPLPFCLHCPLSPTLDCLQQRFTLDDPALSRWPRCRAHHIRTGVTGQGPMRQLRDDVPRTLTWPCPTDCEHSCCAARFPGDCPGARRTANLALPQRIAPGSTASGSTRGPFTMALQPHVPLWHQHPTRFAVISEQVGKDPLLIPMRPTYHSLNTRTKALASKLGSAPRAQKLASPLQAGGPTSQKGMPILRGFPWFPSTQRVPKVPHAVIWRQHWRNLTAHTPLYLPPPILGSPSRTTRFLGPLWLLTQRALYIKGLDHNHPKRTHTTAQLPSTGHNPQACSHEYHNSPEQSSFHGYLL

SEQ ID NO: 1011526 - protein, 302 aa, Homo sapiens
RGGGRGYHERRKRRFTVRGLRGGGTTSFTSRPEVCGTERSGPEPGILSSEALSSLSTSEHLALTVPSTPFSSSRVEETPGLYVRVSGGSMLGKGMDWVVESRTAWLHVADADALYTYQRSEGIINNFRMTPEMVSRKVFEGTMRGTHFAPLNPVCPQILGGYGSLLREGAPKARRNRSPQALPPEEHKKRDMPRSAHKNRTNRKESVQRVAMSTTSTSTLKTGKGHFLRCGQHVDGHFVQQLILEVQAGQPSLALLRDSRPSAAVCNLGASSYQEWLYVPARAITRRKGDTWHAVLALTLHV

SEQ ID NO: 1011527 - protein, 77 aa, Homo sapiens
SGRCGHRAAGSQHIPLSHLSPVPFAFLYLSWPTPLRGLANAEPADLPPRTTVSFLYGSRSSKTFNTKEEHSRGFSPV

SEQ ID NO: 1011528 - protein, 109 aa, Homo sapiens
RGVAVARVVAAALPPPPPPPPQKQEPKSSACLPPLPGVFWSGALQPWRISSVISDDSGSESSGGCPPCGPGRWSAAPGPLSANLRRCLPPPEPWTFIDFNLGRDQDQGT

SEQ ID NO: 1011529 - protein, 134 aa, Homo sapiens
MGDMTNQIKSVIQHKLDMRLPRRKTQTTGLQKDTLNYKREIIKRKGKKLNKNHKTKEHTREHANTTENTSESTQSNKRQPRLDTRTSQEDAKKPTRGPQSVHSTHNEGRRRHKTATKSKKGKKKRSAKEAHKKR

SEQ ID NO: 1011530 - protein, 143 aa, Homo sapiens
MSIMDHSPSTGVVTVIVILIAIAGLEGLDPGAAGGYLRLKRIRQSEDEESIVADGETKEPFLLVQFLAKGPVRGEKRPQLMTPNRPGSPRAESSDASVLVLCCSRPRGAEEEAKPYWMRVLSGEDGLTLAGDGLCGLPIIALH

SEQ ID NO: 1011531 - protein, 34 aa, Homo sapiens
SGVRGLLLTAPPVTRTPPLSRLPVPVPGCEGVPC

SEQ ID NO: 1011532 - protein, 112 aa, Homo sapiens
MVLTPYTHLIHNVISNHFQTKHTCYQMSHPKIINFPLTTAPVTNNTILLPPNPNLLCVSENPLATTTSSLQYNPHSIMMTTRKAESHIRPTATALGVSCNPILGGPKGGENS

SEQ ID NO: 1011533 - protein, 121 aa, Homo sapiens
MLPAALRSAGLASGPGKCGAVVRCSTVCGEENGRRGENCTGSRRSSHRPAVGLFTSWHSNGNRARSINLEAWRSACMSAAGLKITGSTETKRRLLLISIDWVYCQAEARGEEGTASGSLPV

SEQ ID NO: 1011534 - protein, 153 aa, Homo sapiens
SGVLMFAVMCLTARGSRLCCRSEDMMAVDVPSFTPWTSTLLKEPEKPIDPPDRHAHCLLAGSLPTILAVNITAMEDVLPSDICTCSILTLQESSSLRLASLRSVLDTWPWHLVKEDCLPPVMLTNKIVATFTFHSHAESDSTIRTSYTQYHVP

SEQ ID NO: 1011535 - protein, 121 aa, Homo sapiens
  misc_feature (80)..(80): Xaa can be any naturally occurring amino acid
RVVRPTERGLQLDLGLPAGLRGCLSSAPGWRRERRRGLACTAFSSAERKDPLYTHVTKEHAVLVFTWLHRSQLRRSLLAXEHESAPQRSSIAHTTRHTTYDTEEAIRTEDSMECAFSMTDV

SEQ ID NO: 1011536 - protein, 239 aa, Homo sapiens
MAPSPRGGRCRRLSERVRESGYWLSREENSRMLNFQVFAELCKLNPYSADRGAGPPWTSSCHKLTDVILEADQNDSQIAGAGCTRFQDVHRCPALSRSVRDYARRAIGTLLDRSKSRMRLIRKIEAYMEDEQDLSRHPSWSSRAVCGDDNHAAVGTKERLELVPDSFAKPEVGHGTKSHEMAIVFNQEGLKAIESACVGPEFHRTQRRPVPSVPGWRIYAVVQRPLLKNFSAGTLDRGF

SEQ ID NO: 1011537 - protein, 37 aa, Homo sapiens
SGRVLPPQTQERPPPAQRVKEGRYGQRIRLATSGRAL

SEQ ID NO: 1011538 - protein, 104 aa, Homo sapiens
MGLRQGLVWGHFNSAKTKFFCQLLLLFRSRKVTLSKHTWVRNGGDGGLELLNGWITDCLIDEFWHNRITRMDRRTGQRESMVFEGAKWRGIGTFGERWGMWELV

SEQ ID NO: 1011539 - protein, 112 aa, Homo sapiens
RSPQSASRQPVTVASVRGGRERRGETQSRYALRDNKSNATDYTSNAQMPDKAVSNHSSSSHNYAIHYTHEGISMNAIQGDNIETQSTVKATKDNQLYYHAPPNDSIEELSKH

SEQ ID NO: 1011540 - protein, 308 aa, Homo sapiens
MYPRLFLHRISMKSRTRLRDASTGGTNVPVMGTTVVYSGRWAQNGPIAGNDSAMILEDLSEDPWMRLMLSVLTPKRVNGTVAVRPWWRDGRMDESLCCPSREATNYAHTELCVTGHSVEWKPGRRKASQIGSRGNLIGPRHPLETRRYVAWIAHLRKGRGTGNNGNALSLRPHPFERSNTTSVHMVFYPISTHFLLLPMGYVPHWCRHRRRGHSRCSTYALFPPHISPRASSVGRVWNPDILPTVRNKFTVPGSHAGHKYGISSDHRLQVTRTWAWPTFRSPQREIGAARIKGMGQHTGVFPSVLYLG

SEQ ID NO: 1011541 - protein, 293 aa, Homo sapiens
SGVPVAQLQMEEDATVQTCIRCGTRDTLVALRPSRSGVLRYSPQDACVHPPGSLHQGRLRTSIGMDHKQTHRSQESLCMLRQTTLAKQKNDTVSIAGLGGRSVENRAHSHLTSWCSSGPNPFFQPPAVPVTPSLAMLHEMGDRRRLLATGVSCRMAVSIEALRARQDWVVDWLHPTRGVPWSRKYPSARLSTGPVVYCTPSLNSTRRAPGNRCCTHELSLREGLTPPENIDLALGLKVARHPRPRCLCPKTPVARMLPIKVYVIPMASLTECNRRRADEELGLRPGGAGANPR

SEQ ID NO: 1011542 - protein, 91 aa, Homo sapiens
  misc_feature (85)..(85): Xaa can be any naturally occurring amino acid
AGGRTVNGCRLSSSPLCTQAQRAHFSDLAAYPLNLLTRLHDGNSYVVLRKCEYCSVPRHGRLSAYRETCGIPESPACLERRLEVXVDKNTW

SEQ ID NO: 1011543 - protein, 142 aa, Homo sapiens
SGVRRGRGGSMFQAPELEPGPRLPAWHRGGGARGLAPAAPCSRRPGRTRPEALRVHRVPPLPEVAPQRSGVHGPAASLRGRRIALSSSRSRVLDRWMDAQHQWTSRTVWPLLEDAGWTIAEGREESFLACREAEPWFEPLLT

SEQ ID NO: 1011544 - protein, 135 aa, Homo sapiens
RWAEKHGGLVRKKPPPAPEGKGEPGPNDVRGGGSRTSSAREDPLGRPLAGPNVSATKGQGGTGGKAWEADDALRPLQLVRAPKARPSATGRRAAASQALAEELPEPRARGAGTSWKPPAKVNPWTKNALPPVLTT

SEQ ID NO: 1011545 - protein, 308 aa, Homo sapiens
SGLSRPGGGDCAPTSARAATARVRPPAIMVHALAHLSPGFTDRTTRLFQELGKACIVVCWSAECVQAEPTIDRTYADRIDHHIPRNLSAQVITKKSRTVEAQDTCRTSRSSPIAVRARSSDHVFSELTGVYTTLRAFDPCSPGRRTLLCHASLSAPRDVTYQCEARMPSPPVIRSASVARSVTPAVRAQTIDQSDRDRRRCRCLMRPACMSPATMSRSCHGRRRLCCMFEAYAESQFPGDEAAIARDSVMRAHRLGVACSSLTVSDGNQIPLVDKSLCDYPGSLRESIRAIYLLRGAYSFAFCGTDGS

SEQ ID NO: 1011546 - protein, 104 aa, Homo sapiens
SGRGWGASCAAPARRAERAPRCRRRVGGAGSRRGRPSARRRRDLGRPAHLSESRLSGTAKWGATADVPLRRRSPRRRLGFDPGALASTLLPRRGIVTSSPTTRW

SEQ ID NO: 1011547 - protein, 323 aa, Homo sapiens
ERVHDAAACGEKGRQRPINAIRAAAAKPSPRPAVLFLRRNFRPPLIGRCGAEGTRAESRRRTRPARNRLRLVASFRPFKLALPGAAPCSILGPGSCEARRGIGRHRNHRRGTWRALRVSLLGLLTTDPPGEWETGALWKRAPRQGGKMHPQSPTIIRGDGNVSETTGRNAGMRHPPKREEHHAPEKPRDPLWQWTEPTGETTPRRTERRQGAQVPGAHMWGGHATSGESTRPLRRQTMNNITKKGRATLVVVIHGDLVVTQVLRVPGHKTTTQSHRSTSVEKQRKRHPVIDQSTRPYAGESTPAPVLQRLGQPRQEKRATKRR

SEQ ID NO: 1011548 - protein, 72 aa, Homo sapiens
  misc_feature (71)..(71): Xaa can be any naturally occurring amino acid
RIRKLVCVQRTELPRDRRYENCEGGRKLSPCLKACARYEDSEVLDALVACVTTSVAAGWSVGEVPTIVYEXR

SEQ ID NO: 1011549 - protein, 276 aa, Homo sapiens
SGGWEVSRAVGGVYAAQLQSPSRLPVLGGGERKEGSRGVGQASSRAEVGLGSQRERREPAGQRLAAAAGAADSRNRMQVFHTKGPRAKTRLTTGPNLGPTVPRKQSCCDQWASIFGKPSQEPDWEDGDAHPDGGPGCRSERPPSYTELNTGGRSSPTIPIHWVQCGDSGSITNIELYSVGCGWPGRRFDPSGDTYFQNTQGLIYVVTVNDRERVNEAGCTADENTGGGRAPGLLYSLSLQTKQDLPNAMNAGEITDKAVPAFHSSPYLVHSGPLCH

SEQ ID NO: 1011550 - protein, 141 aa, Homo sapiens
RICTFTYCHFLPYEELDGMCSSRNIQHNDTDASDEKRRERGGLREHESAQWTRNGRDPESMEMEKHKMRAQKEGEEPNLRRQVNDEQMKYERTQTSQSTAMNNHQSKRRTHASAPDHVQQTTDKQACSVSNNQKDQLDTGT

SEQ ID NO: 1011551 - protein, 97 aa, Homo sapiens
RVMSCRALPGSRPAPMGLCPRRSDPSAPHGAHMSRQAAPRLLACCSGPSAPASWGLVAYLFGSCVRPYVLFMDLGLDAASSLEPAGTGLSLAIDTPS

SEQ ID NO: 1011552 - protein, 106 aa, Homo sapiens
MGIIVICQDEFGIGDVAGEFAIMMGFRTKSGPEGIRSLSVRRWERLNHAQEPNGTNVNVTLRESRHRMYVDIRPAAKGTQEGLSGRHGRNVPADCTDRDHRGKKMT

SEQ ID NO: 1011553 - protein, 270 aa, Homo sapiens
SGNGGALEDSERLGDKALRKDEGEGLAESVIPQETIFVWQPDLSRNWLDGIPEVTASRMIYCERNKQEKHSYYMSNRKLHLLSFDTIYYFFHEFHTKEYNMPGHFQQRRSMVCLLVHDGSMKIWRGFQWRTQESIARTCVDVNRCRFFPSGLVVLMWWEWSAQLTDMVRLKDASCVVTFIYRSTKEVSVDTAIVDRGRNVVSASRDGDKNEFGIVGAQHCLGVLADLWFSYQMDLAVGAVDNSINLGPLTDAMERQVATEAKTAAWPGKY

SEQ ID NO: 1011554 - protein, 107 aa, Homo sapiens
MGIPAASGRVRATLFAAVDRPGVQTGGNRRVFSPDAVVLAWNSFPRRLRLGCGSPRAWDQWGVISRRKGKFQRARCGSILGREVPRQVRCPWATGQHELGILAHGGC

SEQ ID NO: 1011555 - protein, 119 aa, Homo sapiens
  misc_feature (100)..(100): Xaa can be any naturally occurring amino acid
MSPDWSSRRRGDRRMRQDVLARRPVWLAEHRRASGHATPTLASRWCTRWPSGSAMRRSWWLVIVPSGCANDQAEFTRRTIRGGSPVSSSPVSAWAVDAAXSPLWCFHHLATGLDAHERL

SEQ ID NO: 1011556 - protein, 90 aa, Homo sapiens
AGVRPRYRQIYCMPKCRGGMSDQTEGKRGKWSKGKHHSCTLRYGTRTDLSDDVSTSTIPTKLSCRYRRPAELCVVNIAVVQDPKDDVLCK

SEQ ID NO: 1011557 - protein, 103 aa, Homo sapiens
MRGKRKSGWTSFGEQLGAGMVFQPLLRPTTRALVSGEIEPETLCPGSSSHGTGVQGRAQAESGDSGKVYPLSEASTRGVKNPKSLAPALKLALSFRNKRHCRY

SEQ ID NO: 1011558 - protein, 103 aa, Homo sapiens
MTRASCKAHKGNFVMQTQVSTAELIKQKKEYQSLKTVFAKIRQAEKIREQKNEQGMNNNLKELWNYVKDQTYDCLDYLKETRRMEPRWENTLQDIIQEELPPT

SEQ ID NO: 1011559 - protein, 285 aa, Homo sapiens
RSRDCSCRAGAELPLLRARKPVSAPHRFDPVCLVGCAQVQSHATLWVKLEAKMEPLQQQQQQQQPATNRSKHNLGSSARWMPREKQGPADERSPGLGMPKSWVTQPNSTFPPQLGKTFWQHSLRSLKPEYQPNAAVCQVLKRGNYELRCLSEEDGREGSMRMGHDEVAEVGVRKKARGMVSQLFSLLQHAVGLAPRNPQKWQPQLLQYHNFHKQTQGATPKQQIGTNKSHKQNMTRITHKDIAYHNRGLSHVALVIPTQGRETGPESIGNSLDMAGQAISCTDNR

SEQ ID NO: 1011560 - protein, 208 aa, Homo sapiens
MIPPPVGALCYIRHLEHYWTQGHNFLVSSADIWALYAGRYRCVKSHDAPLRTGAYTKPNIEYAGWMSVIAAGRHPCFAIIENRRALHYSPSPRFGLDSNKWIYTYRRFQTVWGATAQFQKRARSHIGPIGALVRRLDTSVYGLTIICKGSAKTSVGSLRESTIFSKRRKSPGNKGMDLGRQTAREVLVRAPTPKLPPFPQRSEDTYRG

SEQ ID NO: 1011561 - protein, 229 aa, Homo sapiens
SGLRQKAAYRGVPASRGLGRTPPSRSVEVMSRKGVGPTFRVGRFLKGEFRQEVTSRRLPFYIAFSLEPGSRCMGTHCRAGMTGEAATDRGTEGGKTPWKLAIVHNRGSTKGSRGSVTTIDWLPYNSTGRRTRGRYVPRGSEEPQRDGVVSGRPWAKPVRRPHRKKGLVGAHPGGGMNPASTRTYERTECGNGLIGTWRLPPSRFERGPICVDNCVFLCPCVSKRGKALG

SEQ ID NO: 1011562 - protein, 128 aa, Homo sapiens
MASEDETDSGAGSRNSFAKATRDSAPQATSVLLERDLSSVQMVKVKFGQSEAQADLQITMSRLNRNQEGPIGYSHLSASVSIVMNLCQQWKSNTWRNSKSHTDRQEKIDGIFTHWTLLCLDLEEPSGL

SEQ ID NO: 1011563 - protein, 199 aa, Homo sapiens
MGVTSLPCCCQERCESSGVDQPGGSIGASQAWLHMREGDASERSSPSSPALSSWSRCCWLVICLLTLSPDPSLCHPGFFCYDSTYAKPYPGLRLPAECLLLLSTHWSLPGHPHDPAGRAGACPFSLHHLQPSQLIGESTIVSGACCRFSPPVREAVKLPGGLLPSGLFTTTIFGNAGQVVTGIPAHFLVRLRPITAWCF

SEQ ID NO: 1011564 - protein, 103 aa, Homo sapiens
AECNLEARCLSEYLRTEWNFPDLLELDQWMPVWFRIKSAHAYESCWYRSPAIHYCRDDPHVEKLTKAFFLELELEVTPNYLSVKAAGDEEKFLKMLHIKTNFL

SEQ ID NO: 1011565 - protein, 202 aa, Homo sapiens
SGEAALLRWPSGSCSPLAPRLSGPPAGHLAATAAFLALARDTVRERRAAALRAPSLGAGHRGPFLGDWAPAPASACAVPGPSPARGGALRPVSPPVRSGPARLCRRNRALGGRHMRALRPEAVGRCQLGPATGERGLKRAAGTHCSSLKPGPEARHSRVLASVAAGARRDESRISLRNRAKEDGGQALTAGDKGENEAPGGR

SEQ ID NO: 1011566 - protein, 119 aa, Homo sapiens
MTGRVGVSLTPVEQAWSFVIGLAGSEELVVYVNARGRAPYVVSQIPVWGFKIPCDTHITRRGFWKRRGYRATGLGVGGIQGYHFGNKQLTLWYKSDISFKEYKAGPNDVNVVIQNALFR

SEQ ID NO: 1011567 - protein, 341 aa, Homo sapiens
RRCTVRGCWFPDHGFALLALVGLVGVASARHASRRGAPRAVLPINCSSQQQEKNHTDLLVVGSDPAGVRTTGPTTVLKQPQAARWDESKQKRGLMPVCAWCSSGVMEPESALTVNELSSDTLYPGQAPILGTRVSSGGKRGGGQGRDWCRRQREAYQAVVLSLRGQRTSGPWKFLVTELPGVCVRRAYRGLGYNGLPENQELEPETMSCDDRRDSVGQGNVGLERGRILLTPTEHRERTDMRRQALGVTEAGVRVKTRVAQLGRMWNPCDVELQHDGASGKNDPGTDSPDQFGNPVGVPGGITQDRRLEEVPTTDDKRGQKGIERATEKHRTGKTYHNRNT

SEQ ID NO: 1011568 - protein, 70 aa, Homo sapiens
MRDVEDQASTLSGLRPFIALKHYALASPALLPTHLSPWLPGPKAERVFSICKHFSRTIKTVWHYGKKEKK

SEQ ID NO: 1011569 - protein, 90 aa, Homo sapiens
RTLIDSRSAERTADTTVQTHRRRLVDYHQVRLEPQMTGLGPGLLIAYMSLEEHDPSSPVYDNKRTCDLGKAAKDVFNKGYGISTSGHAYT

SEQ ID NO: 1011570 - protein, 68 aa, Homo sapiens
RLFLCASSVTRGTGLPGGYHEPDLEPTRGSCPGAEEAAVGAAVHSRHQKFGRSQGGVVAYPCDGVFRN

SEQ ID NO: 1011571 - protein, 288 aa, Homo sapiens
SFLAPRSSYPSQPAPEPSTFRSMDVKAPSPQRPSEILCVFLRFLRPYSILGGSPLPLHLPVPVPLSRNMPPFLHQGPSEGAACLKPGDAAPSSAPPPTAGSRGMCCACRLKYGDSSECSPDERPRFPACPRPQGIERRTEQNQKTPDTESRRYTYHIIKTRKGRPLTSRPNQRSVHTDVRLHDDNPRIPTSYIRTNIKQRERGDSQTQRGNLPREETYRKRQKTLGSNPIPERTNKKNVTPESQQTKEPAKHTNAQKHRPPQQHSQHRQKRTNSKQGTNSQREHYTIQ

SEQ ID NO: 1011572 - protein, 197 aa, Homo sapiens
  misc_feature (169)..(169): Xaa can be any naturally occurring amino acid
RIEMGGWDRSQPLRGRLILNRPRPVCYTQADGIALKVDERGEAIMDGKTSRITHISGRSRTGLDMLAVVVYSREADGIAQQTRILEALCHSGGRTTIVVQIARGKTSVARGIARGLCRVGLQVSQRRINLWVIPKPCPSYTDEEDWGSLDGNAWNSMNGELALHSSDQXGSGEQLGVSLDWLARKHKISEDRVERQC

SEQ ID NO: 1011573 - protein, 153 aa, Homo sapiens
KYSVPVCLGSTMHCPLFVPSLSAVSSYHVPAATLLWAHVAPARGNGRCLIRVLTAGASKRQGGELGKSWASSVYPLGPLPPATAVHFPGSPGCVTVTGLTAGSTARSKQHLEVVFAVLPAFKLQRGRRERTSKPPIIPMSSQALVGSGPDSRG

SEQ ID NO: 1011574 - protein, 132 aa, Homo sapiens
AGFLGKMAAVSAVCSTSLEATLSDNVSVDGMPLRSVADFASRRRIQASKGPEKLRDDHRSGVAHIQDGIVSWQADTTQLTAQDGSVARTRTDHENTLSYLLYILLFGGAGHRLLSDSTMDETRKLHFLSKTW

SEQ ID NO: 1011575 - protein, 147 aa, Homo sapiens
  misc_feature (46)..(46): Xaa can be any naturally occurring amino acid
MAETERTAPYHDAHSVYKIYVAMAVLATTKCALEAAFPTKRRWGGXEAGYNTHINDNFRRQGTAQYRPVRGLKIARIKNTATVGDPQQRSNLARSNDKTQPPDKQAHLVFGGDTQGVDIVSHLETLGEHIPLEGLFLRSELLRPLFA

SEQ ID NO: 1011576 - protein, 148 aa, Homo sapiens
SGGKSEWRSRRPRQSRPPPNPTQRLGGRSKPRTPTGPQGGHLGPGVPQPSVSRPTPIIRHSDPRHLITSTWPKGSSQVRTQKRTGLCRTHGMGGKAHTTSCMDGHSRVPATVHKKRPPITGIGQAEANRGAAGNVQPARARYQPKCTI

SEQ ID NO: 1011577 - protein, 157 aa, Homo sapiens
MRQKGATAPETSRQAPSEHTYYKSTTGGERRITQRDGVTRGGRQTRDEDGRAKHTGPREEGKIENPIWKILQEQVHERRQETRTETTPETHAANENKEGEKTERNDEEYMHHRERDEERKTRKKQAKTEPTTRQTHERRKKTSKNREDTTQREKEGT

SEQ ID NO: 1011578 - protein, 204 aa, Homo sapiens
SGWRWLAAAVRGCNGRPPPCVTMCGRRGPEAMRGTMQVRSCPLSWREFRRGGASPPRSPAPTNLPTGADATLDGLPRRRCRTRGVTREGALAITAQNSSGPNLVIPRPPVAIVGLPWARAVVVGDFVGPPRRTKQASSIFETPGQGKSSSSGSGPFLPPDWEEVTLGAHGASKWGHLGPLLVPHNPMGMLAANAQKSSVARRLA

SEQ ID NO: 1011579 - protein, 317 aa, Homo sapiens
MVPATDTKAPPTLQAETATKPQATSAPCPAPKQSFRVWSTEHLTFQPCDPAASSAPPMFKPIFTAPPKSEKEGPNTDWPFRSQTTAPLQLLPPHEQPGNTDPTFQDFFSSMGPPASVALAMIPSSSRQHSPAHLVPDRTAPVFTGLAKSHLMLLAPITICQSNPTRTLHSEAMRSGLGIKRDVKQDSRCGDTKEPRKQADRQTVNEDMIHHHGAPQGPHGVAKRFNTTGPMGVPNNPKDRGKPLPWAVGQTKQPTWTPTHLRPTVTPLHPVRRAQAGSHKQGTQPAGSVKRDKRQETQNRRTPTQRTQKQIRPNIER

SEQ ID NO: 1011580 - protein, 236 aa, Homo sapiens
SGRAGLGPQAGRGVRGAARPGRHRAFRRRGGVHRRRLGGAGPHSSSRSPSERSSAVASRGSPRAAARPRKPPSAAGEARCPGAGAGGRQRRGRASEPTPRGTERAARKRRGPRTGTSDERGGQRRGTPGPKPGAQAECSGGPLPLAGHAVPVWEKSSKSPGRTLVNESEGEQWVVWKSKTFSDSTSGKRVTEGKFPKDLVGHGPKFRYGHNFDNAASDRSRTLKLAQELYTSGLLS

SEQ ID NO: 1011581 - protein, 115 aa, Homo sapiens
MVDTEGGGGCPKKGTLAVKADGVGGGAHVIAVTDAYGLPDHIPPRRRQEDRVSDQRSYETNFLRRKEVTLCCTSHDKLNGWSQGPEWRNDRCVRQVTTESMSREHEPCGRLRREE

SEQ ID NO: 1011582 - protein, 139 aa, Homo sapiens
MANGFIDPGERGVCEKKAGRLGRKDGQMLSWRTMNHFMPWLLARSHGRTVKTGSWNRYENILEAGYRKNFQDGPRNGSTRKIASVREVGLSLKVGPFRGANDIQDAYRTLGGGQRNREHFHTHNCVPTCVIGLARWFSP

SEQ ID NO: 1011583 - protein, 121 aa, Homo sapiens
RAGRGLSASARSASGPGPPATSARGGRGAPAWARSLPRGGRARAGVSRAAALLAGILSLISCFFSFLGEGRVGLDEFVSGSPDEATLGVPALFRGSLGARLGKGVVFAWVGDFPRSAGDHD

SEQ ID NO: 1011584 - protein, 250 aa, Homo sapiens
RGRAAGAQPCLPLCSLSAPGQFRDPTEAGGRSEAVTGVGAREGVGGQAAEGGTLKRAGRAQQSRLEKRGQQASGPIKGKGQDSPPLPRAYPSVRTQSVCFGMYELWIEEGEEERMMVLGSLGFVILFPVCLSVHEHMSSRRHKDRLAGKTPKPSSQHSKLQKHAALAVSILKSKLALQKQLTKTLAARFLASPSPTEHWHLCSARGPCASGLALQQPLPLPGPILGPALFRPQRSCPPAQDLSSLPLLAS

SEQ ID NO: 1011585 - protein, 275 aa, Homo sapiens
MAYSTAQRARRAPCQEVDGVATNRYSIGGLSPFLEYAFRVRAGTASGRGPPSEAVRARTGEQAPSSPPRRVQARMLSASTMLVQMGASRGAQRLVRGYRVYYTPDSRRPPNAVAQAQATDAGAPQRPWGSVNPDYAWQWVHPCPTCSGMMGAEELTKEDEMPVGRNVLELSNVVRSANYTCVAISSLGMIEATAQVTVKALPKPPDDSVVTETTATSVPSPGDSGELGSLVTYYVHYTIGVRVLAFNRRGRWASQTHTSGQTQRECWPAGDSGKV

SEQ ID NO: 1011586 - protein, 76 aa, Homo sapiens
MEDRKGPRKSNGDHITQENIEVHEGKTNKEEGNRDEKLPMGQMEPNYEPCPRHPWEQAKDTRRGWKYTRNTLRKEN

SEQ ID NO: 1011587 - protein, 135 aa, Homo sapiens
MITLGKVGAHKVGYTRDQHTPEFIIHQSSRRRAPTTRAMGGLWRTVQPKYGDEDGPHGARVWVNAGHPYPVRDGHSLSTRARKDQRHRCTYYWGRGTLPMSWKMATGRRTTTQVSIVEIDGAPLLPFIQGRRKKA

SEQ ID NO: 1011588 - protein, 115 aa, Homo sapiens
MLSAPRGNHVDNAHLGPHETVSVLKIHVVLIHHFSHGKSGGTAKPDYFNYLEDMRIRIFRCHGAEDSLILMCGEPGIPSWLSLEHQTHVYLSNSKNMGKVVQFIACISITWSRTC

SEQ ID NO: 1011589 - protein, 132 aa, Homo sapiens
AEVPAKVTGSNRRAKMAAEEGVASAASCLCGRLCGHLRPCGRGSTRLLVGCQSPPRRMGQLWLPGAGLRTTWPGGSWGKPLTVLGSGHALPINGCFFFFDALCAMPLGNGGESSLRCPWDVGPPYHGTTIYH

SEQ ID NO: 1011590 - protein, 148 aa, Homo sapiens
MLVPVIHCCSVTCMSAPWLSAPRSLCGKGTAAFSPSASFIGTETRNSRNPYRERTSLISDIERDSETRVDGQPRGAAIAWPEKKTRSAVPASTVLLYIYAASCSSGSQHLADSISLGTARISKDRVASKTSESDHTEPANTNGHEEPG

SEQ ID NO: 1011591 - protein, 112 aa, Homo sapiens
RGCPGKPTAAAGLRDAASSAPRVMASRGAAESPKCEGIKLSARCQTIVSPDLPGLRCGMVRVLRSMCLPQSLQQHSIRCGQEPPCDRAENIYVKTWPCEASRFFHLSIDLLR

SEQ ID NO: 1011592 - protein, 109 aa, Homo sapiens
RAVLDFLLLQDPASTQSIRARRNSGAPYGLGAYAASEQLGSSSSYPVDGPSGVKLTAARAECLGPESLSQEPCMYAPLFVRTGALIPPYNMRLRHPLPGCPMRHCQTSH

SEQ ID NO: 1011593 - protein, 182 aa, Homo sapiens
MTRATTRRSHSHRAQDLSPLQTRLYHSRHIHLSRSIPGRIHILTHTKHLYYTPMNSHILIIEIPYTRTQKTYTINYISRTSTIIYSTVYKYTHYTALDPPNYHTYHPPSAPHYFQNDTPLPKSTPQYSQTKSRNLHYTNHTTTTYQHNVSHILSSQPSTAYHLPTHTTYYYPLTRSHLQSFL

SEQ ID NO: 1011594 - protein, 247 aa, Homo sapiens
ERAPRCGSPGGPRCAAPAIPAPPACAMDGGPSAWAGCSSPEDAMVTELLTPRGLQYRFVENIGLKGPREKYEEDEFHDLQMKRTWARRYPKGTRTCTRSTPAAGAPTCNGQVKAKLAGGDSDGGAAPRGVPRDPRAHLRCDDVALLHGPCMPPACNLHIPVLAANPEAPETQRGSMPHVSAEEVPAKRKPYHTPGFVRMIPDIEIQESSVVVTTKYTNSGQKPSFSGNPSCFQRIPGAQFPTRTPGT

SEQ ID NO: 1011595 - protein, 114 aa, Homo sapiens
RVSEEEEEAWHVGLWLLGECSPARYFMISRIACDRSHSLEPLMGSGLLLERDIAREEVTVHVALCFDIDNAFSMNMSEYVRALEGQGRNLVVTYHAVTQCRQLAAGMPARQKQV

SEQ ID NO: 1011596 - protein, 138 aa, Homo sapiens
SGGSSEEGIARSCVLDSQCSVEGEGSVFCFLSGTVRRIRGLAPPGAIAGLEMAELGGALFDLELLRSFHGPVPGAGQPVTLCVASTRLYECVVLEHGLRGLTPIFRRDSKTDEGTPSHVWFDYALLEMNLEQLHEDKA

SEQ ID NO: 1011597 - protein, 139 aa, Homo sapiens
RGSSLAKAAEGGTNQDRTVTVVESPRSRARVEITASRYEGRRLVESGAKFPSGIHTALWLSRLQYLLEYKYLVSQPIVKKDELAKDSSGFERKRYIAELQKGYLILKEMFLLLIKRSFWYPEVTSVLLSSFDLVTDPGK

SEQ ID NO: 1011598 - protein, 208 aa, Homo sapiens
RADDVRGEPRRAAAAAGGAAAAAARQQQQQQQQQQPPPPQPQRQQHPPPPSTAQHGRRTVGPGADLHLVPPLDGERSGERRSSAPFLKVMPGTRRGICVVDGFQSFLGQDDTAKYFGLLSMPSDDYYVVWCVTSCTSRLSNPQDISDHIMKRRHSSSMQAAFGRSSHLQYYPCLPFSVQKQRRQCKWKQPFVPVEVFLSASSIKFQVV

SEQ ID NO: 1011599 - protein, 295 aa, Homo sapiens
  misc_feature (33)..(33): Xaa can be any naturally occurring amino acid
  misc_feature (103)..(103): Xaa can be any naturally occurring amino acid
AGAGLAEREVHEANVSPQLSGRLQRGPSKTSPXSRQIQRITHIAGTEVIVPTRALPSVSEIIDCPAVPEGAHMAVTCDAPQSILAPSTGDVLSPFPLALVTFXRMSCRPGCWCNECSGYYQVAAIPQETSSRRMDLQSARRPQGQSTESFPESRKTRRSWRAYLGPAENLALLLVSSELSSPRGWGEREYYLSDAGNLRLAINLGDTCTQSQQRPWRISLEKPHISVVPPRGGGYGTGGWNVQLRWCRDKWARACCPELELGWATRGWREARLCWAGCGRTRAPGVQVSLVHFRA

SEQ ID NO: 1011600 - protein, 129 aa, Homo sapiens
MVAYYPREDFVKFETYREFEPLHVNYTPCDTYSDHMIWQTQICCVDGQSVCYALGCQYSRPWVDIEAYDLRGVFGLVYILCGVSLYGVIDLVGKPTVKPWLHFIQNIPLHTGLELKPKVPALWAKVHNL

SEQ ID NO: 1011601 - protein, 153 aa, Homo sapiens
AELDWITRPLPRGAWLPPRWRTRYGAPLRKSSRESGQVAGISEEASGAQRAVLQRLMVPCECAQRRRGDIRLPAEFRLPCQTACVYAEGATQELAEEKRTGPNLTSSERPLTLLITTSSLEKGPLTGKKPEGERRNSPPHGGRVLPLPVNVSS

SEQ ID NO: 1011602 - protein, 165 aa, Homo sapiens
SGGGGGADKGTGGVEGGAELSVGQVARVVDVEARVELYVSCVSVPWTGLAEFGCTVAAVVRCGLWNGISGLCACRGHGWRRGVYVRGASISVPCDWSDVRRGDPRSVCIAPLFMRAWGLGALGAWACRRPQLRRLMGCASVEAVGRALFGRAGGSSRCGWLRKLS

SEQ ID NO: 1011603 - protein, 164 aa, Homo sapiens
SRHGRILYKNPLTSKHCMCSCEPCLLWLLPFGLPHAQPPCEPAAPPYDYHEMLSVLGTLAVVLQDVPLPLSSVQCTELSAALFSLSAYVSIGRTGQWDGVADTQFLLLGLLPSQGHLEAHDNESSSSTPESALPKHRSPTHPRHHDSLALEVQVTVYSGRKALC

SEQ ID NO: 1011604 - protein, 119 aa, Homo sapiens
REYEWRERAELVVVVRVSRNRYALCQHGLTILNSESQHCRNFNQNAFLAVLCTREWVTGELVSTQEDVGEPVTEDLWAQKSAHEAQSYRSSDLKSNVRVLDAVTLGSTFELPLEFVVTK

SEQ ID NO: 1011605 - protein, 149 aa, Homo sapiens
MRPPQAPVSGKVFIQLMIVRQWHSAASCHDQGSLRSWRTGLIGSSLIETVLNSNSKPLCTKHEQARRPVISRRFVLACLTAYTIFRMPWKLIMTKVLKKVSEIRFTEQNEKIYAPQGPPPCTDPIERGLRGYLKVTILLKTRAHAAVER

SEQ ID NO: 1011606 - protein, 235 aa, Homo sapiens
SGIGGQLREGRFLPCSRLSSAAPHPSPAVLRAPRPGSWSSPSRSVSLLGWGGNRQGRKEPRPDNRETDRSPEVSASLRVSIHRRGAASPCCKSRTRKDEEERRKGREARKKPKEGKKKAQNGEGRPRGGKSDGHTGRNHQGTTDGKAEQQNPSRSKEVKSNKNHGGRTSQVAVTGALPIKAKQQGPTETDRQERLSGKNQQETTDQGRDGPQKAKLATQQHRSPGTEHDEENKEP

SEQ ID NO: 1011607 - protein, 69 aa, Homo sapiens
AGPVFRSPEHLQLAHSRSPGTLTRRTRSAPAEGRRQYVATVRLLPRSLIRACPHAPDGIHAECSTQSPD

SEQ ID NO: 1011608 - protein, 111 aa, Homo sapiens
MVTKKLRYRKSMHTTIQDGRRSPHRRTQDWRHTLCEKTQSRTVHNIPDKKEVHLTRAQERTAADQEIGTPKVTSREHCFMNKIPAAEATHAGREQPGKDPHQRAGPTEERE

SEQ ID NO: 1011609 - protein, 76 aa, Homo sapiens
  misc_feature (43)..(43): Xaa can be any naturally occurring amino acid
  misc_feature (45)..(45): Xaa can be any naturally occurring amino acid
RAFWDYFFTVGEGSALNEVLRAKVLEVPNLFSYGLSRVKTLRXLXIGLVPQGHQARRGYWTPRTHFVCQRGPKGKP

SEQ ID NO: 1011610 - protein, 284 aa, Homo sapiens
RTVPPRSRLREAAAGGAGHCLGIVVGERARDPLAETRPGTTLSTTNYTTMMPNEWGKTNGKPEADHRGERERQRIHDLGTERGHDELKAEMAGNKDHAETHGTKKITVSPIRRKKHGKTTISKQAEGAVMAEAQYHERKGNETKQWEQEAYQAPYTRQISGQGDREQAKERSQKERGNTGRGRTWKRHEQEEEQTRGNKPAYRKTRTQTRESPETHTKQQRDELREQTKAEVRGRNGNTKDDEKSTHKQNEHGQTETQTQRRDEEQDTLREGRRTQKTIHKKSL

SEQ ID NO: 1011611 - protein, 106 aa, Homo sapiens
ESSKPRAVLKPRRVCVGGKRRRDDISVDTLGLHQEDPAHGLATRLRTSLPLPEPTTVYIFQDKVNSDMHYGMCRSRAMPPSLMQVIPDMTFTTVNARRGSKVTGTD

SEQ ID NO: 1011612 - protein, 83 aa, Homo sapiens
SGVSLTGSKWRRLLQRLLLCEGNNTSSPAAAAGGGGSRSTIPSGMGTVDRIMIYPWSTGDAPGEGGSKRTEEAHNPTGNSRHT

SEQ ID NO: 1011613 - protein, 101 aa, Homo sapiens
MEKQRGINRRRCRSPAQRTDGLESGRLLQVLYLGGWCDGTQKARPYSANDYIAGVWETQRRPDERMPRCCCTLEEEHFSLVARRTWWERRPMAACQSIKGP

SEQ ID NO: 1011614 - protein, 101 aa, Homo sapiens
RRSLGLGLGVGWGGQASPPTRKPNIIPGRRKRNKNKDVPMTTKRGQKREDIAHGVTRASGKHRDKRKEREITRTKEEGQKQERDKKKQRNNEISEKGKKKR

SEQ ID NO: 1011615 - protein, 150 aa, Homo sapiens
MSLVSNLTHRQHTPSTPTPRHNQQSETLPAKSFLPPTRRGALTNDPTQTCGRPNNYIPHDTITPPPKHNSPSDIPSQLGYHLLSQTPYRHQTLCVTTHTPILTTDFFLDEHQTHTCPNVTPSTNKTQNNDLQLRLTSQINHHTYHDSLSA

SEQ ID NO: 1011616 - protein, 79 aa, Homo sapiens
ADAVWQTMLMCVMSGSQVTSILGNAVQALSRISDEFWLDPSKKGLALRCVNSSRSAYGCVLSSPVFDQHHQWSALVQNE

SEQ ID NO: 1011617 - protein, 73 aa, Homo sapiens
MCGVSLGPWIPSHRLIMHLTPGHFGVVYHGEYIDQAQNRIQCAIKSLSRITEMQQVEAFLREGLLMRGLNHPN

SEQ ID NO: 1011618 - protein, 229 aa, Homo sapiens
REGHVAVDHLEIRRPCVDAGAAAARCLVWRETQWAALICQRISVTASGTRVAGRHHVDARVEIERSYFCAPPIVRWSYSRERARSSLRRRSRLYGRYLYRKTDNMRHRLRTKFETTHEPKKTSRNPTRHRITQPKQVRSARIRTPLSMSRTYGTRSGWAMGQGRNINADEPDAQDRTVRNPRARGKTKHRSSCGEHRSEYPQDESSTAPGRKSSSEDRKAHARRNPEGT

SEQ ID NO: 1011619 - protein, 230 aa, Homo sapiens
SGAASVTAAAAAAPPWTPGAPRAAEQLAPRPLEPRELRELRSASRSASLPLPPRAGDAAPTRVPRWSPGRPDCCSAEAACAGGGVWAAPRNARCKSGVHRSLTAEHRTSDIIQDWVLTHEEDNHQYNKHKPWLEPTYHGIVTENDNTVLLEPPLIALDEQMRLCDLAGEISGSNIHGQNVHLMQLVVDKSTGDAESFVPTENLDCELQNRLSIQPSRPNDCGKGPDGTNA

SEQ ID NO: 1011620 - protein, 173 aa, Homo sapiens
SGVACAPQPDGPPFGAPQPCHPLLVFLFSSSLAPLTTRSRAAGSSGPHSSPRSGAPSTAFAPPGAGRELLPAAIMSTANPETPNSTISREASTQSSSAATSQGYILPEGKIMPNTVFLEELDVRMDETEIRSFFARYGSVKEVKIITDRTGVSKGYWIQSSFPNDRGMLPEDT

SEQ ID NO: 1011621 - protein, 106 aa, Homo sapiens
RDHLCEQQVAGLCPYMDISYAICGSYQIVKSPIEDLVPHNKCSSEVWFIRDSLVSVAHAGVQCSTDSFLQYNVIDCRYNNMQKWRGLGRLMPVIPASLGARGRGLT

SEQ ID NO: 1011622 - protein, 109 aa, Homo sapiens
QWRMQPALARGEGMAVGCLCRAAIMDEDYYVERGRDGADEAGLACQQEDDSGEGEDRCGGSCKNACLNFPPGDYIMEPSYLQHSEEVFQGRRVSRRMLIPALNLDKSYT

SEQ ID NO: 1011623 - protein, 243 aa, Homo sapiens
AGSSCTPPSTLPQPRGTQAPDTRSVAREKWIRHHTLWIGYCGPCWWGAGGDLGRQASRRPGEFSVAAPIFQQDHMIPGSRLGFRQRRLVLPEVECMASRVRMNRRQCVHGAKSYVVWTPLVHRSIGLVRQIQGTSYPSISEETRVVKTLETRCVLAMRQRGITLGLSYTACAEVLASCVDMHPILPGVNVVGEEQLIVTEAMVTAAVIVSRSKGHVKWRSLASAGPFGDSWSQHISNDVRKNR

SEQ ID NO: 1011624 - protein, 142 aa, Homo sapiens
RSGWGQHRLAPVVEARAGGGSSNRRPCASLLCGRRRRGAGRASGEQPLFKNLRPNPGKNLWGITSTAVRNIDGSINNINLNDDERTMYVDLARLMHVLNKLLHRILSRIQVTVWKFHTKDPSSPALAAVNDILNDVCALHME

SEQ ID NO: 1011625 - protein, 246 aa, Homo sapiens
MAEKFDVPRTCMGSLAGEEVCAIRMATTVCLKCFDKFCANTCVEGREGRNRVQEVPNGRVHLIRNPHSWRDTLTYRMDANVPVNPLDQLRPIVGKDNKILCKKCYHIGRISHSSARGAVKAVVAGDRNVEYKGTCLAQQYCIHAVSNCSESSGLEASSPKGEDFQCVTCHETKLPSMREVQQGITSGGIHLPGISPGMPDGECGTWLYEAGWEPVTAVEEPRDGGMRQTTWATNGREAKPHQGCEG

SEQ ID NO: 1011626 - protein, 129 aa, Homo sapiens
SGDASWQGDGGVAAGLVALDDCFFSYMRHSLPPTSSSRKELVLRDSDQRLLFLSDQRYQPEIREDTVTPDYQRDEIMTITVSNERLIIELCSVLVKTWDRRSCNGRSLGHCQNMSVTYSLIDHPWMRHG

SEQ ID NO: 1011627 - protein, 179 aa, Homo sapiens
MVPPVDPHGYYWLARPLSASMYDWMNASLALVLLECKLGPYMGNLRGPAVCCLDAPGPFNGVHSDLAADALVNLGANVVLQVTRGIQLAAPGQGCVQPWSTLGITSDEAGRTERLDCDQHGVRRRCPWKFPGNSLGMPPGALRATTTGCCNGFAVAKPRWYQVVKRGGTGGCLVKKEDT

SEQ ID NO: 1011628 - protein, 270 aa, Homo sapiens
GDIARRSEAVREGDKSTALDVLATAAGVTHDSPSPDSIATISGRRSITWIDADPASITMADLPAVAEVIARTGARMLELAQASADAAALKLVDAHRLLCAHREGPYGVDEWSQRMVTVLSDVLPGVGQGRWVLGETAIVTHNLAQLGVNNGDCGVIVETRPVPTIALPGPGGVPRRLPCSLIPSLQPLQAMTIHKAQGSQFTDVTVVLPTPDSPLLSRELLYTAITRAREHLTVDGHNGLLCKTATGPGYSIDVLGISAGGQESRTSRLR

SEQ ID NO: 1011629 - protein, 210 aa, Homo sapiens
MKAHDISMLPTGSFAVGLALRLLELYRAFAFFCRNSHLLIKGRDSVNKERIRYVAVYWYESDFHFFQVYTELLTRADLSVVFMTDVMIYSEASGDHQSVTRHKGDVTSVSSILDKILRELAVKYEGFATLGASYRSYTYRARTPHFITGGSGTVLKRLADLRAFDMETRPDVPKVQGRIAPCLKLSMKYSRGLTRAPEQPIPRGTSPRIS

SEQ ID NO: 1011630 - protein, 94 aa, Homo sapiens
SGALLWASAWAATLQLSTRPGPGRGGVGRGRIRSSPRIAAPDKLRQDPRVRLAAGGCERSWGIRPGLSGPEAGGTQDIPAERDNDNKGAYLQST

SEQ ID NO: 1011631 - protein, 333 aa, Homo sapiens
AGFAALLAAPFRCLPRLLSPVSVRRCAAPHRRHPSSLGSCHWQPMLNGAGHYLAWSMLTRPSCVSTTVHSWVQGLQGSVLIPREVEACCVRGPRTPAELEMTHELRFLLACMSSRHGRNQWALDSSSYVTVRAMEMIRGSPHKGEDGQAHCSALPMMLAPQTHKRMHSNYRSSTCRRHGATEDRHKPLLLVVSPWMPPWHHQGLGAALQLSFHGGTQVPLIALVCGLDCLCLSQSMDARRVSRVHSMVHLAYREWAARHSLLLPGPKVFGDSIHFPPNHGVGRGPGWVGLTPLGPATWVKGAGHSTWCLAQAYALPGTYSYATFSPTPCGLCQ

SEQ ID NO: 1011632 - protein, 141 aa, Homo sapiens
MSKEERPWSGGRSVECQVMWEPDSKKNTSDVTAFRAGCGAAACPAIGPLETLVMTCTIGPGLSHMQTSGQSSWQNSVELSSHGVYDEGCETTFEKRICQMFRRRWYKRQVGSAIAGNTSCRHNENDRVAINVAKGRQNRKS

SEQ ID NO: 1011633 - protein, 121 aa, Homo sapiens
RSCVPAPAPCAPLLRTALPPSTRGSPSQLGGPPHFCPSPVRPPSSPTRLAPSSRGPRCQAVGAGMDCGGWRGPRIVTPADELPPDGGAGRTIGTSTIPGSTGAAKFAQDVAKRRVIPNVSN

SEQ ID NO: 1011634 - protein, 105 aa, Homo sapiens
MRECYPGRALTPKLRGEVIITQNKRPAVPCRNVKYSETFTRSVVYQYLNICREEKEVAQKILSIATKRDLRAGEASATTVSSSREAPPPNSSFSYQSSLIPSSDT

SEQ ID NO: 1011635 - protein, 135 aa, Homo sapiens
SGANRLGPSRYPGGLLYLLFAIDLVAACSLGPHCLYELITLPAEVCSFMLEASETTNPLGGTNNSKRATCKSCNTPCEGSVASLLKSARPGTHRKESPDTKNCNTHPRVCGFILEVSEIKNPPEGTSSGRAEFKQ

SEQ ID NO: 1011636 - protein, 98 aa, Homo sapiens
RGSLATLWNCFLSKWIYNLSNDKEEVWKQYLELRKLDTAPVETSALFMIETGLFNWKKVRKKHRHGHIRREKRLLVAWWYIANGSIKARGVPGSIRNT

SEQ ID NO: 1011637 - protein, 89 aa, Homo sapiens
ERSVRVQALQDLGRVTSAALLPVGDSTWHWTSNMTRRMDVLAQPNNKLASEQHWGNMPFHTLTWALYTERRPWAPHFSYTDGTTNADIR

SEQ ID NO: 1011638 - protein, 207 aa, Homo sapiens
RGRELLRQGHGLRMHHLLGPLPLRALPMAQYVIESDLHSLVQLVLHPIPYSASSACCCWAWSHSFELKPRGSGPFICAGRADSIALRRERHSCGLKSCADPVPMFFMTTYLTQHAWSVTRYIPTIAVLPICKVGSVPPDAMEEPSLKTSQDGSLRKELSYQACGAFGNPVEAQSSRVSARDNADQNPLPAFHVGRKSKLTKVRQEGG

SEQ ID NO: 1011639 - protein, 197 aa, Homo sapiens
SGAVAAGSVVDAVPLLVAGGGGTRRRRDSAQCALTSKQQQLASIRMVPPTGRSTPASCVHVSPQLTSCVFRPFDIAAMDDQNEPKTQELLRFVMGSLRSLSLALEDWQHGGASTRLTGHYGRHVDEVTLGSINLQTSIALKFGMRISYHSDMLGLALNWVNLGQTRCRACALTVHLGIVAYWELGSLRDRHIWDPGT

SEQ ID NO: 1011640 - protein, 368 aa, Homo sapiens
MRVTAPRTLLLLLGGAVALYLDHPGAGRPELAVRVVSDIRPLFPGPGSVAGSSRFHRSVGLSWNGLLLFREVQNMRSAVEIRTTRRPVVRPWDWEAKSADRQYCENRRRPTRILTKVPTCQPELDPASTVTPGEDPRASGHIHNGTPKEQQSLPGSATKALTKAKDGNRECQQMLEEAQMIEENGHVHIPGKEFTRSHMCTALPRRQGQKGVEKQKRDPHRRNRERNPGKGYPLGNRRHRRETKPVDRELYQELRSTLNGQHTGRAKWAGGTQCKNGRQEQRPMAVAMKVTGIRPGGKGEAAQECIQIGHSVEDFTGQEHVERRREHKNRRVQADTKRHCNKPMGGESPHGTHTDPYTVGDTTSRNGP

SEQ ID NO: 1011641 - protein, 116 aa, Homo sapiens
RIFPSPPLSSRLSRYPPAARGSSVVFSRLSPRSGRSVFPPLRLSNFCDVGGTAPCPAAERRDCELRHYAVTMQLTGRAHLERRNCVNSGGEWIPGGKNMLCSRSLHAIGTRLSHDV

SEQ ID NO: 1011642 - protein, 101 aa, Homo sapiens
MEVGLWVRAYLDLRARGREIVLLCSGKSVGPSIRTTGGVEKAALELLHGRFGGGRQGVGVNPLPAVEQLVVAWRGVLAENDRVCDPEIAPEVVSVQYGKTR

SEQ ID NO: 1011643 - protein, 215 aa, Homo sapiens
MAESFGREKMSLKGTTDDSWISGKGLVYIHAEDDSLIHFCVEGQDVRERGRRLESSSLIDCEFNAGAACAPAGRVQRAEVSGQGPSRLFFWHAGIPKTDQDEDALPGDVNEYLNNTADAWMHMEGQRKTAATNSTDGYGGEGGRAGGLMGNDEATDMLMQNIGPCRPREDWSRGWRALDLDLGLDNINWRKQMEPPREACSSSKFTLDATVGKRV

SEQ ID NO: 1011644 - protein, 132 aa, Homo sapiens
MAWLPGQKVLCILVHRNLNIPEWLLQTLGRIMNVMKNLFDELRSHQNQTICSHCIAECYQSSMDTEVYEQEILVTGIKGSRICQLPMPQGGENSASRWCCKFAKTGLAPGVTQKLSPKPWWFSVIADVGDRT

SEQ ID NO: 1011645 - protein, 97 aa, Homo sapiens
  misc_feature (74)..(74): Xaa can be any naturally occurring amino acid
MFSCRIWFGPFPKGPLCCTSDVPPQRWRNVGAPAIAFRGDRGGDTARDFCLALVSLHTHPGECVGSPPFRFWSXLKALSARGPLADILWHTPGGIDA

SEQ ID NO: 1011646 - protein, 130 aa, Homo sapiens
AGLLRSLPPRCPLSRRPAPLSGAQSGLEFVERPPPSPLAVVLARWPLPPHAGRCPRDAPEAMVLPPAPAKSPPCLESRSVSPGWSVVEPSRLTDNLRPPRIQSNISRHQPSPEYLRNYSAPSKPSTRHTF

SEQ ID NO: 1011647 - protein, 130 aa, Homo sapiens
MQCESSERFDAKYPDRVPVIVEIRSQALIIVDIDKRSTWSHLYIDLCVVQFMWHRSGNRGSRFPSEKAIFLFVDIDSPINDPGLNVVRTGVIRGRTRTHERLDSLYMWHYSVKSNTFRHSEGQLLGLGAP

SEQ ID NO: 1011648 - protein, 106 aa, Homo sapiens
MLTPNDWGYPGNWAPGVESTTFSGKTKATGTMGQAHNEARTTHGHQGKARRRNTRRPEGTRSYGVLKPKIPGVGTQDQGRAVARTDKKSTTHDTAQASTNTRHSAP

SEQ ID NO: 1011649 - protein, 158 aa, Homo sapiens
MDIPGCLLYTKTGSDPKLNHHTLQIISTGFPAMASALQLCIPEQIIMTVYDRISRKAVGQVYRHCQNQILYCIPGTNRRSSTLAELVNVTYEDVLSPGDETWVGKGTKIGNLDLVFPKVSTGHTTKKGPFHNPEMVSQMHTPDGQKVHRYGPTNESHK

SEQ ID NO: 1011650 - protein, 89 aa, Homo sapiens
MESDEVAMAAFKGMPPLPNDPETRLLIGTSRGEGTQSENEVQVGLTRSAETQSQHSSPEYIKTVSTIELRANVAFRFDDSPELSKSAGI

SEQ ID NO: 1011651 - protein, 33 aa, Homo sapiens
AEPLAAAATGSRGVSSRTWEAGFSLLPVVIAAR

SEQ ID NO: 1011652 - protein, 107 aa, Homo sapiens
MSSTSVCSVLEVQLVGDTRVTGMLLPSRFRASLPAIGLLGQAWDFTMSDNVHTIATVLNVVWYYIKYQKNRKVFVNTLRVNTPFDTSLPKIEVIRKKPRKKPYSNFW

SEQ ID NO: 1011653 - protein, 404 aa, Homo sapiens
  misc_feature (349)..(349): Xaa can be any naturally occurring amino acid
RELVNQRPAPRSAVAALKKPGQRTCPRDLQTCATGSALSPVDALNASASPHTLPASLQSMWLRSKCCIKCLGGVPYASLVATILCFSRGCPYILLAVVHVALAGTVVILEKDFSTKASDHALLIEVITCCESCAILLLTLRRHPFDLTRHWDSFLLYKKGRYRHRPKVPVEKRLVRVEVGQTYQLCWARIAIHGGNVVASCCFSFKRLICCRLRTVGLSAWRVVVVRVISTAWGLAPGRWYFFLLQNHYWGQALVDTIRFHTFNPARTHSGGQPNKVSVEKGPGTTCLDGNFSPEAKITRAYFGSSPLGRMVVIAALVGTPLYGVVPVLALCVASTPESVPTHADTECXSYPMCAFILSQGRAIDWGPWLVRGSLGVRPRRCSTLSPPVRVILHLYVESSETLV

SEQ ID NO: 1011654 - protein, 91 aa, Homo sapiens
MRTTCGYLPIILSRRNSLKCGKRIGGRRNEFEYNHWFGGTSRTKLYLGGKPGEPTRVSRQKQLGDCPPRDKAVVHLSPGRPTGEFPGVTTL

SEQ ID NO: 1011655 - protein, 213 aa, Homo sapiens
MSEQLHWCLLLGISYFYRLLVCEEPHVCATEDERHACMNICIAQVKGEIPDAHYRYREDHDCTMTVGKSFKNDVTGYRHNMSLQTHPPGFRMIAYQGKGDIMDPNRIIAGLARRTFDSTHIVVRKKLDNAHDAQCTSHAADFHGGKVDGREVEGYEGIAVNRTACDSASCVNDGPTCSEDTTPPVHKGQLLCQQPDHCNGLQKPQEPWRGTLP

SEQ ID NO: 1011656 - protein, 145 aa, Homo sapiens
MGLADVENGTLVVSGFHVKRRREALWGRSKTDHVPDGLDLSLKASRHWEQLHAGTTDALVGPALGMVEQGEGLGTIRCDDRLAWVSMHTKGSKEAVLRVKCPRRGLTAGRRKTCPLRRSIWGRPPRGGRSQARSELVYGRPRGNS

SEQ ID NO: 1011657 - protein, 168 aa, Homo sapiens
AEAPNTGASAIGYVVVLPESLHRILLVAYSCQLLEDSSASLCNEPSARPRDNSLREMEREQRKNLEHVFMCAASCSVASSTIAWRWKSCSQCNQSDRGHIRIVDSRSGDMVMAWTLLYSTPLMHHKRNKRMNMVARCVFGECVRPMTSLHRDNSWRAKYSICSTGPFA

SEQ ID NO: 1011658 - protein, 245 aa, Homo sapiens
AEKPEEPDRVLAAASSECVYETMCCYVCLNKYLTCTFGESFAIKCSGWIKRLIRMVMSIKLEYACNQCTFGLGSHMVRLEGIRRGKIGTNWSLHSVSNEYSLQINYAMQQNGVPATQERMQLASVMLTVWMGSQTKKESVSARLRTTRSDQEASPSDDLSFLSTKAPKQSRFPYHDWVYNEEAQPEDPSAGQMRKPLQEMIVRSRKNELAASQRLRLPELLTQQEHAKFSLQVDLDSSTFGTSTT

SEQ ID NO: 1011659 - protein, 150 aa, Homo sapiens
  misc_feature (55)..(55): Xaa can be any naturally occurring amino acid
  misc_feature (60)..(60): Xaa can be any naturally occurring amino acid
MTSADVNPKAYPLADAQLTKKLLDLGSGTSCNYESSSGIGRQSRPRKRRLKQGHXLMSIXDWLEDRRSHWDDHVWHSAASCLIDEKCSPNVFDAAPSQAHGETPDAGLPGTVMRTVLVTNQEKRSLSLKRAGYRSAYSKRVHSEDGSYRY

SEQ ID NO: 1011660 - protein, 95 aa, Homo sapiens
SGSLARQCWQRSGRAYSIGRPWIVSTIAEQHAGVQSLVLGILAGMCGTSPAAPSVPRESDMGGRVDANLQQCRLHVWKAMNSRKLLLSLARFHQT

SEQ ID NO: 1011661 - protein, 144 aa, Homo sapiens
ADIESGTGRRREPGDGDSGSAWPQEGVMGKDYYQTVGPGPAGASDEEINAGLPDCQALRYNPDKNNGARLPRQKSKGRSAEWPNEGCSADPGDKAAENLSERTKRGQARALKGVEVEPQVWAGNAGPERVRPKWDSTILSDITD

SEQ ID NO: 1011662 - protein, 193 aa, Homo sapiens
MVAGGCSKVLASTLLTHRLCALGVMVVDGKGSSKAHNGPNDEDTLRIFCHLSRLYCMLEQNVVSSWEGVNTTKRVANRASRPWELTNRGNLPEVRCAYFDAWDILHAGTRILPPLVHCVGLEARWNVPCVRPMQLKTGIAVTGQTLAELENTERLGGRTEESNWANEEGRPGEGRQNEDPGEAGGARELPRTN

SEQ ID NO: 1011663 - protein, 70 aa, Homo sapiens
SVGVRWRGSGGGEAPVWLSAGAWRERDERRREPVGLCDCSLGGQQMAVYALVCPGWSVVASSRLTATSAS

SEQ ID NO: 1011664 - protein, 70 aa, Homo sapiens
RGGSRGRRIQTILANTVKPRLYLEVQEIGRVWWRTPVVPATREAEAVEIAWAREAEVAVSGDSATALQPG

SEQ ID NO: 1011665 - protein, 246 aa, Homo sapiens
SGSPARNGSTMLYVGVLAQQAGAAGGGAAGRRRAFRHCVFVEDRGRGCATEHGPHHPTRGAEPEAGRLTLTEHEALTNKLQLKYTYEHEQMNNATLDGGRCFIQQAENSFVGLSKKDKSNEVPEHLGLILFKDYAVSTVPVADGYAFARVSAAWLGPNLICNWALVNLHQKALKIMQQMSDHRYDETSLCPDDIASKTCIYLNIPATKGTVSAGTEPRKSIQKVQRVHRESWNGTNMLRYPAEAMV

SEQ ID NO: 1011666 - protein, 205 aa, Homo sapiens
RGAQPGTCVSAGLCCRTPGCRRGVGRPRASAEVQRCPRGHCACCSCSVRPCAAPGCGRCECLPAASSAATAYSRHGCTSVLDVSPGFRAHRWRADFCFAPRTRRQVGGGKPQSGETPARTLRARAPMPVIAQLAGWQVGSAPKQHRSLDAWDGRNRHPPAKPGDPRGPDPFGTQGTHRDSFAGPGSLTSPNVDDFRNHIMTSMYT

SEQ ID NO: 1011667 - protein, 198 aa, Homo sapiens
MSPREHGGEIHSRPHSSRPVLLSKIEGHQDAVTAALLIPNGGRRDHGQRGQNHPGMAEKRQWSLLGQLYNHKGLLPWLRLMRFPHSCTREHGIYVCAQDKWQRVVEFNVPEDFNNHETYITDLPSSIMNRVSAISFSLATECLDQYRPRQSVCTLGCCTPERAHARAGHFYTSWAIVSAKYDCDTQLCLPVGDYSWAA

SEQ ID NO: 1011668 - protein, 229 aa, Homo sapiens
MALVRGGWLWRQSSILRRWTRNWFALWLDGTLGYYHDETAQDEEDRVLIHFNVQDVKIGPECHDVQPPEGREPDDGLLTVNLREVRRTGPLLLESTGLMPYAWNDYALLEAKCPARCRVYTAYQDYYESGAPPKCTARATYVPQATYRNATTQALDVDSTVIVREDHCYRQPDAPLAMGDALPVASTGGGAWARFMLVRPCLVLSPGTRQHLIPCAWMADSLFLREPIL

SEQ ID NO: 1011669 - protein, 241 aa, Homo sapiens
RTLVSLWRRGRGRILASTDVRVAHSQYLLLSGAHAWSCVCAGSCGAGRGSVRRCCITGPVGRVFAAGLLLDPCGLPVPVGVAATREEASYLLSAPLKCHSESELLVQDRVIAMNEYFVSYLWELRCDTQFNRCTSEIRFDPSALDIPVDSQIEPMFLRGENLSRPEPTNLGIRLTHLPNGSTNLGTGSKFPGLDAKSRTLACWWMPFSVYRDSGRDRRKGKDAYFCDTNNASEYSTILAEI

SEQ ID NO: 1011670 - protein, 79 aa, Homo sapiens
RRVGKGVSGGPGRVKGSKGEGGTGAELKGQDGQRSTTALQLTGYLDCAETMERSLEMALRTPESVYLLLLTSGQEQEGP

SEQ ID NO: 1011671 - protein, 200 aa, Homo sapiens
MVGPAGPSLQPSLIDAAHPRLVTDRARSFYNVCEWASVFEPRNLQRINAGSPSLLLQGLTVKIKPQRRSQVCSNDFHWLVCLSHLATEVYAEPDGDRVVYTGTYDTEGVEPNEEVENGNPSRSPMPFTDIGTFETVWQVKFYNYHKRDHCQWGSPFSVIEYECKPNETRRSDVGEQGVLPLKVALSDATGQSFQNIYCFR

SEQ ID NO: 1011672 - protein, 219 aa, Homo sapiens
MRLTAVTRRLWEPLAPKKNPAEMLAEQPGETEFEMTGRTSPWYDHQDLQQDLQPCCLTLGGRTSYLGSGTQSQEDSGSADCSTSQLRSRLQGKLSSSGRKQDGDCATGKMKRDKHANRVYGTNCRRSTSNSAHPGLKHTHTLTHQAYAWPGPGQRPSQPGHPDEFPWTPLDPWTHPALCTVALGQTPQATFWTSPLSLECPTRGDAERIGTVPLLGPHK

SEQ ID NO: 1011673 - protein, 331 aa, Homo sapiens
AGCPDALMPRERSRGELALLEDGERPGRAAALCWLGWLLLLMCLLLLGSSAGLAHIKKAEATTINYERRSAEAAEGQIRPATYHEQEWESALREAAAGASPALDRPLKHRRSVDGRPLWVLRLNRLAWGSLIPEVDPGPDRCRARRFGPRCMPGPGPQTINTCDATTAMATEDPAVRRPALHNLPCAREPETAGPSRTREPQPPGTAGLVTTTHRTGGYPGLGHRRSKARGSGSQTTVATRRRRPCGKTRPATDRPDPRRPRTETAQEQNRDREGRAHTAQRQTASHEHRFTHTKPENPPEPRHHSVRPRSDAPRHTTNNERNTPKANTLN

SEQ ID NO: 1011674 - protein, 72 aa, Homo sapiens
RVCVDVSVLTSRAGGPGLLGAGGGLRVSLDWVPVTPRQAPPSAVGATGIHAVPGQLGGGRKHPLRCIRLYGW

SEQ ID NO: 1011675 - protein, 75 aa, Homo sapiens
AVRCSRGNQEQVHPPLEFEHPKNRYFVSALLMYPQQPELPDICILSVRHQAVEEESMATLYLLIYSFCIYQAQFW

SEQ ID NO: 1011676 - protein, 106 aa, Homo sapiens
RVWEAPALSAGSVKMCALVAWRRPRLSLSGAGSLRGAGKGAGRGSLRVRRQWRLCPDHRARLRAEDGDPGPESRPNVLLAEPCCCRILGRSERLMLAPASPSMLCG

SEQ ID NO: 1011677 - protein, 210 aa, Homo sapiens
  misc_feature (184)..(184): Xaa can be any naturally occurring amino acid
RNGGGGGGDGDSSGGGVWLAGGGRSRRRRLRGTRAEGRGGRPPAKGPASRVEVGGARGQAASEECVRRPNGSRPVFPSLVTEEKWCLCDASDQPCGKWQDSESGSVTLPDRCLTHPNQEILEGPEARVSLHSYCDKARAIQQLFSIRTPAMRARYHRRYLDDSAKGFLPSLRNYRIVATHKISXIAQAHFGGAQNKLELMLKQRFFTTAC

SEQ ID NO: 1011678 - protein, 238 aa, Homo sapiens
SGGAPGGVWMAASAAAASAAAASAASGSPGPGEGSSCAGDKGAPDAPFRRSLGLLPSAAASSPAGGGAEALELLEHCGVCRERLSTEREPRLLPCFDSACSACLGAPLCPAGRQQLGGRGGGGRRHRWSDLYPLCKQQCFSKDIVGEIISCVIVAARPAPDAQGCEPVLELAVRIHAQATGYSVKCSEPLSETCVRGAPSRVTVHQGPYMCALLGAKQDLGDVVNVLAYCNVHQGMNP

SEQ ID NO: 1011679 - protein, 109 aa, Homo sapiens
MPQGILRVTPFESPGGAMIENEHGGSPWWRGASPMRVWCAAPLAFSAFLCVESLRFSVASPPCRGRNLEATFGCEHLFQRRPRRQFGGSSSFPERLGKRLSSSFGWDLG

SEQ ID NO: 1011680 - protein, 161 aa, Homo sapiens
  misc_feature (67)..(67): Xaa can be any naturally occurring amino acid
MACAVVPGSEALAAFSTIVRGRRQLRRTALFVVRHQCGRLAAHMSGDVAPAGSPSTQFPLPIGPTNXAGPARLELPRGAVPGACSAGVRVDFSLVPGGPGGQTVAGVSAGEVAAFKVKRRALARVTELDTRPGVPHAVRYNPTSTPPGQLSSRRARRPPLN

SEQ ID NO: 1011681 - protein, 153 aa, Homo sapiens
MLAESGQARGRVLLLVLLSRMSPSPRLPVAGQSWGREWLLRSEWRGRSALGMPGRVLSPPLPCGLIAGRLLPGDRSGRAAFAQDTRSGVCSFGRDASFNGYAVFPTGADLRVAVVTRTAVLQIQAGGSGEPGLVLEEQRSAQVTRWPQVCRYL

SEQ ID NO: 1011682 - protein, 151 aa, Homo sapiens
RVETMELQNAEVFTSRTNECQGQCGRQLLPPAWVQHAPDQPTWKSSLYSSLAYSEAFHYSFAARSRLPHAACAGAASQSLSGFVCAPPRCAPNDISHLLTGVFRNFDSAEVIGDEVSSKLDQGPRQRECAPQRKFVDQLQQNRELYKHAAG

SEQ ID NO: 1011683 - protein, 100 aa, Homo sapiens
MVLGTKKVGLRNIRFGEELSGETQKNGNHKRTLSVSSFLLRERPTWGICNSRNENEVDFFRLWERKTFLAYPRPKIELVVQGLRHYQGQVRLSRKGEYFP

SEQ ID NO: 1011684 - protein, 195 aa, Homo sapiens
SGGSWGKEFNGSAHTRGLLRNRPLSAPPLHDQVIAKQLSEYTVETKRDRLEVKKKRDQRAERPRDIVGMQKTQTRIVATGEASKCVAERKHHTTRYTNIKPTSEKYATKQMQMEPMKQVEELERIKGQPRTIHKQSKEGKARRKQYKAKQNRRSGEPQQRSATRKSANKKRKSIAQEVEETQDKGTQNKHRGDNK

SEQ ID NO: 1011685 - protein, 121 aa, Homo sapiens
  misc_feature (107)..(107): Xaa can be any naturally occurring amino acid
SGLALSPPRFLPEPPPVPTLPRLRRPRAVPTGNSAQGRSPLLRSWGSVLSAALVRDGPESLGAEGEYALRLPMIPPGVPKPCLANRSCTGPMGPCQAGHLDRPACGXQLRREVQMGTTAKR

SEQ ID NO: 1011686 - protein, 82 aa, Homo sapiens
SVTRYRVLRDDPQRQRDKSACNGACEVTRSPRTMTGATISGLRACGSQSHNMSLLSEMMRKWCQSEQATSGLLEDATTQPCE

SEQ ID NO: 1011687 - protein, 115 aa, Homo sapiens
MGNQPIKWKKAWESCCSTASISPEQFHVVENPGKEAESDGVGSEVTGRNDEEAICSSVAFILHLQHSERMLTGHKREPEGQWLANDEQKASVRKDVRDSKDEEKQHKIRRERKKL

SEQ ID NO: 1011688 - protein, 101 aa, Homo sapiens
RGAILEPWCQFPTLAFKRWHFFPTLPSLFGQLSVVCKVNRKRKKAMRRTDKNKKQTKKGIVKWRREERKEEERKKCQKKNEEKAEKRKKQPQKKKRGRRRK

SEQ ID NO: 1011689 - protein, 103 aa, Homo sapiens
  misc_feature (9)..(9): Xaa can be any naturally occurring amino acid
MPGRVVRQXRRRPRPASDYGGTGKQDCVHAERGLDRGTAEAHTDRSWLVRHMKGCVTAAGSESSSSICNDRYISVSDGLHTNVGCVPVAIFTGMVIQHRLSHA

SEQ ID NO: 1011690 - protein, 234 aa, Homo sapiens
MYLLLLRVGGQGFRKGWALLAVDEDYPWRQVTWGQNGEAHALTSHPMGTNTVRCCLESRCLLSFASYRRTLGDRPRIRVAWRPSLRCVNPRSADVLCRPSSLALEMLPILRRGERSSITIQPPFCYHSSTSWMSCGWRLVGIARSRGIHDGEHLGNAATVADKNPVGDHPLSSCLAIELSGDHPGAWPFGNLGDVSPAFKAGAGHQHMCCPWPTLSPKGNPGRILDTLMPNLSS

SEQ ID NO: 1011691 - protein, 302 aa, Homo sapiens
SGAGGAEVQKQLRSKLVVPASRVDPEDVPRLRNDSAVSLISLLQHSDTASLDTCLWFWIMISASRGGSLGGAWHALVPFSAFEGDVRLRPLAALTSRMSCGPLWLLVSGSSTSPVAPEKLPPGGSSTSRTPSSPRELSWAAVASVGDLGLRNCSPPESANVLHPTLGGEVLVPWVPGAVTKQYTFSEHSVLDYSYNIPNIVVPPDVVASTEVEVSMHGAGAVSRDCGLAELSGPLKGLWGAPCAGAGLRDDDGTLGCMLSLAALVVPMTGKAYGPESWDCQASFRKQAFSPEGLDHDGSQYP

SEQ ID NO: 1011692 - protein, 274 aa, Homo sapiens
AELFCSPGLLGSPGRARVMVVGRGLLGRAQCSCALGAVCARSRTRVHALRGSFRAMSRFCVKNLSRVTRASVRGRGAGCPETRITCTWSFDWSRSTRGLASLWILRCMPQEKVRRTAGGRNAAGGCKVDHQVLSRKAQTIHIGSPCFGGDIEEISWVNAMERSGDLKTCCIGRGLTDSVILEDLVSSANEIYVRPLFQQLDKRWVMSSIGSGRTIALGLNHPMARNYQSEPPVFVTFSGGEQTPPGEAASEKGPTPGPVWLQQRGWRRPYWFDV

SEQ ID NO: 1011693 - protein, 521 aa, Homo sapiens
RVRKEGGLGPGLRLVGACCAPSGSLLHAVFRLQHSPNFHLAHAAAGAAGSKHHAQAAQLRSEPTRCAPASLHRRNELRTTRTGMPRNSKANPLRPAHANSGHLSALHTAQGLYTDTYCRINASPPWGKLLTLATASQQHATLQGTPGFHGSNTLGLNFSRPTEPRQRPEPKATFARGTKRSATQFTYTQWSPKNGVQFLSNFRNHGSPVGKTRNTPHNLRTRTWEETPKVPNNTVGNAKHHGKPQLLANPTNNEQRAEKRETRSGKKTPSWAPRQLLQPEGFRGARREKNAKSSPQRLAQQEVPHNGRTAQTRYTQNALNPSLFPRKGPGWDPQERLGSIKDGPIRSPTRAKQHRWRNFGKRENANNKRWAHSRAKRQKFNRLSYNLRTFLVPQYISAYIVPAQIPRQVCPKPPIEMGPDTVYSHWENFTHFGNWTPADSSRNTKELGVNTRAGNGKTLEPIIWGPSDVDNSSPSPYHFRERKKPNSMGASQTFWKAILTPTTFWGTQRNFSGGRKGCAAV

SEQ ID NO: 1011694 - protein, 277 aa, Homo sapiens
MQHCTLARDYPEHHTTKRLAPARHHTCMSTDTHAQDTHHPPTSRTHDHYPEPPPGATPRHPTARAPTRFRDETPPTPPPPILLPQPQPANLAYFHLPHRPRTTPLFPLSQHPPPRSLTPLSHPPPLPSLDNKIRDPTPPLQQPSPSPSTPHTISAPILPSITPTAPHPTTTPSSNHHHHHSTHPPSNPPHQLLHPSHSLIDHSPQTSTSYTLALPTHAPTTHTLSHSPTTSRAHYPHSNTSHTYSQFLHPQYTIRPTLNTPIITPSLHTPNNYQAPS

SEQ ID NO: 1011695 - protein, 106 aa, Homo sapiens
MRRRFRGRIQLLWCAESLVSRALRRRRYGRSMDSFESAVDAHCTHEEAHVDTQATRYKPRARCFSRKHRAGWNGKRFMILTICRSKLGLLEQMLPRCSDRKLLMTL

SEQ ID NO: 1011696 - protein, 71 aa, Homo sapiens
SGLFQDGGASSRATGPTVEASECRRKTAARDERLNGCSCRRLASGPDAVFAAATGCCHEARLGDGPHFPGV

SEQ ID NO: 1011697 - protein, 80 aa, Homo sapiens
  misc_feature (61)..(61): Xaa can be any naturally occurring amino acid
MRLRTTVSDPDNVGVAASLSSSVLFHTFGRSITRPLPLRTTRESYKPPIGSLHSQQSTMLXLIRTVLCVPPYYYLIYSTA

SEQ ID NO: 1011698 - protein, 159 aa, Homo sapiens
MRENGTRKTSPGSGARDFHSCSEAKRSRRTENQEGRDSGFLTKYEPGAGPRQVNHQRDKAPSSLWTGRRNRRFPLAFKGQETSMNEANQPRINFINVGSFDWDPSRNSHPIWKRTRNFYNTVVNVIPFAQKEIPQRGQPLKSTVLHDAKIYAIPKCKNK

SEQ ID NO: 1011699 - protein, 91 aa, Homo sapiens
RVLLLRSADLTPGRSVPRAPAGNPAGGEDGGEQRSRRLEQRERRGEGGELSAEQVIAGFNRLRQEQRGLASKAADVGDGRRMSTSLVTRYS

SEQ ID NO: 1011700 - protein, 109 aa, Homo sapiens
  misc_feature (30)..(30): Xaa can be any naturally occurring amino acid
MDKVLCPVGPTEATQSDWAVSNFAPPVTGXRMNPEFATWTPRKESDWNSEGNRNKRVSPYERGISQTQAPLTQRVSVKGRKEAQLRGKFVALTTYKGVPLLRKFVARSN

SEQ ID NO: 1011701 - protein, 41 aa, Homo sapiens
MRTKPPIDTLRHYLGDDNSRNSTIDTKVQGNMENRKPPIMS

SEQ ID NO: 1011702 - protein, 181 aa, Homo sapiens
SGNVFCSVPGTSVCHVPAAFLGPMAPPYVATIVATIKEAQPLEWVKDPLHAHLPKSPVGLDMTSVVIPISSHIPTWESPHAPTSPSRPVGLMITLEALMLPQRCQPQPRGIRLKNLVTIPGTPGIPGWRSSPWGPEQVLGFTSKDLQGQAESTGKTSRVCAQRKLNDQDSSSDVGAFGLKT

SEQ ID NO: 1011703 - protein, 290 aa, Homo sapiens
AAGPEPLKNESPVISAPVKDHRSLGPSSSKESKSYGSSRKLRIKALWYQSLVQRINGSYGFLSRVKESKRPSGPMASFKDEWSHGSQQSVKDLEVPWSQHLVNGSMVPIVTSHLSKGERSHRSLAPVNGGEVPMVLSDLSRSQDPMVPESIRKDEQLRMGTAPIKNQSSMVSEPVKNRKFTWSQGPRHRINDVVVPEQCEQVHDSARLSATCRGITGPVVPESVKNLRPPCSQVLVKDQGPPQSYSRPRNQGRIVPEPLKNRSAYKSQCLCRIHDPLGASTSKRTEGPGS

SEQ ID NO: 1011704 - protein, 312 aa, Homo sapiens
AGRRIDAWRPRVSNGLDLAAQALTRPGGDAGRWPWLGRGLNPAWADLAPACELEAGGPGVGAYSGPNWNGTALYGRATTAGRPGLVLPSRLLTCTKPPECAGALRTNPKDGHLNSTGRYTQLSTGPNQAHTQRTSASGSTSHPEHLDNHSQPWAHNVTSSPEKDKQTNHNQLDLATLTAHTVPHHLGQIPYKGPQRRKARRFSRLSTEDQHHGTPSNLRSDTPLLTNALDTPQQARENARPRQPPTQRQRGPPHPKQNRGRKQYPTKTQVRSRKQTAPQLPTLYREMARAYREGHKSTRTHTDNKNSRRVKN

SEQ ID NO: 1011705 - protein, 103 aa, Homo sapiens
SGLSGSQRMLLPNRMAPVSAGRIATCLANSLTIAPHERSSRKVAMHKPVTKTSSLLGTVPRRPNPYWRCFSCDTGIVLCKRVSELKPIQAKFCHYANVCKGPR

SEQ ID NO: 1011706 - protein, 360 aa, Homo sapiens
RGRAPSLARDAPLDGARAWALSLLAGAGAERRGARVHQSLSPPMGTLMFLLDRLSQRLSLNRGSPGFGQCVGQLVASTARWAPVGPALPSLVHGGQFWRILRVVLRFRLSHKLGVRACHMVCGCVLLAPRRIGVDYHYHRVAVSGVGTELLQRQTMLSCRLVEGQSMVAPELNAEMHAKMIDLGLLWVRLGNWSGPHQDVSHLVVWHPTPLVVYVNASKGNHLTALIRAQAWENNFCIEGDRGFRNVRQNGVPMGNDVSKRYRNVPIHSRPPWCPVKQQTTRGHFLCGYPVGQLNPNATMFKMVFTTQQALEWGAVPNFLRNWRKWQEPGTSKGIHSGPNGKNSTRSPTRELFPGPDGPM

SEQ ID NO: 1011707 - protein, 376 aa, Homo sapiens
RALGEGRRAGAVGVRGCAGADGAGLKTFSVALAEQRQALGVAGSLVHKSPEEEILLTICVHTPTYCDLRKGCYTDVFTKGIMELILTTGHAYTEQGKASGNPRNPNIRLGTLMGPYPFTPRNDTTRPIPLAGQNTLLGTRTIQLHLTRRGKRELLDTNTLLPGHHSAHAAGGDKLERAFLITAAHRPHTLSPTQHGRKKYRNLILGDPNPFLFGMAPSAYRAPFRTEYGPTLWRYIKNSRFGNRHAKASKNLVHRTYIFGPLRGYTTGIWLEAYPQGDRADPQFVEHPNWATWKVSAQGVPTILPHEMRLKLQNRDSQHFSVYNLCTGDTRLGKVNQLPPVQVTWAANRDNMRERGINTSLSTVQKLSISAGYDDD

SEQ ID NO: 1011708 - protein, 216 aa, Homo sapiens
MVKPVRQGEDPFAPWHNNTASIYAHRSSFIAKVGSPRRGGRGQEASQWGLLLAPGSQTTPARCHPFLVGGGHFPPPCGVPSPWKFASSLSGGPFFDRRGDFRSLEKGADQKGVGVVGGTTAAIIAPPEEVSSVPRGEAFFSACRCRPAARCVVECQWPFVLGPEIRNFHLLVAHLTILGNTRSRECGPGRLSRVRAPLFDLPLAPVVPFTKKDFGG

SEQ ID NO: 1011709 - protein, 70 aa, Homo sapiens
SGVWRLERQYVRFNGDCVKLAAADGKGQEVETSVTYYRLEEVAKRRSPCKELWSCDPCGESTYVYPTSSN

SEQ ID NO: 1011710 - protein, 212 aa, Homo sapiens
  misc_feature (194)..(194): Xaa can be any naturally occurring amino acid
MAIALADAQLVPNVEAYWTSIHAVHVDIVMQSFGKEPTLRSSSQYPSHLGGRSPACFNQVDCACQEADSEDRSLGDSVCFANSWLGLSCGLKSIERILIDPLTMILVADCPKPSDAPRVGMHATEIERATYTRSRVVRIRPLDFFVANPDLREVNGAFGPKPRREQGLRNPSIPQFSHAKFRNVEKGLLMYRLXRARCWRPSLARPGLPFRL

SEQ ID NO: 1011711 - protein, 193 aa, Homo sapiens
  misc_feature (74)..(74): Xaa can be any naturally occurring amino acid
  misc_feature (175)..(175): Xaa can be any naturally occurring amino acid
  misc_feature (185)..(185): Xaa can be any naturally occurring amino acid
  misc_feature (187)..(187): Xaa can be any naturally occurring amino acid
  misc_feature (191)..(191): Xaa can be any naturally occurring amino acid
SGSWFGPGIKGFAAQDSLALRTRVHVVCIVRASRPLPTASFQVIGLRVTRAIVKAIPLSFKVHQPVSGWRASKXVKLFGTTYREGTLGPLCFYSFLGLVTIMCCAQHVGSISDSSDDRCDAGTLPAQCLGRVLVSGIGADYGVVSCLYVSIALALWPLVDSTSIPSSRAYRTWDXALCDPSTGEXFXPLDXLR

SEQ ID NO: 1011712 - protein, 119 aa, Homo sapiens
RSVSRNLLVRTVGGGGAGAGPGGGAGVPGAGAACPSPVTSCRACGAPERLFSVMRRRLPRHLSAPRFLLTCLPPPHGPVRQTRRIPSQWGTLPGARIARPRYTYAHSYNHIRHLYMRYS

SEQ ID NO: 1011713 - protein, 208 aa, Homo sapiens
ADGPHCLLRTRDVRLPSGLLAMDADDSRAPKGLLAEVPGAPLRGRKAIGVLTSGGGCSRYERCRPVPWCAWVSTWGPTVVLHLRGLAGHGGRRLKPSLEADMRECLRAILQVGGTIIASSGGAKRLPSTAGEGARLKGWLIATLASKQLDYTNLVLLIVRGNGDPHPRAQTFFASEGGVEVGPCLAGGMPRKQSDSDDRWPPARSRPT

SEQ ID NO: 1011714 - protein, 255 aa, Homo sapiens
SGVWSRACPGMWELPDYPDATVSDRKRHRGASGCMHLIAKITSSLRTCSPCLRNGSEAGTWKWVTPAEAALHVWRTGDLLSFSPRAITTMHTGWWRTRNEAQIDIDAGTTSPRRVPWAPAHVLFACVVMPGGLAGTSIVLPSHRGWSSPQFVAASFYGGMNRAVVHASQFEWRGHGVMEGLGIWVSCPPMPRQKGPASLGKPSVSLAQARVWLIGRVRMVGTGTPVGAGEAELSRLFPFVTTTIGDVLYEQVHQA

SEQ ID NO: 1011715 - protein, 104 aa, Homo sapiens
SGLLRKVSEAGGSSEDNAALGHTAAEDGTPIESSCWSGARISTMKSHSEIAPLHSSLGNRVRLHLIKKKKVKEKKENVFIPFSFLKKYIGLDKGSWCLTVWWAF

SEQ ID NO: 1011716 - protein, 374 aa, Homo sapiens
AESRCSCVWRWRHCSSERRTRLAGAGRGAGRGEVWGGLAERPGTADRAWGAQQTSPDWRPYRSAAPPGAPAPSPARAIGAAREAGLKAPPALWAPGHGNHRARKCGEGARNTAACAEYWRPGGTQNSGGLRDVGRGRWTPKRPGKLGKKFGSFWTPRMDRSSIPMWTPKDIYPVVFSPRGAPHSPWGFYKPSGTLEGRSNGGINRWAPRSADVTRLPAKEPDAHKGHHTKFTPIKRDLPPFLEKGKKGCVATFGVRGSEHYAYTRGATEYTQSCWPPEYQKTKFVAVPKKTAMSYHKHNKCGDCAQTRGEHSTAKKVCATRRMLCRRKIAEFIDRTTLPREWCVETHTTICEGELQLPQTTEERALLGVKQTAL

SEQ ID NO: 1011717 - protein, 34 aa, Homo sapiens
MRQQNNPDRAVKTGRPRDKHKTTGRKTQKTDTRR

SEQ ID NO: 1011718 - protein, 136 aa, Homo sapiens
SGRLPPLLLARGRGRALREALVPAAAALLRRPGLRRFSPGGVSPPGDPPCPGISRVPEPRPRVPRPAGENALSCSSRPGLAPPGHEEGPVRRARSRRKRREEGGRGGGRGRRRMPPRAAAAPPPAGPRLTLTPGPR

SEQ ID NO: 1011719 - protein, 85 aa, Homo sapiens
MSNRRTTLIPTIVNPTSNTDDKLVQPRHMQLASIDTNVNKPGMCMGRPPPWHPGNTSGQLKETPTVWSKSTTLWRLYVRHNDHDT

SEQ ID NO: 1011720 - protein, 189 aa, Homo sapiens
RERASERGFPGRPGPSLHIAGLRRRLRSTIRLTPPKLRPPSGGGKARDREPVANHPKLPSNSHSRRGPSVRRKGPDRTETSGRRNHGDGPNGPVLGSTWSGLRPWLAERNTGGSPGSNDTEDRQRGRNQATGASGGPSGNREARSQNVQMQRGNWDDTEKAPGTEPATDTSRTRTEHENGPPTTARDCN

SEQ ID NO: 1011721 - protein, 319 aa, Homo sapiens
RRGGSRQAVGASDELLLPPLDFLHGSLRRFVLVWPGRAWFLLQTPTGEGLDLTAFHPCSPARVISGSERGRSRGMDRRVSRRHSDRGVAVRLEPSVHCDARPPVRGRCCTRYASAMSATLAGPPVACRLVEGYSRRLHRLSSVRVSYRSACAACVAMLGRLCGVRLGRSARGPLLGCLPLMTSPLWIRLSCKAYRESNPMIPGRHRVGWGDMKTWYKGEACPFRDRMSRRPSHSSIVKDCSPRLFNQKAAPDGAMYDAHDGKHSGYARLLGLSAWEVPERTRRSLALTGRGLMSGQDCTQGAVAHFGGLGLGNRVYPLA

SEQ ID NO: 1011722 - protein, 121 aa, Homo sapiens
MAQKHLESATKGENFREGVEWWDRSPIGCTLGGWARIHAGGVTAVDCGPTLRQEHHKEVHPVSRGRKDTQKRGLVTETEPLGRTYWDQRGPRHPSAGYESMRHTAQEHPLGGDAATTEVSQ

SEQ ID NO: 1011723 - protein, 263 aa, Homo sapiens
MLHRVFAFVALPCVVVAGCCMMSELPCRQVHARPPYKARHCRDTWVPWNPNQRTEGRHRRPTGATVTEATADRDAGRGDSGKKHKRKTGGPPLKDTERRYHKKGAKGKTGNEEGETTKTEQRQKNETDPKEKLRQGSQGRKHTNQEHRDKKNHGGERAQKREGPQTAPARPDKRQPAEHEEKRTTEWERQRTNKGGGRKRREEDNTLRGQEREGGRRGRKHQNRNERGREREEHEREEHGEDKERDKADRDETGRGKEPRREQ

SEQ ID NO: 1011724 - protein, 273 aa, Homo sapiens
RIGPSCFQLLQSGLRRQSIQQPPAQAQHGERRARSPRKAPAANLTHFIYDYNTDAYCGHDSGYRLVPAGYPHSSSTQEGEVQARRTPVSESPDLAEVLYSLSFPLQPLVAAACCTFPRYISACRTCPELLGSLHVTVVRRLVWVTLADSAWWTRSPRRWRPVTMHPKVGGRCKLLYLLQALSRDDSAESPVCIRIPKGLKGLSSGDRGRSIRGPLSITKHSLAPRSFHGDGGEWITPNISQLREPWVPNPPLLLRVWCCVVQHARVAGRPIMS

SEQ ID NO: 1011725 - protein, 88 aa, Homo sapiens
MTCTEDKALSRWPASPILTGAETLGGRTSKGTQYYPYEKGIPQRGESICAQIAIGRQETGTQTSRKRIDKKIKPTKLIVGANRNKESN

SEQ ID NO: 1011726 - protein, 247 aa, Homo sapiens
RECAELSASTLSPAPGLPRHSRLNALLGLDHAGGPQSKLVRALVACKKWTSSRSTHCMITLRRGRAVDELGKCADARPRSKNRPDAAFRGMVLIHGEALQLLVLTDPGMLPTQEGSANSRELSSHFPLVVNIEGASDIKQWRYVLSDLCGLCGLPTGHRPPHASVWLVYDAGAGRLKCRQSPSSVNRIWRTTDGKVQGWRSFRFKRTEAHGPPRWLASVLPWADVAMTNVAQSCYDATVSEEGSAGQ

SEQ ID NO: 1011727 - protein, 62 aa, Homo sapiens
MRRATPENGDGITKYAHILLGVNRMERGACNFPGIPRYTSIGPGLGHKVKRNTLRGILEHRS

SEQ ID NO: 1011728 - protein, 196 aa, Homo sapiens
MDEERDAPCSPDSLVYQIFLSLGPADVLAAGLGVPPDGRAVSRDGVPVGGSSFYTYYQVAADVPRNPAAMSWYEESSGCYDTVPVRGGAERCGNKTDQVLCTLSFSTFRGTQFDVRESKGTATCEGSWSNDPGTSRMMQQRGHAALQCGSLTHKFSQVSTRDELRYVLASEGVPGGRHKFLIRAKIGGISLGEHGG

SEQ ID NO: 1011729 - protein, 105 aa, Homo sapiens
MLMLDARTCCSPFRSAIMIDLPGPHQSTDEMFSEHLRRILRMIACGVVPVTVGGEDESVSDQNGDIDSTSLHWWENASDVKGPDGAIRYPTMLSDRITGALTIVM

SEQ ID NO: 1011730 - protein, 342 aa, Homo sapiens
MLLSLLLLLPNVLGRRRSRWPRGRLPHLGLMLIGPDHRLSSRASEVGEQGYGLAGMGPNLFHRHVRAPVRERDHGDQQLTRAPVADEYAQWTLTGRAAVLSRSSPPGSDSTAGADLMTSSSWMGAENLTKAEACSCQCRPPAPLGLSVALWPSSAGGRTFGGFVPLLWGPGGAGSTFPGPNKSSAMGKELASPWDGEGGEAPRNGYRKGKHRRGMKKPRKSPKNTDGNNDQDTKACHYMDQRENKSQPTSHCTETNYRNLGERRETRSNETRQRKHPQLVTREPDEGRPSQQDMSDIQMKIDNRTQQRQKTKKDKENKKAKGEKTGKKKEERTTRRKKTTTK

SEQ ID NO: 1011731 - protein, 227 aa, Homo sapiens
MRRRGAEKKQLRTPRTSEGAGGVPRGAQTCLSLEPRTRVPTASLGWAQAPAGRGLQLAPSFMARPGPENLASMKSAREHPPAAGQRLDHLRPSKFHTWSTTTTKHAMVNQVTRQKAPHLGQQPEDTTPEDALVQGPVETHLIPQGAATPVDITMAQQESTLPERRRKYQQRAAQHVDCLATTLSAPHRRERGETQPTNRRCQAPPQTDVGRHRTAANASGALQQHPR

SEQ ID NO: 1011732 - protein, 182 aa, Homo sapiens
RVHDAETELGTRLGRSMIPVPGNYPAHASYPVQPPGNQGIPSDALQSASGFSRTPTAIMPTQSSIVLSSGAPIVGSHMSRTIDQSVVSSRASLFLPLAQVCVCVAPSTVPRSPWLHLVHVRYPLYLDLCLHMELCVKEMGINAMCDHEYRVAVGVYVTWRYIRVPHNLLIGIRSLFTNHVCV

SEQ ID NO: 1011733 - protein, 121 aa, Homo sapiens
MFTGKAACPNPGPPERKVLVIMAARLDNFMGCCHLRDVIASEDIYFLNTEGIASFRDHVNQLNQTKCSVIYYLRSNGRIHVITPNICMLMSMLWHRGQNGSDRLARSVTSHIVREWTGNQA

SEQ ID NO: 1011734 - protein, 146 aa, Homo sapiens
RRIALDSRARTLKLSVIPPVLRGTGHRLDPHPQFLHSATPPVGALGGRPKVSSGPPACPLSGAPAATNWAHVEFAARLDPRGTSPPSLPHRQALVMARGLIIGFDEPVVIYAPALPLRFHVPTASGPSHHLSICRRQSHCQVRIGK

SEQ ID NO: 1011735 - protein, 313 aa, Homo sapiens
MENSSSAEYKLAHRSDNQYAYSRVEYHLAPSNHSVEHLPLQIPKNRGSPLCTDLQFREPCRIASQLGLDPDWNRSPGDCELISSILLVRRLRVPGVRSHKAYTSVSVPLPSNGPTLHSALRRNASTSSKDSSFPTFHTMVGLDNPTRPPNMLGQVQGPGGRNCKPGRAIVGARCCRAGDFRNLTGLAKTDKVRVTQKPIELGKLATNPFRTPRFTHLIAPRKKFHWGPSSMPRIDWGLTQGGPELMHHWVTTTGAPELWVRQMERFRRSQAPWALIRASEPKFPQPQNPRDKGTLNPNLLETSKPVGREKLRT

SEQ ID NO: 1011736 - protein, 141 aa, Homo sapiens
MACSYLLYVLCLLTAGLWIVYFIAVDSMTTNFYHEIHAERKPGVKHAPYISIAGDDPPARLMCKSQVMNMAAFLPFVVRCDCSYHSNLKTEEASKTPCAAISQLPSVPPVLMGIPIRKMTLTCGYTSHHAFNKIECNNTSH

SEQ ID NO: 1011737 - protein, 103 aa, Homo sapiens
MLCHSRFLMVPCCHDDCSLLLPTTPHPPAALCSAVFSCGCHVLLPTCLACSMPDLPLLLQPMSNQGPVILISFLTCMGLFWLCPSAPAGCLAMKHHKTLEAYC

SEQ ID NO: 1011738 - protein, 255 aa, Homo sapiens
RTRAEPCRRARVDYSRSLVGRVAAQLSRTCGLRLQPVNRTFSPGDESYHGVAAVPGVWWPPCCLGLNLIFLVAYLGLCMPLPVGDDAVQTEAAPPPCCITWTAVSEPGSSAVLPEGSGYLCEDTRMTNDGAVANLMYSLDDANHNFSGIDALVSGTTQKMKVDLDQHLALAQLEIFAARGDYLKTLKFIQADGGQRKSSTLSGLARVGEEVTNGADQSYPDKTGLRGSTKSGYSKLLLFRLDLSHLPHCRLGWQG

SEQ ID NO: 1011739 - protein, 200 aa, Homo sapiens
MCYRPFFNVRVAIFVVSNWSPKAHIVCPTCRGPCGHPFANLGYSRTWLLQYFSPCKYCVFWDVTLTLQHNRRSKTMKSSVSQALFLVRALVLPVKWHGFSGMLYCPNLMHSALSPLQPLPGQTASTSPLPTGPESLPWLLLTCLHHWQSPGPGPIHSTGSPSTQPGNKSTGHTDPPLALRTTASTTTARPAHTMRNAPAL

SEQ ID NO: 1011740 - protein, 87 aa, Homo sapiens
DDGDALGLTGFDARGSALRLGRDVRRTPSRGITVVPADQEPFVHCHTRGAGQADILDRDGSIAVVGDDLGRDHLASLRAGTYGSARS

SEQ ID NO: 1011741 - protein, 106 aa, Homo sapiens
MWPMAQESVASHCRFCSESRLMAFLYFFSLLNGYGYGCDKEAVNSKVEVALGPGSLVLLTYIAPPEVCRMSLRTNLWVLKGTIENAGQLVRGDIQNSPKMAMCLPR

SEQ ID NO: 1011742 - protein, 113 aa, Homo sapiens
  misc_feature (71)..(71): Xaa can be any naturally occurring amino acid
MSDTIQAAWTLLHEIAIIVIPRGLITKCSKAEMTWRISSRVDPVHDTTSLPWKPGKRRSDSVFKRRAYGEXPKALKVAHAKEPHVYHACRAVSPSNEGKGDRNNGAARKVKSE

SEQ ID NO: 1011743 - protein, 246 aa, Homo sapiens
RNVGVAGHVSLDLSSTSSSCYGRNLGLKHAAREINLRIRQVSKVPSSSIQLPALLSVSLTRVIMPRGQKSKLRAREKRHQARCENQDLGATQATVAEGESPSSAYLLFGDRPQNLPAAETPSIPEALQGAPSTTNAIAPVSCSSNEGASSQDEKSLGSSREAEGWKRRSFKQESSVAGAFLASEDDNDKSQLHRADMIPVVIRKESVHFNEILKRASEHMELALGVDLKEVDPIRHYYAFYSKLDL

SEQ ID NO: 1011744 - protein, 182 aa, Homo sapiens
MADKFPTRVSHTHKHFRQCHRGLSTWCSSSCHRITSFVNRTPSCVSKRRGTGGIFGTLDPNTGFRRHTRIEKCRVVVRGRVGQPVCVLEVHLRRTRAPLIHHIWRRTDQIGRMSEGNLFTQYNVKFSHADRLATIGHCPRTSCGGGSPPWVNNTHTWAVHVGDPRHLYPIVVYVKPVRAPSS

SEQ ID NO: 1011745 - protein, 99 aa, Homo sapiens
MHYQRNNGGEKRKTKRDNGHLALGYRKVIQKERVGQEAKDPDQDSKGNTNRQRRTRHPSKDEEQETRDTGETRAKATNQDNGARQRYKERQENTNTKHT

SEQ ID NO: 1011746 - protein, 122 aa, Homo sapiens
MGVLAAPTGGDTKRVGVTVILHKRGSLSRGCCTTDYCSMGRGPSHGYEAPKEWPLYRGTPCLPILWPRMSKRGIISARPTFWCRPIRETLCFAHRAFVRQDTTPRGRGSFFRPAECVCVDSK

SEQ ID NO: 1011747 - protein, 75 aa, Homo sapiens
RNRTHTRAQEAGGPGAERAPMDARQHGALRPPDVRMPSPVRLRHAEGSLDRTRLRSYSPRNNNAGTHKPSLDKKY

SEQ ID NO: 1011748 - protein, 97 aa, Homo sapiens
MASYCFLSKTEQHLQVLKVTKALKLHDKLSSAVVSECTYRLHQTEYAGVWITINGMFPDHIKADSNQHEACQVVGMAINSRNTYNSCTQMQVAYHKK

SEQ ID NO: 1011749 - protein, 106 aa, Homo sapiens
MVAWFREPLILSIAQEDRFHSRTASRSCDFGWSSTGPTHLTRQTVLSPMENVHDKRAHGDTRKLDLRLGRQEDIRGGASSKISSHFRSTPGCVLPTGCGIHEIEPL

SEQ ID NO: 1011750 - protein, 155 aa, Homo sapiens
SGLKALLCAAGVLAVLACGCVGLCACQPVPRSAGRSLLGCAVVRGWDPVCLAGGSSLGGGSGHAGWCSLAGLVCPPCVAPAELLLRPAQLSLSLPSFALTAGKLVAPARLPGFRDGDHFLSRSRASARCALSRPTVPEPFGERLTPLPPSSPRTN

SEQ ID NO: 1011751 - protein, 277 aa, Homo sapiens
MRHHLRQCTKMAPYRRYWCLCCRKLWVCGRYHCGRQILVPTGQGWIVDLANVLMPRWMLSSPVYDHGIVAKISLEKIDSTQQTCEILVRMILVFGSSFVVVGTHPGVNPRLDAWINMNAEASNVLRSLAGASVLWEPDVGPSAGDCRKGSRRMRLIASNVTIPGHTGGMSEKGRALLALIASAESRTLDGKPISPFGSTRWLGRGARSKSNVWPPWPDRRQIQRPDRTVFMNLSPGPKRSNGCLRQIFERCGLFHGERLVGHSLGKVHFATRQNLLA

SEQ ID NO: 1011752 - protein, 148 aa, Homo sapiens
MQLVQGVQEWQDGCMYQGESGGTWKLVIWHNVSLATGDSYHGQSYRYHCHGRGTYMWPDGIQVFNGHILTVSIEKATGAMYMKDTAFPDIRCQNENCQRFSCELWGQTVKKWLKMRGLTEPQHVFPLPLAPSSPSSPNVVKRTILKPR

SEQ ID NO: 1011753 - protein, 372 aa, Homo sapiens
MTSPWWWMTSVCCCCEADVMDIEAEVSCFRGCCHPLKEACMFVRLISENAAASLGPSCAMPAIALSIYLESPDQCAIARGWTRNSSPRSSEVSIRSPPSMLRERGVKGDECAGRVCQQCWCGLTAHVAGRADCPGPGTPDVGAQAIPTMGQMHASANCTLSYLRLYHQSRLWGDLTLASNGLSSPLYQLRLVGEPEAANKAGLFVIALCIIRSLLQGPVISLLDRAHSMFEAGWQGKPGKYAPTKFMQDIREGMGTKARGPWESKGSTLLAVGKSTKDFTCVDGAPHWSTSWPLAKWPLITNGLWRGVIEQCPGGDPLQVFYPRGTPKIGPTGIRSRALKSRYLSLINVTSSCVLSVGATPVYVAKDSTEIS

SEQ ID NO: 1011754 - protein, 162 aa, Homo sapiens
SGGSRRRRGTSERRLPGAHARPRCGLAVVFFVFFPRAGPGGWRTGLVGRGSERPKRRGCSGAVRSSQREAAGELGEQLGRAEPGAEHLQARARAPPGRFGKKRHQGAPSAGATEFVLQESRRDIVSCVADGSLRLGLSVGGYGQKLHIILGNSSVQVSPSQQ

SEQ ID NO: 1011755 - protein, 141 aa, Homo sapiens
MAALLGAACWAWAVARGPRPPYPAQSSPLWDRVDGWREEMTGELAPRCPGPGGRVGEGETGGWPGLGARDPHRGSGRRWTTRRCTKELDQWVEQLNECKQLNENQVRTLCEKAKEILTKESNVQEVRCPVTVCGRCAWSIS

SEQ ID NO: 1011756 - protein, 157 aa, Homo sapiens
MSADGSFEPLLERSISVTECLSDWRASSELSRRERGLSAGQLTLSGSPQPWATWPRLAKTVNLWGPARGEVEEVVSVRKMSYVYCTLVIHRVGKARGERNASCLGTRISDWPALTWVVRSACREIDTSERHRQTKGAFGNAPKCPYLELKPQSMGRS

SEQ ID NO: 1011757 - protein, 126 aa, Homo sapiens
MALSPLKCHCGGWDHWTPFCGDWAATVFDPLMWAPGKSISVWCCSECGACFPGASRNTHIGYWPNLRDSSWGCDYEYLLTRKTVAFCPACQGKLEGPKLAQRMVEALVGPLESFKSASLSNPGKEH

SEQ ID NO: 1011758 - protein, 90 aa, Homo sapiens
AGWLEVAESNVAAGSPSEEKVSRTAVNFLTVHGGDSVIPKGPAPVFSTLYRCNLVTTEPDERFLQLTPVGRNTRRQTSDRRCRMAVVLVN

SEQ ID NO: 1011759 - protein, 71 aa, Homo sapiens
ADWGSGNGAVTGIPEGAAEATMAERARGSPRPPPGCRDDWTEEGPQSTVTIPHEKDPSIHKPHRYSMTNRR

SEQ ID NO: 1011760 - protein, 207 aa, Homo sapiens
AGGQDVPVTSPKMLAAPPSPGPPGNPAARCLRDPTQGTRAGLRRPWDPSRASQPASDSTWRPQRVYISREPSVAGVRRLSREKHRPGARPGLPRPFAPECPREKRQLHDIPRAGRNPLSRPVDDPDARKTRVAVQLKAPKPKGIQGRHHFNPIIRTGAKQHEQRREHAPGLDTPDEAGQLEASNGHKQAGTQEQRSEGYPPKEQPGN

SEQ ID NO: 1011761 - protein, 307 aa, Homo sapiens
RELLVVPVVLGSRWPLSMTPRRCISLVLPVLTSTRLSVRMSARGPGYRHRPGHHLFCASVSSNMATVEIIDQRPWAIVTTPSYVAFTDTETSSSTTLAMNQVAHEPHAMTHLRRQEADLVRKFDGCHSAVWILNTGLFLGELRDEDGKPRVQVEVQGGDQDLLPMKEISSMVLTEDDSEIAGSLAWGAHCAHRGSLTVPAYFNDSQSQANKDSRHHHMGSSVLLLIERAHGGGIAYGLDEKGCAVRRQDTVASSLTRGLRHFRRCPSWTIEDGIFEGEVHGPGKPPEPLELRPSPLVSHLAEEFTRH

SEQ ID NO: 1011762 - protein, 135 aa, Homo sapiens
SGALACVRVVAGGLVLSAWPREEEGACGVQCEWAGTLAAWLVVSSLGDVSGLLGGPVALVACWCARLVVTCLRWLLLLERCGGGLAARLGGTYVGVAVTVCFGQSPDVGRSSVRRLIGARCLDIAVDCDILYKPA

SEQ ID NO: 1011763 - protein, 294 aa, Homo sapiens
RRPKSVRLDPRVTNWDWGQQSWVAAVLQSAPWPAQGAAQHGLGGSAEAFGLRVSSSSPWRVRSAWLILGLVLCLVCWGGLILACGLPIWRVTALPGPANRSLTAADPTLEPGCGVSCCGACAPGHIAVLLVYDLGSLALMLSRCRAGSGALFRRAAVTAVRYVCAHSLPLAGLRKCHHLLCAHVARAYASLVCVPHEGGRASTMVLAELARRARCHLLTGFCQSIVRPAKFYPTRLVPRGRKTVPNAGLQRLVQSGCGVATAACFHVRRAALLVLRAPEVCTGRPVLSFPVEVL

SEQ ID NO: 1011764 - protein, 55 aa, Homo sapiens
MLTCDSYCKHTKPKNSSLVELCASNHVVWKALRKETLKAHTVHKELGRKLGIEGD

SEQ ID NO: 1011765 - protein, 299 aa, Homo sapiens
SGSAWVTDGKTLSPTKKTKKQKISKLPYLRSRALRGLGEEPRNPGNSSYYSHSQELRILRFSGNCCCEDFWKISDVSVTSDTSRAHVLFVRTLQNDPMASTSPRTVADRQFPQPRADCCVPCRLPIGGPVLQGQSMLLALWCAWGRPTLLSRLLCAPGVFTPLERPLTVVHHHQVGPPRKKKIFSPVVKYKRGENLETQPSATQPRWRHLYGERTCLLIQPADIVGAKKHISFYAHKRISFEHGKSLDAASGVPIWVFLSVDASFCERQTQVNFSFSVVLSAPEKRPLAKLCPSRGDSL

SEQ ID NO: 1011766 - protein, 73 aa, Homo sapiens
MPSMWQTLGDHSKEQHLTVVKSSPSCTPPFMQSNVLIAKAHREDPCCYRGQRIGLVLAKTEIQVVQESGGCSR

SEQ ID NO: 1011767 - protein, 253 aa, Homo sapiens
SGAVGDAGVLAGGSSIEADLAESGTRSGEVDCGVTTGPPSSALLPGWLLGTCALRGPLYSVHKVDPDFQLLDEEVRAGVCYTIFDLGFRFDVAWFLTEHFALHVVQPGHWSLPISLSVVGAEPKGISIFTRAHSIHLVRGDESAPKESMNQRTLGSVSQSLLVSASVPVLRTSIHGKLSLRNMAEPFSATEPKAIGHRNYHAGYSMSGAGLTGSLSNLFCGVCVRIVGSGAALADAQNPSLFVKILIVEIFGR

SEQ ID NO: 1011768 - protein, 167 aa, Homo sapiens
MCVENMRGINMGVVEETVCKGSYDEYGIIRSGLPAQEARRQCEEAKKTIKHGHQGRHTTRKWKRASWGFHNDRAVRQYRERRGMRHKVAVDQCEGAKTKRKQGGTTRGRHQHHNDGSTEERENDRPKQKPGTSEETAGEVTPRVKSNGARRERKKSNKTRHADATSK

SEQ ID NO: 1011769 - protein, 169 aa, Homo sapiens
SGVEAAATLAASQAPRSRRHRRQPVRPRLRTRSRSHPRSPARGSARPPRTVSRCGSASDGRPKIDRIDGLPARRTILVRDRTAYGQLIWVTFKYDGSTIVHGEQGAEYQTFIQQCTDDVYGSLCLRVASPSGDAMQQDGPKVGPHHVVSVRTVMRAAAAPRTGTDQTLV

SEQ ID NO: 1011770 - protein, 194 aa, Homo sapiens
SGGFTLRSTGSAAGRGLRKLRPTLSRGACDVGRSVWKLRPSHCRVGRGARGIFHAPPLCRLKCVGGKRWAGCHLAPPFSCGVGQAAASSSCSSHRLHSDPSPAAWILLPRRGSFSRKSPCASPVSTRSLPTHPLGSKPPLPQVSWLRERQRERGGKTREQAMGGDGESLLEQTRGRKPTFLHSPSIHLWPYVFH

SEQ ID NO: 1011771 - protein, 109 aa, Homo sapiens
MALSGTTLVSNASCRAGLPFVNGALHAGEFVRVNFEALIITMSVVGGTLLREALPVMLAAAAVQEEEAAGSRHRQVQEKASAEREERRIRQEERRAEMKTRSSDESREQ

SEQ ID NO: 1011772 - protein, 146 aa, Homo sapiens
MSPCLPLLQKHETLTYDTTLITDEAEGEQFDFGSGAAVTRSGHAQAPIRPMQHRSVLEPDAKPLHPPGRCRHWSLDAREHSTSWARSTILKALADFARNVSSHIPNYFLSLIELSHRPDSQAGNLGMRLTQRLPPAAAAGRMLALA

SEQ ID NO: 1011773 - protein, 112 aa, Homo sapiens
MTPETNAADEMLQAFRTSETGDLRSCQGDEPRQQAMCRPYFRSDPWGVPSGRRLRIPRGLSRMRGVPQVSVVECLECGKSDESRDGKHGQGCQARAPEGNNFTDSGCSPIIA

SEQ ID NO: 1011774 - protein, 116 aa, Homo sapiens
MTNSPLKSGNCLDPCPAEVSTRDVMLENLQEAGLPGFGDLSAQTLCHLSGAKIKEPCEFARYYETAAKPPAICAPFSQDLSPVQGIEDAVPENLYWEEIREIVDMRIDNYEKVVNV

SEQ ID NO: 1011775 - protein, 104 aa, Homo sapiens
MAVSGPAVRGAWWVHAEARSSRASLGLGREREQRIYLWDVRRQKIIFDFLEFYYSSCQPKAHQSRRKIVNALNESSGANLTLTSRAFYNNVLGEYEEYITKLIN

SEQ ID NO: 1011776 - protein, 97 aa, Homo sapiens
RSPFVLALCREPADRCRRPARSCLRRQRAPLRSARLAQVRFPEPCASSTLPRCAVRRPMLVPSSTPERVPVTETGVQDYHGHNNLMTPYAWLEDPDS

SEQ ID NO: 1011777 - protein, 135 aa, Homo sapiens
SGVCGELRVAVVDMCQVPDSEGGRAGSRAHESRPGGDIEQSFADMSKKKLILRSRPNRMVSNMLGPNRRTIENIPEEDNHPPRGVNKECGYRCGAESKRHRMAMTATEHHRNRNAGEEDMTLSSNYLSRRSPGSN

SEQ ID NO: 1011778 - protein, 213 aa, Homo sapiens
  misc_feature (121)..(121): Xaa can be any naturally occurring amino acid
  misc_feature (128)..(128): Xaa can be any naturally occurring amino acid
SGAVGRAEKTEGGVNDLLQVEKRLELVKLGVPQARTRSSPHVCGASKGQRRDYTLHKVAFDRHRGSVSDGGVSYPGQMTHFLGRWLKALWRDGRTIRGVKSMSTCLLSLQGMTRDVSGAPXLYAWRRXEIPMICQEAEETLSASWCWTVDCLTNQGGSRLPRSSGVSQQLTGLRVPKADALREETGGWRANRVEILQGPSSQLICADDVAKGN

SEQ ID NO: 1011779 - protein, 120 aa, Homo sapiens
MFRVRGCSISRALSRFPLPFPQPGHSRSAGTGSQRMDKRLCAALEQCNVVMSLWVSYFGNPELTDLIQANQSWYSSWFVDLTDQLTSGVTCRRDLLIRSAFKRSPTCPSDYQYPTKSVHS

SEQ ID NO: 1011780 - protein, 183 aa, Homo sapiens
MESGEEKPSDSVHARHSKKTRKINKKPDMPSISGYETACEVSDCVKEHGGLRGQKAYDGNSRRIQLDYGLNARRDDRHKAKSPSCRLRDKDGGSLCDHDVPTSVKDSLLIREARPFVGKDTAWLGHDLKEGACTTWLLTSWRKTFVNVTYASRIKYWIHLLVRNSKLVVDTSVSTINVKAASE

SEQ ID NO: 1011781 - protein, 112 aa, Homo sapiens
MSFFLQREGGLTDMSQMHDPRFNAHGLEDAENGVPELLLEVAQVALCHAHMGSTLTEAKEVSGLWLIRFALNTYSDVMQIIVMIPYYPERTSNTDVLTNDGYSNGPTPVKSV

SEQ ID NO: 1011782 - protein, 117 aa, Homo sapiens
MERDMCDTLEQVELMDAVGTRCAAGCVLAVVERSVLTNPAQSSWGVARSHVGRMLSLTVPYIRRGPHLGPPPPPPPTSSSDLRIGQYPSDDGADTPLAQSDEEEERGAGGAEPGACS

SEQ ID NO: 1011783 - protein, 286 aa, Homo sapiens
SGLGSDPDPADPPYPRILPMADGLYSAQYPGVSSRFARSRVRMACLTSLPRKTLPAALRAQVRTSAQMGQEGWSGAQRHGKGSKERECRKGRSTEGKRAEEYGIYMNDRKKQDTAVRERTLMNSKDMFKCAMDKGIYAEAYMAAGERKSQKRKDKLGLNEEEIQARQGQRTADTEQTRRVSEENAQQQAAPQTQKQREEVASQKRQASKRSTPTAKHNKGQRAAPVYRPAEKPTRKDNKQKEKNEGDIKEHKKRRHCEIMRTITDEHHKTMRKNEKRAKTTTKTVK

SEQ ID NO: 1011784 - protein, 117 aa, Homo sapiens
MRNKIREQNRYDLKTAGPQSQLLAGIVVDKPPSTMNVKMMIMAQQLLLTHLVISQKENLQEYKRTNRERYTKRAKKRKPSGGGITKELLSPWQVPVMVVNGKDDMHDVEDELAKRSE

SEQ ID NO: 1011785 - protein, 121 aa, Homo sapiens
MADDEANVLWHSQTYRPRVQGETSLRRGQPNGTWDQAHSILNVTMTPEVEGDLVRSVNAIGLQGKHLVTSYFMVVLHVAIANSREAGIYGACIQFAPNFKLLSFQGKDHFSIKPVSLGSLL

SEQ ID NO: 1011786 - protein, 131 aa, Homo sapiens
SGVGPSELGVGYNLLVCRLLSPLEEHSIGVGVTRFPRCHLSPLSLTRKGNSLTPCTSLVRRCLTLLRLMHGALHPLSCNHCPALPSEMNLVTQLEMQKSPIFCVTHTGSCRLELFLFGHLGSTPKAGFFNG

SEQ ID NO: 1011787 - protein, 124 aa, Homo sapiens
RIRRRLPSAAVRLPRPLPPSSSDASDRLIILLMTNQSGRVVTSSGVRVIATPCVTQEVASYQVRMQDSAKSCPRMRVPWDCRRLQPSRKSVARTFYVHACAMCVIRHVQPERPRTVSQMLVCNK

SEQ ID NO: 1011788 - protein, 186 aa, Homo sapiens
RSPACASPHAAGLGPWLPTPTAPAQAALGLLRARRCPTRASCGTSSRGSIKTVSGSDTQTPELQQALSNGCETPSALQDASLGNIVRPCFLHELNKCSGARLYSQLLVRLRWRRSLEPGSVEAAFELMIKATVSMPAETERNPISKQTKKVDACCSCHWIIAASFYLSDMRLLSSICGGSCLRNSR

SEQ ID NO: 1011789 - protein, 119 aa, Homo sapiens
SGVIRQPRLPRCRDCRRSLVHSVLNGAQAGVQWRDLGSLQPPPPSRLPWPPKVPRLQPLPSRHPVWEVRSVSAWPPIVWDMRSLSAWLPSLESEERLCPAAIPSRKRGAPLPRRIPSRK

SEQ ID NO: 1011790 - protein, 108 aa, Homo sapiens
SGVLKAGLRLLGGYPESLAGVGSRLRRRLSLWVRDPSVVAGPGPSCAGSRAPQSSDLLQSGGNGYAARRLEMSIRSLSPRPFMLVRYGPSCPRTLQSRAPLRAGMSCR

SEQ ID NO: 1011791 - protein, 99 aa, Homo sapiens
RESPPSSSLSLDSLTLQVICQALASKGSSELQGAGATVCHRAQGRVSMTRAHNKDSLAIVDKPYFIIYLNMGWMRCYASTFSFPRDEKWGLLPSGIVPD

SEQ ID NO: 1011792 - protein, 225 aa, Homo sapiens
  misc_feature (94)..(94): Xaa can be any naturally occurring amino acid
AGDRERGARLPAPLSRLPDPPSPRGLALQGPEGPLDVLPTIERTFQNVLIDELGEYVDEGGPQRMGAVEGAPVRAPWCPRPGGDALLGRRIPPXQGGGWEAVVFPLAAGGPPSTGPRECLAVWTRGALWGVGQRVSRRLLAFLGATLLLGDLVARRGRGTKESPCCVPPGGNCLHSPRGGPQDIMGPGAPPGEACTTHATIQGGKWGRRAQVHAIEDIGFSKINR

SEQ ID NO: 1011793 - protein, 271 aa, Homo sapiens
  misc_feature (105)..(105): Xaa can be any naturally occurring amino acid
  misc_feature (143)..(143): Xaa can be any naturally occurring amino acid
RAWSSCALSAMCYALGIRHAGPLSLCTMKYIEGLLPPGCPCQSTALTWAKVPVDRCCVDRYGDRVRQWFKAPMTMGCADNEITKECILKIGSTADERALLKRVAXLSWTELKAVIVVLPVGSEAQLGGIRGRQLIQFDEIDSXKWSPKDFEMTRQQVEPMQVLHRKEALNDKLDNTWSSGIKGRATVKDVQTLAMQYAWLNPRSKEGVYSAQWADAQRFVFDRAQHLHKDEHRRKTLQVSDWRYNTPLSPRFPMEHSPLKQYFRILQSRGF

SEQ ID NO: 1011794 - protein, 216 aa, Homo sapiens
  misc_feature (66)..(66): Xaa can be any naturally occurring amino acid
MDLGNNDRVRTLGYLTEGPCLTQSCEQCVASFPPVLLSVLWATLEGCQMQVRESSDTCVHTKLAGXFAERTKGPLEIHSHRKARRKSARLAQSRQMKHFHDIIGLAIWKPASMVVRGRTREVPSPMRGHEAACVLSANTLTWSQPETLGQSLHTPRRWSCRWLAGRDLELLHLTEWLGQGGHDFYLMTSTAFDISDIEMAEAKSHWGLLQEGCCCP

SEQ ID NO: 1011795 - protein, 104 aa, Homo sapiens
AVHSSLGDRVRLRLKKKKKQKKFLESTGLDEHKPQQTLRNPVVAVTRAPLLSKAPLRKHGRGRAWWFTPVIPALGEAGAGGSLEPRSSKTSLGNIVETVSLHKI

SEQ ID NO: 1011796 - protein, 276 aa, Homo sapiens
AGCTFELGQFRPPPRALCLVAGRLPCGRPGPSRPPPPGHFQRGRLMLQLPPVCPLAALHGGLSEAGSCLLVGAALTTPGALAGLRGAVRVPGGGSTGEADRVCKFGCPARPSSLSRRSPKRSVCAVVPMAPVPYRGRRRIACHFWKLPRAYGETPLLSRHGLWCALSRGASRSCPSCARKVRPRHVRCAWSWHRVPIAELRTGHRPKSLCYSPREALRLEGTPLGVKAATSHSGEELLNATRANRVPGEQRLAPLVPLCVPLDGERRSYFPRRGVA

SEQ ID NO: 1011797 - protein, 162 aa, Homo sapiens
SGGAGARAVGRVVRLERWDSAVGWSSGARAPGGGGGSCYTRLVLALQIESERMALPVHNQSHINAGDRGSDCTENQVTWETGVSDKARQVENSEVASAAEDRKISEAVKASCTGHGKGKSIRINRNLDGEEKGEYCKPLKDVRQSTQFSSKKGTVQEQKDHS

SEQ ID NO: 1011798 - protein, 280 aa, Homo sapiens
MPRRSGLVDSKTPFEWISSSAHVRPRSSRRYGMVSYCFHWLRGNHHLATSTGAHLSRSLSRSSMGRHPFAWVIALGHKQIQVDPCDLHLGTISGEYVLASRIVRDPIGWPLIAQQLPQECMVGTPSIGQKGLAQRALAVDRVLHDSDIYWLGNACGFPLAPMHSYGPFPFKKAWVDALFASALVLLGCEGGPTAENMNGLCMPRRECKQRKHWELHYATDRLLGLERVESQRARSFARKRKGEILAWIGRNFLVKREQSSCTRLNLAWRGKTPFWGEESL

SEQ ID NO: 1011799 - protein, 141 aa, Homo sapiens
RVSRNLPARMKGSEKKPLLPVRGRHLVDLPSVRSARTLAGLVLGCLSPTLRTRLSCRAQPGGLRGVSCVRPERVCGSTLVVCTRMALLSAAVRLTGSVAPGGGGVEQACNSRMERAHGVSGPVSTYRSRFKAPADDRLGQQ

SEQ ID NO: 1011800 - protein, 269 aa, Homo sapiens
MGVSQVLYRPDSFPYACTCCALARSLPVAIDFIVVETIVSTLSTLGSSKPCVTIGPRQIIVNFERVRSNQIAYVRRMNEAWLCNAATFIPEWSHSFLVPLRFLDPVFKSFFYEAKLSGTFWLVEDFDVDTVGGGRFYTCLGSNSLFGNLFNETSHEPPSFFSVALVPRGSGMAHLKDDFVRKFSSCMRVLLSWSFSLSLGAGLVMGPWSSAYVSWVGGPSNGFALSVVRRCTPGVPGRVCGNDRVSPLLGVEAMVAPTVFADPGVGVRT

SEQ ID NO: 1011801 - protein, 343 aa, Homo sapiens
MHASRKPSSKPCESQHVDSGASSPVMLPFQAAARNEGPPDPMVGPYCQIVRPNCYGTLLTPGTSAEWRLLTPELREPRCKRAVTPCMCIGGRFRWDRLVEDHSLHHTYLNSCTYPSDATWDNVSCFARKVSEWSSELRVVPGMTKGIGRYEQISPLGKAKKYRLTIWYLQLLKADERLTLEPQEGSSPVKKKRFEAEEIRLRGDGPNPRVRFPLQVGPQLLGELKETSAVTSFCGRNLPEGWLNRAMAFRATLPLGGVFFSRQHWYALTGTPLTILDMRVECNRIILSRFAVPLVNLGSVPPHVASALELGAPWHVIHWGARFSQVVKRDGGGGPHRSGGASS

SEQ ID NO: 1011802 - protein, 172 aa, Homo sapiens
RGTAAACVPPAGGTLDPRVLRYTPVPRHGCTMAALKDAWICRRLKEAFSLFDKDGDGTITTRRELGTVIEIPVEQNPSDAELQDMINDALDADGNVDHRASRMFLTMDGPCKDAIGPTDRSEEDDSERSSRDLFDNGMWKWLLVILRDRSMPLTIDDRIPWGEKLDQMMKLA

SEQ ID NO: 1011803 - protein, 107 aa, Homo sapiens
RVVRPGEAEVARSLARLADSPERSVVGRSAMVGRESGLCGRGLRLCRRWHARMVPAGPGSNGTSPRSFFPRIQCGPSGGRGCRPPILNEPCSVRGARPPPCAPVTDA

SEQ ID NO: 1011804 - protein, 69 aa, Homo sapiens
RKGCEAHPGGQLGSERNGVRMDEDVLTTHARSSSSSRELRVGKVQPCSGGSQSDTFDPRTCSERIGVDL

SEQ ID NO: 1011805 - protein, 110 aa, Homo sapiens
MLRTWSRNAGKLTLCSLFSQTCGNVHCNRSHNYVCFFGYPSFKYSHPHHFLKTTCMLSVDRLFSSSSQTLEKGSEKITVKEWYVHRRTIQCLSLIASREVQSDQSFCDHH

SEQ ID NO: 1011806 - protein, 131 aa, Homo sapiens
MTRTIFVDRAGGGGWLAAAVAQCPGTQSRKCGSGLHDGIGDSDCLRGIPVAKAIAVELSRQQSEESHAVNGCEDPGAWLLKGAHQNFIGVSEEFEQELCTSRGHTTTGQLDLGYSEGTFSKMAFEKAHMKK

SEQ ID NO: 1011807 - protein, 231 aa, Homo sapiens
RFTVPITDVTENALKDLDDVMKTTKIIIGCFVAITFMAAVMLVAFYQCCARAAASSTSTTGPLRTVEIINVEDELPAASAVSVAAAATAASGGGVGGDTPPGPARPGARPLSIDATTTWLPPSMAHYSRATPSWRGLRGRMARPWSSSPSSETICVFKSGSKENVQRDADLMAAGPGGRGAVEPRHQVPNRTQYMTGNPSLHQIQSAANWSTAHGKSRRKRILHNMVMRIG

SEQ ID NO: 1011808 - protein, 361 aa, Homo sapiens
  misc_feature (203)..(203): Xaa can be any naturally occurring amino acid
SGGVVAVTRCVRRRSPCSVLVSSASSYWRASFPVFAPSVSNLGYTDVEGQLLLLCAIPPRITVAESPCRVLGSRRLFNQIGVSLKYTAGNKVIHSILQDLVIRLDKGEITIEIARCVDHSAWCGSKLSSRGIQYEARKVHPERIALREKLSVRDAYALVLSRIEGRASSTKNLGRDHSWENNAYIDSRRMRARLDPTGFSFPXCLASSEAAIEDSLFIGMYIRRAPIVAFVGLGAALRNVALSLYSPVGVTPMRGNMQRATITPRVGSRQLGTLMYIGDEGLTEEVLFNVGPQYVRRSGGYEKRLHEQKAYNSSNTITRDPMEGISGRFKQTIRKYSLNWLQCGCLREERSKPPQRNVGLS

SEQ ID NO: 1011809 - protein, 209 aa, Homo sapiens
  misc_feature (168)..(168): Xaa can be any naturally occurring amino acid
SGGRGRSAGRRVLWRLPRLRLAVRALAPVTLGRARPRPAPAPASSRWPRPGCKLGLRRSLYSDHSASDECGVRRTLPSLLVRWVYRQPGTAASGRAHRECMGTVSVLVDATVTETELYYYGINQSTRDGEFQTTSRQGRPQQHTRDNSSGLIQQRPMRSYPKADCAHXNEQFTKKPPASEEAAYTQSNSELYTLTQSNETTNPCATNLY

SEQ ID NO: 1011810 - protein, 104 aa, Homo sapiens
MGLMEPWSENAFSYMDASWMRIDRWHISGFDVYVNDYKGQTYMKALTGKIMKKFNIGQLNERSRERWSNVERRNDALMWVTENNNNGRTKQSLMVDGINKRLMK

SEQ ID NO: 1011811 - protein, 109 aa, Homo sapiens
  misc_feature (9)..(9): Xaa can be any naturally occurring amino acid
MTRIINNPXKISTPTKDIETKNTMDRGEPNMASNPNNNYFKTNSQTQEDRKKMDHPERKHPDCMSTNEGNELDKSLIIHQNNGLRPIRIDEKFTQFSNSCNNIYQTCAM

SEQ ID NO: 1011812 - protein, 67 aa, Homo sapiens
AGSLVLEGGRRGKLNKDESSRAAIHLVEQRLAIGPEREPLAEIYRRQYPSRKMKEYSRTSSMFHVAC

SEQ ID NO: 1011813 - protein, 136 aa, Homo sapiens
  misc_feature (113)..(113): Xaa can be any naturally occurring amino acid
MGSQACEIWDPKSKLNWKPQFAYTLSCQIENRSLNVEILGIKLKENLRVPLKTKIFRDSEKYSCIKRAFSERRKELPIGDFCPEMILPKRENAVVKKKNEFPLGANKVAQYLXKNYRKALVVQEPKRFFGKSLQDF

SEQ ID NO: 1011814 - protein, 102 aa, Homo sapiens
  misc_feature (94)..(94): Xaa can be any naturally occurring amino acid
MVTWPTATYTRYPAATVPRYSVVREDKEGTEQLPTPVNIIAEPCYIGGNLAIHLSSSAISTKVEAPTSMSLSIMFEINELKRIHFDIIKMSSQXYPNLRIDI

SEQ ID NO: 1011815 - protein, 110 aa, Homo sapiens
SGAPPGLARTRSRSLTLLVPMWAVFVLVPAVVLRLPIAGPWQRDKTSKVLQYGLPERTTNKSAAYSRGQLLPVFTSVHRIYVERDQRMRRVEEKQKLHYIRGPHAMKGGT

SEQ ID NO: 1011816 - protein, 191 aa, Homo sapiens
  misc_feature (165)..(165): Xaa can be any naturally occurring amino acid
  misc_feature (170)..(170): Xaa can be any naturally occurring amino acid
  misc_feature (176)..(176): Xaa can be any naturally occurring amino acid
SGSLFLGRVPTERGDADRPVSRIDGSPSAARLRGASMIARTEVATQARFTPGDQVRPHMLERWKRYSCAEDPRGIDYRAWKKDAGAQICDASRTRFMEGIGERQTQRAQCVSKWAYREVSLVPLTCHGGMDSACVTVQLEILLVREIACTSVSSKKPPRGQCVEXSLHLXLAHAEXHQAPMTRAGVVKNSE

SEQ ID NO: 1011817 - protein, 190 aa, Homo sapiens
SGAWPGEAEDGGGGPDALGRKSLVPLSYVRSRPVRSATPLRWGEGQDLGQDKRSVLSYKRAYTSKREPFARPSLQWVALSKAALVLSDRPIDAPSPPPLLCLDARYLVVTNVADMHDLRVSVVRLNRGLIVGFTLERQGLCCMGLGPRRSEDRPCGLRCPGAEDDCAGTRTTHPYQSDVQRWTRKPPDGI

SEQ ID NO: 1011818 - protein, 225 aa, Homo sapiens
RGERYVTGRVALAGAVQLIPGVGGSGGSSKGVSPGEPVQLSRWDRASRKPQMVPAEEDWALNMEICDIMRDETEEGPKDGLRAVTEENVGNKNFHDGMLASHRLRNLCQELRAPGSTCWWPGRTSWRSVLVRTMLPKNNPARALVGHDKVLNLIQVLGLTSFRSVGRSDEVWSPSDEDLQEERPGVPHDVTWTCCQRMHRAPEDRVQLRDQSGQETVGTDSSQQE

SEQ ID NO: 1011819 - protein, 242 aa, Homo sapiens
REIPAGSRKHEMLPESWIGLHSGEHMTMDEDPVFYPVNTLDRIFKSDEASSYGYIHGLAFEKELSRQGEESSEAWAVSDARTERNVDSRAGKVVTSAAICDVNIRVPEKAEVLSRKQRRKPQAKEVKSLARKVARARRHCKTRCSGVDTDDGGRAKEASTSSPQTVPNSGYPKEPAAIVSWDPQSPGEGPTHDLSITDKLINWRCSRARGGDLACSPCELAKTRLQNQDGESHVQRNDRMPE

SEQ ID NO: 1011820 - protein, 247 aa, Homo sapiens
RRRQEQSVKTVPGASDLFYLGKESRETPVFHHKPLSKTGNGLAGHEGWTIALPGRAAGPEWILGVKESMSLGCPRRGNSTKRRVRLEEPLLTAEPGVLCEAYAGHVSGPWVIFGTGIIGNTGLVMCIVGTKYYMRRHLHNPSWANWASGNFTQFIFFLASAGSSSNEADQESGCWRDFSLARIGALYRGSVLWEINNLSTLMCSVHRTGFPLLDTQKYQMVPTQMIAELVPHKSGQTCWDIGWEHYC

SEQ ID NO: 1011821 - protein, 140 aa, Homo sapiens
SGSYTFSRRPGYPVMCVRVGPRAAGPCGGAHCPHYWSYSLDLACTPWTAFHSLLGIPTSLSVLTPGVICARRGDFMPRISSGSLSCELTMVGKDGVSSEDSAISERTIEQLKRSLRQKCDPIQIRIDRRVEAPWGALELP

SEQ ID NO: 1011822 - protein, 109 aa, Homo sapiens
  misc_feature (4)..(4): Xaa can be any naturally occurring amino acid
  misc_feature (97)..(97): Xaa can be any naturally occurring amino acid
MARXSQRSICKRVAAPKHGMLDKLIRCVCSSSIQPVPHKLRECLPLIIFLRNRVKYALTGDEVKKILHAAVSLKSMVKDPKRDITLPSWHSVDCHQXLTKTGENFRLSL

SEQ ID NO: 1011823 - protein, 124 aa, Homo sapiens
  misc_feature (73)..(73): Xaa can be any naturally occurring amino acid
SGHSGDVRPSDRECSVVAPPLNTENSNYRVTVEQEAHEDSSIHWTRVSHVATRRLNTRAGNATTDLGPHTAPXASLCGVKSKVSAPWHTAYDRPPTEETNMALDRAGSKVLHVNASSVLDDIAT

SEQ ID NO: 1011824 - protein, 231 aa, Homo sapiens
  misc_feature (109)..(109): Xaa can be any naturally occurring amino acid
AGSSSGLPPCLPLLRHDPVDTITGAQRLVHLSYRPLYGMLLHKRPETDRLYVLRASAVIRPDSILSDKTKPFHSYILWHNVRVMDTRLATLQGSERLSFPAAIVTPMTXVDCGVLGRVHTRTSRLSLLPRGTDDLGPGSPVHCLLGAGSVRYVPRFLGAGEDPSLHSRPLALCRCSAARLVTLHGSGSVGSMGEMSLPHVALRVRVPWCSRLDWASPNGARRISRGPVLQL

SEQ ID NO: 1011825 - protein, 249 aa, Homo sapiens
SGCDCRRALPRRTSFRIFLVETGFRCVGRAGLQLLTVSDLPASVPGLQTESRSLSPQCYPGWSAVACSRLATTSTSQQPALASQSAEIAASARPPPRLGSEERLCLAANRLRCEEPLCPAAHRLRCGERLLPRRPVWDVRSASAQPRPRLGGEERLCPGAPSAEVRSPSARQTPRRQSEERLRPADRPSGRWGVSPRPVSLTSGDRRWGTVPTRTSQTLRDGKVQRQPANPDNRADWEERWGQPRQSQQ

SEQ ID NO: 1011826 - protein, 278 aa, Homo sapiens
  misc_feature (84)..(84): Xaa can be any naturally occurring amino acid
  misc_feature (126)..(126): Xaa can be any naturally occurring amino acid
RLLLSDRVVCLGANSRERASQHATGRNLGYVAELMCNPAGGPFGATSRLGPKGSADAESRRSMWLLDKHRRVVSGMGHDFYPWXNDPQTSPVELPRRPCIEERDPLGRPLFGIGLTPVLAARFRPXIRCVARNRSWRSIESLDLLPLGLAEHEDRISFSMMTACRNPESFPPRSALSSAVLVRTQRSALLDPRHAGQYSNGVRLTAGVVLKHFRCTFNLSRPGFPMKLIDFRLWRISPTGGFVRPVAAVKRGTKLPQQWAKGLEDLASLEERIRKERI

SEQ ID NO: 1011827 - protein, 362 aa, Homo sapiens
  misc_feature (319)..(319): Xaa can be any naturally occurring amino acid
AEEGRMADDENRAARPGTNAHVARSLQAVLYYFYHITRAAQPDGSRPTWPTTLGTWSAHHIRGMRRSPVHEAPHDSDYLCLSDSHKPKIHGRPIHPSVWPRSIDHPVLKGSEGPLRMNCPQTRLRTPCKDFTCSRGRTRRNLVKRSPGRIHQDIQDVARRARQDRKGPEEMHLGVALAMAWTVHDWQEDPLEKRSSLQYMAARGDRVGGLRQRATVVTTERIPGRFHILVPLPAPPWSLQRFEREAPQGRIGLLLVRPGAMWVRRHLVARGAKDSAHHGPSRPQGQKVGARETPPREIPPLRRIPVVDPWAFDIPDARXGRPGASGTRGAPLSQGIPAAWPLWWFSPWFSLGRHSPGIGGTW

SEQ ID NO: 1011828 - protein, 225 aa, Homo sapiens
RCRASHACSSENLTGLVVLTTCLGQPASAWYEGASASMPQPGELEALAVRVRVMLGWAAVAARVVPLLSQVRKGSGALLTSALPHAVAWAAGMGGGGAWPPAWEAADEAMAPPEEPRGAGNTEDIKAQWAIAQQCVKRTKKRPTTSKRRKATLLHYPEKASPYEGAPRRRDEKGRSDEPECQDATKATRIPFLVAGIPSYGRREQQHSRLRCGGKPRETERTEGH

SEQ ID NO: 1011829 - protein, 123 aa, Homo sapiens
RLFTANWVLPAINTRVSVKYYPYIEPTMGNRNIIVDINICRRLCTPLAFGGNTSTTYLGHSDSHKCSDVHSGTKSNLVEDKMFEQRECVTEHREEGLLSGYGLSSLGIKPDIACSVNDEYSAT

SEQ ID NO: 1011830 - protein, 105 aa, Homo sapiens
AGCWCLPGDSGALGFVALPSVCSAVLYRRGVRDRDVVWLLTVTLEQESAVSRGTPASCMGLDVVQFCDPACHVYDLGGAGLRAPAVAEGRNTVLSPQKFGLGQNI

SEQ ID NO: 1011831 - protein, 111 aa, Homo sapiens
MAEYLISGGTLLRCQTERTSASQSAQSSFEPGGRRAFEPYNWTYRQFSHGYTQTFSVQDHGWILNILHLTRENIDLLEDPASGLYTSYRIGKQRSATCKGIGRMGLPLAYN

SEQ ID NO: 1011832 - protein, 155 aa, Homo sapiens
AGGVGYGRSLRYAALNLAALHCRFGSLSNRQSFALQEADYGIAQDSNDTRVSPALYDAGFYVLGARSEIQSSSVRAWSTSCDRTAVHIWVTVPRLPGNTVPCSTESLLLGRRETKLIGCPRGTPTSCTVNTETGPSSSISDIAQKTVMWRLYGRW

SEQ ID NO: 1011833 - protein, 442 aa, Homo sapiens
SGGRAHAICTPPIAPSHSRVTFSLSTLQQYMSRRGSVIPGPQDKPTQHHSGPVLHDTTVIHREGHAAEQGPPHRDTGHRSTDGTHAPAASQDQQGLAATEPRQTRTDQQRTPERRDGRKAAKKEKEGTRERRAGRGGKQRLPGNRGAHMRGARVGKEGGRRRGEHRQQAVEEEHNARRTQHTTLQTNTRSGRPHVETGRGQAQLHTRLAQRETEERQIEREAQQHDTHDSSSLGTHEPPQTTHQNRPRQERHTAASRTARASGEPTARVHPPAPPTRPTQTETGGAPSDRTPATNHTDARSSQRQPTPPTQTATYTARTAHQHYTQHDAHDRQADGAKSVTPPKRTCPTNHAVTDHTEQGKVGGERQGSYGRSAGEQEAGAKGGRGGARTQPPRARRDAAARRPVTAGAHETRHSTGPDEQAGPEQRVAAGATGASDERDAR

SEQ ID NO: 1011834 - protein, 191 aa, Homo sapiens
MSIEKIWAREILDSRGNPTVEVDLYTAKGLFRAAVPSGASTGIYEALELRDGDKQRYLGKGVLKAQGWGTPDRFKVHHRAALISSGLSVVEQEKLDNLMLELDGTENKSKFGANAILGVSLAVCKAGAAERELPLYRHMAQLAGNSDLILPVPAFNVINWWLSLLATKLAMQEFMSSQWGAESFRDAMATK

SEQ ID NO: 1011835 - protein, 175 aa, Homo sapiens
SRDLSASWSLSAVHSSDVQVALEVGLASLCASEGGSGQPSPQSRLHHLPALWLDGAAGPQRDGTNPGEAAPRAVNGKNWLPREMYSAASTRHWGPQWAWVRQLAWAKRRRLGGNALGNLLLIQVFTLLHTFLPLNLQNMTLSWPEQGTAQVYDASAYGAGRRAVPFQWAATTHIL

SEQ ID NO: 1011836 - protein, 61 aa, Homo sapiens
MENERIGHDDLGATIKVQQRDIAIVVQRENLERQPVCSREQNEHMEVARFTTGVTERQRDV

SEQ ID NO: 1011837 - protein, 200 aa, Homo sapiens
  misc_feature (59)..(59): Xaa can be any naturally occurring amino acid
RVVMAGVLKKTTGLVEIALLCNTPHETADSRVIVTPKIHRWSVGGTIRIQKMQTNIATXITAHRVDQDADSLAYWLYQSAHRDCLKQVRETHGLLQAGADLSREEFGIHLYSLENSETPDKLLRHRHIDSRIGENRERPTGGEGLQCDVVEPKARSVDANSKVGTQWPRLCTLELSPGVEPVFASRCYPVGGDILTWLHV

SEQ ID NO: 1011838 - protein, 166 aa, Homo sapiens
MNHGVVIQPAYKDQIKHYPVWDSKIQGISFWNITLVVMNGCLHGALLQIPIGIWGMIVQDIGPAYTVVCTGPEYPFRYKFSEEHLIYHLLCDCPSSPHGRSGRSLGQGLRTSAVTLSHPYVDHIWYPAIPPYQEPYVIRWGKDANLPWCLQLGDCERPLSKPVTRG

SEQ ID NO: 1011839 - protein, 60 aa, Homo sapiens
MIVKERDVVWSNAKTLDFDVRCAQNRVMHDAPYSGKAFILQGYTNLICLEEKLEHGSGKH

SEQ ID NO: 1011840 - protein, 46 aa, Homo sapiens
MPSKQEDERTPAGAPRERKRGGCKRSAEQRRASTEGRKDREHERER

SEQ ID NO: 1011841 - protein, 106 aa, Homo sapiens
  misc_feature (25)..(25): Xaa can be any naturally occurring amino acid
MENLHGQTALSGALNLNRLLLSRNXGSRKHSPHGNGRGPLGVVYFRRGIEFWWTKAVLQTNFLAGLLAPGKFSEYPGKAVNSGVTDEFTVEALELSVWGKTIAHGD

SEQ ID NO: 1011842 - protein, 117 aa, Homo sapiens
SVGSRWTALRFCFYLRPEPHSCPGAERRRESARGLRGLPCRAGDRHGDLEKLMKAFESLKSFQQQQQQQQQQQQQQQQQQQQQQQQQQPPPPPPRRRLLSFLSAAEGRVRLSERRGG

SEQ ID NO: 1011843 - protein, 266 aa, Homo sapiens
  misc_feature (89)..(89): Xaa can be any naturally occurring amino acid
AGAGGARARSGEDRGHELGANHRGTAQPAPRRGNRRSPWACGAGRVMLGTCLGRSRKALRWKARRRTVMRHLTDIPHDGSGTRRAVRRXVDPWTEDKRTQNADGHQSALPQEALEGKDRRSMDELTMADPGLRIESLTNIVALDDILLRVGAYSLLVICSTVGSRHGELLGLVLWKKATDTGAGLPSQAHRSRCVDAVTITVHDLGHCITGSLRGHENLACTYEPWYERTPQTSIDLSTFGPLPRLGGTLGRCALQRRVETPGYVA

SEQ ID NO: 1011844 - protein, 135 aa, Homo sapiens
MAGRRPSFGRTWTEIDVLEASSAERVETLGVEVTGMGTMGHCKSCDARCSDIRPKTSLCVLAEITVVRETYVASIDYEGWNPRVQQKVRALCTHVRLDLCGGVHQCLYSESALGPYSIHWMTSRLFSHCEGQISI

SEQ ID NO: 1011845 - protein, 114 aa, Homo sapiens
  misc_feature (51)..(51): Xaa can be any naturally occurring amino acid
  misc_feature (68)..(68): Xaa can be any naturally occurring amino acid
  misc_feature (80)..(80): Xaa can be any naturally occurring amino acid
  misc_feature (85)..(85): Xaa can be any naturally occurring amino acid
  misc_feature (109)..(109): Xaa can be any naturally occurring amino acid
SGRNSRAEKCNWHTIEECIRTFYGITFYGRNDLAEERISELKTGYLKIYVXENDKTAKKDKKRHFPTXDIENLSLKKGNXLRVIXALTRRGSTQETGVRQRLFNRKNNXRASNT

SEQ ID NO: 1011846 - protein, 283 aa, Homo sapiens
MREKDRFPPCCFLPVAAAGCACASVSASARAHRVRSVCECERVSVCACACRPASARSPGADAAGFSWGDCRRYTTPRQMRSGGQRVATAGEGRLALYPEFPRERTWRRSLDAVTCVREGTMAVYDGLSEDPQRYRTVEKASTLGRQPWHAELVTLAAHEDGHIRTRNRSYSPLEDGDQRNRAMIYAISIQTVDLRTLVSSETGTEATQSSCDTRKSFVKKSSACGASDWPVFTFMVPGSVVVGQAQCRMSEKSLAAGTFALFQLRPPAVKREKPFQFKAAPYP

SEQ ID NO: 1011847 - protein, 226 aa, Homo sapiens
AGGPGAAGAARGIAVQHAEPGLVLARLGAGGREDAGWASPGLGPRSRLGRAPRAAPSSRRRLRVQGRGPESLRSPPPAPAGPRTALPLMPQPQGGRAGPGAHWISQPSSPASSFPLSAGRPADAEGQALRLIPVRIPGPDRRGRYGATGPEPTEAAAQEAGRRQPCSGEARPLQRATTRKRTPTAPEAPAAGGTRDPGKAPAARAGEIPRNKGLTLDHVLTRWYWK

SEQ ID NO: 1011848 - protein, 301 aa, Homo sapiens
AAWTRILQGIVVGASCEERAGCDARLGGLALQSGVGLPPLLPLPLVGLGIYRGWLRLDWVRGAVTPRVEPRNLLCEGLWAQRPRREARRCARVMCSRRFGGRGGGEPSRQRLGVLPWVRAGARQALALLPCCDACVLPLARAFATASFGEGPDSSQREGGRVLTGQVSPGSHRVGAAWGNMGRAPRAAKNERSRPESVPGPCGPGAWPACRKNETPRGVRVPFDDTRRSAASNMGKGVAPARAGGRVYLKEGKPPDLVTSIAQASGTGLAQKQARGDPLQGRTGGGSAQARGRGLNTNGPT

SEQ ID NO: 1011849 - protein, 225 aa, Homo sapiens
RARPRKSMKGYMHSGSCMHADQKDDYGVLQCSSRPRSGIDYTPVTGPRGRDENPSQSPRRDPRAGKDGARKPRRRVWADSRHEEEEAACEGATACDERLIWHEDDGDEWSPSNESHKQALYRVTRKRSRAPLKGSHRVWYERVGEQGPDWVQRHIALRALGGKPPQVADPGSYETFENAPQGTVNEGRTSACKLRDRTSLEERNATEVRGQAGRTSYERNTEPEG

SEQ ID NO: 1011850 - protein, 77 aa, Homo sapiens
MTVEEASSKCARIYVNEELTRGELDPERDGLWLAVRGWGGSRAVRRAMECPAVAQRVVVSVWGRNCLQDRCGAASRE

SEQ ID NO: 1011851 - protein, 226 aa, Homo sapiens
RRGWWRACGRAARSGPCSPVSDAASSLSRSELWRAPHPARPAARGGRTSRWRNDLQYLREGLVETSSARVELEPEEVRAIGEKVSLAQANDGEDQGQRRKAIKGVVQRQVTLIQGACRNSGSSFTGAQEPGLLKTPPTLGSESKHRPLDELGRVLEKLKDYPCVREHQAGARGRMREEGRWGLFPDDVSSVSSLLLFNNTENLEKKYVFLDPLAEVLVATEPCDAG

SEQ ID NO: 1011852 - protein, 270 aa, Homo sapiens
  misc_feature (90)..(90): Xaa can be any naturally occurring amino acid
  misc_feature (92)..(93): Xaa can be any naturally occurring amino acid
  misc_feature (127)..(127): Xaa can be any naturally occurring amino acid
  misc_feature (131)..(131): Xaa can be any naturally occurring amino acid
  misc_feature (198)..(198): Xaa can be any naturally occurring amino acid
MMSTMVRGHVSLIVLLVVCVHRSRVSQQGDKPWCRMSCTRIQYKVPKMDWNGQKSVKKGMHVPEPYCEDTTRTRIDIYNTEMHVMAPHPXRXXTEALETRTICKDVTRESRFRLTSMNRHSKWFPNXEIAXAIALVALIGCYLHLHGEVVSYSPYVVMAQTWGWPQAFQLFTPSLSSTIPQDVVYIGRSSGGKTDEPXQNCALSICRGIIALDTECPIATGTIPDRILGPLAAFIEARYSSLVKGGFRLCAKQRSVSGETLLLGTSKEDS

SEQ ID NO: 1011853 - protein, 114 aa, Homo sapiens
AESAAAAAAAAAAALQSGGRGQAGVPSLPPSHAMSQEVRGTGPPRSDAAETSSESTKCKRGSMKKGEIRRTEGEGAKGAGIEGGAGDGTTTEVEQSLNESNDTETRAGRRRARE

SEQ ID NO: 1011854 - protein, 197 aa, Homo sapiens
AGSRLSCTLSRRASLMGVCCILGCGRTESGGGRPHLAPRCGLENSEKAEGEGEREREGTRRRSASITSLQDVLEAFPVPCHGLAVLVKVAGKPGKNRSAGAIHSPYRGRQTCNRTRRDGCHHDRGGTGLQARRPWRSHERAVPSRVTWCKDRSPPAGTTGDARRAAGSRNKRQPISAYGQSNSFYMPEGPAERRRRE

SEQ ID NO: 1011855 - protein, 259 aa, Homo sapiens
  misc_feature (248)..(248): Xaa can be any naturally occurring amino acid
MASGMCKRLVFAGETTLPEPVFPFQSVWTHPITTMGVNDWSIGVHEQELHTMSQIEEHQEDYDRGAIRIEPLAKDYRQYYERPIGASRCDPHNLCAHSSHLRHGEEIRRVILAKLLFLIHILDDVGRTIGNSPQSKCMAIATKIGLGLGSRRGTHTPGERSAKGTHIQVRTQRTATCRYFTCLVTDTISETSLAGSTCICVCVTLRQVDPDEPGNLFIATILRGRQHNLVDTLSYEGSSGRQNRGVPXHNQSRFDFPNS

SEQ ID NO: 1011856 - protein, 132 aa, Homo sapiens
MAYNIRHTKKQPEGMTTYDFDDLRETRKDRGQQGDSLLMLQWITVKDRLVNNVRQIALNNRTCNERFHTAPAVMHHIGSSAIGRPGKLFEAVISRPCNCDLSLLREESNGRLCVLKLHVAWDRDVGVLQVLP

SEQ ID NO: 1011857 - protein, 124 aa, Homo sapiens
RGGSGQSTVDAGRWVRAECRRGLTPNRRSSRTVPRSLPGSRARLVCGPRSKRGVNLSEDLEWTSAIMCEPGNWNATKYDVSQGVLMVVGYRMSAIVCASVDMRSRAPSDLRSLHCAPTLRIRYV

SEQ ID NO: 1011858 - protein, 256 aa, Homo sapiens
RGVAGRGGPSVRGGPVVVRAQAEAAPMPVQPLGACWIAGDDGRRWCRLCVGGPAGLATHGDTWLSLAVSEAVAYRGVHGSPCQETDSAESGLVAERSPTGWTAVHPFCHSQAWRVAYALYTVVVQSQLPGVQASQSAVTRLRCPDALGGRRNPGVSANIVASAALFNNALTHGRLGTLGVPGSGLSTPWMTQTVGVPSLHRRTVLRVHYGVAFGFAGFTPKVHPKFQWTCPIRFRGRLRLRETKSKYVPQFAPRVT

SEQ ID NO: 1011859 - protein, 187 aa, Homo sapiens
MLDVGRGGAESGPWAVWGTGSAGLVPCGLAAMVLLPVYAPRDEWRACQMRSNDDLKGTCGEGPEMKGRRWEGESCMLVGCLGSQGKEHRSCMLDRRIIHVRMAYSEDGSVQAATVAVCLQDTSIHGSIMVHCQSPWVDLPDSTLADSPPEAERHPWAAIGAVLHRPRSKACSLMTVSGVIQRLWADH

SEQ ID NO: 1011860 - protein, 249 aa, Homo sapiens
MIGERAQRDMEKNQNEPNGQTPKKPLTRDRQAGSQEAIEYSQPSRNLAPKSAAPGASGLRERTQSTHEGRPKNRRTEIEKEARHTSERESRGVRKAEEHQRGRPQGKEQAKKREAPQLHQGTRPEGQPKHTPSGGQYRHEQPNATHHTRKPGTTTARGKTPRHYHTPSTGRQKHEKDQQPRTTPNRRQTYNMNTNAQDASAHTAAQPHDTTTSNTRHNPKKTRPNRHRNNTNQKTPSEPISNNQSEEKQ

SEQ ID NO: 1011861 - protein, 141 aa, Homo sapiens
RGEAGGGRREVLGPLKRPPSRGSARVWAKRVCEDRGAHGTSPDSRRPKGCQRVTRQDGVPGNKNTRTMERAQQPRDDTGCMKLEDWETSMDRRRERDAEESQEVAGNHSKIVVRNECNEIEPIRSITRTMRTSKKAKLANE

SEQ ID NO: 1011862 - protein, 107 aa, Homo sapiens
MVTQFTVSMIRGACVTCIITQMRSGGGRFRLCRYACGRPLAWTGTCHVTRSHLEVALPRVTRVAGLVGMLFILLTLALVLGRALWLDHLYQGKHLPRCSSMRVGCDT

SEQ ID NO: 1011863 - protein, 199 aa, Homo sapiens
RVRASPGRAWPCPRPLASSRPASPASPRRLFRARHGPPQALCARVRHAQLPKRQKPTLKYHTTPGALSPRSSGPRGVPVACSRAKPRLHSLFPQLRKPAGETKMLLLIRINSEHLSHAVKLDCYGARRFRRGIQPNSKLEEVPTSCEIGKSDYLNAQAQGDAAHQRARDSGKQGGRDCTCQKGNVHEEDRKGNQKKSVK

SEQ ID NO: 1011864 - protein, 252 aa, Homo sapiens
  misc_feature (163)..(163): Xaa can be any naturally occurring amino acid
RGVAPFMTEGRCTRGAPPGTHAQNPTQPVKSKSTGGPSPSSRASHPMRAPIRSTYRQPTMSFHYPSNTLSVQHYRSAPWTSYSSITPLGHPHIGLDPEVRLRVLCQVYSLFDRRYVHSGLPTVFSGAPPEQVWAKFPVTHVHPYETTHSHSCVLPRPDLRTLXYSLGTERLQGDRPHLKCKRQVAGQRVQGPKDDGSTKRAVRAPPLWCSEPVERPVITTSSVTPYRVNSDEEWLVYQSKEGPQNVAREFAV

SEQ ID NO: 1011865 - protein, 156 aa, Homo sapiens
  misc_feature (103)..(103): Xaa can be any naturally occurring amino acid
MADPDDAHTRWQLKCFLCHTLLALRDIEVKRQIPLCVFVLEYKWSTGGMRWSAQKGLRIAMNPQSFPRHLVIDYYSLKWFRNLIIGGVYRPSTTKLLMHDVHXMTLCEGDCDTVHLGTTLSSMRSRVSHSTIWLMHETGRTCQRDRAELTSTNLQP

SEQ ID NO: 1011866 - protein, 102 aa, Homo sapiens
MAKGSPHPKRRDSSGERPQGRGGQSRETEFGGPTKAARKPVAFPRTKRQGPRDHEGHRRKRELTHFNSNSLKVAPELRSTRQQSAYRSAYWSNEGGNTGPRG

SEQ ID NO: 1011867 - protein, 85 aa, Homo sapiens
RNQNNGICRQPGMELADDYSTVKYTQEWKTKALYALTHKWELSFEDAKAQNDLMDFGRTPRERVGRQGDADRKTTTPEYIVYDYV

SEQ ID NO: 1011868 - protein, 149 aa, Homo sapiens
  misc_feature (46)..(46): Xaa can be any naturally occurring amino acid
  misc_feature (111)..(111): Xaa can be any naturally occurring amino acid
MVTCPQQRCNREGSIEHCSECELDGCGSPLLGERESSDHEVNALCXDQFSRELERYARTCLEIAYSSFYSEEVAINNSLSLKYETIVQNLSELVDAAVRGGCTVERYNSLXDTIAARERLRWVLHVYEAPVGTTVCARTDNELAFAAWP

SEQ ID NO: 1011869 - protein, 179 aa, Homo sapiens
SVGARGWRRKGGRAWCRWSAAPPGLGGGPREAGAAAHEGAEHRGIMELYRAGLRAEGERVSTPEVVPKIRGGTCWKLKRGPHFARHYQIAKGPSVLPGARSASECRGPQEDPLRARVLMTTTVEKRVPKNPEGDEDNNGKGGWAPSGEAHEYFVGPQMVPGKTRIGKDRLERRNRKGQS

SEQ ID NO: 1011870 - protein, 271 aa, Homo sapiens
SGSRALRREALRGSTLCPAKPAFGARLVWMDPVPGDRLVAAGWSGLARSALCTPGRVGASDWRLVSVTPSHVVAALHYAFGSMLCAQNLWLALLCLEFFWIQSQQNPPDNVVVDIQVVCGDKRPPDCLGCASPRTMNTPNVIPRSTGAPWYETHVLLKAVGTSECHGPRGVLRCPVDMGKDQDRCLDTFLYVGPVVRLCQSWCQRANGPERQCPIPEVSAGIMQGSLSGWQDSQTMKGGLPGADQCPRVMLLGLHFCVKDIDSICEASKPL

SEQ ID NO: 1011871 - protein, 136 aa, Homo sapiens
RLEDGARKQEPDAINVNTQQNWIAAVGKAPQDKPFVGKKNTSRDAQAAGVNSVIGGQSSGGWKPRKAPADILLLGHMPASSAPSSSRALPHSNMHMRCHTSVENATTSCNDLRDWLHFRVHRKLSRKSMKRIHPGA

SEQ ID NO: 1011872 - protein, 126 aa, Homo sapiens
MPKGAAWVRSSAPSRGTARTSYLVPIDCCLTPLVSRVYSSGQVAAVRALGLSRPWGSEASHGVVPGAILQRMEHCCVSQRWHVAPIYSLQRNTLKRRSPWISKRYSAGCFPWCRETQTVWRIVARL

SEQ ID NO: 1011873 - protein, 245 aa, Homo sapiens
MKPRPAGFVDNKLKTAESSSIDYGREKKEMLVGFRRKVFSIISSEKELKKFNRIREMNIWQKGRDKVKRIMSILKAILMMIQVWKTTQIHESANLLVNMFPACLVYRRRIILMSVSDTPEMEQRETTLFNHALNKFHKSGSIPLKTPAKDSEGGMVYGLESPSVEEQTVCPWTCHVRKVILRKPIHCRYRIQKILLYRRVTMKRKGKARAIQEANRTHRRSSGSRWSKLKLSYHRELKPGGRMPG

SEQ ID NO: 1011874 - protein, 134 aa, Homo sapiens
AGSRTSPMRPDPEGTWLCNLCSVCAAGGCKKLVATLPDPWMHVCQGDDGDKRQLVVSQSAVGSAECWCECQERHESSTSAQDREPRTVLFTGDSGFSVSPFHGGQFLLASQVTHVRSPLAAATTKFVTYLLTSA

SEQ ID NO: 1011875 - protein, 75 aa, Homo sapiens
RKDGSGWSWPSEASGIVSAAADPPPARPGVCRPRTVLYHKNGCGLIMKILYHVGPIDKHYLKKCCEHATWIGGVS

SEQ ID NO: 1011876 - protein, 191 aa, Homo sapiens
RGCGAARGGAGRDARSSPPASPRAMAAGPAPPPGRPRAQMPHLRKMERVVVSMQGPRPGREDAEPGPAGYRHSPRGDRQRRRAVVGPEVLLSSEEEALDLGAVLVPGVVTSTRCATPRSLMLRADETPYRFQGQARGLHGGSRWGPGRERERAKALHKSGEHREGAGHEGLTAKSGTGGIRANGWASTDID

SEQ ID NO: 1011877 - protein, 272 aa, Homo sapiens
  misc_feature (41)..(41): Xaa can be any naturally occurring amino acid
  misc_feature (64)..(64): Xaa can be any naturally occurring amino acid
  misc_feature (79)..(79): Xaa can be any naturally occurring amino acid
  misc_feature (87)..(87): Xaa can be any naturally occurring amino acid
MAGAGMLGASGVVVGYLHIKPGYSQQVDLRTHSGWFICETXVGKRRDDKSQAACKTSQVRPSRXSLTWGVHPGALSKTXQHYAMASXKGSSAPHPWSGEIYIRSRGLHLGALATNTTITLFTSGDKPGDPWELIFGHHHESSVCARQSVVGQAGGKVEVQAVMGSREPIDPRGVRILDALRRGRVATNGAWEWEALRVVTQGARPGCGKWTDGGTLGVAMLVHIGVAESSAPTEGKAVRTKQAWRLAKGFLPPKTNLGNSKGYSQHWEFNEP

SEQ ID NO: 1011878 - protein, 258 aa, Homo sapiens
SGRLPASPPVRSPARWGSMAGVRRLLWGPRCRGRSAFWCLLLLGLFRPPPVALRAAGKGAPSGLRAASPSLAETGAPRRFRRLSAPEVTAAGGGAGAGAGRWRICWRPKRQERARAEAQEAEDQQARVLAQPAGLLWGAAPVTSDSGIMGSGRRPRRALQLQASLCASVSAPGLTPGDLAGQPCPSARYQAWGSDAWTPGRTYKGPVRPADAVGGRAEEDTPTAGTPETVREYLASATDTSRANAKCPERRWEPREGP

SEQ ID NO: 1011879 - protein, 197 aa, Homo sapiens
MRVVTSISWTYPLAPESGEEAKVARSSLSIAVSPVYAFPIHTRLCRQAAPALEGQHMRTTAYVLWMYNGKKATGARAGEGYGILTEDLYPTTGGRPFRGYPPQGTHPGTGQRIPLTREGYQVQPSRGKGPNKSLGKNAGGAPRPGPQPRTNPISTQKPTGLFLRAGSRTGRNPKVIRAKKLQGGFFGDRSITGRYWF

SEQ ID NO: 1011880 - protein, 219 aa, Homo sapiens
MADPGAGHSEFGRPKSVRTIIAPMRAYGGAPVKDETWADVCINDLCNGTWALHAVAWDVLRVSLIYGALVPLALATPWCLDSAQTDSMNADLAVTRMSMWQDSAAATGTRTVGGPCREGCSDDVAAMVVRVMVAAIETWLTLSRTGGRVAAGVCRDGAHCCEDVRSLDAAAENRERCVVRVPCCDVVVAAVGHAVGLLVPHSLVQFDSRKIERELCVLD

SEQ ID NO: 1011881 - protein, 467 aa, Homo sapiens
AGAPLRTRDRTAPLLIGRGDCGPSLSFPARPLTSGLIACSRGAWPTRRCPRAPGSWVRQPRRRAHEVCCWSCGRRECADCAGVLRDRVGPTLGALPCPLPSTRSRSQAHCLVDLSTTVPFLIAFLEPWGDVHSPRVSYLYVTNGYTKKGFDVRPYDIAKVRRSMRSFGWVYSFSYVTLCGHYRCHSNLPWWRSVQPDCVCRGSRPFCLVRRWPSLAVHSLTSVLIALLAAFGKVLVPSAMGAFAALRGVSLPVPPGPLRSVYPTSSCFHQGACPEYAYSVSVLSRGSITTATRRAGLATMAFLGKAWVAGGLPGSDTQLASLGPSLNPSLRLLRERSGPPASFEPEEQNCGDLLAARLVVVTIGHAERYRGGFVCEPPGWEELGKCPAPKGELTKAPHRQTAPFPSPRVHGAHLPVLPPRQTRGAPLEFWGGPARLRLLVRTRGSRVSALVGGNRTQVTLCRKSPCW

SEQ ID NO: 1011882 - protein, 136 aa, Homo sapiens
MRLIEHRRKGARIKGSKRKLESSIASSGPMKKTGDPRVRIESFVGDISETFSRPFPGIAPPVLGREVHSRGGRDCLFEQQRSRMDRSYLWQWKRHTTMISTLGGLPLACEVALRRTTGGVPSRGPSMGPRIYFSNS

SEQ ID NO: 1011883 - protein, 37 aa, Homo sapiens
MTGLINMGDRILLILQGTFSKRWVHWRNTRRRILCTD

SEQ ID NO: 1011884 - protein, 35 aa, Homo sapiens
SGYDPLGFLGLDCCQTRRVFCPCRQPVATQWSAVG

SEQ ID NO: 1011885 - protein, 150 aa, Homo sapiens
RRGEARPRACGSGREEGSRPCPDWTCACMRGSHRQRCLPEEAAPRRKMTDDRGLRALCAGYGQRRQLLLQNAAAAKTQGSCGGRAAGQLVVNPGADEDDIPTRPVSSNGRASVDSDTSTVKEKAEARKESAREKQLKEDEKILESVADGP

SEQ ID NO: 1011886 - protein, 112 aa, Homo sapiens
MAEGRSSGPVTWREPAALAPMEGGVSHRLNKSLPAADGGSGDGTWERRVVVSLDPRALLPLTLHRGCLDAAQDLCGQTLTEAFVALLQSSSIRYLQAFPYDCRRVLRIYRHR

SEQ ID NO: 1011887 - protein, 152 aa, Homo sapiens
MSKGPAVGIDLGTTYSCVGVFHATENSRDNCRMIRVNQNALLSVCLLFTGHCKLVDSVMPLEESELAMEPQSYDSVVDAKTSDWTAEFDDACRPRLDDESIRPLYWMAELTACRVSNGSADVELQMGRRANTRLIVRDRQVCFCWILDEKME

SEQ ID NO: 1011888 - protein, 73 aa, Homo sapiens
  misc_feature (47)..(47): Xaa can be any naturally occurring amino acid
  misc_feature (51)..(51): Xaa can be any naturally occurring amino acid
  misc_feature (54)..(55): Xaa can be any naturally occurring amino acid
  misc_feature (72)..(73): Xaa can be any naturally occurring amino acid
RAASPGGARGHRVPLTEACKDSRIGGMMNDSGCMFVGLLAETWESGXQVLXGTXXGLETNGKLQEHGSNQGXX

SEQ ID NO: 1011889 - protein, 170 aa, Homo sapiens
MAPRLPPCRWARWEQGCPIRRGDTTAGAASSLSGSPDVMHRAVLLYEYVGKRIVEPAAHRGPRCLQLGVASPSTFAKAALDFVVEEDLNGPSHLLLHPEVRPGEPPCRRYPGAACSRTPGLQRAGSAPCRTSSTWRFAWPHVLSGNPGSHLGTGAQRLFCRTLICAHVPD

SEQ ID NO: 1011890 - protein, 37 aa, Homo sapiens
  misc_feature (1)..(1): Xaa can be any naturally occurring amino acid
  misc_feature (9)..(9): Xaa can be any naturally occurring amino acid
XENLADLYXFERRRSNVVVDRGVNPRVIRSSSIQKGA

SEQ ID NO: 1011891 - protein, 207 aa, Homo sapiens
SGRVRRGLGGLRSADPGARLPAPCEGARGPRGAGRSPPEMRKLRLREVTWLARGPPASVNPHPASLDDYLKRNNTQRAAQQCRDPLCPHHHPHPLHPTVPMSPITAPCGAEPRLSTQEVSITDGYVPILGNKTLPSRCTVWMSAVSTAGTTGPESTAECQPDMMHHMVSVSGNKHLRVWPSVCPRAERPGVVTDPETVISGAPTRCK

SEQ ID NO: 1011892 - protein, 270 aa, Homo sapiens
ERLNPSVGKEGPPCSPCWLPPLGSGSRLPHELPMYKKEEDRARGHKPVSKKGADRHKEKEQHQQTAETDNKRHNTEYTRRQERKKSPKRTQKRPAEARHRAPSKHRPAEPPGGKDDNTRTGEQKTKTRARPQSRQRRTQSVEMHNTAQRDKLGRTREEKKRDTRRTNKRKRKRRQKEEQRTESDTKEEKTDNKKRGDDRNSKQGRTNRMSKRKQDEHSEQTNTQERDERQCEMKGAERNKRQGKNNKRNTRRANKTETHNPAKKQSSRKK

SEQ ID NO: 1011893 - protein, 109 aa, Homo sapiens
MGYWEAGLSARGSRTYCSPRRRDCLPSGVVLRVTAARAAASHLGQCGRSITLVQIQVNDSGDSSLGADGNAWKEGSQTYDVVSEDLVMSSKSDVRPSQYAHIRRLARLL

SEQ ID NO: 1011894 - protein, 148 aa, Homo sapiens
MTRFEPVAQVFKRLYYLQGVKLKPGTDLEAVAESLSLMASVSHKERMDVPCEYMSEENTFVLDHLRVWAGSAMLAPQVAIDWAAMIMSSGIDECRSDVLQAQEDLRDHADAFAQVLYINVNDGGYKYLEKGLEDEVIKSIAGVFLRKG

SEQ ID NO: 1011895 - protein, 258 aa, Homo sapiens
  misc_feature (201)..(201): Xaa can be any naturally occurring amino acid
AEPVPGRERFQSGYFWWDIERANRSERSRRFFPATVFAPESEQEAVKVVSLSLEWSLDRVVHGGRAVKTSTPGSSRGSRQARSGALLGTRETTPMTTRLAITPHAGLVQLTEPHGRTQVKGRQAFQRAGVSTLVLVNVRVPSMTPSHKGSTGCPLGTYTFSAGERRFRTVGPIRKCSWTVGTAAATGTPARGLADIGGGHXGTDRADRHTGRISAGTCRVAGMPGRAANGHEGAGEAEDRMTKRAEEERKGHAGPADG

SEQ ID NO: 1011896 - protein, 202 aa, Homo sapiens
MKGQDTEQMTNADWHAVCFHGWARTTVECPSRSYKHMVAVCNSLSLLYFGLQRGSLSRQTQNGTLQQNVYSCKTIYGYDTAFAEGRANGSRSKNLAVTVDLQDSAFMSTDFSSRFSHADVLRPIRHSSDMHFGTVPSREQFPSTGAPLRWPALPCHLGCMVLTFHSAETSSSKFFIGTLQVNVECNDDCGLKGEPLPAPIPI

SEQ ID NO: 1011897 - protein, 71 aa, Homo sapiens
AGPTPETANVDLIPEIPHGYEHLVKDATVYTRCTSHNCVLLDSVVAGQLLVYEGGAKISRKMLDPTEARRP

SEQ ID NO: 1011898 - protein, 121 aa, Homo sapiens
SGRAGAGGDARQLTLLFCRLRLVTDGLQEPFSLRGAKMGNSLKEHKLIGPSLREGSRHKQIHRHTKDLLIAVKCLVTSEASGLLCVSSQYVGNSLMCSDERCIFVGTDPLEGLYAFNKDEK

SEQ ID NO: 1011899 - protein, 212 aa, Homo sapiens
RIVSCCRCLQQDAALRRGGRRVLSARSSVTAGRWGSSLDPRSSPRREHWPRPLEPRELRELRLGVPRASLPLPPRAGDAATDPIPPLVPGRPGCCWLGLLCGGRGSGTVRCEQGIKPLGVEPTYHGSRSLENDNTVLLDPPVIALDKGCASCDLQGEIRGLKIHGQNVPFDAVVVDRITGEGVIRVQKRNWTVSCRTDYSSTIQAYDGGKGP

SEQ ID NO: 1011900 - protein, 156 aa, Homo sapiens
AGPCGAGQQTVQTDTRGILAVSGNETTKTDAMTEADVNPKAYPLADAQPSRNVRHNCDLDFSKFMETSNAAFGNGAELRPLKYSFNQGAISDVHRDGMQTARADWRSLLHLPLLCEDENVTHDDLVRCQAGPWGEPVGSPGLSSPVAVHHLKKARS

SEQ ID NO: 1011901 - protein, 156 aa, Homo sapiens
RFYARGFDGVSVSHESSPLPDMGPFGLPASEAAEVRHRGKVKSFPHGFTRPSLVQPPEHFSWRLHGLGMIHIVRAQQSEQAWDPSVTNVSEGGGRCDHCHRTTTPWLSLMGIDGCYVESTHRSCPPCNFKTDLLHVSDIEMMECTEVLSYDSNLRI

SEQ ID NO: 1011902 - protein, 273 aa, Homo sapiens
NIPAPTYDEGGVLQAHVTNLDASPYLGRLALCRVVSGELTKGQTVAWCKRDGSVQNVKLSELLMTEALERVPAEKAGPGDIVAIAGIPEITIGETLSDPENPVPLPLIHVDEPSMSMTIGINTSPLSGRSGDKLTARLLKARLDQELIGNVSIKVADTDRPDMWEVQGRGELQLAVLVEQMRREGFELTVGKPQVVTKTIDGKLHEPFERVTIDAPEEFMGPVTQMMGLRKGQMMHMVNHGSGWVRMESSSQPVALSASARGSSPRPAVRPSE

SEQ ID NO: 1011903 - protein, 149 aa, Homo sapiens
  misc_feature (57)..(57): Xaa can be any naturally occurring amino acid
  misc_feature (108)..(108): Xaa can be any naturally occurring amino acid
  misc_feature (114)..(114): Xaa can be any naturally occurring amino acid
RRLPVWRQPSGYAKMGALQCYIHGVYRERSISDVMRFLQLRVLMHGSLPRNASRALXRWAPRPYPGLHKAAPDSALTVGRKLKVSVSIYGFRGTRRVWPDKEPPNVAXKVRNTXDLAIAVAPIDGCLTQAQHTLWPPAEPTFQIARLPM

SEQ ID NO: 1011904 - protein, 68 aa, Homo sapiens
PYINALLERIKRKVMNTRTEEPDRDERLTKEKQERLRNEKKSGREKEKNGKEKDDEKRNDREHMKEAR

SEQ ID NO: 1011905 - protein, 77 aa, Homo sapiens
MLTGDPDQERCNDHTEKQQRQKGKNIPMEPAEGAHIKSVHEPPREQQQATPKRGIGQQKHLDKRKGARTPNGLKEHN

SEQ ID NO: 1011906 - protein, 225 aa, Homo sapiens
MPMYQVKPYTRGAGAPLQCGDFPPACTWLPNVHWQELRPSAGRWPRAWNESNLSLRALESRQDDILKRLYELKAAVDGLSKHDSIRARCMTWHVSQLVMPMRMRPTNFNHRMLLGLDIAVALGRITGALHKTIVHQRQTGASHSPHPWLVASAVLASVTHLQGTCPSGAHATPRVKERALKTFSSALENRITKQPRQDYQLGFTLIWNECAKTQTEHSASRTMCP

SEQ ID NO: 1011907 - protein, 154 aa, Homo sapiens
AARGPASQPASLGLAAGTRPVPMPWSQCPSDELASRWCELCWLFCCPPCPEPASPAKLAFLPALSPPTRCWLPGAALAAWLRPCPRPTGPGLTCLHCLPAGPWHCAPARQPRRKGAGRAGRRPRVAGAENFDSHRDRCCRQNQCAMISFQAMPS

SEQ ID NO: 1011908 - protein, 88 aa, Homo sapiens
ERGNTAEYGGIGAARSGEVDALKGTSDCPGSARCVKLEEKLGLWKADNLTQGNYMEQCVTGSEIQNIEGGRWLSRTFSCIPKRHDKKL

SEQ ID NO: 1011909 - protein, 384 aa, Homo sapiens
  misc_feature (9)..(9): Xaa can be any naturally occurring amino acid
SGGGAHALXIAVLGEGRDTWESTLEVRSSKTSMGNVVKACLLIEIHKVSWCDGEMSVFPATWEAEEQENALETQEVEVASEREMAATGLQPWDNRDVRTSTPHERREEEKRRPRRWDVGANKGARIPWTGGSRSSNVEACHVSEGVRVPETGAGKPHGGRIGQWYAGVVATGVVNATGPEEIATPGKPITRRHSGPRKGTDAVIALPYRRTRNGEVTTRNRKQRMGHSQERQNNKRANETSTQYKRTNTMHQTEENRNTRGKRRTKRQAPTSEEGHARGPGDTGTRRKSKSTEKTNRGNDGTLMREDRYETTRHAQTKNTDATSTHQEPHQDAEPQREGKQRTARKPKRTDRRRHRRTRGQRTKEKDERQHAREKDTRAKTRRR

SEQ ID NO: 1011910 - protein, 112 aa, Homo sapiens
MRTRMNLTLLPRGPVLLPMAVGIGIVPVDTRRDRNTWDMKRTHSRAVSLVIHFEPEWGHTQRELVDRLGRGDCNVTGEYGNAVTWPTAQVIYPFRRSGQWAATKITRKGQFN

SEQ ID NO: 1011911 - protein, 207 aa, Homo sapiens
RGAEERAEPRLRARARLWPRRGDSEAHWGSQRGAARRQPEVYGCARPKEDAAARPGCGAERLSSRRSGSTALGGVGSGTRRAPGGRRAQAGYTLSESAEFAASEGGRRPGWARVAAPTGAPERPGTGGTLECRNRGRRENLGRWPCPGAESRAESERPRVPGRSAASGSHSPRRRSSSALQTKMARRSGKGSEARCVRLPSPLLVGK

SEQ ID NO: 1011912 - protein, 77 aa, Homo sapiens
MGSKVTVPDLPAAQLAVPKRRNFRVLCAATITPMTENGDNQLCSTWSRMWIILCKEQGVTEHFREMAQQDEGLSLSV

SEQ ID NO: 1011913 - protein, 189 aa, Homo sapiens
MTGGSLPEPLPGLTGVVLPLIRAIMVWSWPPTISAAEVPGGFWADPPPLHPGSMVLAHHPWVRFGPVPADPVSTSSPGSQQSSMGANKLVSLNPEKRWRSAWLKADLLPSGVTHLRYHRPTGLRRTSSGQWRAEIACLDSGRTNAITTPFTLTSGALRTPLSLHHPGSRPLDHSLGQIYLAPTLPDFRF

SEQ ID NO: 1011914 - protein, 51 aa, Homo sapiens
MRSTVYAVEDVRKIDSPNLKCLLKVDVVYLVERVISANAQTIPSYFPVMIG

SEQ ID NO: 1011915 - protein, 185 aa, Homo sapiens
MAGDGRRAEAVREGWGVYVDPQWPPIRDGKEAGSPLNNWRLVAECVLAYHDSVLACDSQVGRQVKVVGVIESEARQRVYRGTFEAPWVAIDEKVPRVGIERIPGYERVAGSECLRREESDEKARYLPFGLGMRRQPAYPEGNRRIDEGRRRHYPVFSSRISEHAFRLQSRSPVDDPGEGLRDFSV

SEQ ID NO: 1011916 - protein, 302 aa, Homo sapiens
RVHWRALPSGVPPTHARRHRTPRRFTLTELLGDGRGSGSGRNLTLSPRLECSGTISAHCNLDLTRYKQFSCLSLPSSWDYRWSLALVAPAGVQWCDLSDLSDLSDLSSLQPLPLGDFDAMRRLILQVLLDYRGDYRAPATTPVLVVGMFVVDDGGVHQVGQSGLELLTQVIHQVSVLSDRMVCDIQADSPSHGRFPISKFNDRHKKSFMTPRTCIYRIGQDGNRSNFYAAKNEKGSESEAKNKQEALIAKITILLCLGLLGSPWDSTGLRVGCWVKFLVTTNFFFYGIAGFQRIPCPVKKIA

SEQ ID NO: 1011917 - protein, 252 aa, Homo sapiens
QHVLCLPPRNVTLLQERANKLVKYLMILDYKKIPIKRADMLKDVIMKYDEHSLRSLNEQRTPWNRKFGIHLKEIDKEEHLYILVCTLGLLRSSSLQKTEGTAPRLSLLLVILGVIFMNGNLPDEAVPLGGSYGKMGAGPGVRHPFLGDLRKLITDDFVKQKYLEYKKIPKLAKPSCSMNSSGACEPVDEDQSRMRVLRFIVHNQNRYPREWKAHFLEAVDDAFKDNVDVDMADEHAMALSMRGPDEISGMKR

SEQ ID NO: 1011918 - protein, 67 aa, Homo sapiens
GHSSSRCPTIDDTVRPVFKLETALPKKTNQELFHKLLAEALRRCVILLKDGPNLEIFNHRLVTALGN

SEQ ID NO: 1011919 - protein, 49 aa, Homo sapiens
MVDRSNGGQRSEQRRGPHRYRITTSPHKTLKKYDEKQRRATGTIAEKGK

SEQ ID NO: 1011920 - protein, 111 aa, Homo sapiens
  misc_feature (102)..(102): Xaa can be any naturally occurring amino acid
RRERRGAAAMTGSTRSAYKDYPALQGTIDEVETDVVEMRPNWTSLCEAFSWELNGENAKRGRLYLGDLGWHAKLTMRDPTDLESPAISQYQGWPCMWRINFXGKEHRRSGR

SEQ ID NO: 1011921 - protein, 537 aa, Homo sapiens
MIYSPVQLGSLYPNKVYGASPRTRGPGVNARIALVQSPTIRGLRTSETREYTAEHDSSERRAERLLSRVRCFRACVCGCSPLAAARMEERVRHSNVAVAGPLCPLVAPRVASSVPTHGLQCDRGRRSVVPCPREACESGSRRMPWCVRLRGALERGGAPLRLLALLGGGKSLDARCGRTYRPRYAPAPPTFLAKVAGCVPVWGLGHLTAGCVAMYWTIPPCAVFPMAPFYVALWARCMGGSSRTSRSLAGLRLPPRLWFTLDTADGPTDAVAPGNFRAGGDRSKSPPGACTGMRGGETCTPRVNTHALPEPNSQRWGTPCGSRQSSRPSCVEKKKFPLIEGDTIEQVGTRTEMGAYKVPQTKRQAKPRRVNPGTRPQAIVGSATRNTDGAAQENPHIAQTDKGVEPPNMRAPLWKNYGQGRRISFRRIAQKMKGAGDARQPRSPTTGVSDKNEEREDNHQTRARAATKEKQETAQAQQTQCYTAQTHRSTTNERTTENKDCTRLNTSNNDATAQASIIGCNNQQRKASTYSTERDDT

SEQ ID NO: 1011922 - protein, 67 aa, Homo sapiens
SGDALLLLYGEPCGAASVGRNLKDSQTMAEHTGDYTEERWLPVEAKHSVEYRQKGTYEITRTNERMH

SEQ ID NO: 1011923 - protein, 333 aa, Homo sapiens
TSSSWFSACTAPSKGGGGRWRNYDSELRGEAGVCRCHHLDHEVTPLLAPPTSHLGLSGPRSSNKTSKTRDWARAQSQAQALGSKLRLYLSLMNSKQSLDDEHCLLPSASSASSYLIFLVTWSLGWNAYMSSAHGFPNLPLYMMIASGFCVNGPCHPVPAYHYSLSPELSLHHLSIPVDVPFHVMPGGLDEWYYIRGQGTENPARIRPIGVPGRKRDRPLADSIYTGRKEGRSEKSVPFGPLSPRDTSGKEVWRDLKAEDNSGELHSKGNYSGQWVVISQAKGLGTEHTWLAYRGESPEGQQLKGALKLTGTVLSEATRKTLFPNGPSDETVKW

SEQ ID NO: 1011924 - protein, 128 aa, Homo sapiens
SGSDAWSHEPGGRGGSLVAEVIKGRNMQFFHVQIALFAILYSRPKSASNGTYISSIDEENLRYENVPRRRVEESTTIQSKKERKNEKQRTKIKKNAKSKMKRNKKKQRTKAQNREDEQETTNRREKNN

SEQ ID NO: 1011925 - protein, 257 aa, Homo sapiens
MRLGSEPAAGPGAAVLLAFPGRWVNTAEAPGLACRCLVVRHGLLSVDARSRALPAARSTMVHFQASGSPASVLHNKFVVILGDSIQRAVYKDLVLLLQNRLTFHSCPAENAKGELSFEQDQLLVLGTNWVSCYNGNTVSVRSASICSGSEAHTLCASTSSPRVYSEYLEDVLEELTYVDLPRTVVNHQLHASGIFPDMVGCSMESYLGATWKRVVCAHWTTLFARLLPVGCGTIGDAPSGNVSLGITYCKSSSPWQG

SEQ ID NO: 1011926 - protein, 124 aa, Homo sapiens
DVVVVRSLHFDLRDDDDAEEEWAQAGAWCSASVGRSGRRASESNNRFELINIDDLEDDPVVNGERSGCAVDMIAVAPGNKGRGSAVKTQRARRMEMTTETVALRADLMQVANSGRRTEKTEHTE

SEQ ID NO: 1011927 - protein, 107 aa, Homo sapiens
LITSTAAHPPLLARSSSSTEMAAAFSSTVGAPASTPTNFLGKKLKKQVTSAVNYHGKSSKANRFTVMAAENIDEKRNTDKWKGLAYDISDDQQDITRGKGIVDSLFQ

SEQ ID NO: 1011928 - protein, 242 aa, Homo sapiens
MKKFLVNDGTFLAESTPLYEEDALSTLTVISPPESLVGQSLSALASSRFAHQLALAATRSSRSSSHHASSGVYLEAAMKDVFNALKKDKEESMKERGGQSKMSLQQGATHTTGDSTPRRNNVGKTEQPHNGLRTTIKHEMPLRTALLYNTIKSREKAGKNKGKHQSSRRTPPNQSPGEECEPQYQLHCNCCRHHTNAQSAPTGLHMKDHSDKTGYSQDEQQDVPTNPRPRIFDTPSTDTHCE

SEQ ID NO: 1011929 - protein, 141 aa, Homo sapiens
SAEAARVPGVTVQDVNHQEFVRALAAFLKKCGKLKVPASGVDTVYDWSTHKRACSLLIEELVLLRRETSFPQAAASCTYRGGAWELGSIDQRFYCGDVLRKRRHCPGHFSRRLQRVWSRRVSSKALEGSEIVVGYYIRTMM

SEQ ID NO: 1011930 - protein, 57 aa, Homo sapiens
MRRAGMLALLAASVALACGLLGPRTCPCAREPLRVHGYCPQRRCTPAARFPAVCPMQ

SEQ ID NO: 1011931 - protein, 115 aa, Homo sapiens
MHMEIIEIKEIPIKLVKKQTILIIATETVMKKTVRSKSEGNQILDNDVKITFGKDGKRKSYILNHFKRITWYPLVGSDLNCAVNTVTSLDFITFALSLLGDALIRGYLYIEFEEN

SEQ ID NO: 1011932 - protein, 172 aa, Homo sapiens
ALSSPARASLRPPLPPVPGHLLEAEPGCCMMGRRGDRMTINIQLSTWSINCVPRAHPGPSCSASLTDFPLGGTQDLERGLAVVLAAWQAPPAHPWSPHWPAGLPLLFGDPFSFGADLNLGFHMQRHCVARARLAYRALMERSRFGLLAPDALGPAAWVACWNPFLPMDSGPF

SEQ ID NO: 1011933 - protein, 331 aa, Homo sapiens
  misc_feature (149)..(149): Xaa can be any naturally occurring amino acid
MDITTSRWPKSSLILHYNQPMLPAQAKASLICTILHIHAEPYTNVLGPAVKFRSFISTRHLNFNLKGLSNRYNMGRIYSRFYTGLCNYNIMPNNVQCSEKYLRAHTQYNCLFKCVLTFVMKSAARRSQRGATRLGVLTLFFPRFILYDXGSRISQRGPHIVVPRSGSSIASFICDRAFRRCQLESQSAKTFSGHSFTGLLGIIHSIGCDNPAADTPTLFSRVATPPARSRHATPPSFPGRRITSLSALPLSHLISGGATSQSRVITPGIRVFCPILPWHPRLPLRCRHLPWGLMHRLLSFCRPLPNPLAARGAFIRPGNLLYFSTLYYFVI

SEQ ID NO: 1011934 - protein, 230 aa, Homo sapiens
MAWLPHQWHTMTRGILDSIWALIFVRVTCGVLPNAGTLARDVTPTLAKNLLTYWLPCAQRVTLAWTPRIENPPRSHVPSMKPFVTCLSTTDPPVSTGKGGALKRQKNPGTLGLTGQGQNAGSRTLLRIVPCLPTKRGNFPNGAQGSLILPPKGGQPALYFPNINFVLQGPRAETVDTRTDLNDSWAFLGETCQSPPNLGPLRKPGPLASTDSPQCPVGGIPPPGGTLFPA

SEQ ID NO: 1011935 - protein, 260 aa, Homo sapiens
MCNGEVPGPAPGRRRMRSACDLMRLRSLATIAAGPGSGRTRPRSHRSLCWTRLACLRHCRLHRSPVSSVAGDRGPWSALTLDAGCVAQPSPCSYRRARGGVTPFAPCFLCSERVPIGHLRAIAFVWSALRSHRCSEALELESTASAPTCWTPTRLLGLGRLPVHLLARVLAGCLRSLSRGQMVAQFTCTAGEVQRKWWGPDATGQLPRTDPHVPTSNMLTESARKTFFPLPKAAMRGDPGRCTLPIRANAHAFKSAFIPP

SEQ ID NO: 1011936 - protein, 90 aa, Homo sapiens
GLQNVRVRLWGLAEHREGERAEPMRASQYRSPAVPCRREHALFHSRNTSPARLGTAGGIRLRGYNIHVNGVLHMSGALLASSWGCTSRWD

SEQ ID NO: 1011937 - protein, 137 aa, Homo sapiens
SGLRTGPAFEWQVVCYSEHQQHPPFALLSLSFTSHCHTTIITTRHLTINPPRISLPSQHFSVPHITLHPTASISHNMMSLPLPPTISLTSNFYFTYILAPTSSNYTTPPYYAQPLHLTPLISVPSSTYHIHHPDTPL

SEQ ID NO: 1011938 - protein, 281 aa, Homo sapiens
SIQPSPVATTTDPAMATAPPQLLLLALLSCLSLASAAPSLRPLPRADDDGLLARTTGSSSSPSERGVGARTCWYTVQIKTSCSSPARTSDAISLAFGDVYRDEVYAARLGGAAGAFDRCATDTFKIGGPCGYGVCYLYLRRAGRTGWTPEWVRVYEPTAPSAPSNLPLRRPAPQQRLVRLQPLPAPRLLLLVIVSFLRCWCCTGDVAIGRSRSWALVYVCTVGGSRYYIVGFISAVPLSDCVVRPVLVPIRDGLAIMGTHEIKTLFGLFWEHPNTQPTNTK

SEQ ID NO: 1011939 - protein, 96 aa, Homo sapiens
GDLGRASRSATIAEEAAGSWSGADFREAAVRARCPHDFSLWTLFVIFFACVVRVRDGLPLSASTEFLPHPRFYGMEETAQEFSLADCAQYPGRGSA

SEQ ID NO: 1011940 - protein, 166 aa, Homo sapiens
MRSNVRQMSRYQDPGGDFLWPNRPSGNRRSAKGWHHKALEKRVGNATNQTRMQPDAGMHSPPSPTAIPPKPGRPITNRLGTKGIYRKAYAVEGQSTIPCTRPTSKQADPREGLPRREFAQRVNHHSATASDHTAPHTQYTTPHHAAHPQTNSPAEDAHKLPMAASN

SEQ ID NO: 1011941 - protein, 256 aa, Homo sapiens
MAAALRGRAAARVLLLLGLAICPMLTAGPCPGPGTTLTECCCADVKALTLHYDRYTHSRRLDPIPQLETVLGSAPDALCAFLYPKSSITSCQQQQGPRMRYACYKPGNAKHGTLTTTRHTTLREHTCGDACETATELPLTDQYCTNEGLLLASGVLIYDLIPEPLGPARQPDTGGPGKRQPPAFGPLFPADFITYYTLEIHPRRAIPYATQCTLATSDLTHSLSTLPMGQLRPHCTPLLQRHAPLNWTTATHIPHP

SEQ ID NO: 1011942 - protein, 274 aa, Homo sapiens
RSGLAWSAQCEPRGREPPLTPRRGVGLAGGASCPAPAAGALPAPLPAPPPILPSSFAFRRLGPLLPCFASAPRAYGTEPLRIPQHHLRIQETWPERSDTSDPRTPAHQAKQLEELALTRAQNVRQHLEPESNWRPIGLAIAQLLLLAFSHPQYTRLSKLHTNLTKPTIAPAHKRRKRPSGHQENDGRLQETKAKEAQSRSKRQQSTQTDTAQESASVNKAELSQRIEALAAQVERTPGDRQGADPDQENKRTRTSGYQTRARDGSDHRGTTSPL

SEQ ID NO: 1011943 - protein, 317 aa, Homo sapiens
RRALSTGRGKGELGDPACAGPDVARGRDDLWLQPCDEQMGRALTECISQTHVAVHEGEQFMSFDLLSCMQMLLNVDGELGDRLHEDLKPEFQSLFSRPGGAEYEGKVLTAHVLKISAPVPSRTATSCRNQHGCAASCRALESSEGASGDRQADSAGHGTVVGTFLRHADRNQKMEGPWAHAFRLSLKARVSDKSCSHLDGGRSRKSGRCVQAFKFLPVPRAPVIDAGLGSLVAGELCDPWLWGMPVLRDSKDGPRNVTGSSARNQTLRRGPAPVLQGRNLDPWMGAIEGTSRRSPECYTPCTGVVKVWRLEDYSELP

SEQ ID NO: 1011944 - protein, 217 aa, Homo sapiens
MPVSRIAVGSHREVYEVGALKAALAEFISTLIFVFAGQGSGMAFSKLSPDGAATPAGLISAAIAHAFALFVAVSVGANISGGHVNPAVTFGAFVGGNITLFRGLLYWVAQLLGSTADCFLLRFSTGGPPTGTFGLTGIGAWEAVVLEIVMTFGLVYTVYAHGRGPQEEAAMGTIAHISHQAFIVGANIHVSAGAFSGASMKPADILRTRTRQLGDGG

SEQ ID NO: 1011945 - protein, 223 aa, Homo sapiens
MSRRSQGMTPVTLTSKAGILDPEPLEAILTDDEPDHGPLGAPEGDLVDLRHAVGYVCMMNFPWWYILDLYSSDHTESECPKGQSLFRIELWIRPASPSPNLSMKNSIPESRGAEACALLVSGPRRHEQMCVIKRSIVAGKFASQTGEHYCHEYTLLCYLGMGALIPFRLRISSALRGFYIHQRSGTEVPKYAPTGYFVHDEAQPAYGDVAELGEHRRIVDPRC

SEQ ID NO: 1011946 - protein, 378 aa, Homo sapiens
  misc_feature (210)..(210): Xaa can be any naturally occurring amino acid
LITSTAAPVHRVLAMVSARSTEYGCCRSSIAPSRAPGFYADQLPREEAQRNAGLIPSDVNLTMSIRAPMVPHMVTTGALRSSVQPHIRTEAMSEAPTKVANGSVLLRISSRADHGRIITQRGKGQSVGLPLSFHARPDLDVSGPSHRGPDPFNINTVVAIEPMVNSMKVRTCRNITHSAEGIRYTLLPLHSQVRRSICFDPILRPYDTYXLTPSATTIRRTRQYHIYERIHAGTGNGVKEINFSISVCEAVVPFALQMGGESRAKSSDWSALEDVFGQKVRQIALEVAHGLVLESGACEYPGEGPGSTVIPGRGFRIVAGPSFRFTRSPFDSPSDGDKGMGLGIPTRRLKPFKKPSIGETGTGPCNCWAHARHQRGLP

SEQ ID NO: 1011947 - protein, 107 aa, Homo sapiens
RRLYPGGSYFDPLGLAADPEKKETLQLAEIKHARLAMVAFLGFAVQAAATGKGPLNNWATHLSDPLHTTIFDTLGSFKWSVVEQFLSARLQNGRTRVRVTNVLFVCI

SEQ ID NO: 1011948 - protein, 256 aa, Homo sapiens
MSNAALLSSCLWGLPTSLPPGGRPSSNSRPSLSPPLPPGRTLGGTAASRVPARLPHFPRPTPPPPPCSAGGRRELTAAPNWPAHRRSPRYVQRLPFPAFHIHSFPLPLFREPLAIPPSLSRPPSPAFVPPPFGCPRTRRPTPPLFPCAPRPPLVAPASSLRAPGALPVWRLRPPLVGCGPTTPPCAAFSLPLYGGAPSSSCAPRPCRACAAGVPLGRGPSLRRFRSARVFHPTPFFPPGAGSYHYSFPRVGLAGGW

SEQ ID NO: 1011949 - protein, 140 aa, Homo sapiens
MRSSPEWTAKDADLNKKSLPYESLAAAKAARQQGALRLKSSDSDSDIVPLVDYLNTQYYGVIGLGTPPQNFTVIFDTGSSNLWVPSSKCYFSIACYLHPKYKSSKSSTYKADGEICKITYGSGAISGFFSNDNVWLGTLL

SEQ ID NO: 1011950 - protein, 150 aa, Homo sapiens
MGKTQTTKKPTKTKYNKKTTSNNKKRRRGGRRLQRYPPGGGPNTGARTAQVYWMKGAGSPPQRGGRRQNDSEQSDKDGRRLKQDSAAQDWEQTSVTRAETPCGDRKPPRQQERGGEIIMGGRPHTFFHMGSYMIAPPMGGLKFNRTSGRA

SEQ ID NO: 1011951 - protein, 134 aa, Homo sapiens
MAECDGRGDSDVSQRPERSPRRMIMKIIRMMVTQPSIRWRMGSGDSSRSCETFRVKILVHSYVSSKKLDREQMAYHDDDMVEYYIFKNKSVKYLGVTSFKRKYPDVERRDVSHKEKLYLRELYVITERSVRSRA

SEQ ID NO: 1011952 - protein, 199 aa, Homo sapiens
MTENSDKVPIALVGPDDVEFCSPPAYATLTGEALQPRVGCSNGGSRGPHFGSCAAALMGPVGAFVLLEGERQSHLQCPLHHEYQVVTLQRWVNGDIDAGNNIVRALIMGSGAEEAIVMLMISSNGITGIRLAGGDEVLIIKGASEGSLFLRWAPVTKLEHLLQYWKATIMPVTSMREQFSYLGWAVDQPVKDNSFLRFY

SEQ ID NO: 1011953 - protein, 105 aa, Homo sapiens
GRAWDNLLQNKTAFTTKENYGKGEREAQWATAQRTLHGLQAPEPASHTLFNDKSSYRELSEIAEQAKRRAEIARLRELNTLKGHVESVVKLKGLDIDTINQNYTV

SEQ ID NO: 1011954 - protein, 75 aa, Homo sapiens
IIIPDTKAHLLLLEIFLGPQIWRMSCNCGSGCSCGSDCKCGKMYPDLTEQGSAAAEVAAVVVLGVAPENKAGQFE

SEQ ID NO: 1011955 - protein, 224 aa, Homo sapiens
MRSSRTNGSVQKAGRVSHAQGEGPSWVLVAGGVLLSTLSVRFGCKLKQMFDTKKQNSTSRAKRRHGSCELHSNLYRFDDETNCYCCVSDGGVEIKQAPASSLSKPDEPSLPLAKIPGPESSKENSGVMWTSSPDRLEDHRRPLQYSNSSGSPCVSESGSDIYIKREVIQKLRQHLRRRDEMIMEMQAQIADLKNSLSIEETQAAKLQSQLGWCQSRSVRIREGD

SEQ ID NO: 1011956 - protein, 77 aa, Homo sapiens
MTEPDRNAGREVALDWSIVGIFILFVVATGQAIVEIHPCEPQFICDGALGRIRARSGCHHTPSGGEVEGVAERRSGR

SEQ ID NO: 1011957 - protein, 243 aa, Homo sapiens
  misc_feature (112)..(112): Xaa can be any naturally occurring amino acid
MTEQSMEAPDYEVLSVREQLFHERDPAELYYINLLFGNSCTVLLLTCLPEPAFKEACVEFTDSGMMKMPIGQQDVRSSLCSFTRGNVVLGACPDSCPFSIISQVKAACIVPXTVRRLSFTVLVASHGLPSSMAVWNRCLTLLQPVRVMFLMPFAYFFTESEGFAWLQQRVSWAGSYETVVMLNGSVTLLVLGMVCGGISHEWTENMAMQRVTHMTVREYYLHLSSTHAFSFLGVLAAPGVYSD

SEQ ID NO: 1011958 - protein, 112 aa, Homo sapiens
MDWDPFVEKRNNHHVGGRLDGHKPSDVFRLPVLRTERINTVPWRVSGPHSKTEGVLIAPSFEGRYSEGKPWDQKRVIHTWKEMFGSAQENSQGTAKGGAGCEFISRLGRRGL

SEQ ID NO: 1011959 - protein, 141 aa, Homo sapiens
THTTLIHSQANLAACSLQSSRHCGSEGRGTGAGDGARGVLVAPPATVHAISCSTVYSTLMPCLQYVQQGGSPARGCCTGIQNLLAEANNSPDRRTICGCLKNVANGASGGPYITRAAALPSKCNVALPYKISPSVDCNSIH

SEQ ID NO: 1011960 - protein, 149 aa, Homo sapiens
CLPLSFPATPNSVACRFPLPAPASPPFLPRPYPAPVCPFRLAPPCPLFLLTRLSAAPNLLCRHPAGTESGTPRDTEPALPPTPSLEGPSTTRGGARRGLTPTKLEFPRGEAGDKLPILGYDTYQHVCARPVHGTTYCFLLAQEGSRTGE

SEQ ID NO: 1011961 - protein, 102 aa, Homo sapiens
TNIHKPKHISEIGMAHFQEVDYCSEEVRAVGYPVRRGCGGVQEHIVKETFVQEFDTAGRRHGHHGRGSGHFEVRESRLEEDINTRTGEFHERKENFVVRADD

SEQ ID NO: 1011962 - protein, 126 aa, Homo sapiens
LGAGLSAVAGRRCAAAAGERGQKWRLLTPGNSPKGGAPPNPPEVDLPEALHSLNPDDHGHVALVNTTRKGIRTSGMHIREYIQREKNIEAIEAMRMQRANNIERTVRTGNDPSSPGDIRNRPMERK

SEQ ID NO: 1011963 - protein, 108 aa, Homo sapiens
MWADRAGWRCEDPNPGLGGGGGCCDRRGLETHRTNAMRALWVLGLCCVLLTCRVGHELTSEVDSGVVQVQKRIWVRSREGSRTDDEVVQREEEAIQLDGLNASQSKRT

SEQ ID NO: 1011964 - protein, 178 aa, Homo sapiens
FPYEPGKQVRSAVRIKNVGKSHVAFKFQTTAPKSCFMRPPGGILAPGETIIATVFKFVEHPENNEKPLDQKCKVKFKIVSLKVKGPVEYVPECSDEQKDQVAVEQILRVIFLDAERPSAQLDRLKRQLAEAEAALEARKKPPEDTSPPIVGEGLVIDEWKERRERYLARQQVEEVDSV

SEQ ID NO: 1011965 - protein, 210 aa, Homo sapiens
  misc_feature (182)..(182): Xaa can be any naturally occurring amino acid
NGTLTSSVGLYYTYIHIYIYIYKIAYCVSHKTEYTVATMYRGVHSLSETPYLSLSLEGAGTYISQSRFPPQLPPTLAPLFVAGCHRRLSLDDRLILIIDVDPLASCYSYLLLIDVDEMMWGVDRPILPLLIAPRTRDEAEENERHTPHSIVAPAERTMCSRSRIATKDEKVLSPTNELPLTXVVVLWVVVLLGDYCAGDSNNDDWTNRIE

SEQ ID NO: 1011966 - protein, 87 aa, Homo sapiens
RTHCCGTETVKLSRILPVWVGGSPVVLHTPYGPLPPCPDRVPLPSEPILDLSAEDRPGSCPSACCGQRTDGHWAAMTSEKASDTVAA

SEQ ID NO: 1011967 - protein, 228 aa, Homo sapiens
VSRHRRRDGPQLTGAPPSVPSPSPSAAAWPPGYGLAAIPDELLAEIFVRLPTPTDLVRASAACVSFRRVVADRSFLRQFRKLHAPPLLGFLGPHTGFDPAERPHPSASAATAVALAADFSFSFLPAPDPAHRWVVWDVRDGRVLLRGMPLENSHGVVFTETVVCDPLHRRYLMLPSIPDDLAASVEGLRPRSCEIFLVPEGGDESTTAEETSFRVIWVGHYEDKLITV

SEQ ID NO: 1011968 - protein, 59 aa, Homo sapiens
MRLRYAEGPSRLCFLSAPRSCPWRVRARMACEVLADVLLLPDITRPNIVEALLHGVPAH

SEQ ID NO: 1011969 - protein, 67 aa, Homo sapiens
REKWGLRSAAVQPARRRLRCSGALSPVWPSSGDPVTELSSASSPEPCSWLELLPFLSKTKHIKNTTI

SEQ ID NO: 1011970 - protein, 77 aa, Homo sapiens
MLAVSSARCLAAADEQRAEAAPMETVGGAAVVADLDIDFDFTVDDIDFGDFFLRLEDGDALPDLEVDPADIFTDLEA

SEQ ID NO: 1011971 - protein, 244 aa, Homo sapiens
  misc_feature (42)..(42): Xaa can be any naturally occurring amino acid
MGGDSSTWPPYAPWISYSRLDSGIVLPGQSAEKGDSENVVAXPMMLPYGIAAVENLVSREGLSKAFQGIAPMEAYCCTCAWTHRDSNGIHALRAMEVQVVQTGIDRGETVVSLSMGVLENIGLRNSFNAETLVEKARRCRNQFAHVAPGYSSPNPFTVSHFVRARLGLACTSTVMAASNRLRNCQNIIPVRHVDSWPFGRACLRLVYFDSVGTVIVSWGYWPEGWYDQWVQRRNGRASLGKKPL

SEQ ID NO: 1011972 - protein, 36 aa, Homo sapiens
KGMAAQALQDLLGRMCNVKSQADEEGHESFGYKREL

SEQ ID NO: 1011973 - protein, 254 aa, Homo sapiens
EVALAAAVSVPVAAGCQDPGRRRRMPGALVAPRCRRPATPTQRPDPAPPVLTPLSQSSASPLPLPTRRRVPLLVPLSTDSALPSRCPLPEPLSRANWVTSGREKRATRPEKNREKRKTKGKQKETPKEEEAKRQKTQQKRKRQHNTEKKKKTKKQTEQRPNKKNKEEKKKTTGEKNKEKNEKKKAKQPHSRKKQNQKGTKKKQKKKPGTKKTKTTKKTTQKKRAKIHKEGEKHKKEKQNKNKSNREKDDHRRQQ

SEQ ID NO: 1011974 - protein, 221 aa, Homo sapiens
  misc_feature (147)..(147): Xaa can be any naturally occurring amino acid
SGGTLPEVKQRERTQARLGSGVMTIAQVEMVRPKPWRPFALGISSLASQSSAGNMRSPTRNQEDGSYMLKQPPQVSVTSFMQYSEESRLRCQLSYGNMCSAGLHRSFKPSMNNPGGPTCGACRTISIERPCGRNLREWNGHVNIYLXYVFISYVVGKHHVIGKSSLRRVYPNKQLAPLYPKLNGCIHDLQLLYPVYIFQNEVKDGKPYRQEFVLGSYILYE

SEQ ID NO: 1011975 - protein, 81 aa, Homo sapiens
MGFLPKQLICGAELGPKNWPLGQRWAFYFHFPVCIFNSNERVGVVAYTVIKPKLSNGKPPGGAPFVVPRLSLPKCKKVGPP

SEQ ID NO: 1011976 - protein, 253 aa, Homo sapiens
SRHPARPTDADACPVMGRLNGAGVPLRGDAPHPDIGCSDRRWPSAWGPSSSLMFGCGSVAQCCASAWGTHGVFPHHRTWPLALLSLWASSSLDQVSGAHREPCRDLWHVLPGLSEPSVIKAAHRTPLAQTLGAFYGCMEIDNTGWYHDESGNFAQTEPDIYDIRGPKWSQPGILATYPSGHLDMINGSFDQFIGTDSLIVCVLAIVDPYNNPSYERGLKAFKVGKRKNLCHGNSYGYQIRICQTNLTRELRTQ

SEQ ID NO: 1011977 - protein, 157 aa, Homo sapiens
MPYLVGVSCSLEGSHTVAYGTHRSCRVSRPGHGLLTPVSGDRDGPDGADEESKVGSRLTARYVMSRSRLPGKALTVDVIGKAGVASGLRENRWREDRGCVTLKLVIYRTRKNRHLEENSRNQGETFVRCAEDENWYREVKVSISNVEDPRRRGKLST

SEQ ID NO: 1011978 - protein, 68 aa, Homo sapiens
MVDSHRLYQCACSDARQRIVDPFKLSFSTRAAAQAQDPVPDKTSHVHSMLPAEVMLCAWRTRSAEGPQ

SEQ ID NO: 1011979 - protein, 284 aa, Homo sapiens
RCARGAPGGGTRIRRRGADTDTKGIRVPPPPKPCGPPMVNWLQRSSVAPLVHGPISWTRLEILTDDSGDRASSLRPSGLLRSPFPRRHTPSHPRQVSVPVPSVPSLPAAAMLHTEGHSSSSGGGSGKATLGPVCFWSEAAYVNELVMPQGETAANGKPVRARYDDPQNKARLVRLIFLVAEGCGPQISQTGLTGALALIATALQPGRWGCSPTGCSIACFLITHQTQRHPCLGPRDSTAGDDLKSLGSTGPIGTPTGGDQLNDRFWRTSIGLDDVPIATGHTRG

SEQ ID NO: 1011980 - protein, 420 aa, Homo sapiens
DGWTWGHPRRASWVVEESPVAATACASCSDRCSPASPACCLCCFSRMLGSRCAWVDIRVKVVCQSDRLHLKLKNMLTFTGWKKALLSQQCSPSGGWAQYTDRMIADCIVRMEFESRSRHVVNSNNGFVVAVTLLVIGQRSLAVVRPARPGINAQQSHLITSLPGLTAYSFTRGPFPVLTHHFSPELYKRPKSGGLLLHRGTLVQDRMHLVSPMTFSAGGMASVGAQVPLGAGTCSSLYSIHGPPMRPCPDSTSGDWCLLNPRARILSQRFNPHGQGSRSGQNSTPFATSCDSWLARTSLPRSAFGEPVLVWQPHAGPAHSLASTNHTTQPPQRQQYTPGGLTHLGLARMGHNPLKTTHAKRQNKEAPPTPAHVHRQHTQAQRATPPKQSENSSTNHKPDNPRNPKNRTQPEATTHTEHRP

SEQ ID NO: 1011981 - protein, 335 aa, Homo sapiens
QRCRSLGAVAAAAAAALGSVDAVRALREALVPAAAALLRAPWGCGAPGPGPCPGISLVSTEPLCPWCPCCPGLVENLLLSVLVASPCGSLPPGAIDRVVPCVGCCCCEFGERQRQARTWRPERGRVLLWVRAGIACRCAGMPCRTANHAGGSPGGPLNSRTRGWSPALGAAVCPAPSRPGSWCHFGVVGTKTFSPAAFPEAPFRPGGRVCWPQGLPHWLGLPAGPWRRWWLWTPQLWSSPSYELTPWRSSPWKVPRHAMFLEGRSSILALGPPLPSKYTAIRQPSTGKVRSHLDPGWQKAGPDRADLSEEKPNFALKAFRKNQDHHPAQQTQRIL

SEQ ID NO: 1011982 - protein, 217 aa, Homo sapiens
MACINTLQSCSMFKGAKSKARRGRASGGTFECRASTFMDGSGLRLGLDENPDAIISGEWPENFSLLSYDDLRAYLQSQQQQQQQQPSHAGDQQRGPLLREAMSTPVLMVTAEQALVEVEGHFQLVSGLPVVDSARRCVGVVVKSDHVRASHGPKTKIADVMTSPAITLSCDKTVTDAAALMLRKKIHRLPIVNQDNQVIGIVTRDDVLRALEAMLKF

SEQ ID NO: 1011983 - protein, 120 aa, Homo sapiens
MASPGGGYADRPAPPLDGMITVDGGGEQDAAAGGAAEAARFRGLMQQPSRLASGVRQFASRVSMKVPEVVPGIRPGGGRMTRMQSSAQMGLKGLRFLDKTSGSKEGWKAVERRFDEMSKA

SEQ ID NO: 1011984 - protein, 187 aa, Homo sapiens
MNRNSTAIGRVMASRVIFIFRIDGAGWWTVESVWGDEKIFLHLQTHSSRGCKQRLVYEPHSFPHSRQWCVTVVSPAGSVTSFQPSLSSWSCTWFSSNTLEKKSATALRAMGTPYTWRKVKRHKGPYLRDTVVDLCHQRAVPAVGRGRLHVCLLSDLPWRTAMVRLVKCDVSALTQQHVDCFVSRATE

SEQ ID NO: 1011985 - protein, 215 aa, Homo sapiens
MVLKNRRGGRAHVDLIRLEETSKNWYNILTEIHKELLADHSRGCTDEIAEVADEVEKLVDPRKERRNNECHEDTRQDSHGQASNSPMDPNIGESKFYNMRTNSLKIHSVKDIAPVCLYKGERGSSRQSTRPSYLGERDEFEYPGYFSAFVELHEYSVILISSRHYGKYDLWSFRITGEGQKIDRMMEAYAQRYGQCINGTWFQGPRDTLGTVIVP

SEQ ID NO: 1011986 - protein, 131 aa, Homo sapiens
MALTSAPAMYLLSNCRGFLVNSGLAANWAQALALLAPLASYEAPFGEGRMSDRLVRIALPSCCSVATGLRITYADPAVSWTVVCRGSVAASLLYSAPICTLSSRYRAVSLPRHSSGAYVSAYDSCLASASY

SEQ ID NO: 1011987 - protein, 32 aa, Homo sapiens
VSGARLQTRRMTLRAAVFDLDGVLALPAVFGV

SEQ ID NO: 1011988 - protein, 332 aa, Homo sapiens
PPARLRSQPAAKRRRGHQIEMRPTVSYTDMRERRIEKRLFVSTRLRPRWIEKDIHVYFFRELDIVLCCDVDMERFILYNLKSKKWPRMFDAIERPAGNHTISQTQTKDNKTKRGAGRSQKLSPSRRAPRLNYTRSPTVTPVIPTGPPYRRTRYYLRPSMHARPIMLYNKQVAVSTVRAGHNPCRPTHLREHPLSVSNGHPLAPRVLCYHTYVAQLSFPLRRTFHTPLTRPTVTTCFNKTRYTRVYKTTFPRPMIPAPTRSKTLPPTTTYLPSPKLLFLHPATTLTITCPQHTLLHITTTTITPQPRNTKHNTTLHPPTHPYHSHYLTPSSLI

SEQ ID NO: 1011989 - protein, 112 aa, Homo sapiens
MCVNPCPPVHHTICPPQWTIGNVSAVPKMCDPAMGLRCESVTAPGAENRLCVAAALGQLLHRSSDGDHLLPVAALNATSSPRPKGCQKGRHRKVKKPLSQECPPGTLLSQMG

SEQ ID NO: 1011990 - protein, 392 aa, Homo sapiens
RKSQFTKIEQSCELLALERFVWHVEPRRAMWGLKSRQQRSAGLPSASRFGSRWIPRFLPVSCADVALRRDATLPPALRNFREFGHSRCNSHMVQQDETTLQRLTALSRRGFCKSSAFKCRCLRGGRRKAVNDDAYGLDSKWFGRTSRRDLELGLNRLECDTGLPGKPEHSRGILTAATGKTAETYGSHDKDKLDSMLKIRAFSSEDALQSRYSPKAAGPDKSACAGLNQRTFHCKATNGPPNECRTQLDLILCRTQLVPIVLILGRLQGQNCRSKKTPCESAITKGACPLGRKALHRKVLHAKAAVASVEEDDYRGQANGVANNGQGFPFRKRAVSKGYEKGPTILDMETLALGEQDINLSSTKNAAFPYTGAIEPCAIFVPFVWGEGNLIK

SEQ ID NO: 1011991 - protein, 88 aa, Homo sapiens
MEAVGSKIPHEPVCRDRDEGHPGVSAREPPKNEQNKSLKENQKEDAGKTCWRTEGKSEVTKPEREVTEEETSEQGYTERDWAEITTES

SEQ ID NO: 1011992 - protein, 70 aa, Homo sapiens
QIKVSADLVSSEASLLGLQIDFYRLEDLSSHGGVLTWSFLCACTCLCANLLIKTNEKLAVCMVRVFSLLP

SEQ ID NO: 1011993 - protein, 66 aa, Homo sapiens
AGFCKADVRWSSVLLTQCPASLIPGVAAVVVPPPSTDVADMLCGVMVCIYDSYPDIPGSEARIWSD

SEQ ID NO: 1011994 - protein, 64 aa, Homo sapiens
MSLSAISLYTAPPGAAYSSSSSEFDLGSLRLDAVQHRGAAPPAAPTAVRRRRRLGPLLLFSSPG

SEQ ID NO: 1011995 - protein, 84 aa, Homo sapiens
SGGTAGSSSCGMSASLLLWEEEEKEEEEEEEEGEEEETGAGDGKLYAESCHSKKVLPTSLPLTHTLKVHNRKRKDTDDRSCKTE

SEQ ID NO: 1011996 - protein, 159 aa, Homo sapiens
  misc_feature (117)..(117): Xaa can be any naturally occurring amino acid
PRGLSLASVSVWTEQDPGTLFQTSERPPMSSPVGSSGTIFSAISCFWDLPVTGCVGGLVSLRCARANRDELHSIRSEVIPLERGGMPVNSPWSNCQYLQAVRTHYLSSWVFYCRPVXCMMASGKRVESMLHCARTWTEVEAVEGHSKAVVLKIAKTSRC

SEQ ID NO: 1011997 - protein, 177 aa, Homo sapiens
AENPAGSEQTSVPIPAPAYPQHAATPACLDRQLCGDSCLQTPRHYLVRPWISVPKNPMPQLVVYATEITQRSAREMSNTHTYTTEHVDLRCYAEQTTVETKKMVRRQLRRMDRHGATKCTSNTKKSDQHIQHRASSETIPREKKQEIEIHRDAWEQNKKPTDRANGQKPMEHPKAAK

SEQ ID NO: 1011998 - protein, 107 aa, Homo sapiens
MSRSPRGQSVKSFQLENTLSTTSHSNEGDFLCRVQPYGGLAGVLPVLQRQEIVRNKDTRQTDKEKTAGPRDHYHQDMETASGSERLAALIFIEYKTRGQATDGESSK

SEQ ID NO: 1011999 - protein, 237 aa, Homo sapiens
AEQSMSRPGPGRRPMCQWLALGVLCSPRLPLPPRSFSRMAGDSTATSRRLGVCSGTATAPGIFSLAGCPPASATVSVVWAGGPEPLGRVSGWWACGVHQGNGVAPMSENAGAQGWLDCFEDHYAASTVACALPGLALFPMADLMGSPRVRGYASGYLHVREVTRTSLRGSVIAAVLPASNSCGTNVGSLVGAAAGRGRFWKPCASRFVAAWASETRRLSAVPGPGGPLRLLGEMAIP

SEQ ID NO: 1012000 - protein, 301 aa, Homo sapiens
MDRYGPGLAPRCRRRVAPASCAAVAGCWGLLLGSASRAPGQVAAWMPPSPQEILIKGAGVCEAGDAGAPVARGLSGCVWEPDSAGSWHQQTQRGCGHPCPSVIALGTLGAGHWLPALGFLHRKSCALGRVDQGLPFVLRLSRPLPCSLERPGPRSSSCEGPLVPHFFLRALPVAPLPGPLVAMFQRRACRPALSAPTYRPGSWPSPYRLGQAPEQRKLRGFSPAFPWGTLMASQLRAHGFLGLELELPREVLLNRLQLADKVNGDQKGAGYSVPPIQLYLAVPYGKLCLQGVAQDSSLQID

SEQ ID NO: 1012001 - protein, 195 aa, Homo sapiens
MHPNLRSTSIFVDGMFLMTYSGYSTKALAKEGEPGLLAVERRAWYKHDVSNAPWMRNARALNAWCRIDSCGGLPRHEISPKDRVGVPARLTSGGALPSLFGGQSESDRGHDPSLNARCVGLWTVCAGVRTTFRMVHCRGSGRDDWGHSRAGVRARLGDGLTVGHFGGFVLARTVMGGSPPVRTLLAWDAWEPVPS

SEQ ID NO: 1012002 - protein, 117 aa, Homo sapiens
MSGSCLALLAVLLCSAPAHGLWCHDCTLTTNLQPLHPKAVPAADTVCASVRITDPSSSRKDHSVNKMCAPSFNLLKSDTYSHDYLMGFINSGILKVDVDCLRQGFVQWVRPGAVHSP

SEQ ID NO: 1012003 - protein, 243 aa, Homo sapiens
  misc_feature (25)..(25): Xaa can be any naturally occurring amino acid
MESAVNTDTGSSQLSILTIASAPEXHVPAVAVCMSGPVSQVRIPVCGSPCIQLPSHHHSSPEFTMTAASRIAIDMILSCSLGAWMLDLSWNTLEEKGAQGGPSALMQEGAIADVARQEGPGSGAEQGMPVRGAWVYGKLQPQDGAALHTGARHMPTLYSPRTGGCAATCDSSPLSALCDPQSLASHACARSSCSLYVKVLLLPGTIAHHSGLWPCSLVTPLPGPAAAGTPWSRLGAFSHCARP

SEQ ID NO: 1012004 - protein, 66 aa, Homo sapiens
AVYHIGSVSDSIQACKLAQENGWGVVDESSLHEMTDDTFIADLCGGAVEQATSTLVPRCRSLNDLG

SEQ ID NO: 1012005 - protein, 135 aa, Homo sapiens
MRLYPTTTHAVQTTDKCHKTDTNDNTKYEDTIKLHHISRELQTANDIGDHPFSKETNPEQRTDTTVRQKQQHTHPTQDQRIHAHEAREQLKTHGKEQYTPDQQPHTDDSTTKKDQQRTPNTQATTKQRTAENRKQ

SEQ ID NO: 1012006 - protein, 227 aa, Homo sapiens
  misc_feature (71)..(71): Xaa can be any naturally occurring amino acid
MTKQRDPWRWQALHYVDIVQGQFEDAEEISAEPRSAKTLRGRGLPVFKEAICQASVTCSESVGTDKRRCMXDQTPSRQLIRYEESRGGGSACETVRGIRRVSDDVLKATYEEEPEPAQDRAGQFQKRDRRRMFCKALDLGDTKSTWRLAVLQAGRPLEQPGEESSLDVKCPAKDRDGDMLEEAADRFSGLDNAKVSLDCGRRLCDLGDNAQGRTSMVMREDGQRDSN

SEQ ID NO: 1012007 - protein, 346 aa, Homo sapiens
RERGVQGDGGDAAEGFSSGSGLQPVMPGIVELPTLEELKVDEVKTSSAVLKAAAHHYGAQCDKPNKEFMLCRWEENRSEAAFRGRQTGQQVCFWTLFSATTKHVTCCTTPFTRNYLDSCIDSTTGPAAYLSLTVAQQHGKASDELCSLAQTAAGCGLTLASNCQKVTKADNSIAPLPENPYSLKTKTEIPALRIARRSARLPHMAAASHFWTKYHDGSVAHTRLMCSDNALTQHRPLPARFRLTRWCPHPRTHQTLNPHQLTFCDSDSQSYTQLPCHHKIPKAHDPRHKRPHSSVNPPNRACTSTQRTPRHQPNDPRKTTATPDHAEHARRAPRHSHPPQAHRAPT

SEQ ID NO: 1012008 - protein, 188 aa, Homo sapiens
  misc_feature (89)..(89): Xaa can be any naturally occurring amino acid
MERFSVQKGSQESQDVTHAMSELGALMPSALSTAVPYEGPLRHQVPSLLGLTSGIETIHQSRLREGRRIEDRVIELQASVVGMATSWTXGNINRVSQTTASSESQSGARQGLSMLETGEGQEDSRRTMLEISKLIVGNVDQRNGGVQNMKADRSSTPQAFGDPNQQLKTAWEPIEEVQSIEAGTEKVP

SEQ ID NO: 1012009 - protein, 130 aa, Homo sapiens
SESSTASGVDSHLKPHSNDGGPVLSQKTSISNVILSSQPSWQLPEPLPYRWSPGLCRPCRDCEPSSRGGSRGGWTCRPGTCTWRGRLLCTLTQAHTHLLTHTLNSCSHMPVRLTLTLAHPCTDTHTRPAS

SEQ ID NO: 1012010 - protein, 227 aa, Homo sapiens
MGVELGRSSHGVSLSRLCRPGPGVTGWSGARSSLTCGLFSYDTGSGPVWYKERQADQSAGGTWSVAAGGLGAPWPVDEKVYHTTQPILPVRELVGAMSFYSSDRTSIRTIYTSLHNELKKVVTGRGALVGLFLTCEELLSHLSEQLCFFVKARMEIADFYEKMYTLSTQKFINAEELVGLLDAIMKKYSSRFHHPILSPLESSFQLEVDVLCHLLKAQAQVSEWKFL

SEQ ID NO: 1012011 - protein, 294 aa, Homo sapiens
MADHKPDSDSTPRTLLLTACVGYSGPSARLGRPRSARAWSPEEPCVETASAQEVEWPRHTVADSHVVAFPMVRQCLLARVGPIFRPCGRRWQGYMTTVWTADVREASVLSCAQKSSILNAVRSVREGQMPAPSGRSNPTGAEMMQIAGSPVSHANLACSSQPLATIPGLRGRAGPLAGRITEAEDCQCFSSGGGTRVTVVCSPRSLKGMLDAVFPHQIPQPDLCQTSSATVSAEAWLWPADLQSAELETWVPFCGICEILRRGSSKHCVGGHPCRSLRPWVGRPNVYPFPCLEA

SEQ ID NO: 1012012 - protein, 158 aa, Homo sapiens
SGGGAPPPRLKAGFLANQRLESSFKSVLAARRAHRYICCAAVKLDLDIWPGTERQMNVACNTVDVRNKDFPVFLDGSCEHVAGDYLSRCSSASRHLPCSAPAVGRCPVGLMCMLCVRRCIGGMVAQVAAVRAFVYAGTRHVVRRRARAPQGVWAPVAQ

SEQ ID NO: 1012013 - protein, 107 aa, Homo sapiens
ARDDLWRTEHCLQMPQVLTMTVYFSLRSVSSLWEVTVHKFCLNVRALQQWLLTALVVHCLSMTGECLFCHKPVLRPPMYRTQMVSSWLPSGPCPVDLAGSGLWALVR

SEQ ID NO: 1012014 - protein, 219 aa, Homo sapiens
EHPGNISLKGVFKAMKGLGTRDNTLIRIMVLPDNEVDVLAQCVGIFRSKYDKSLYSMIKERHLWLIDTTKTLLKLVWGGDDDCCCVRYFPEAAQVAYHDVGTYEMHVGRVRAERELCAQPMTSILTQMRKLLRKAMKGTSGVDDMTTSHRVSSGTGSNVQTVSRIAADALLGLTVGRELEVTELKSEDLCEDLCKELSSWVLMNANLGRLRCRKQPERR

SEQ ID NO: 1012015 - protein, 175 aa, Homo sapiens
MRGRRSPGRTAADRDGAPETARGGADGSSAESKTSIPGGVMTRIEAYQEQWARLNKTQKSHMQHCWHKRVKHQDAIRQYVTRAIHDEGKMDIIASQIEAVWSERALEKQDNKKLEFDGGHMRKISGGPKRVSTESQYKHVIQQHRQSPPRHKRRTPTNRNQRERHQEIQIGTEYE

SEQ ID NO: 1012016 - protein, 62 aa, Homo sapiens
MPHYTHGYVTTLNPRVRFGYPPKIVPLRGTYTPVCDNLPLYEMEEPYHSSVGHTPFRKGTAS

SEQ ID NO: 1012017 - protein, 185 aa, Homo sapiens
MLQLAVGHRGYTPSGVTCSGEDYERLGQIDVHMFNAVSLRWTKLAPVKSAIRGQAPVVAYMRYGALECVPLSTTQCSCWGGRNDIQKGSCNVLYAFDVSGLFFQVTCSKLDTSDHDMDSYLCKGQACTLEGLPLRHNAGKSHVCRWGPCRSFGHAIPTMRLLNRIRVYDTELRLGWTVPDSVLLE

SEQ ID NO: 1012018 - protein, 101 aa, Homo sapiens
MADVEYRCFAAASPWATDDQSLQNAFSKYGDVIDSKIITDRETGRSRGFGFVTFASDEAMRQAIEAMNGQDLDVRNITVNEAQSRRSGGGGGGCSRRRRRA

SEQ ID NO: 1012019 - protein, 42 aa, Homo sapiens
GIPVKPSALTTTDRHDARRDPGPRSRITTPKKDMKSVSTEQE

SEQ ID NO: 1012020 - protein, 259 aa, Homo sapiens
TAAANWCYATVAPRARSSTIVASLGTPAPSNSSSFRPKLIRNTPVQAAPVAPALMDAAVERLKTGFEKFKTEVYDKKPDFFEPLKAGQAPKYMVFACADSRVCPSVTLGLEPGEAFTIRNIANMVPSYCKNKYAGVGSAIEYAVCALKVEVIVVIGHSRCGGIKALLSLKDGADDSFHFVEDWVRIGFPAKKKVQTECASMPFDDQCTVLEKEAVNVSLQNLLTYPFVKEGVSNGTLKLVGGTTTSSPASSRHGSSKSS

SEQ ID NO: 1012021 - protein, 261 aa, Homo sapiens
  misc_feature (217)..(217): Xaa can be any naturally occurring amino acid
SCSTPGPSALKPRKPHVTLSHSLLPGLRQQPLANDSLSWKLCPQGIPGANLVSCRYRTVPISSAPGREAGSSPPQLGPHPLLTYPRPALLCPPLPSLPQLYLLAQNCALSACFSAPVNVQMPLQLFPAHTELPTFLTSLRGPVGPRVLLSPSSLSQTPVPRLPSLPCQPCAKPLQRLLGFPAGSGDMHFSLISATSIPPGLLVASLIHFCLPCPSNXAPEENTIVVPHAEAVRWRLLFSRGRAVTSNMPSKAHWASQLHSA

SEQ ID NO: 1012022 - protein, 45 aa, Homo sapiens
TDVVSLRVCVSSSRLRSRHMAYRGSSAAEHWLAAGRDQALSGTPA

SEQ ID NO: 1012023 - protein, 494 aa, Homo sapiens
  misc_feature (460)..(460): Xaa can be any naturally occurring amino acid
DDTEGCSASLYARCKGNISSLTLKKKQSHTQTLHQKLHTTVRPPPSCCPSLSPASPFRRQVSLTSGHPGAVPTQHLAHKLLSNARRENDRNQSVRNPRVCIYLCVALVSLYIITTKDSDDRTMRRKNRNIHNITTRRRTHKHTHTEIQLTKEVARDRNERSVSAPGVAPNSKCWLLTHCWGVPRGTRKGLLTIRVTQQFERESHSSRVVAQGSFLKRPEKGCVRKNKGNSHGFVEATFVVRRACNTFFLPPRGVGAPPQILFLGGVGPSFKHQRKNSFFKDLPRKLEVAPLCIQLIFFAPFGDRLGAPHKFNGLPFILPFGAASFPYKDLWFSLSHTTRYYFHSYNNIKGFFLPTQRWLARFVFSSLPPHPLPPWDKLKRLRDGMEGGKKEGQKPNQQAEYTDWVGEEVVETSLYSTGLLHHKNDRRGPTTTHRGSAAPTKRARTEQLDSSYESSQEQPXATLQSDAPPPHSTPPRARTNRTQPTRTPTADPTQ

SEQ ID NO: 1012024 - protein, 192 aa, Homo sapiens
AAQGQPHSRRKGRSEAGPGAVKGIKHPKACKLLLSAFFPPPPASRGGGVGGGGGGGRKQRFLWRRMQTRMQNFNHLLLTGPSFLSRVWAQAWRRGSLGRERPEQPMPVLGDAGKPSLLCTSIQNRGPRSTCSRGGRVGGRRGLVLSEAAPHGTSRYPEQHACLLACSWVLNMVSRSPVGDPSPVPGEGLSSH

SEQ ID NO: 1012025 - protein, 138 aa, Homo sapiens
MAPVSDCLSRCEPRARMLPCPGSGYSTPGLAAPWAHLHVPRWLASARPWLAGSAAGSRGGGWQGPVAEPLCRPLRGESGSGALGGSRGNWGRERRGPNLLSLNLSSGGSRQLNLGKGKDRTECGAKHFLRDRVFRRAP

SEQ ID NO: 1012026 - protein, 117 aa, Homo sapiens
MAALLLLPLLLLLPLLLLKLHLWCRSCAGFRRTCAFAGASSVLAKWALRARCPVPRLSAAGRVPSPSLAHVGSAQRALVLAPEFLESLEPDLPDLRAMGLQHVGLQAQEPNTCWNKR

SEQ ID NO: 1012027 - protein, 189 aa, Homo sapiens
  misc_feature (53)..(53): Xaa can be any naturally occurring amino acid
MSGRTGIPSRIRDISGLLAFLQRSLLKTYLKCNIKNLLAGGLSRLPSAAAPSXEGETGKKIKSVELRGSSRQAQKVLGWPQAGRRGKGAPIPQTLYFYLAAFSKILSGLSSRELPADDLPDRGAGSADHASRTCPGGPGALISADPRARARHNVPWKGSLEGAENSSNAASKSKCSDKIDLKQESPSFA

SEQ ID NO: 1012028 - protein, 154 aa, Homo sapiens
RAPQPRIRFLDRQDQINQKMMQATVALSAVLTVAVRGRPAARRRSATVAAGGRRMPGGAVRASAAAAPEADYSSSVSVFPMEACDLVGGEACDAQMYPETKLGAGAGGPAAAVARAPEVEREYLSYDEPKTVFPDEACDDLGGEFCEAPYQTSK

SEQ ID NO: 1012029 - protein, 261 aa, Homo sapiens
  misc_feature (115)..(115): Xaa can be any naturally occurring amino acid
MDGQLLLAYLTTEMVDVDEGASSLYPGPEELYLKIGMNTGGRTRNRDIPGKETDWQIESPTWRDVRTGLTHPDWLGCVGDRPCHGGTQTGSPKSRKKALCMDPSISPGASSRLKXGSTLCTLDVEETYSGRCMWRNQHLRQAGGPPAWLEEKVMSYIKLDLSSFNSVTDKQVPLTANFIFHRADEPRIPLYNFVATPRTRHTATGSEEIHGKTLQEGDQIPTGMKGKLVGHASKKEGMEKDRGVGQGRVAHYLYNMKHRIY

SEQ ID NO: 1012030 - protein, 153 aa, Homo sapiens
TRARHTLQHQQAGGKQRKHNNQMATISAAAATTVVARAAIARPSGPRSAPAEDEEREGEGSYSKDAKEATPAAAVRGAGASLLAAAGAVTASAGPALALVDERMSTEGTGLSLGLSNNLLGWILLGVFGLIWSLYTVYTSGLDEDEESGGLSL

SEQ ID NO: 1012031 - protein, 159 aa, Homo sapiens
HSYSNGSSRLVAAGSLRPHRHSDDGAGHASKMDAVIDQAVKAAAAAEPAGEAKPAAAAASPAPKKILKKKPVYSMKKGQIVRVEKEKYLNSINYLSVGHPPFYKGLDYIYEDRGEVLDIRIFEETGEYALIAWVGIPTPPAWLPTYMLIKSDKLDYERI

SEQ ID NO: 1012032 - protein, 71 aa, Homo sapiens
NKPTKEGNQSASHSGFHPSIHPFLSLLGSKILILCCRPAMDGGKKGGRDRKPAQERSDRKSGTGMSGDAKK

SEQ ID NO: 1012033 - protein, 223 aa, Homo sapiens
AGPGPARCRLLGRTVGRRRSGPPLCSPSAPAQPAVRAPVAGPTPAFRPVSVRRAPCTLGEPSLCLSVLVPRWPAALGALLAVAEGKAAGLAGDGRPGLRRGAPVEAPSLLLLALVVAGIPAGRLTTSTPQRPVHFQGPADSFFGYAVLEHFHDNTRWVLVGAPKADSKYSPSVKSPGAVFKCRVHTNPDRRCTETVHGSRGRIGGTSLRKDLAGKTAMMSGCR

SEQ ID NO: 1012034 - protein, 85 aa, Homo sapiens
RCFPEAEARGLPAGALLDECVSSCSAQGSVEENNKLMTKMNVSADATDVQPQENGEKGELPQVWVNAKYYVFYDANCRGSVTGCY

SEQ ID NO: 1012035 - protein, 71 aa, Homo sapiens
MAPGRKFSPACNLGALGGMALLSVGIPSPFLPSWSGSPGRVRVRPRVAQCLWPSLFLTLGTRCADNYPCAP

SEQ ID NO: 1012036 - protein, 92 aa, Homo sapiens
MIAHCLALRYLLRTRGSSWGRTNQGVAVIANPKGVCACHTVGSRCYNNTCQLAGCAGGYMVAPVDGAGTARFPCPCRKGGRYVAPGLRFRAS

SEQ ID NO: 1012037 - protein, 31 aa, Homo sapiens
SSAAEGEQRGTLTLTTSRSDLQGLRRWRLPF

SEQ ID NO: 1012038 - protein, 33 aa, Homo sapiens
MHTEIDDELIEKYDTVVTDGDGKIVPMKLRTNP

SEQ ID NO: 1012039 - protein, 129 aa, Homo sapiens
QLPQRQVDLTEEKKGEARKMSGRGKGGKGLGKGGAKRHRKVLRDNIQAITKPAIRRLARRGGVKRISGLIYEETRGVLKIFLENVIRDAVTYTEHARRKTVTAMDVVYALKRQDAPSTDSEARPPSPPD

SEQ ID NO: 1012040 - protein, 52 aa, Homo sapiens
GTQNILGTKRKNQSPAAPRFPPSVFGVPGSELIHCSCDVAGRRSGAPLLAAG

SEQ ID NO: 1012041 - protein, 120 aa, Homo sapiens
MAHNTYTMDFTQQISRSYRMKGPSWTVSMDMPLNSGRNQHAAAHRKNHPSTVQGGTHAKARLKGAANPESQCVLPGKKVASEEFRRIMSLNSQEKFGNKPGDRGHLLEGEVRLRGKRCER

SEQ ID NO: 1012042 - protein, 260 aa, Homo sapiens
RELEAKAGELARAQEALSHTEQSKSELSSRLDTLSAEKDALSGAVRQREADLLAGQILCAADDMRLALMPGAAAQLPGAWAELQGRLAERESQEQGLRQRLLDEQFAVVAGRCCRRPVGILQDALSKLERAPATCGLYRAPQNYLGDAGPRRPWDCREAPWREGATPSTLNLLGRRSPALVAALTRFFPAGCGYHHSIGRCHLRNLGSHRTLAYPGFIEHLAGELLGPVGSGSSLAEGVKGAWKGFWGPLQDHACGGTAP

SEQ ID NO: 1012043 - protein, 58 aa, Homo sapiens
PVKRKEDKRNKYGLGEEESAAAAESERGRRKEPPSSSEMTGKAKPKKHTAKEIAAKID

SEQ ID NO: 1012044 - protein, 108 aa, Homo sapiens
EILNGALRASEERCRGCKKHAYVRLIDGTSSDGLKTRKASIDILPEEDEKMFMIISDDDMYLQKHRSSDVHLAEPRSTYRKSEQRRCPEILTTLLIGVQVARHCVNQV

SEQ ID NO: 1012045 - protein, 180 aa, Homo sapiens
PCPLPCSPSSLSFPSVFYSVHTRFLPDSLPPCFLTSMSLPFGQLPIPHLSPSVSLRHCSLSFLGHPLAPLRPPCLPPGQALLSSMSRPMPCGWLQAAICTSIAIFIRPRSLENVLEYGPGGLPFAPPNTVSLGLTRRLRSNYSLQKPGQRFQQDPEGDPWNTKRMWRGIGSIHPSSPDLA

SEQ ID NO: 1012046 - protein, 254 aa, Homo sapiens
TSELAQLLPSLGCDDRLAGQHVSPLQGSLRPPGRAPNQSWDSPFVRLSGTFFQVKADRDEEAEMPCIQAQYGTPAPSPGPRDHLAKQIALTSCRFYQAPTMDLVSPEARPRVVPLPDFGTEDAGDVQQFYRNCISVFSGASSAKWAEKIPGFADACRPADLGPCCCESAFLAALFILRLAYGSLALARASSSSALCRGATAVAVLPVVSGTGLTGILGLAHRSLGSLLCPMSPGFSWPLLPLVSSPIGGGLLDP

SEQ ID NO: 1012047 - protein, 184 aa, Homo sapiens
DSSLDVRRIASRAGQVVPAAGRRPPASVRLLGVAGQYCLWVLGLPVRGVYCCRGMWSLMVRGAACSPSPLWWAVYLGEEELLHDPMGQDRAAEEANAVLGLDMQGDHMVMLSVIPGEAEDKVSSEPRRRHLWCWRSGGFKVQRPREPFLSGWRLQQHFPDRVRGVLHRASKWRNLYADPTRGLQ

SEQ ID NO: 1012048 - protein, 231 aa, Homo sapiens
  misc_feature (116)..(116): Xaa can be any naturally occurring amino acid
MLVLRENRRTVFSSLVRRSSAHEYTWVVEDEASGFLHVRPTRWTLGLLWFGEEEGSLVSTSRVLPEPARSSVRRLVAHLPMRHYAELTEPVSVSRLSGSLYVAGRGSPGLLGAMWXCGTPEEQQPVSYALLEVTYKGSSAGMKQNQEKELDGSYRFFQNLPSCYKQITVKGPRDTWEACIIRSLQHRRNSKHLKSILSKDGVLIVLKLRAGQVSVQRRSNGMAKFRGSDCC

SEQ ID NO: 1012049 - protein, 197 aa, Homo sapiens
LRGRGAAAAVVAAACGVWRRSWPGWMSWRGGVLAVCAGGVPAARGPVRSPAWSRAACWHGWLQLCGVWPVVGRLVGMAWGPAGPRYDKIRTPARTTRRCRLEPLSPRTWWQAPWQGILEALRDVTPFDCVKTRMQSLQPDPACPLSQCVGGPLEDYKEPEGLLEAHEGLLNVTANRRKGLAHALYFACYEKVKKDIE

SEQ ID NO: 1012050 - protein, 253 aa, Homo sapiens
VKTPGRPLHSSPFTWVPLGHPHHPLQQPSGASTLRPHPPSTPHSSHDGEHPQLAQSCEGVSQCVALMSCFPSHGAPIRSPSARIAKDSDATYGMMCSHCRKTFSSRKNYTKHMFIHSGAEAAPVRRVLAILLSTRLPAQDTWSRTPALRAFQCAVCAKRFTEKSSLNVHMRTHRPERAALRPPAAKVFSHRALLERQLAGAPCALMALGPGSPTVDPGPPAHVGHARCGTRGSPTLDPLPPELQVLSLPSPFL

SEQ ID NO: 1012051 - protein, 266 aa, Homo sapiens
CVAERAALVGRLYGEQAGAMAFTPTSVSATLPPSAPPPPAATKGTPRRAPWNAAPLAAAAASSTAALMDATPVAHAAAFSKEDVAGSFTKVVDTVDAVIGVGGKVAEQSFVVLRALSEAVKPALPVLQSAGEQALKLASPVVSDASRQATEALQGAGVDLAPFQSAFKTVADAAQPAFGAAKPIASETVQTIGSLEGTDYVVAAEPRFLAYLLLPPAWSLLSYGLRGTKVTWAQLKLWTWSPLKGYLIIDVRTENDKAKAGVPESP

SEQ ID NO: 1012052 - protein, 55 aa, Homo sapiens
EEPHRHPIHFISERGLEAVKHKCSKSCEKEERAAMARHSLLAVLLVGLVAASGFS

SEQ ID NO: 1012053 - protein, 245 aa, Homo sapiens
MAQQREKVHSDLLLLHPEKLDLAVTQQSSQYLAEWRVATGSTSRTHAAPDTHNERNRLHCFPSHRAYLAHSNAYTIEPSAINRPQNPLLPCSMQASDLGSPRILPPYQYLRLGLGGHPHRRSVLRLPSPRPRFSLPAAPTTLHVPVTAAMLNTAIPIGTTLSRDTHPPAHRNTNPHNRNHPPHDHNPHTHHHHPASHNIPSTPTHHPPHLHHNTHNTTSSTTKTHPHTDHPIRTDPPATHTTHPP

SEQ ID NO: 1012054 - protein, 77 aa, Homo sapiens
AGSVGCGGSCTLVCGGGFGVGRSMVHMRGAWCPLNALRVEGVACGSRSWLLCYSRDNVELGLDRGSGPGRSGYRLTP

SEQ ID NO: 1012055 - protein, 158 aa, Homo sapiens
STPQPTQTQLDLTTTVRSSGGRRRPYRTMAMEGYDREFWQFGDQLRLQTATFSGLSLGDSIWSPRRGRAQSARKRGRPESRRGRPRGPKEERRRIDDARMNEQAIIRGAAFIRAHGRSCVRYGAQQTPGRGRNGDGQTIQAPRRTAGEQRTEDKDNGL

SEQ ID NO: 1012056 - protein, 272 aa, Homo sapiens
MRSVAVSAQLWGGGRGPCADVPTPDRSTAGDRRAVEEERDSSSHRISIETQATLGQGQTNPEGEQEQEEALEDPQRDLGHLHTTRHQVLHERDHQETHARRQGTVRDQTGHPEKGIIEEALAIELRPQGANPQGLGPPRKATMGVRRCAQERRSVATQLRKPRGARKWGPPIIEPLYPEDHHRTTEPYGTNGTTEAPCQEAEDGIEASREPKGEHSTTTIHAKLPGDRRAALAEETAGETWRNDCHEARVTARARETGLNRRTHSHIPELIT

SEQ ID NO: 1012057 - protein, 182 aa, Homo sapiens
SGTIPPRPRAHTSAVSSPPGLRRRSGQMALDPSFAIPGGASRREREGSKSCAENTRRLDIHRERCYARMTQARATCRACIRGDTTQCTTSSKQASVPSRPPKILLKPRRVSHRTPMAPSGLEFHVQIPGHNTSQSDCATQTGQASHRDIITYACPEADHYVQRKRYQAAYPAGEGPKPQKKP

SEQ ID NO: 1012058 - protein, 132 aa, Homo sapiens
MADHDPELEAIRQRRVQELMGQRGGAASPQNAGQQKAQEDAKQEAEERRQMMLSQILSSEARERLSRIALVKPDKARGVEDVLLRADKLVEYLKKVSDRTGLSHFWSKSTATQANKTKVTIQRRRNVLDDDD

SEQ ID NO: 1012059 - protein, 227 aa, Homo sapiens
AARLAAALRPGCIAALPCPREPRCRVRPAAGRPEAAQFLLAWAPGGAPSWGSVAEALKPALPPCWCPSVPLPVRLARPAAMARPARAVRQALPGHYVLAAWLRRARVPTQSATVVNPVPWCQSRSCFPTFLVEPRRMCPSVKQPRPVLLVLQGRARQRTIFFRCNGEWVRQGGPRDRGAAQNGTSVSLPHHGGSALMSSRQQVEKVSGLGGHTWCQCVGTGAPSGRP

SEQ ID NO: 1012060 - protein, 183 aa, Homo sapiens
MKRRRRYSNVSAEMMGVDARQRLEMVLSNMKRVQEIFLKFQMTCESRFPRCRSARVLTAGSRGTPAGRCASVSCARPSLRVREEEEGPSVCGGQAALDPTKAKRVTGRLEPRSPRPRGPGGPSRQEARGDSRTHQRAVPGKKPAARSPGRPQGSPRKMCARTSRAVQGPRKETASQGGIQVGA

SEQ ID NO: 1012061 - protein, 210 aa, Homo sapiens
MLAGGPSFTKRFAGPRFLCLLIPRAEACPVHSVWRLAPGGSCSCGPLRRKANRGGDMVGPQFPYSPFVRRTMALPRGGCSSPWPFATVGRCGAHWPTFPFLPTAAPLEAFALRSLCPAISHVACSPPGFLRIPQGMVRAWGDWGPIWQGVVQAQPGKRGFSFLPFWGAPFAHSASVSGTPVRAVTAGILGAPPTVALIPFPEIPLATTSL

SEQ ID NO: 1012062 - protein, 101 aa, Homo sapiens
MVSFPHGHELYPYPVGGPIPRTWVSSECWPGRGVPVLISPVQRYVGRLVKQMDVSVVEAMDGKTALRWCMYLRKWVGSHKIGGFPMWGFAPGLVGTFSEQG

SEQ ID NO: 1012063 - protein, 279 aa, Homo sapiens
SSKSLARPPYGPRSSTHGIHDHGRRSRAVVAKTPFLSGQAAPPAPPPLRDIAAAATAESPWATTCGTARTASMYLGPFSAQTPSYLNGEFPGDYGWDTAGLSADPEAFARNRALEVIHGRWAMLGALGCVFPEVLQKWVGVEFKGCPSGSRPGSQIFSEGGLDYLGNPNLVHAQSILVLLGFQVLLMGLVEGFRINGLDGVGEGNDLYPGGSTSTRFALPRTLSPSLELKVKAHPEWPSRHVSNVGVFVQAIVTGTGPFGEPVRPPREPVANHCMGFRN

SEQ ID NO: 1012064 - protein, 267 aa, Homo sapiens
AGSDRTDSTAPQPGAMLPLLLGLLGPAACWALGPTPGPGSSELRSAFSAARTTPLEGTSEMAVTFDKVYVNIGGDFDVATGQFRCRVPGAYFFSFTAGKAPHKSLSVMLVRNRDEVQALAFDEQRRQARGAQPARAPCCSSTTATQCGLRLLCAPQYALGAPGATFSGYLVYADADLLTRLRAGRRPPRAALGFSGRARRRLVGSDAGPGPRHQPLAFDTEFVNIGRATSTRRPAVSRLPSARAPTSSPSPLASLPRKNAVRFKAVT

SEQ ID NO: 1012065 - protein, 130 aa, Homo sapiens
EQVRLDSTELKEGTKTSVNSATLSRILLAVAGGFQPVKLRGCCLDPVPSRITDLGYKRRRATQMGRSNAAWSTIRDPKDYPFLHLLLLPLTRNLQGFFLGERLPHSWKIPRNLSKHEDSNVPLRRYCTMC

SEQ ID NO: 1012066 - protein, 181 aa, Homo sapiens
MAQSAPVEAALPPRAPDRCWDPRRESGRHFGASRVRRTPGSAPAGLEGGLSEAPFRALLLSRSFGTLPRAWSRARHRVLPHSGCLVCPSRPAQLLALGALPFSGSRVLRSGRPRNAATVSPGWAPPRRPRAPSQATRNVQIEASANGKAHSHRPPLEGALTQYSYGESRKPTRAEAQWQRR

SEQ ID NO: 1012067 - protein, 76 aa, Homo sapiens
GIAHVPEAHADRRRRIRARLAGPVTRLHVGPSPEEPDRCGNLLCPPRDPGQEGETIQNFLTGVAVQIVGKEKRVPF

SEQ ID NO: 1012068 - protein, 309 aa, Homo sapiens
MSEQEAQAPGGLGAVPLDMLAEQVELWWSQQSAAARRLCFVVACGPRGSACGAGRRGTCLSNHLAAAQVNGRLSTRGNCALFAGSAGSGEPGLMSSGCARDLELASGQGPSIVGPCFAHVLASVPYGPRFDWLPASRCAPRLPRLGSPWGLESLGPEGFELSCVVPPFDAAGLTGQPTHICAHKPKLGTEIPTARGANFWALHRGLMPHYETEPFPGTVSIGPFGPLYVFSGSPIRLLGGRYDVLLSEMGIERGSYGLENARGNHNSFSGASGRVLPAFTSRGYRSERPRTASPPLYPLRDLSHGSSGV

SEQ ID NO: 1012069 - protein, 247 aa, Homo sapiens
RRSRVVPEERQLCSWAPRSPPTRLLARAPLGPPAPSRSMNYLRRRLSDSNFMCNLPNGYSDRPAASASRATTWRLDWRTYLIAPELHNDRDPGQRAETIGQAKKVERMRRNADARARLIGREHQRPELSTTRDMKKRPKKATQAKPQTDKRGHMNTAKRTTHTERGRPRSKQDTRCGGRDTRVDTTETYTAQEIEPTAVHRYRHTESNPTEHVTHYGRNRPYERTHSDEDHNTQTRVYLNNMAWHIP

SEQ ID NO: 1012070 - protein, 183 aa, Homo sapiens
MHIYETPKTDVKAPPALGRVLSKSTGAASRTLFLERIPMYLEILLGNMMVRPLATCKVQGGRRTKESHKGRQGQVPAMERQALPGQDTHGDEVQDGPRRKDMLYFTMVCSLLGSQAGTHCAQGPKRSPTAHTTSSYIGCINTCEHTKQTKRTRTQRKTKHNGQTQQGHTGDIGTRAHTHKPHT

SEQ ID NO: 1012071 - protein, 147 aa, Homo sapiens
MTPVQRGGPGGPCVALGWGTAVASCGGFGSGIRGRGRWPVDGAGAEAAELAEARPTDKEWMPVTKLGPLGQRTLRESMSPWTEDLVSLLPCPLHGIERSIEFLPWGDHLFKGDLTVIAQRFIAQLPGKTRTPVTRDPSGQHRDSKGQ

SEQ ID NO: 1012072 - protein, 189 aa, Homo sapiens
MTEGNPEHEDSTRYQERASYTPKTPIIYCYMLTKSGRSQVDSSPDISAKKPGVHSNKLVRVHLAASIQDPSCHPNYQSQLVPTRVHESVRTYQYALTSLTTERTPGMSTKERHTGVKRGQPCTEKGGTPNGSHGCPEALTRHPVGLRIPQTRPNHEGRHTKEITKHHDWIQPRGWGKNARHGTQVDKAK

SEQ ID NO: 1012073 - protein, 161 aa, Homo sapiens
VRVSGVSLRVSPTGRPQTTPAARGTRRPPQDPGPSARKPLSCFSREAKMPTLVSPPNDSAGSLWGAPCILTPPGAWCPLVSLTGRGVPRPGPLVQKIEPLQFEGLLVSLTPRFNVTDTRFLWQLQGLAPRGLKTTLPRADLTWPLRLMPGTPRRQEDHRND

SEQ ID NO: 1012074 - protein, 220 aa, Homo sapiens
HAAAGRDLGTQLGSQETRAASPSRLSDSPDRLARPPHRPPTLPSLTPSLFPVPPPLPDPGCHNHVRGGDSRESRLRITSTFGCTTRRSRAVMEARSSRFTTGSTWYRLMRSEHSYNTKATPFADLTFLSQDKPVLAMALDLCSRVATFDDGLLGRTSKHEVHRDGGSLPGKRHPRNTLAKAKPSSWGDLPSSASDVARDGVRLQDDSTKNRSNIPVTQTG

SEQ ID NO: 1012075 - protein, 295 aa, Homo sapiens
RARRDSGPEPGPCRNTRYRNKRQMRIDSWQTLHCPVCRLRPSASGSLEPSPQSQAEDGLEPVLCSWGWYQRVPVKDTGPAPQERGGGELSDSGCLRVLPLPVASAISGSRPSNAFYQMSCLLDHGLLLLTTVHLLPAMAVSPPWTKSGEEGPIYWTQRDQHTGQGPTPSLLVDEATVNPVLWVPRAFSIGAVAWIEQYLLVRPCASSLISSISIVPGRWYKDQKAKPDSYEDMVEFVNAGCALCTASGGRGKSGLELQVDLGARGDLALVLPARGVELGLPGECAPCGMASCIGE

SEQ ID NO: 1012076 - protein, 258 aa, Homo sapiens
MAPKRGGKAPVPAKKKTEKVTNPLFEKRTKQFGIGGALPPKKDLHRFVKWPKVVRIQRQRRILKQRLKVPPALHQFTRTLDKNLATKLFKMLLKYRPEDKVAKKERLLKRAQAEAEGKTVEAKKPIVVKYGLNHVTYLIEQSKAQLVVIAHDVDPIELVVWLPALCRKMEVPYCIVKGKSRLGSIVHKKTASVLCLTTVKNEDKLEFSKILEAIKANFNDKFDEVRKKVGVVAVMGSQVASEDQGQAKGLSQRELRSG

SEQ ID NO: 1012077 - protein, 336 aa, Homo sapiens
SQPEGVPVWGCSVAGGNGMCQCLAGAAERLCTWCPRLVVTGFQDVLGAGAAHPHPPRPTPPGLMPPSCLWEPPPVLLLLGPASKAAGHDCPPQPGMPPLTWDDEHTTGVRCKARCPVALLDHEGVGFASYPLSPRDTRPQCEAWVAWTLGANQAVQTCPQGTIIFCFMLRVADCPFSHPTDMLSYSATRRGAGTLGRKPTEDGDKRATGVDQFHLLCKRSYQSSRTITPPHLMFRGACGEQLKVTSNGGEERRRYSGPLQTWYIGEGLQHPDGRHRVRVQLGTSTHRVGTLCDWPHQLLPLKRPGGTCGNPNGNMQNVRVSIPLTGHVFPPILYKL

SEQ ID NO: 1012078 - protein, 182 aa, Homo sapiens
LVLCVTTPLPSSIFIFLPHAELDQGERGRRMENSSGREVLPNGGGAGGMGNGAANGRAVQALQRSFAEVQAILEKNRILIQEITQNQESLEAGGLSRNVALIRELNSNIARVVDLYNALSCSFSSSLTNGSAPAASDASKGAYKKAAPCPVEETDRQRHLLLCSDLDFCCGHPWPGLSGRQI

SEQ ID NO: 1012079 - protein, 226 aa, Homo sapiens
SCAPHAPPSQTQASGRTKSSSSRPEAAGGVTRGMGQWTFQVSCAVEQPIVIGLAADSGCGKSTFMRRLTSVFGGAAEPPKGGNPDSNTLISDTTTVICLDDYHSLDRTGRTGERCDRPVTPKAKRLVISCMSRCQAIKEGKAIEKPIYNHVTGLLDPAELIQPPKIFVIEGLHPRYDERVRELLDFSIYLDISNEVKFAWKNSERHGRAWASLESIRLASKPGNLI

SEQ ID NO: 1012080 - protein, 156 aa, Homo sapiens
  misc_feature (156)..(156): Xaa can be any naturally occurring amino acid
GLFLFLPDSTPAPCEERVNIFVLFICFWRWDGFVSSPGGLIWPSQAGCSQQPWLGGLTPFPLPQAVISPPRPSPLLSFADVLFSLSRPFTPSMYSETCRRDFPFWSRWLEIRGCGQERKAPCFSFVRPASGFSAVDSPPVYLPSAIPAKGLRKFNX

SEQ ID NO: 1012081 - protein, 136 aa, Homo sapiens
MARTKQTARKSTGGKAPRKQLATKAARKSAPTTGGVKKPHRYRPGTVALREIRKYQKSTELLIRKLPFQRLVREIAQDFKTDLRFQSHAVLALQEAAEAYLVGLFEDTNLCAIHAKRVTIMPKDIQLARRIRGERA

SEQ ID NO: 1012082 - protein, 52 aa, Homo sapiens
ETRDLVRLLFDFPPFLYTQEDPGKSGDHTVNPRRRGTLGIVSPVAAVITAGA

SEQ ID NO: 1012083 - protein, 41 aa, Homo sapiens
MALLTTRTLSLRQRPVVEASRQAAKREAQRKRERHGREREV

SEQ ID NO: 1012084 - protein, 59 aa, Homo sapiens
MARPSSSPMATRLPLLLVLLSSLALQAAAQKYNAVYSFGDSITDTGNLCTNGRPSAITF

SEQ ID NO: 1012085 - protein, 38 aa, Homo sapiens
  misc_feature (33)..(33): Xaa can be any naturally occurring amino acid
MHMGFLREPMICSNQNSVVKTLILSRPSASRFXGLLRH

SEQ ID NO: 1012086 - protein, 269 aa, Homo sapiens
ALVFALLPQNCRSCDGRPLRDFLAIVYAGLFFPAPNSWVGSVCLKSLSSQSCTRVPLCAVLDPTAGPFRTPSQERTLRTSGVETPTCVCLSSFPYSRSVLLLPTSAVSWSRWFRSCFLFLRVPPDLVGGGLSSYSRCPLVSRFVFWSTFSFSLVCSSWPLLIPLRGRLSCRPSCEDLLIIFSRTSLVLDFGLVRLKGLTGWIRDMQAMAPGTDVTQVLEVSRVHLLSRRKVKLRREALTLEPAPARLPEPVLTRALASDDACAVGPAGA

SEQ ID NO: 1012087 - protein, 89 aa, Homo sapiens
  misc_feature (18)..(18): Xaa can be any naturally occurring amino acid
SAIVSKLEAVAKTLNLRXEEKDNGVVKMQVRKEGRNGVLQFDSEIFEISPSYHLIEMKQTSGDSLEYQKLLEESIRPALKDICLGMAWS

SEQ ID NO: 1012088 - protein, 214 aa, Homo sapiens
WPSLGPRGMTVDHQWPAGPPGSKVTEAKTGEKGPAGGRLGSWGLQGPVGFLERCVAPRPPMRTPWSSWQPRPLTKQPPRGALYSLQPVYETKTMETHRLASAICGHKVLAGVQGPQEVLPLESTKWFHPLSRPKEGPPQEKLPRITRMESQEAHELGRGQKGTKMGAQSRSETVGLVDNGGGHMKRDEEKAQHDFDKKVSAQGRDQTDPEQNGH

SEQ ID NO: 1012089 - protein, 102 aa, Homo sapiens
RSPSPLPVDTLPAPARSPSAAAGGQSADKLGTGERLDGDGGAGALCGPEAELVVMRRMHLSERRMTLFKNAWSAVQEVSFDDPQEEAIWGCATSVAYDDRRL

SEQ ID NO: 1012090 - protein, 116 aa, Homo sapiens
RSGGVQSERCAVGRLMGAHARARWAIWCSSQSGTLIQLVRHESCNQPSSNAKSDRPIEEARERSKLPSVAASSYSGSDLSKLNETRGVFRIGPCATPASHSWASLSGQSDSRTSRL

SEQ ID NO: 1012091 - protein, 294 aa, Homo sapiens
AGAWARGLCHAAAKARVDSLGEGERGRGVPWAVFGGGWGLRGWLGQSPWCPGPGLLTLLCCVFPRTPLCAVCVSLSVARCSACPWHVLHWCPVRKVVHFSDELHVDVASLSAMVPRSNVLLRDACETLGVDYVLADFARRTASDTSKINRLMPRTRRDSSGCAQFHIVETCCSGVCLKQLVYAGLPYAMWRLSYDEGFLRDNVSRIRFTERELSTESSANTKCLPSLTEPLIEAKEPAELVDTAYRFHAQNMTCMMQRGQEYNANEIHKSTHVPELGARSIGIHMGLIARRLSA

SEQ ID NO: 1012092 - protein, 109 aa, Homo sapiens
MYRFAQYTGLQECATIPANFYISTFAYFGRDRRSHHVAQAGLSNLGLNVIHPSRPPKMKDLWIKFERISPGDKWVITCNPSDFMQRWVHQLSAMTFKTSLAKMVKAHIS

SEQ ID NO: 1012093 - protein, 383 aa, Homo sapiens
AGDEPIAVSRERAVAAPGRGPEGEQILTNGPMGAAIATCWASCGPWSAAAVGYCDDCSRCLDPAILMTPGLQHPSTVVQVPRVAVCSPDAPPGGRPMVPAPGAPRDAFGACPSDDCALRHLCPPTRTMGRPGPAKVGGKTALARARGRIRCDVEGRGSLGPGCWAGRACGAPDPVPVAGERRRTGVGFDRSYFPSLLRVGLPRAMLAFPLGVRSSAPFAPGSTTVTMNAPTLATRASQSDAQSGTLPIRMSESKSRGGSGTDSPPLGQGAYRCPNSTGLPTQCKMPKTNPGWRAPWARNLPVNSFLWRPSKVGSYLRPPGWQRNERIGTGGLTKYSVPPQSAAKRQFWPIPLVKKGADGGDWHTSGRREPISCSHCSPARYRN

SEQ ID NO: 1012094 - protein, 142 aa, Homo sapiens
EREGKGAHAGRRGVPALRFVAAPSRHPGVAPVQLDFGCLRMLLTEETQLTQAARRYLFGSAGVRDSAVACGPASSWPLVQPPVAGRAHAPVPRLVRGLGAAVNGGSARTAQTWARQALLPRSGLAVIDGHLALLSCPGLTSW

SEQ ID NO: 1012095 - protein, 76 aa, Homo sapiens
MTHLKIYAVRKYTQISTCVKHNKFMCRANCTRNSQICLRTRDVIRHHPPIGIILTRRSTMNGCTHNQQNVYISYTH

SEQ ID NO: 1012096 - protein, 118 aa, Homo sapiens
SGVTLDSMSKSGVRGKKAPGPGADGSPPSVDSDRLDLPISVSPVQSADSCALSFPDQIISHLSGLHLLHTCKVTLKDALLQRVLSGNVLWSTLLRDTSPGYCVEAGAAYVYLYASNVG

SEQ ID NO: 1012097 - protein, 184 aa, Homo sapiens
MVEVGEFDDECTSETARGGVWRKTSPVQNRIALTNSGKVLPRLDENEQHHVRVPWTPAVVTLTSIGESETGVQRIDRDRDLCEPLCLTDIRIAQLKVWTLEGAPKKGPRASTVDYTLCLVALHPALICDAEPDPISLLRMLGLVSRTSWSPCDQRDEDKHLLIDKQKLRVKKIHENEKRLEAGD

SEQ ID NO: 1012098 - protein, 105 aa, Homo sapiens
MSMNSKQWYPRISRRTVQVGRLNLRGTFSETLCEVLSFMETPPSLPSMPSEPSTRMGTGALTSREFIVRSVHQAPGGSLEHEARTGPSICMTWMVDGHDRPEWRC

SEQ ID NO: 1012099 - protein, 137 aa, Homo sapiens
MADAKATTAVTLRTRKFMTNRLLARKQFVLEVIHPGRANVSKAELKERLAKVYEVKDPNCIFVFKFRTHFGGGKSSGFGLIYDNLESAKKFEPKYRLIRNGLATKVEKSRKQIKERKNRTKKIRGVKKTKAGDAKKK

SEQ ID NO: 1012100 - protein, 256 aa, Homo sapiens
RNSGRASASSEPGGSDPADLETGPGGWLVRNRVSLSLKVVMGSMLLRPSCAGPAGFQLAATGCWCLDPDTLDQAASREVDVEVVISDGALVMKTGSPMGHRISGVNEDSVNIYSECKRLCIVSLQLRREPRQLTWLMWSGNRMLDLYAQISSVPIGYMPPDLLKLDPNESVNNASMYVNRPGLGILPPENFVEKLRQSLLSVAPKGMSQLITEWPVGSVLRMRNALETSFMWYRSKERGQRGFSQEELETCMINRP

SEQ ID NO: 1012101 - protein, 415 aa, Homo sapiens
RVPGAPEALRALRARGKRLGFITNNSIKTRAAYAENACLLPGLLAGPRWGPAPAWMVFCARAYCTALYLLPSALAGRPLVPKGLRAGQAQYLSPERAGRTVGRRQLMERGGPEDHVKDRRVPRDDWACSGRPNGSPKQCRGGWMDEALDPGHLPAYQLTGSPKGPLSDLPLQSQAPGLPIESAGATHTIWTNAEVSSALKEHGHRLSNSAGRDSPDEPRPTRGRRDGKKHLLKRSASDDEDEEDLTSIAHMEPIYETTEGYPQWWTPPTRRINHERMEIHSGTQEDHDVEENGTQKHRNRPTRELPKHVHSSRGKEPPIEPRGFPNVITREQTAMIVYPPEGVNVTQCRRFYTAPREGRTTPWHKISRLGEEDPEGPLGTERQNEYPFHLYEVGHHHLVCERLPTNEPKYTMDSP

SEQ ID NO: 1012102 - protein, 137 aa, Homo sapiens
AGGSSRPGAASVRASLSTRRKTRLSYGTLKKHPSVRGRALQAHVIGGCSVTALRGEILSLVLERPGQTSMPKAQEKVRGKVSSLVEKVYERGQREGRSLGFTWWNEVRSLTQKNSEDVDLKLIIAVTGDGSNDRTAG

SEQ ID NO: 1012103 - protein, 79 aa, Homo sapiens
RRPRKDQSAPPLIPEVSKPLVGRGEQAFTMAVAELWETLKQAILAYTGLSPTAFFTAVAVAAALYHVVSGIFAPPPPPR

SEQ ID NO: 1012104 - protein, 341 aa, Homo sapiens
  misc_feature (53)..(53): Xaa can be any naturally occurring amino acid
SGLRSVGRAYGTHVMNLLPRVVRQVLRAEERAQGILPPAARPSRSWSSSPVTXVSPRGSYRSCGSCQPPLGALTGMSCVIGAQMLPSGKAGPSGRCSAPRGWTRASPGGIPCLTASRGPIFARETPATRQALGSAGSPLKMLQGVGIACGPSIEAAGKPTLGQQPLFEENKTFVEGPFPDVDRKGAAPAQRGSNAHENKPRVGRGTAQGSFGLPFKRPGGGRWRHRCRSARGAAFLAEFDRGLPLHDFFDTLVTLRPFLPLPSPRLPLVGRIGKGKSKGFNARPDIIPHQVPTKRAPFLPGLFQHGICPSANVGARRSKKDNYLFQPVNSGAPRDINQTNP

SEQ ID NO: 1012105 - protein, 100 aa, Homo sapiens
MCTGQWNRTLRFVENSDRAKLTFRLWTPVNNPEVPFPRDMIDLEAIVLTKIDNELKEINYNIQEALKRNFLELAELQFILRRTQQFVDEMADPDLLEESS

SEQ ID NO: 1012106 - protein, 141 aa, Homo sapiens
METEQQQKKPYPNTVNQSGEFGRDALQKIVEEERSIEKSLETTDEMVEVDSIRAFRAKNAGASDWKRRLRIVKASPILDYNASVSVTRRADGPEAHIEYQLLILKADEEKILTRKIIPTFGRRACECANHPSETSQLPLDI

SEQ ID NO: 1012107 - protein, 265 aa, Homo sapiens
  misc_feature (209)..(209): Xaa can be any naturally occurring amino acid
RGAGAWSLARRVVVVRSLVCACLSRGGREAGCAIAFLSPARLCTWALVPSAGDPTSLEESARSRPWKVGEHSICRIRKNNCHRSSRVSRARIVAGTPGCSMGNCKIAGTSGSSRDSGLGFLPFDVFHLDVRPRFPSSVSNRLALSSPQHVSLVSRGRDPLHRCRWDFGEHPGAAKGALAPSLVVRGPVFVHRSEFGDTNKEEDSDSWSXSLYGSIAVSDWRLRERTITIPFSLSLCHSELGPDNVLASMRPLGQIGFRSSSLGVV

SEQ ID NO: 1012108 - protein, 247 aa, Homo sapiens
MAGERRHRNHTNTEKKDREREEKKKGRKKRRREGGATTRQQGDKKGREREGTDSESSRKEQRNTNTREKRPDRAGAQHDLAEEKQQRDAGETARQKNNGDERTKEEQREREGGQGEERKTGEGRKNRKETGKNKARREAGEAKHRRRGNGQRKRKTRQEEQVGTQRERGRETRAGETRRAGRGGREKGRERDQQAREKEGSSEGKQQRGGEEERQKGREESKRRGEKTEDGRQRGRRGQSRGGDGEG

SEQ ID NO: 1012109 - protein, 411 aa, Homo sapiens
MADFDSYEDRAYCSFGGGQRVHACSCWWLIGFPVSRRSSATSSPRAYTVISYGHMLPFRYGFMGRRKDAYRVKDSHAIQRSCTAEVNETKDNLIEIYEDFWLLVEFWIERWGVPDNGSALSIQTWVALDQERIRVPLCTVVCGPLSHEYGRAKQPHAYKGACAWWRNFLGIDMGSRTRGNLNHDVGLYEVGIRTFSFTVSEPEGGRGQGPGRPQGTRSPRGLRHRMGRTLSRWGLATAPELKPRNEVGRRRNPTVGRSEDNPETHSGQVVGRGKKSPAESQGHMEREREGKADYGKGTPTRERSHGRFENIATGDPMVRGWGVSRSPTISWHNGEGPQKIRAKIFPWHKFRIHEGGEVWPQGVRLSNRKSDSGSAPTQRHCGRDDREKLDELFGAVYVARERGKLGGQYAR

SEQ ID NO: 1012110 - protein, 106 aa, Homo sapiens
AWVGAARRSEALAGVGAARRRQGLRGAPRRPVQFLADGVRLPAICLLSLVSCSPALLVPVPSAGPPGGRWAMVLASPPSKDLCLVLSSSLDLSWWWAGLAIFSCVL

SEQ ID NO: 1012111 - protein, 103 aa, Homo sapiens
SGPTWSRAPDPCCSRVQDSCGGAFSSSRCAELSSPHARRVCIWSLAPRSSRGRLKPNTVPGAACRRRRTLRPLPNQQVRDADMHPATGKWICAFRVDPSEDHR

SEQ ID NO: 1012112 - protein, 39 aa, Homo sapiens
MERDQRVQDSERQRENTTFDAETAELKVGNSDSEAQNSR

SEQ ID NO: 1012113 - protein, 84 aa, Homo sapiens
RARPAGPEPRRPAQYPDRTQPTRLYCRLRALPRGLDDGLLRPDKRVDKDADSMDYGGVVPAAMLQVNLLACGIYQLRSVGGTET

SEQ ID NO: 1012114 - protein, 283 aa, Homo sapiens
MGPSLGPCRSMLSGPAGRFRAREKLAHVTVLIAAETLSDGRRWPLTVVPGTPMTTFSAAQWHLSTDAGTPLPFRCTWGRRAPAGFQLIALAPLRPAPGLERWRKLWFSLRFPGEAVTAVPDQGAPYRKLPGDRLRGMRERPGTPSVAGCPTSAGLTPPGGGETLGKGGTECAPPEEAPRTRRVEGPPAAEEYPPSRALWQRGATTGRAVRADTPCRDTIQEEPPLHNSILNSPPGPNPPETPPILSNITHQGKASNYGGPGYRGAEALTSTKSATQLLRANRE

SEQ ID NO: 1012115 - protein, 98 aa, Homo sapiens
MVTVQERWEGYNSTGVKTILPERHTVHIHKKTFNLEVGQPGMYDISRAHRKEETYNGRVTPPQGSVSPLEHGTTRGTSHPQRNDNPHGTKLQPRAHKS

SEQ ID NO: 1012116 - protein, 178 aa, Homo sapiens
AGIQPASCLSGAQVLGPLYSPALPGLAVSCSSSHAVAVAPGCLSCCDFGCGAKQGLWGCPPASWAGTEPETQEQQSRSKRGTEDEEAKGVAPRYVPEECAEIPPAHITLLGLIANQAPRWSTRLLNPTKDGGHPKTVGRNSRGKLTGCTRARGYRSRTPCIRDRELLTGLMPSMLLAL

SEQ ID NO: 1012117 - protein, 189 aa, Homo sapiens
  misc_feature (57)..(57): Xaa can be any naturally occurring amino acid
  misc_feature (82)..(82): Xaa can be any naturally occurring amino acid
MPLPTVEIDNWDYTHRDACVQANAKDSAEASGAGGGLLDCITCGLHAPLTCVMLHHXHHRVPADSSIPSCDDDETCVVSIVXCAYQRTLLRTGCPARLPSLGCCHSSQPLTRGQQRGNDEERKQNGQKKYRDERYEAELQDIFNDVLELLDKYLIPNAYNKQNSPVFYLKLTMEIIYGYLSEVASGRQR

SEQ ID NO: 1012118 - protein, 119 aa, Homo sapiens
MVVCKGFVEDLDESFKENRNDDIWLVDFYAPWCGHCQKLEPIWNEAGLETETACGFSRLRLEQMVCYVRYSMHLLQELWQFDGYPSNYSSLQGTWLIIIRGPRTKADIIEYCSQSYLGL

SEQ ID NO: 1012119 - protein, 175 aa, Homo sapiens
MDNVFGGRSAEWGGTDVPCSVQSRVVLEMLERAKMEGGGLAEPCSCTKWLAWEVLALGWTSPDYYEQHAVYFAVLRFSVSHRVRRGERDDRPFRIVLPSRNRWHECEWYYTLQRAAVGNISIHLVPEATVVGTSMSYSFITDGESNLPMCLARRAMRRRITTEETTSPLGPLEAA

SEQ ID NO: 1012120 - protein, 147 aa, Homo sapiens
AEWAVRAETVLEAGAIRDRRCVLMRRMALSRTIIVVGAYAGVIRYSTQTENTASATIHGIQMPTAFICSRLCSNRNRVLIDHSNLRQSETDDWDVTTVTGLFWEMMSDTCHHEERDEKSGRALEILPLGKERGCPSQEKNTYLYLLA

SEQ ID NO: 1012121 - protein, 60 aa, Homo sapiens
MSQWPSPTSAATQPSTVTSRAQTHASVAATDCMGTLARGPTLQFLETLPKYLATDYAPAD

SEQ ID NO: 1012122 - protein, 79 aa, Homo sapiens
MVPQKGRGGKRFPYLQLFKPPHGAWAPPPKEYVWRRSQRPWGVEGSLEEARPLIRRKLVPQYTAFAKHQTPPKRRAQNV

SEQ ID NO: 1012123 - protein, 231 aa, Homo sapiens
AGRRIVASRRQERDAQGSRDPPAHTHMHTLRALTRIHTPSLPRSPPRPPSRSRALRSGNRGRSGDLEAAEPGDAGPERSRARTARPGRLRHPQALRLQCPQAERATESSPGWALPSCTPQTPTQPEVSHRGGPDLEPGALSPETMLEDLYDHDLATLSLWGYTAFSLHLQGSDSIQLLDQLTKSTPDPSLGQGDFSSFGTQQGHSSSQVHAWDRDRTGCRTPGPQRPSLFA

SEQ ID NO: 1012124 - protein, 71 aa, Homo sapiens
  misc_feature (4)..(4): Xaa can be any naturally occurring amino acid
  misc_feature (67)..(67): Xaa can be any naturally occurring amino acid
  misc_feature (70)..(70): Xaa can be any naturally occurring amino acid
RRLXVEVVAAAPQCGEDGAAVAERGLKSVVWQKYKPGLMTCRKSEGRLDDITTLSLLAIQCCQKLNXNSXP

SEQ ID NO: 1012125 - protein, 32 aa, Homo sapiens
MRLSPWGGGADTHIRVSPNPLAAAEKVRNVHP

SEQ ID NO: 1012126 - protein, 208 aa, Homo sapiens
MRGMHRIKRTTRSELSSARDRWSDLIMEVVTSCVCKGFQKSCVLETMNGLTESVPIRSMHDSDMRAQSFTHNHCTWVLASCNVPDFRLCEKALCSTSGDPMLVITNDAIRYQSIDVAHRLGGSRRAFIMHEDNAKIPPETRLTSKSTARRMPEKDTTGPSTKRKTRGHSEVEHLPRTMKFTTLGSFLPDPIATTAQGKKRRQPYGQFP

SEQ ID NO: 1012127 - protein, 129 aa, Homo sapiens
RVHPGLGVPMASRVLSAYVTRLPADFAAAAPGSGCLAVARPLSSRYSAPSGSPDRGSGLLQPALVLAHRSWYSYTARAVSIRDSARPLDVYARASKDPCASERYSKRRIDEENLSAMKKCVLHVEVLSY

SEQ ID NO: 1012128 - protein, 81 aa, Homo sapiens
RDVRVRQLPSCPVPSRCCWSLDSLLPGPGAAQNEPRIVTSEDGHIFCEQPLYSHVTLQCNLTIQTLTPLHTATGLKNGRWN

SEQ ID NO: 1012129 - protein, 136 aa, Homo sapiens
MRTYRLRRKNSMRQRTMLMLCLHNKAERWYTHRSLWNTYDDSPMAENLSRVGVLASLLKFEKGDGQYTTYLDSLSASTTVDIGCEKVNFVIGLIRDSCLTWINLNTVCECYSTKDIIHRHTFLDFTWTLAYFEEGV

SEQ ID NO: 1012130 - protein, 123 aa, Homo sapiens
AGDDPRPLLPGYWGLCLSAQAAVDSTRPGAWCSSVDSSWRPTEGFPPAGVRRVWLHRTIRDREGGTGSMWTRSGAPACPGVHGRDRLPVPEAVTEGAVRKSLAPEDLGKTKHVSFCKVETSSI

SEQ ID NO: 1012131 - protein, 125 aa, Homo sapiens
MATALLREKAQKLNEQHQLILSKLTEEEDNKYCADVRGLRSSMGFLEYWCVVLRIRCAGIHRNLGVHISRSNQSNLEPMDMQNTIRCVRDMGNATMQDYSMKPIFRENFRRPTEQIKQWNCSHQR

SEQ ID NO: 1012132 - protein, 216 aa, Homo sapiens
SGGFPMLVLKSRPLFLGRPVDRASAAETMSADGAWRLMAATQVTVENRYSRSPSVVDRVASYASDQLHRADNGVRSLCLHRRQSYPHIKTVCCTATREGSDGPSTAAAVSGASADPLHSWTPQIASRQRIQPTRGLDKLEENLPIPAAEPTEKVLADTKELVSSKVSGGPMRWCLRAKDTVGHPMCRRRWTRPAVAVQSGRGQDKVRNDRRVQSVM

SEQ ID NO: 1012133 - protein, 205 aa, Homo sapiens
GRRFGEVQRVDGHVLVNRGDEHLVADRVAEGDRGAELAGSLDEDDQRAERIGPDHRGDDHALNCCHRLAPATCAISSCEAGIDANALRRIRERNGNSSAAMMKPIPHTELMADRTASPSMGPKSMSATPRRRVKSIHAIAAANGGVINGTMTSTSTHPARRMGVQERKNASGAANRVAKKTTRTESQTVLRMTRSISGRTRLSRA

SEQ ID NO: 1012134 - protein, 101 aa, Homo sapiens
SGERLRHPCRHADLYSEGAAGVPTCRLALHDLVAIGEPGGRTPLTTRGLCSSCRQSLVIQYSLCHRKKSQAGFNPPQVCWDLRCVKPNTSLERKDEIGMID

SEQ ID NO: 1012135 - protein, 68 aa, Homo sapiens
ERDGGFPLLTPALGEEVRSPRGVCQSWYTVDHIEEELYACQRGCGLFAYLVSGVDDWNGLKSTAKSAM

SEQ ID NO: 1012136 - protein, 39 aa, Homo sapiens
RSGGGLSGFEPVSGSGGTGRLRGWLTKLEVSASASCGAL

SEQ ID NO: 1012137 - protein, 137 aa, Homo sapiens
AEGTRGHLRSLGLARSLRRRLSDALLSSLWGRPGFVPPVIAQIFQTCKRARFDCQSLRRHERRDLRSRPTLGHYPGKEISAKREGRYATRNLLYTSLTVVIPDPEDSRTLTSLLEERSDDNYTLLLPKPYHSMSFRR

SEQ ID NO: 1012138 - protein, 231 aa, Homo sapiens
MSPGHCGERVKDPRLVSVLARATCGVFCALACPRSSPIVVSAPSSSACSIFCLWLFLLAHGLGFLLGPPPRRFTRIFDAGLVFVCYVGDCLPHLAWTNGYFVHGLLMFACDATLFYASAFGMQPLALRTGLVDGTRVSGLCYALRLTHASQVPSPTWWGVYCGPYRLLWRWRAMAKSAAGRVQTGAGQSWQLASGALFFIISDLTIASQILYSCALLSGAYSWSTYYVGTN

SEQ ID NO: 1012139 - protein, 189 aa, Homo sapiens
MALGFAQGSPTLLETEAFPKPNAGKLVGGKWGKGFPASPRGGWRLGENAFSGVFGHFNKPVIANSHCKFALQIHHPFSLSPRQRWHCSETNNVGPCPLMMTVGREVHGLFPFPPLFPFPFPFPFPILFSLSFRPLSFSFFPSLILSIFSSSSFHIHLSKNLPWPEITLSLQKLASLQPISQVGETEAWA

SEQ ID NO: 1012140 - protein, 139 aa, Homo sapiens
WKRISLCAQAGVQGSICGSLNSASRVQPFSCLSPRGVLELQAPCHHARHNFQKLLRIRRRGFQPCVGPGCGPQNLLRTSVITTPALVGSSPRSAASKQQGERPNPAPGAVTIHLLYLKTRLNHYKQSVCAAVDKAPLMR

SEQ ID NO: 1012141 - protein, 106 aa, Homo sapiens
MRRKSTGETSSDLAELTEPVVMRWRYLRTGGDRSIKPCPETHYLSNESHGPAERACGKNNKESERRQEICVSPRVYEVTSFELATVGVCALTESWSWGVYTSVAIG

SEQ ID NO: 1012142 - protein, 71 aa, Homo sapiens
AHKPIDIINMISNGDSIVRAINPIAECVQNVLSSYPCEDIGFATIGIKAAPNVHLQLLLKEGSKILNQKNV

SEQ ID NO: 1012143 - protein, 147 aa, Homo sapiens
ADGAPSLDQPRNPQHGDVQSFGFRGPHWKKNCLGPHIKLTLTVADELKRRSVPKAHVLRKFTNLCWAAFMAILGHSQLRQSLRSTGRAPALLHPGTGPCTDQEAVALQVVPAGNSKAHKPPRDLMAASSVQWAPRLPPRRVGLADVS

SEQ ID NO: 1012144 - protein, 109 aa, Homo sapiens
EECSAREESVVREPVSWLWMRLSGAGSRCLYKQWERLWGLCRREDPTPSGGGRLSDAELVPLPGEKVARFKGTTEGGHGGEASGVVCLCVCEAFTSNTLADGADTLGII

SEQ ID NO: 1012145 - protein, 39 aa, Homo sapiens
MLGPSALRWQLPGPSLDASVNIFRRQRGSTGQAVVTTQS

SEQ ID NO: 1012146 - protein, 181 aa, Homo sapiens
HRSDLSLLSISFLPHLRSQEVQTLVQPASADTPRRAASRKQVLRRTAGDERSGLQGRGFGGAAEMDRKRIKEALEKHTERPSPSTSRGASREKELLAAGKITTQIGKVPKVSDVEEFETDSEDSDVSGSEGEDTSWISWFCSLRGNEFFCEIDDDYIQDDFNLCGLSSQVPYYDYALDLIL

SEQ ID NO: 1012147 - protein, 139 aa, Homo sapiens
MARRSGGGRSSRPAPRAAPVRNPPAPARPAPPPATTQSSGGGIMSGIGSTIAQGMAFGTGSAMAHRAVDAVMGPRTIQHETVVGEAAASMTPMDNAADDKCGNPSKAFQDCINHYGSDISKCQFYLDMLNECRRGGATL

SEQ ID NO: 1012148 - protein, 232 aa, Homo sapiens
MSKLPRKLTRDLERSAACPGPPVWLLYCPDSQSLSSHLASDSPEKLKGLLVMSAAPFCLFVTFDLLFIFPGLDHRTEIPTQATPYTTCDLGRSSKSRTLKLPSSTSLSVAFFRFSGLLLGYAVAAPPRTWSGRLPVTTLVSSAFLIVTVILSGLLYARGGEFGVPAPPIVSFVLAWWETVVPDFKGPTPVKAEDGADGILPPRLLLPVDPCCSPVLCPRDSSIHPQNPLQGL

SEQ ID NO: 1012149 - protein, 487 aa, Homo sapiens
LVPCSSKWIATGLDVEKDMVKAELPHTSSRSTSSDFTAAALSTRGPCIDPKHTCTTMHIHSAPLARPTVVRLLLPLPPERTELARPLAQPAPYPKSVTRPPPHSVTHSHATPPLPHPIILTSPYPRLPPVCEPLYALINSLPPYRQHLTLTTAPYPVPTHRHSPPGSNLSLDPHSSDKSQNAGTDSPTTPCVPWRPPTRSFRHQHKIIRRTGATFPPRQNQSLGHERRANTGPSNRGHIGLKARFTLRKPLALSFPPPLAQPQSPQNDIEHGKLYTEAYPNCPTAKSNLAGLHNSRAYNLAAYTTPTFKPPIRVLTLRKPRNAQTRMAPTAHLPQSPRNSPHHTRLFTQRSPLTIVPLAPTQKRLPPRSGTTTPPLGPSPALPPTASREPFSIWDRWRSPQLLYRMSILAQTFPERRHILGTNTFECRLDRNPPYQHLHLSHLHHHLPLSTPRPSLHINISATTSTTSSTSTQPQPPNDSTTPQKST

SEQ ID NO: 1012150 - protein, 186 aa, Homo sapiens
MPPPSNTNRTRHPAQAYLSTTLITPRTHPPRCHTTPPHPLPPAHPPRNTTRPSLHSPRTARGPTRNHPTHETTPRPLIPPQQHQRDHAHGPEATPWHFTKPTKFDTADTAAKHRERTSAPPLSPTRDSDLPSLPPTRPTHLRRHSPSTTHLHTAPSTEDIDSEAPATKDRQDPTNRQQKSTSRMHA

SEQ ID NO: 1012151 - protein, 313 aa, Homo sapiens
VRVPARVLLRAGAKPWGGQESWPVAGARTGELTVAPPRCLRSGPCAPWCCWPSWLDCELVLCLACCETVRAGSFRVSQAGVHGVEPGLLVRQGSAVNERFKEPPQMNRPGAWEFRDGSLVSQALEEGWMNGQGAFRGCQFLDASGNLRPELSFIRAWPLRPVNCERVVSGTGKPRDPPYSALRVTLGKGPGSHGRTALVVLCLRFGYPRDRQSLWGCLGFLPRRKFRSGVVPLPPAALGGGLAIGVGDPVEPPVVERLPRGRNSLLARRDQNPREGVSLGQVLENVQRWRKPPEALGGNSNLASPVMPWGLKT

SEQ ID NO: 1012152 - protein, 335 aa, Homo sapiens
GAGLEVGVLRDALRESLRRCGTWPELEWRRGSGLVCVSPMPGGAGFWGVCVQAPWVNGLGDVGAYRGVWPGASSHVRVGCTDLSCGQRAEDLKGDPDQLARSRSRPSEQFQDREWVCCCHLFRSGPPLRWTLHGDAAAGGTKQSVIEEAAGQAAGDEVYSHSPSEGEGLTDKGYRGELGKTVLEERAFSLVKDCRIPMAGPLVDCAYMIASHAPKGSRKKKEREEPGSIGREKGKTVVVGALQPGWNVLRGGTDIHGRETNQGAIYQGDEGLTADVPMEKRSDKFHEKESGRRRARSYKRYKKHRTWIACTEVNTRARSRPRNKGAQWWKVGVSK

SEQ ID NO: 1012153 - protein, 102 aa, Homo sapiens
MLYLLLIPVLLLLRATNRRSAGERAAADNHGGRPLPSPPNKLPLIGHLHLVGPDPHVSLAALAAKHGDGGLMLLRLGQTRALVVSSPRAAEAVLRTHDHIFA

SEQ ID NO: 1012154 - protein, 41 aa, Homo sapiens
FGGLGVMAVASRLAVARVVQPDGGAASGRRGRQGFAVVGLP

SEQ ID NO: 1012155 - protein, 248 aa, Homo sapiens
MLPLGSSELADAHGAAELPVAARIGNSGPWIIRIRGFIKGADTCGRAYATSMSCKHVNGLRRRVMGVYARGYEEGWVEGLDTGSSISKQETRIKGKGAQWAAVTLTEQGEDRRTQIEELQGSTYASYRLPKNEGALCPNSVMRTLRASRSRLGAPQTGPSTPAAKLGSGPHPFAPSPSGHGQADRPGGPFSGPHRPTAQQFTPTERQETDHNERPTRRHTGTARCTMMGAQHQHHGTHQHDTTAITTR

SEQ ID NO: 1012156 - protein, 90 aa, Homo sapiens
RRERMAAAELAPLAAGGEEAAATISVPGSPVSAGETSAERALEEAVATWDPEPVYTVRLKHFAPWAAACSYDLSDITQADLSRNRFPEVP

SEQ ID NO: 1012157 - protein, 128 aa, Homo sapiens
MKRGRRKFRDMAVYLYGSPPIHKVKGAGSVGRQVWWAFQEIGRIYTGSARKPFGPTTRLVNNSQPFYQEIPDNGNLTVQRLRRRLGPILGPLIQRGHLIPEKVAKRSRCCSAYRGVATGFNPGFYSAP

SEQ ID NO: 1012158 - protein, 37 aa, Homo sapiens
MASSAASLLLAAVMCALAASSASASRDLRSRPTQFVV

SEQ ID NO: 1012159 - protein, 137 aa, Homo sapiens
STRQGKAPVVTQEKSKSSKQHRAREKRSVSREEVAESKPFVFAASPKKQQQEEEEAAPVRRRKPAQYRGVRRRPWGKWAAEIRDPVKGVRVWLGTFPSAEAAALAYDEAARAILRAQAKLNFSSSSAVAAAAPGARK

SEQ ID NO: 1012160 - protein, 260 aa, Homo sapiens
AALPLLLPGDGKPQPGRALGKALCALLLATLARRRPSSWGESPSVPPEPLAIYSITFTGTWSQTGLPPSSTPCSCPPEQWSSLLVGRGKLRLQHVEEEPDTSANGTATHFVGRRGEGHGQLMKEIEAGGGGAAERARWCCSAPAVPMRHRCMTSAELEVQLQDSLVSFVVRIVPSPDWFVGVDRLDLCDGDRWRDTGGAGPVPLRRPVDGLAASLLLPQFASIPGDTVTEITCSSPSHPANVLLLPAAEGPASHRQGDTC

SEQ ID NO: 1012161 - protein, 307 aa, Homo sapiens
EAPSSNSRLGHRTTDSGAADMASTIMAAASRAVVAKTPFLSGQGRAASASPLRDIAAAANGRITMVRTCHELTTTEGTRPQCYVRVLRANDCLMHVCARSQGNDLWYGPDRVKYLGPFSAQTPSYLNGEFPGDYGWDTAGLSADPEAFARNRALEVIHGRWAMLGALGCVFPEVLQKWVGVEFTDARLVQGRLADLLRGRLDYLGNPNLVHAPSILAVLGFQVLLMGSWVEGFRINGLTVSGEGNDFYPRGQYFRPVGLADDPVTFAELQVTGHQEWPSRHVHLWKGSFVQLLSTVGSIAELFDTSR

SEQ ID NO: 1012162 - protein, 120 aa, Homo sapiens
RSFQRARARRRPALLKLASLPPSCHAPPARAGAGGDAAVTPPAGEGPAALMAWPLVALSHLLPGKPDGSSHTGFAVESHAPRVPWLAPMARAPAARWTRLVGSVTQGTLSVQPWTSRALT

SEQ ID NO: 1012163 - protein, 351 aa, Homo sapiens
NHYYKLFIPWTNQKIQNDFACRGTCCEFNATSEGFDRAFADNPGPMVVFAIASGDASTLGESLHGSSRKWAVKTYRSNMVIMPGYCVHGSPSCQEDPQRGSGKLADVRGGQCAWEVKMSGGVHVMSVGYHGGTPRVIMRLVCGPGESRRCCAAGAMSRRALSNEWTFLNAIHESMQEAPFMLDVAGGVGVPSIEFMYGVMSLVLAWLISLPLGGSMGDHNLGYYCLCLNGRHHGVHTLAHNQGPQQTLHPVIALLGREWACLEKRGAIGGRWYGGALAQWGDGARGCIEGDEDCERVKPGRVIVWTRTAWPTLSFPAAGCCPPVEGPQESPSAGHMAASNSLGCDCKGTRQ

SEQ ID NO: 1012164 - protein, 106 aa, Homo sapiens
ALCLSALGFYFFFSLLPCSRGRCPAAYFLPGSLAPHSLRVSGKTKGPRGLSQAAMACVCTLLEAPGAPVRPRASTLAAWRDQGVPGTTWLTGRCRRRDGVETPGKP

SEQ ID NO: 1012165 - protein, 361 aa, Homo sapiens
  misc_feature (188)..(188): Xaa can be any naturally occurring amino acid
  misc_feature (254)..(254): Xaa can be any naturally occurring amino acid
  misc_feature (257)..(257): Xaa can be any naturally occurring amino acid
  misc_feature (333)..(333): Xaa can be any naturally occurring amino acid
RLCVSLKVPGKRPGAVATPVIPAVWEAEAGASSKVQEFETKSGQDGETPVIYEKYNKLCRALVCSCPVISGYSWRLSTGEIACTSGGTGGCELTAEYHRPPATSYAKWRRGAVTANLQYNEIEYNNRGTLEIYNSVENVAKNQMGRVSPLVTTNIVPPPFRYRLEKRLQCGRKRSCASCAAATLKSQXPFYNAHYNSDNSGWETQETLGVCYTPESHWARVETAVGRQALCVSPFGAENLSSVLRDVRALLASXHKXASQHRGGLKAPSVSGFSYTGQRIQCGGNTLEDPLCLRSSATGERPLECPVSTRCAQRPRGETVTPGLTSMRRGTEXSSVDPLEAWGPMRGAGGLVASTFDCNIP

SEQ ID NO: 1012166 - protein, 154 aa, Homo sapiens
  misc_feature (8)..(8): Xaa can be any naturally occurring amino acid
  misc_feature (11)..(11): Xaa can be any naturally occurring amino acid
  misc_feature (15)..(15): Xaa can be any naturally occurring amino acid
  misc_feature (18)..(18): Xaa can be any naturally occurring amino acid
RLSVEFWXFVXATSXWLXWLPLFRRRERAGGAGGAGHHVPIVPPLAGAQSARARRAHCPERLLRRGRRRACTWREPAAGPEEGALPWRQLSRADGGAGGPGGPGKEGLVSWPPASPYSPLDLDGPSWGQHPGIGAFQLSQNLQHPQLPVLASSK

SEQ ID NO: 1012167 - protein, 324 aa, Homo sapiens
AGWYLVLRVYGSEADAELAGGSSARSAGWLGAVAHGGSACPDGECPSVLDEAGCMHHVIMCLYAMPSSNLADPQDELGWQGHAASKLEMPEGPVRPCCGPLILEHPPGHGVRSIVVTECEAGACRCRTFGFEEQVTCDPVGRPIGTAECRRALNDPSVGTPSGHCGPKSSSRVGHTSMDQSVTKGRPCDSTNEGLFALGQDPGLRKGTIGYQIEIQGIRAVWRNSLGGPGYARIGRAVKLSSSLFRRTLSRHLEKRVIPSFQGRRRSVDERFRATHHKERQSGHHGISCMDKVTKRVTDYESGQKTRIPEFHESNRNSGGELTI

SEQ ID NO: 1012168 - protein, 232 aa, Homo sapiens
QAVLARKFWACSVVSLDTAWLPKAVTDCVVPAPWRSGGTGVCAPSGSAGGELANLIQAELVDLVQWTDLITFRLPDGQLLTGFVSNLFQPCSGTRASRSCATSNLHRVSGRGRWSFLDNESGAVSALCYRVAGMWDKYNDAAVAVMLCVFLLSGPARRGPRAAPRTGRRRPACCASTGATSLDFPELDQPFADHQRISLTTGSPHSTYLAQCSIISNVVRAKVTGQSESWDL

SEQ ID NO: 1012169 - protein, 311 aa, Homo sapiens
GTLGLETAATVVKLSDPVSLETVSFSTQAPPARARRPPPPEFWGPMEEEPSQIARYPEPTDRSDRELPEAPLPRSDRKASPIRVRNPEGPPPGGARRPWLRPCVAGSRSSTHSHDAGIAAQDVRGQLRGTVFREYMEINCRSLTTLVAPWLGYAYRTNTNAYRYGAYKANRYRQQKIGPGTGEPDNDTGQGMPEPPCTQGGPPPRIMGDASHAPYVAAKQWFKAFCPQNKHRQELTCNITKTSPAHKRRAMRLGTDLGQPPWPSADTETPCGTDTTNELPRKNGAGGKLNRTIRPPSKHTAETEVTTTEEQ

SEQ ID NO: 1012170 - protein, 137 aa, Homo sapiens
KAASRREVGITSSLIQASGCRIYEMIFPGLPSFLPSFLPSFLSFFLSFFLSFFLSFFLSFFLSFLPSFLPSFLPPSLPPSFLPFPLASFLFLCLSFSLPSLSFLPSFLSAGLYSVQTSWSADGMITVSLRPPTPELK

SEQ ID NO: 1012171 - protein, 303 aa, Homo sapiens
  misc_feature (6)..(6): Xaa can be any naturally occurring amino acid
  misc_feature (18)..(18): Xaa can be any naturally occurring amino acid
GDLGTXVRRFFGTVKNTXWSLAARKRWHFFSVACDEVLGMAVEGYTHMYPGNHGSGVVCLIGKLYISKPCEQDSMYPRDGTEGLDVLDMSGECGQDVPQGRVDDGAYILIGCRKCRTVLYCLELPWKPNRYCRWAGIVSWSYKYTITQVVSHGCGGRTCHVYPRRKLDRLPCHLRLMCWTLLHLALGLRREACLCLQDLVAKYWQVLGGPVSGLSIGTGRAMLGTDTMEVTVYHRRGSRSYVPLAHSSSGFTITDQVPFSVSVSQLRGLGWREQALPEKSGSELLRSSSMTQWYLAEADSPTP

SEQ ID NO: 1012172 - protein, 72 aa, Homo sapiens
MVDEDRTEKIKRTQNENNQQADRSHTEANKGQKKQKRNNGHKNARTKPAQKTEPTDETNNEHQGDQINNQRR

SEQ ID NO: 1012173 - protein, 46 aa, Homo sapiens
MALLPCRTQTSQGSDVPPCGPLSRVPEPLQRYPSAPAGSGENLSNS

SEQ ID NO: 1012174 - protein, 210 aa, Homo sapiens
MQVSVEEVLKTVGNNRDKGRSNHSAFLFGSGDGGGGPPQTMPEYRLKRLSNQRMGMPRVQDHTLRPQTALLSILESDSVAACARGLWELFLDAAQMASYTIINAQIKKGNRECERSPATDSVTSAQYAWPWSAAVSPCSYSARVEPSMLSSSWRLLLLNQFPLMWCLEGCIRAWWQRKPCAHYEDIRGPGQYTCYSASEPKHCVLGEPGH

SEQ ID NO: 1012175 - protein, 40 aa, Homo sapiens
MLQLRTKASYPGRVSQRTGLEDGRFRGLAPRTRTVFLLRD

SEQ ID NO: 1012176 - protein, 82 aa, Homo sapiens
KQSGLAAIDMSPWPGGTGRAQEKLHIVRPSPGGSLWATIVSQRVPEAPSWPGRVSPRVSEEPCLACVLLDKTGRSTESRTVI

SEQ ID NO: 1012177 - protein, 348 aa, Homo sapiens
MLCRGVLLGSCCVPAVSSDMGLCSCLRMRPCAHALSMMSCCDMLHCPCALIPTHVMDACVPPLTSSLPLQTLGLMCHVDVHVHACEHVLFLVPTVMPCSLALRCMLTVLPCMPRLSSCVLLMPPISTGGDAAFPAQPSPSSPRTPLTHLWSLPGFLVTPCCLCGDVMPNLHLLVVTPLCPMCLLLQLLAQCAFLVDACADCPQNAVGKTPCPLATTPPRWTCVATAQGYDGIVVGAHRLLLLALLKVVASHPQCLVKRGPPKGFLAWAFPSSHLPTKLGGGGWGGAGPNLHCIFGSFLATLRLVRWINLVPRCVPLLARPQNTSPYGLEPLGGPPSSPWIFSPQGPPQ

SEQ ID NO: 1012178 - protein, 109 aa, Homo sapiens
CCLALRLPRPAYKALRDDCGGWVRGGARLDLLALLAGALALPPFASPCLPAPPRLRVSTAPRFWYKPKRQDRVEERMEVTIYKKMSRDGKHITTSLHDTEGERERGKEQ

SEQ ID NO: 1012179 - protein, 87 aa, Homo sapiens
MLGWLARASVGGDYDRRLHTKEDEMTVTGIERMREAAPTKFPLWLLHDLEEGAGPTSELAMTAHSKDVHKGCRRHHLIHHISDFRLE

SEQ ID NO: 1012180 - protein, 283 aa, Homo sapiens
VVWPGDFEDDGLRRRRFPDSHAQLEQLADLLLEARSCLRGAGRVRWEVAGRKGGLLRAPCVPRTSGPVHVSRRLLGFSIWGHGWGGGGPGRKCGACRCAGPEADAALRGLGQHLASPEQARGSKGGAWDARRKYLPVRCPSSSVSCLPTAPGRTRGRGGLGGAPLILALFSPAVPFQGLLPGIGLRIISFLLHCPCGPSRAPPIYLAQRPGLYRFRMEHACSGLFNQGTRGLGPCLDIAGRDRLSNNVPVGSTLALLVPWSQRWSSKISIEFGIVAKVTWPVP

SEQ ID NO: 1012181 - protein, 230 aa, Homo sapiens
DLTFRTGKLPRAREDRAPAVPRTRADRGCQSLMIMSKDEELSERRFSAVSAPHMRPLKNPWPEFHGAEFNQYPQPACNENLQTRSSWQRPPAGCAASFSPTDSGEEPGQHLPMDVQFQRRQNQRRFSMEDVSEEALSCPWDIRLPQGIPTECYRWRAQILPKPLSRFVPPGPPCQTLAFGKLETYVETWHKPWDEGTLLPTVFQTVRSQILTWRKPCCALEMQNPGLEAT

SEQ ID NO: 1012182 - protein, 140 aa, Homo sapiens
  misc_feature (112)..(112): Xaa can be any naturally occurring amino acid
RLVLVLGFLGIVTTRLCGAVEAAPKPRSSRLGWGSLAVVAVAVVRACRGSSALTMCPKGEDAGACRLPLPVLCQPVCRVAAGTCGLGDLAWRPEVTNWRQLRTHLAWYARLXKGRPREALEHFAVMPKGTPLEFLGTGFQ

SEQ ID NO: 1012183 - protein, 265 aa, Homo sapiens
LVRPEVRALQRQRLRSCVSSSSSYSLAYASSSSCVSPAASAAPDCGALEPAAEPLASGAYAAPGGWRVTGCADASCSPALSRWRPAGCCGCCSPASSFGCRPCCGAACRPPGCSRLSREPGLVPCRGRAQVSSWLHMPVGPCLQPFQEGPGKGSVGAQDAPGLQAWGPGPSPELPRLSIDFLAPGACPERSLQHFNSAPLPKGPDQLVPGHPATLGFLGHGGQRAWTAWCFPFRLQGSPYAHGSNPFPLFSCVIRPCCTLSPLLP

SEQ ID NO: 1012184 - protein, 145 aa, Homo sapiens
MASPWWRVPSALRFAGAVYVAGCARTLLGNIFRDVLEFLRSLRCCCPCLGSYRAPTNALYGPNGLTVVVELGSCRSGLGLQVLRALNHHFPESGPIVRDPKVTKAGSEDDFGVHRNTFYQLVKPAVRGSCGILASKLQELEQEVG

SEQ ID NO: 1012185 - protein, 194 aa, Homo sapiens
DEQARGPGGEGRGWAGGSLLSAGERWARGPGGLLSGRAGWAGPPGSRVWAVPGKSAFVHPSAGLGCWSLPRPLGGKAVRGAGEPRSVNNPERWLHPLGSALHDGRPVTRGALHPMLQDPTASKLKHGGPSPSSGSLVCTQEYYRRGVAPLPPIHRGCSAGASGGPVQAGGTSARLKAGGLGRLGPRSGDGDLSS

SEQ ID NO: 1012186 - protein, 154 aa, Homo sapiens
MPCACYQAGQGHQGPGSGPVLMGQCTQVIGWWHLGDCRRPISLFDLYPVPNPCQPESGEPHSHFITGFLMVPFKRSVFWPRSRSLNSISASHSAVAFSADRPLLLPPAPVGTRRCAWNSWTYTSRSIIRNVKGPVREGDVLTLLESEREARRLR

SEQ ID NO: 1012187 - protein, 127 aa, Homo sapiens
RLYAMELWDLHDGGGKTLLCVSVLTVRKDSQSWDMRKEPDPSGQNAREEHWVVVGAGVPPLSSRRVGAIARYSCELRSSDRTVQSEAERTTGKVKPVREYLGRTVVWGLGACRSATLFVVEAVAEDT

SEQ ID NO: 1012188 - protein, 107 aa, Homo sapiens
MGENKRWASEERNTGATTRLAAITARTGNPGHRTQATQTSESHTSPKSTGITRNGSTRGSGPIQGRDNNWDPQTGLGEKTGKGSRNIPHTRGIYQTEGANIERTAIK

SEQ ID NO: 1012189 - protein, 265 aa, Homo sapiens
AGTGPEFVRMRGACVSSFPLPLTTAPTALPCPGHSENVDGVCMSVRLCCQGSEDVGALRCDAPPCGIFEHNHLLIPDYVSVLMVVRTPECSARISPEEELHTWVMTAIRVAARARDLCRDVGDVGTRCMALERPWCCFGIPMEWEGRRSLERLLDQEICIMVVGEQVHILGPVTVSEERVSVTGEDSDIEQIGWYTMTSSETLSTGQKHEEALPGRAGMGAYEETMCIEDRILIHWKPIDHQSTTQGCSATIDHSMQQQYMPRVT

SEQ ID NO: 1012190 - protein, 87 aa, Homo sapiens
MSNPELTSSISFEHQGKSWELAQTRQRQVWLGIELGSLAKYKPKVPSRDIDQGTWINSFRELNHGKLEGVRNQSPLHPSVELHKKTK

SEQ ID NO: 1012191 - protein, 282 aa, Homo sapiens
AGTAPGRYGMRRRIHAELTQCHWKTVSFSTQAPPVPSQKIPLPPNSGGRWKGAESDREVPRADRPERQGGSQKPPPPEGVIGKASAIPGERTTEGPASGRSPTNLDYANDGGGIPARQQNALRPDTKAKDVRKRQDASQDTTCGPGKHIINAGKDNQGTITKADTSWTDSHETPHMSSKRHGNKPEKTQLKRGRYRKIGALPKAPREGEDRKGMTRNTRGKREPEEHKRKHRRIQKTETPRKKSNTTDRHQAKYLEKRPNKRTGENTEKREKTTRKRDIHEA

SEQ ID NO: 1012192 - protein, 294 aa, Homo sapiens
AVTGPGIYRHVEGSCARLDGRQVSPAGKAWMGSIGVAFEGTLSPILVPACVCLDVAAWTPRDDWPAALVHGPADDVLRVLLLLVPGTAGWVVGVTSDLSSLSLLSDIVFKPCCGIPDCTAVMPREDRATWKSNYFLKIIQALDDLSDNVPICGRQTMCGSKHDGSEIRIVPFAGRLVVLIGQEHHDAAKAILRAPGTTTQLLEKLVASYPGGNVGLVFTTGRTSLEIGDMLLANNGCQPCLPVAWLAIAPIVKVTVCQAQNDWISGPEKTSFIPRLKGIATKIFQGAPFESLHT

SEQ ID NO: 1012193 - protein, 124 aa, Homo sapiens
AVTVWNFWDGGAGSNEACWRSGLSSVCAFDAMCRCAAVYRGAEERGPARSGDFAPGGTGAAARSAHIPPGAASLGGPGLRSSCWRSAPSQGREEEAVDATTRRCRAKRSRIGSPPLSTALQALL

SEQ ID NO: 1012194 - protein, 223 aa, Homo sapiens
MRARGLARWSHVAGSFLSACRTSDPGTPFTPFPVRPVRPAGGRNSERALTAAAAACCSAVRLRGSLECALCRPDAVISIFPCAMIHSSRTQRGGIKLHKNLLVSYVLRTARQLYPEERYRRASTGRQHARSNSKQAAPTTSTQHLSRTRTPAYPGQAAVPDIRARPPNFGGRARWELPVRGACTEDPESQRHRGTPKHIDTQELQQHNEFQTERGNIQKNKRH

SEQ ID NO: 1012195 - protein, 265 aa, Homo sapiens
LGSGSSAAASRDTDQYFKHKKLASDAYIFFTRSVQFTGGEIVRQAEKTELDAHFENLLARADSTKNWTEKILRQTEVSSSETQSQVPCCGVSSLYGECWTVKVPLQWVHLTWELAGYRYHGRTRPSESGSRTIPHSGNHTALKGGRQLTTRNVGIRLRAGTFNPPRHSISFAHTLAANFLDGGLDRPSRMRGGSIQNRRSETWTACTSEAEERPRLAEAKSHALESMKWNKGDAGSSSDWPKTRVDRQDSKGTGLLLEGNQETLT

SEQ ID NO: 1012196 - protein, 104 aa, Homo sapiens
MYIGEFEGPYGEGITEEYRGENEDQDLGFRKRKKLEDATERSNYIVEVANTHLVTSKAREFVNNRQAYGAFIDRTGEQLIVQKNGSEHLVKLYKGKTKVEIHSL

SEQ ID NO: 1012197 - protein, 122 aa, Homo sapiens
LGMELWSAIAHASARRDPVRELRRGPPTEICCPGPDRSWRHPQEAGGGGRRQRVARRAVLTRGSAKDEIPRWCTCPPSSYNVCGPTVRGGRQAGGAGDCGTRRGTGGHTDRLTDRHHRSYPL

SEQ ID NO: 1012198 - protein, 177 aa, Homo sapiens
MEEPLALACCLGQWPSAALLLAQLSCACTAQPSWRGESILFQPEAPDQNTAITFTGKWSQDGLPQAVPPVPHPLRKWSSLTGGRHSSEYKHVEEEPVRQYRAERLLRSGGEAWALMKEIEADGEALRACTKVTRAARRYPSGTGQTVRAELEGEAQGTRWTRKRVRNRAKPQKGREQ

SEQ ID NO: 1012199 - protein, 115 aa, Homo sapiens
MPTVLLHIGTEDNIGGEEGKHEVWHYPEEREGLVLECAKEVDVAESNRRLNLSVSSACEESQVYVHALYDARCVLDMAGESWHNDEHVRHGRRISRENWNFQLERGLNHVDQTLL

SEQ ID NO: 1012200 - protein, 92 aa, Homo sapiens
RKPRSLLLALRRLGSSDSYAVTGKRPAACAASISNPGRRLITYLKKYINILDIEGTLTNAEMTQMGQKSQDSYSHRAGLVGFFTYGVSVRLS

SEQ ID NO: 1012201 - protein, 102 aa, Homo sapiens
DSRSKQELISSWQSWAMEPVETEPSDERRGEGKQNEARQNGPRMNHINNQAESGWRNTAPNTTITRNMTSTQEAARELIQGRGRNWLAMGPVAPEQSNLRIQ

SEQ ID NO: 1012202 - protein, 121 aa, Homo sapiens
GSLSRLPTITMARGFYISKVPGAYLEDTYLRQNNQNTNTHTIQEKHPKKKQKHQQHPHNHHHPNHHNHHQPRLGQHRWTRSKAWESVTGSPNTSIGSPILDPRSMMKICLIYDLFSPTSLS

SEQ ID NO: 1012203 - protein, 117 aa, Homo sapiens
KGDGMEEVPHDCPGPTAPRRAEGLIMSGMPQPSNDTLSKETGMLTDYDPTKNRKNLNEIRMNGRMKISIYNDIRKGLEKIKSRILGWIEAHSGAHLLLHWSLALEDCKCISEIGNGR

SEQ ID NO: 1012204 - protein, 343 aa, Homo sapiens
KIYTYSQVAEHPPARLLETKPHHTCRSIQDHLLSAGSAAMPTFVHPRYGSPRCQNHQHTLTDDAALTCWHAVGCLPALSLWGSQESLASGLRWSHTSWRVALHGSPALGNYFNGDEEAAKPTANATPLLDLNGLVRMKFVDQSQFILAGGQGLLVLIHPNLGLLGLEYPQEANYTSMSAWEQVDREEGSFWADLFNRLKDDGWLSTMHPAVDSTWAAIKWHNSGECCPSSEEISESKSLHFKAGNPSGAMREKGSLSDRIGEQIGLLFMLIGEQDKKKCRAKQINAPKGEGDSKRQMKEWLRAERGFAAETLVPFQVRCESCHSYLSLRCPARAMSPWDYLAN

SEQ ID NO: 1012205 - protein, 106 aa, Homo sapiens
MASEKRINEVDYELRNQYIKIIKHEQRTNNEIHSGRICKIKIKTNIYLPNSEYMGTSIMKYLKKDRLKESMLLPELTADEITYREDTEKMPRQALDEMIAGNECNC

SEQ ID NO: 1012206 - protein, 155 aa, Homo sapiens
  misc_feature (65)..(65): Xaa can be any naturally occurring amino acid
QQQKQEPLGSDSEGVNCLAYDRSQTITTEAGSSRICKRIPLEYRCYYRHSSSIEKENAKMRWNYXDYQRRRQGLSKIGEELRAIRKDQSQDGNLYSIRGFSGYLPGEKNSTMMIEHDNNEIVIYHELIDNQMIRNEIPNDTLESDQMNIIIRNCH

SEQ ID NO: 1012207 - protein, 67 aa, Homo sapiens
IDYNGDGGQAVRLEPGGSPTSSYYYWNPKERNQPRRIAVREQLLVLSGRTEPIYRAYSPKEDYRMTA

SEQ ID NO: 1012208 - protein, 111 aa, Homo sapiens
RRLPKWRVRLRGLAEQRRRSVQTSRSCYTGPIAQVELTIEKQTSERKRMERRAVYKDTAFIHHSTVAWIQATVEIYAMIETGERDESELQGGLHESKLSLKDEIKPNDEHT

SEQ ID NO: 1012209 - protein, 197 aa, Homo sapiens
  misc_feature (106)..(106): Xaa can be any naturally occurring amino acid
MAPRPEKHRTKKARSTMKNKEEMIKATEDRLMRNPKEPHDDNIAAKKPDGRRTYIRTPPRLIPNHILEQIDIPDRVQSMQTDKGAAARFSWFNQCLGRYFSKIVQXYERKDRPSNQTYKWKKNRKGSDNENTCNDALLKAKRNLAYKREKLSAKGQPTNRKNARQAPYEEREKTGQTEADKTILSQQEPMGRRNLDH

SEQ ID NO: 1012210 - protein, 376 aa, Homo sapiens
MYPGWSARDNYGKKKKRKRDKQPRRDQKTKHTELKRSTQVMVRLLKSQMTSPDGDRCSMEKCGHDDWTKTEQSVVVANRCRDEKRECVRYIRRRMAAASSPPTRQYIKANQENDSPRAKRQILMEVRGRPWEKERGTLNWGGESLLWGLCCPIGRAWDSLGGQIADGQKEDPHTFLGLDAALWWLCKECRGLRAKSTTLCQTDGHANLRKCLQMRPLRTHQLRIEAPNSWAPRRQLVTCVANNCLNGDGCQSKALVIATFDFVHISYPANKSGGVLPGASEALPRAAVRGSLGVAKGGACHSRWQKGTVYFRKLATWRKSECPHFGLSQKIFFQIGAAIFVAAGRKHFGFLRGRATVGVNRACCQTLRNLVPRNFI

SEQ ID NO: 1012211 - protein, 99 aa, Homo sapiens
QLPAEQEKISFLFGYPLDIVKFYNEPIRDANESASAETENLQSSIIDSQGEQNGDIRRTDEVTIHQENGTRGEPGRERERKRDRDQRETQKVRLGREIV

SEQ ID NO: 1012212 - protein, 207 aa, Homo sapiens
MPRPEGRLVGTPPYSRQLRTPHGSIRSVPVPFAVGTWLTQQRRREKMTQGTQAASLRHTSRAACCQDLPGRQEAYTDVDRTIEHRTIHTLRLPPGYHWLAASLTHGGNPSRYGASRPSGPRVDVDLGPGMLPGRLLTSRLDKKEEPPNRNKHGQAVAHGNPEETSPAKVASHTQPSAALPGNANKATTGPKEHSTEEYKKRCTRQQQ

SEQ ID NO: 1012213 - protein, 380 aa, Homo sapiens
MVLGGSLVYVVNRGCPVSGNQPPYESSLTIVCIRIDSHPRTAELAHDRVPEGISLWVGQRDHLVFGGVLFRNVNFLEGVITVVSAHGCLHAMGTNGDSLQVQAESLVEPWVKALLKAEGSWEKGGGGGSIAEVPHHEVRRDSHRSGTLFWFALNLMGMGLRGRYYSYTGPMGKPWVYCLGKAGDSSYGFPLAGLPLGSGADGALFVAPIGQFDKGGRNEVRYNCPPIWGASPLVHTCVPFVYLKLEGLRKVPRSRIGAMGRGGSTSQRPNLGREEGPLWRPQVGPFASKTHFRFGGESGKPEPSVQLTHGAKEQPARGPSTTGFWLKRSVSSNLPLWGQSFPRGGTQQGGTSLRPTESGLWTKGCNKRSPQSLGKNSKGW

SEQ ID NO: 1012214 - protein, 107 aa, Homo sapiens
MHVGVLRHRKDREYTEDWETTEEKQYKVYMRREEQKREYQSNRIQQQEKEGGPSRIPQGFLLSDDTHLNIGGVTFPNMFYSDKMEACVGGLQVEKAPGLSYSCSINN

SEQ ID NO: 1012215 - protein, 97 aa, Homo sapiens
RVSVPSRSAGASAWVSEERDTKRGAVCGVWWRVRYVDDDSEVQQQLLLIFVFQPGNRERNNTPPKKKVEYTSAGAKNSKVLSISAKRIQKELADDRL

SEQ ID NO: 1012216 - protein, 313 aa, Homo sapiens
LFSQDQPLAQSRAMAYVPAAGLPVPPTSRCCSLSTSPSPGGLKVANVCLHSNGVASRASMKLVLQMNFVVGQDPGSDVAFHFNPSRYDELVDKMVFNDVAGREVASSEERKRSMPFKKGCRLCSQVFIDPGLQHYKSGGKLESPFYEYGAPVFPRTEWSTHRAMWMGICEPSIQFNFIGGQSLRPLGYLLIDATFPVVPDIAIKDAETALRTTGEEPTSFQTVLCQYVGEAAKGGLTFDRNSSIIEAGYVPSQESEKLLLSRTSRVGYLQGDHSDSCYIKSHDMGNEYRWYQEPVLPEWATMGDSRGKSKITP

SEQ ID NO: 1012217 - protein, 234 aa, Homo sapiens
SEFDGLFTTHKGNFQLLLYQKMAACGGAPVTPFTEDLTCFPEKSSQALLGDDAECEMDARWYMMYEGPLSGVLVGHVSYCRRYTLVWIAWTKLDACTREHRAYVKCTLASALVELATVLASEYGGRNAVVERSLNGNGDIRIRIAVQSLAFPGAPSVIARQGPPGGGIAFVAFVPKALVCRGYRTGNSPLGNPPGGDPTIAVRLAGVPKVGSALWVAPRSKDLGPHPYPLGKPR

SEQ ID NO: 1012218 - protein, 338 aa, Homo sapiens
MRALLARLLLCVLVRETTPERQLVNLQQVPLEAVTVYMEEHVCPTKYFIATIHWCNCPLEIGGQHCELDEVIEHCYEGNGHFYRGKASTDTMGRPACPGTLPLSFSKRTMPTDLMLFSWAWGNIITAGTQTTGGDPGAMCRWAYSRLSKECMVLTDADGKKALLSSRRITISVWPKDSEAPAFKTIGGQNRPHRETRPWVCGHPTGGTPGRLCHLTCSGGQPHQALCWGDQDDTQPESLIIPERQEEPTHPATPMEGPASKGTINPKQRQKWEHHDDVDRLRTTPQAADNNSATPHQTSNPRDPHRRRALASLHTQARVHTDKGQESSTTTPESNNRT

SEQ ID NO: 1012219 - protein, 325 aa, Homo sapiens
PRGPSGEVEERRARVCWRRGACRNAESAGLLLGRREFCCSIRPRRDLLVASWLRGGECGRRCWDCSVSPGLGAVAGEPLGLQLGMGAFPTRSGQSPEPRDPRVFLLRGPPWAMLFLEWFRNIDRISSPCFKDPQFLVTFFIRACEPKPQSGRIRRAGFPLSSRPLLAESGNFLRCEDRPVVFPGTLLDPGTNGPSSSLSYLRRVAEALVPGLALSEAVWSAMGCPALARRNSGAGPLVPIPWGGPGMRFAAPGVGAPLVCGPPGASVAISEGVTVGTFDIRTIRGSPGGAAHVAVFALRRRCCGLWHVGPCGPFAAFIHCVSRVR

SEQ ID NO: 1012220 - protein, 125 aa, Homo sapiens
MEVVAALGSGKPFGLGLSGAGWRHYARGMAHCVTLVQHVTYSCETNLIDKDIGSKSDPVCVLLQDVGGGSCAELGRTERVRNVLQGPLSFLQGTLQLEYRFETVQKLRFGIYDIDNKTPELRGLD

SEQ ID NO: 1012221 - protein, 127 aa, Homo sapiens
  misc_feature (114)..(114): Xaa can be any naturally occurring amino acid
MARLRVATARAGGAALIVSQFTEEPYVHKSLVVDKLRQLFQLDRHLLGWTLKLSWKDVGDSVRIAHELRYGPAKRSRKGTGQRGHRKRRDVRLVSSSGSHPSTLALVGSSICAXPHLSADASSGFAI

SEQ ID NO: 1012222 - protein, 170 aa, Homo sapiens
MGDPTYEILDVPEDASADDIKKAYRRKALRGGTQTRKPMTNKEFDDEDIYRRWPRQYDGLLLVTSTSWEHLRTAYGRRRAAPGTRQLALSRGQKPGSWMGLGLHAVSSLVRQCAQEGEGSFRRSQSQSLSAGCAVTPCLGPRKASFFVRSLSTPGPFLLTVVTLRGQGPR

SEQ ID NO: 1012223 - protein, 270 aa, Homo sapiens
MTPDWAYSAGSQCYCPWGLALRRVHCGKGVWRAAPRTDARSQALTAECWTEVAWVVWLVMKMIEQLNGGDQCMVLENSTKMGFIHGAVYNLWVDEEAKRWKLVRPEWHVLMCNAGIPNKFFQNWVQWFDVLDLADRLISKACPFAAAGIMVGSIYWTAVTYGAVTVMQVVGHKEGLDVMERADPLFLLIGLPTIPVMLILGKMIRWEDYVLRLWRKYSNKLQILNSIFPGIGCPVPRIPAEANPLADHVSATRILCGSPCLSYYCYNSGT

SEQ ID NO: 1012224 - protein, 186 aa, Homo sapiens
IPLSSATVMQDSGSSSSPAEMMKPPEVERLQSSDLGALGICSVAAGSSLTPESPPSCRVLGLRPRRLEVYSPVTPVPTMAPLNSYMTLNPLSSPYPPGGLPCLPIASGALVPPCSCSLPWGPLSHGLGVYAVCLQTWLRVAGAPGPGLVHWEGDALKGYRRAPGRQLAKVHRYSYISLITMGIQQA

SEQ ID NO: 1012225 - protein, 226 aa, Homo sapiens
MERRFFACANACDLKCSGLLSGLYPWLIDWCHVDGLWYHWAPVLHAHLLVLVLQVWATSFEDRAPLQACTGWGHAHSAMDTIIEVLCAGLGARGARSPEWGIAPATGRYVQSLRCARRTVLGLYRFDVALRLNEGPISRNPGRKSWALPWMRGGCDGSNNKYGRVYSWVGYSNGDRSLLHSAVLGVLGRLVESKEGFRRCTLKVQKLPGTKENLASFHEQDLTDRG

SEQ ID NO: 1012226 - protein, 110 aa, Homo sapiens
AAGACSWLLSWMPVADVLPACACWVRAVCLWGCSCAALLPVACACECPVGPDVCMVPAIPDVCCLHWSGVPRCLAACCLACATPCVLRVPCLRAERVRSQHGEPDCGPSA

SEQ ID NO: 1012227 - protein, 222 aa, Homo sapiens
MAESRLRRRQRRAPGRGPRGEQRAGVVALAAAAAGSGRLSCRMCGRRQAASWAGARGPRGAAWLQMPRAPARQPAAQRGRCMLSQRGNPNCSSSRRGNGRDATGSRQVVYSGIQGRELSVFHFDTSDALLPRRTGPYVTRELPCWTMELKDSIAMVINQCPIVTTSRYETAGISFQLYRMSSGCPGPDVIPIQATFRGPNLAWTNRGAKNFKPNLKAFGKRG

SEQ ID NO: 1012228 - protein, 108 aa, Homo sapiens
EGGDCESHTLRLRMLLILSPHGCRHLWEKCVLGLRGAAPMASVLSYEYLVHAVAGVRGKRDSNDKVFYSPGYSLDFDLQVDDEQENPNNYTRWCSMEIIKRRRTPWHA

SEQ ID NO: 1012229 - protein, 153 aa, Homo sapiens
MRASGREAALAPTLLLRSPTRAARACGLAGKGRLPAACAFASAWLWAAGCPGMAQWAPPRLRDVPDAGRRHVGRAAVPFLSSLPGFAPELCIATPSDKLPDSQWTALAIKEDSTGLGPNHEPFSVTSPKKHQWGLYSLSPAEGPGARHILSSK

SEQ ID NO: 1012230 - protein, 227 aa, Homo sapiens
PARLRLVSSGCFGDCVHRQEWRSSPAPPDARPALLRPDLFPHDCPLALLADWTSAPCVVRDLTLENPGSECLRGGSEEVLTLCRVLADSLSVPWLLAAIEQERPIDHLLDPKLQASCALVASLCSNQKDLPDKLPGLTTGDGWRAGRGAVLSCPGQAHAGRELNSPQEGAALPNSKTRELEPEQNKNGSQNFPKRWHNKPVLVTYGDSPVGKLARKYVNQGLDTYHI

SEQ ID NO: 1012231 - protein, 302 aa, Homo sapiens
CPQTPVPLDSTSVCSHHLACWGENEPRRCLWSVIPNWSGPPAEPVFIYGQCGTNSTLQLMLCDAAWGLWQVVSGGRRKHHPRQNPELLNWSLPAIPCSPDGGLDRGAPYRHQHSVFVRCALFFTQAGLSLTSTQRVLEYGSAKTLCGKTDILHNSLSRSISWHTHIHSIRLGSCLPLRCQLVSRSTPHGTTRYAGRLCQVAMHWRFTGPGLCPRSQPDQPEPPFCRPVTTRLDYLFSVEVRPWSGRLSSGANRFPGERLERSHIVARALTCPFNAKEQSRPSSDAICTEALFQLWTSYCGGI

SEQ ID NO: 1012232 - protein, 283 aa, Homo sapiens
RRLLEGTAEAPLENGGVWRLVGAGALERGVAPIKRQYLTTKEQFHQFLEAKGQEKTCLGNLRYETLLCNELAVSLSAKGDPTGWMGHDVRDWGMDGVSACQMPWVMQLHDSRRVCPVLDKTMVPGPSVNAHCTTTMNSAVSLPNPCDVWLLRCFFGDLLCLLSALTVVGCYLETNAWPTWAPCCVLFETFWPGPYGVDLPLLLGAHLGARWDRTWCMEEVGWTCGTQSAVQSCNCPGTNALACKQLPEARRSASSELSRPLRLFQGKGSPTTHVCRMYPEGAT

SEQ ID NO: 1012233 - protein, 89 aa, Homo sapiens
DLPALLPCPDCAAEGNMAGGPGPAPAEPQRRSARAPRACLPATGAGALKMAGPWWLLARGGLRAKPAALPDGLTCDWRLFLGAAGSCRT

SEQ ID NO: 1012234 - protein, 74 aa, Homo sapiens
  misc_feature (67)..(67): Xaa can be any naturally occurring amino acid
SSSCRDGHPVVVNLLIGRTDFREGSIAVLGPCGSGRLAAFLPLALCPCMVWSLIIALPWAVSHEAHXTSDEPSL

SEQ ID NO: 1012235 - protein, 272 aa, Homo sapiens
MACLLWARGSLLLLPLLLLRPASRTCWLSPVERGAPNKEETPATESPDTWPVLPTVYRPTEVTDVLETDGHFREKLQAANAEDIKDAGKLSRELDIVSLTMSRTRAVMSSKANSEVSTRVRSGARKAKDGTAEQDPNDTEVEIIVNSSCKQVGSTMGPVKNQQVHAKARRSLVSCMIQGGARQETLDPRKRLQTSVMTDVQRGYEEWLYTDTPESTCSYSGEVIMGRVQQRNSEAGSSESMAHGALKPHAPRADANHLKSCNDGTCARTKDT

SEQ ID NO: 1012236 - protein, 135 aa, Homo sapiens
MRPGRRRRRPVCGDWSWLNAWCQVLQCCSSLVPVAATVVVHGSAVSASTTRRVRRTLRRRLPRAVGYGPGLELEPCTGPQETLDLHRCTLSCPADLRLASAGRLVRGKLLSRCSPSVIEDTVLLLLDSVWESLQP

SEQ ID NO: 1012237 - protein, 30 aa, Homo sapiens
KLYMVPWPLVLMIFNISATVLYITAFIACS

SEQ ID NO: 1012238 - protein, 140 aa, Homo sapiens
MSSRRRGERDSVTDTEMNTSCELLDALLRLAITLHWKDTGRWRSEKQTPSPSPVVLPFLLTVHHGDSVSQDSRAGMSDLYSMTTAPGAGPSSLDCKHTCCSCVPDRQMRTSQKDVRVPLVAGVTKLHSRAFSVSQRPGRA

SEQ ID NO: 1012239 - protein, 160 aa, Homo sapiens
LRAHRLHRVPNSFIPRLAMASRGARQRLKGSVGQQWGYEPRLLDKSAGAAGQPERRAARSTGPTLSGEQQQRQVVWHREGSIAFEVSAFRQGYVLLSWSNDLWTVDETFNVLGAEHTTSSMGKGYRLGNIPQSYGHIVYLCLPVASCAGHAAFSLHRNST

SEQ ID NO: 1012240 - protein, 214 aa, Homo sapiens
RRLACFETAPGRGAAGEVRRALPGGVRGRVPSWACEAPGLGLTRHRGTGRTTTRAWCWLWLLRAHEPVAVWAACRNGVSDWCRSSSTSGGVPMSPSGCSVDCPQSSARWSLGLLAWANYVKGVIQVLPRHVPHPWRSVKVGGQLSAPGGVAVSSSASLEVATYSLPPAACPDSGTIAVRAQVCQQVRAQLRRDALGIMDQVISLMGQKGHALLI

SEQ ID NO: 1012241 - protein, 34 aa, Homo sapiens
DLFPNEEEEEPSNGIVPWYKVLQQLSRVDMRSQQ

SEQ ID NO: 1012242 - protein, 30 aa, Homo sapiens
WYGRKSWIAAISSVRRAETRTGPPERMPVR

SEQ ID NO: 1012243 - protein, 67 aa, Homo sapiens
IALLAVLRTVGSFLRPRTVIPAPGLCGLRDCWERWPDSEGLTGPGPRDSLCLGLEAVTPTALLQGTD

SEQ ID NO: 1012244 - protein, 231 aa, Homo sapiens
MWRAAGSRYVRRSCGCPWSDFLGTPPRPVPAERHCSQYQVLKMSPFLKNPSLDSIEEGTYLCQICKNENLKNLSDYGDLPLKSTEFTEGTFAILALGWWHTCIVGHFEHDAPDNQACSSGSLKNMFVHTGEYPAPFMPITLQKCWASHGGQAKCAIDHLGLTPCERLCRLCLYDASEWSLVESCDMNVAEGSPLTSVAHKFALRSDGCEPRDSREDANQIRGSENLTNQNP

SEQ ID NO: 1012245 - protein, 111 aa, Homo sapiens
LAAVMAGVLKKTLDLVGLAVCNTPQREATEYCPPRFLMCLRKSLRKVQHYRKYSRDTDYKMRTLAHSGSKLQETQDDLNKITRPTFIVTVTIRTMREYRSGLIHETKSGPE

SEQ ID NO: 1012246 - protein, 280 aa, Homo sapiens
ANCVMEVSVDQRKAVEKPNAEDMTSRDYYLDSYGTLGHPRGDAARTRCSTRHVTGNSIVSVTEHHLRMDKVGAWIVRARAPASSACLLPRPGPSKVFGIECFQLSHDSNGGCNEYDLNVRNTCCMTQRWLYHSLKGRGGGSVELPLGEWLDIHQSGEMRWGKLTSFVRYSSAQHSLSLMSREHRWLGARMRSHSVPGPGSSLYVDGSDRGTWLVHKTTRSTGGMNVYGFTMSCIERCGHLRSPIMDVVDPKQVVHQLPALSRRRWTIYTVKVDDLNLSSP

SEQ ID NO: 1012247 - protein, 213 aa, Homo sapiens
MANCQCTPRAGGPLLRPLMARQAYWEDQPGAPCPLIPSFPTYTRCNRRASSFFCVSLNGVNGTRINIDSNRATTHRRKKRKPFLVYHDFYTSLTPPLHVQRVRAQGRKGPRTCLARVGRRGEDYACVWGPCRTPPAQKRRDRKGRRSASIPPCINAVRQALSGPTSVRAPIDVSIGPRGLLLPPGFTAPNTHLGDTPLMNPVARVQFEGPNSV

SEQ ID NO: 1012248 - protein, 251 aa, Homo sapiens
KIYTFNKDHDRVKLGVDTYLASTWTTSTCTPRSEQVPEASSCITRCFMSALTAWKGPTSFLRPLGSLRCCFPASDQDGSPYVSSMLLEQKTTFGPVPSSPGEAQGTVCWLAVSPVRAKLDRQSPAVFQPSPLASHVRTALGLLRSSLYSRERDQSGQHDGVMVQRLVRGALTVVLCGAKVPIARQRGTELSGGHVARVPTYNALLRAVAAIPPYWTCASVPAAISFLAGYWRSRGLGGAECYRVFRSRARA

SEQ ID NO: 1012249 - protein, 66 aa, Homo sapiens
MSCARKGRRIADVGRGSHGRLRWGKNGHGSGTGLWKWAEITWQGNSRKRKEVHKVHSTQTVRGAHP

SEQ ID NO: 1012250 - protein, 248 aa, Homo sapiens
TETDLIKAPECNGPQISAGPGVPHPDDPPETLQEAWATKDDHMGSYGPAFYQSYGASGQFSHEFAGGNQLFSVDLKSREAVWSLPEFGDFARFDPQGGLAGIGVIKAPSGLSWLERSEPQLEPIYSCAPLGDLCHPTRSRGGDWASRKHRSSASVDEHLAPLVITYHLDCADGQTVTEDVAQSSFYSQPDHLFRKFHFLPFVPSGEDVYELTGGALVAWMRHSSGIEELQVPIPSADAMESPDLCPEA

SEQ ID NO: 1012251 - protein, 44 aa, Homo sapiens
MTAPVVCIPPGDIGCTLHHVSDGRKSNRLKRIKTAQTMTPKHKW

SEQ ID NO: 1012252 - protein, 149 aa, Homo sapiens
MRLIDLLEVLDPEIQELYEEDEASVRTASTLESSLQCQNAAGASYSIFTGERAMLVCGTECGWTEENVRRFHGQTSKCITGCRQTTDVVPCEIKYDRRRGKLGAPKARAFPGPVISLLAPLVTLDRGISLMARDLATALLRYVEPPGRS

SEQ ID NO: 1012253 - protein, 211 aa, Homo sapiens
MVALGCTSAGPARGCRVAAGVMLGTDCMLAIILVNCDDDFGGDHRSGGGRLCLAIHGHVTERITLVLTGYFSYVVNVRHAVSDHKWSRRRNLENLGDAEDPGTGTEGIWGLRPPKGRSFSSLESSLDRSNSLSWYGGESYIQSMEPGANVLSSRSLGWVEVPEEDLAPGTDAVFAVNNCIQQLAQTRCRKPASKMVPGGQNIADDPEEGMP

SEQ ID NO: 1012254 - protein, 120 aa, Homo sapiens
QALSPSLQMPCGEPGGGRVWPRIPDLRIVQLRFLLMPVPDAPRETLPVTRRADGGATAITERVAPYYEGLVSNPSTVQIDVDLSDKNEEGQVKMSGQRSDEELEDAENELVGESEIRDAM

SEQ ID NO: 1012255 - protein, 212 aa, Homo sapiens
RGLGEAGEGGPTVRGTGRGQRVAPGAVSRNRGASLTGPPSMKTPADTGFAFPELVPYKPRVVPWSSRHDPAVATLSWSCMREWRSTRASFACAGWTTGNSSIEMTLDECGPAVGLFAKVAKPQDELLINAVVRALRYYYNKRISAQMTKGETRSALRELQLSTKTVCWSITHSIDVGLAEWVQCPESLLPPRCRRVVAHFRFRIPSVRSSEV

SEQ ID NO: 1012256 - protein, 291 aa, Homo sapiens
MAVLLALLMAGLCPAARSALLCYSCKAQVSNEDCLQVENCTQLGEQCWTARIREWGDDEPPGLGLCLLKLVILFLAKSVAQSVCCFPFHLSPTRPVTCTAQAIHPSILSLQSILLHLSTLLHFILLPLPHSFHSYTTIRRSAHTGPRRPSREASTYVHSPALSERSRRDGPIVPQEICEWAETEGRRTQAPRTGLRILEGRGPGVTSKKHLGHGWRQERRPGGQCQGTVQHNKGETPVPGSPMFPKAQLGPPEAVIRQRLQFGTAWMTSQELLRGHNEIECCNPECALQGG

SEQ ID NO: 1012257 - protein, 278 aa, Homo sapiens
MRVVVIGAGVIGLSTRASASMSATTQSCSHLDSKGRTADRFTPDSPCTDVVCRALASPCTLSDSQQPYRRRYRGSQTRSCGSYSPEAMVQVLRNSLVKPWAWIPYILVATNHLSHEALFRDLFAWHRDDQYRGNVLESWARPEHAGVVFRHEFNRLSVPGFRHDGRPYIYVARGTEKLSLTSWALNVDTRLDLGRMRRSWKSVRLPEALDNGAKLHHRRRRWANGGNGAPRTGGTWSKQAHVRAVNRGLEAPANQGERTPPLGMARPKGPRARAQAIR

SEQ ID NO: 1012258 - protein, 203 aa, Homo sapiens
  misc_feature (103)..(103): Xaa can be any naturally occurring amino acid
AGEVVVLVAHKPSRASPRRVERHTLLAAAMTEQMTLRGTRQGPQGLWVTHDRYYPVSSRNMILIDRLEIEHQYNSCGKRDRGSEDQTMDIPTALLCGGSLRTXVDVEMSVDRPQDGPRFALLRRPWDRKPVAGPPGGTSPIQNRVANASSNRPRGRKLCGLEEAPELNPKNGRMGWPLGKGVVWGPPVSFSPFVENPKTPGAQ

SEQ ID NO: 1012259 - protein, 46 aa, Homo sapiens
DGAVTRTQQGHAGGDSWTPTLLAATGVAEGGSVAPSHISLQTLVAS

SEQ ID NO: 1012260 - protein, 190 aa, Homo sapiens
MRNPSILARCQAVCVLEPFMSVQEFAGTSSSTISSDVRCTSDIMLSQKKCPQGKCQPGTKSSPGWSWEAGPVGSFPIFTEYTSGSSVCPFGVCLGPAACRLSLCMTGLEFRILLHFSQTGAPVAPRGTGAALDHDEHGPQPVWDIMFQVAVPKVNESEADSGNPAPSFPAFSPLDASKCDISDACCLNIP

SEQ ID NO: 1012261 - protein, 70 aa, Homo sapiens
MSVRSPVQAKWLAALTQYVPSRVSSQWILMGTPSVLPPNSGVNQVSSSKGLGGGWVVLLLRPLLGPLAPF

SEQ ID NO: 1012262 - protein, 294 aa, Homo sapiens
QNYGERESRSASRMWIVLTDRGNLQGIPLSNGLAPRKIPGVPDSKSRLPSLNLGLDPERSSRRHYTRSTVFAPAPIDDHRSKVLQIEIIVDGTATAIAPMSTRQASLWEVWANPDPNCCLGVLWADAVYDHRTRDLTQNVFSNIWSQLPTVSTCTMTSSLGVQVGFAFVYFRNCDDAKEAKERANGMAACMGVGSRVRALYNDKDHIRQHQEFTWGDLTYGSSRRRDYYDLEDMIGAMMIRDYYSRSYPGGGGRGGKLESWPRTGIGLIEGRHLLLTIRPGTDTDHVPSISDHS

SEQ ID NO: 1012263 - protein, 267 aa, Homo sapiens
ETLGCGCMCAWRAPFFRRGGQAVCRTVANGLVAQGEELVEQPPWRHTGRAGACCSAWRLVWSQQQTNALTAADGAVAGQWTWSLDCFLCERRVRTVDALASVCRTRAQGLPMCWEQVPVLDDGSLEDIQRDFQGGTAGPMMTPTIISGGLSGPGPDSPVREGLLHADCSGKEVTLEISRYFLQMTETTCSDSSVGSLANVQVSGGGPSFSLCDERLPGSANELEALWPPEARRLPLSPQGTVRTAVESQVMTQTQSLSFLLGSSSSL

SEQ ID NO: 1012264 - protein, 156 aa, Homo sapiens
MLLHRSPACEHARAGSSPRDGYMTERAGATVTLGDLIRHPSTSSIARRVTVNAERTVHAIDGTPTENEPTGVGKVRQMFDQYRYTRNLVDQRNMDHLNLDRFSVVGRTDIVQPVSLRSYHSPNACLERWLQRESTARHKLGLGLTMDSNEYGHRTV

SEQ ID NO: 1012265 - protein, 310 aa, Homo sapiens
YGCATADQRVVGSRRVPPGGGLRLRRCLRLSCSALGLAPTSPLRPSSAVGHLGESVHTHVTDEDIVGYLLTSEAAARPFCRLTGDWDLFVSVVLQLEATLSSNWEEDSNSVVLSFDSAGQTLGSEYDRLGFLLNLDSKLPAELATKYANFSEGACKPGYASALMTAIFPRFSKPAPMFLDDSFRKWARIREFVPLFGIKGQDNLIKAILSVTTEYRLTLALEKPPLPAMHHRGAGGVLAQQSLWGSRIDDYVTFVGENCIRHQLKGLEKGRWAAKRHLASTYPEGPMARADRYEREILLAPAGSLADLSA

SEQ ID NO: 1012266 - protein, 131 aa, Homo sapiens
MNARLRSFYDEAYGHRQLLMTLWVKNVQVLMWSELSGGNDTDQGFPMKDAVLTHGRVRLLLSKVGIPVTRANENWRTDRELSASCVRSCGLQHLSVLNRCASCKNTMDETGIFLDCTDDYKCLAAWDPKKS

SEQ ID NO: 1012267 - protein, 35 aa, Homo sapiens
EEENFYQQQQQSELQPGASEDISKNSAAGHPGPAP

SEQ ID NO: 1012268 - protein, 49 aa, Homo sapiens
MFGGFSRSFYSRYNCKIPNGPGFEKSLSCIRSFTTCTLEHFGTGHRESP

SEQ ID NO: 1012269 - protein, 315 aa, Homo sapiens
MVHKFTSLETLTHAMLLTCGSALSPQPRGKMKPKLMYQELKVPAVGARTSELPMNEIEAWNGCGRRNARWVLLGPHSGGCGLRSPLMTQLFLVGNTGDYASLYGTQRMSPSPPGYDPMEASCMVESDSLKWACDLTPNCAHTVRNPVLTYASAIGLGPVASALVAAQASALALSGLPFLNWCTPSNLKHMKDTRRTARKAPTEAKLGVELEGPFRASMLEPLRAPKRGAGNRSRHFGLMKPKGAKPERPPKRNQGRVHLATGLLSLARRRVAPSGPRRFGPRTNARHALTPVGGPIGITQRFLEVVWTEGPRSRN

SEQ ID NO: 1012270 - protein, 77 aa, Homo sapiens
MSLVSPEVAEETFREIKSGERENLEGEGKGGERPLSAAAKKTDSAKKRAAARLESEAFPAPAGRTCGAHFFKPVVRM

SEQ ID NO: 1012271 - protein, 272 aa, Homo sapiens
MSFLRSYGRVRASSMRRSEQPGPISQPAPGRSLRREREDAPATETLLARKAALDLPPWCSESGRPLAARPLRPEQYCAASPGLPPQRAAIWRCHEDTSQSSNLIEAGLRAIPDAVLLFPDSLTLSIVLALGTRCPGFQVDPERAPFVLSCRVRPSRGLRVLEKPEAAQAADSASSPIGHVLAKPEEGVECTARETYVATLVGRSWALPSGVPGGPLGPPVHGRSDGEMPAPGYRGPLRGNPFGSGKPARGHTAMGKAATSEGAPASPPQIPV

SEQ ID NO: 1012272 - protein, 161 aa, Homo sapiens
  misc_feature (143)..(143): Xaa can be any naturally occurring amino acid
GGLAGRSLGGVLWWLPGHTLWLVAQMQVVKGALLRWRKDRAVPSRVEETLHTPGPFRNWGFALLVHMAPSQLGKPGELLQPLVGLWSSAPSSIALAVVSLDCRPCCLPHCESPPTPNSATVVTVHCPVHVPLRGRGLSWFCTXACTLRCLQPIPATYRVRQ

SEQ ID NO: 1012273 - protein, 182 aa, Homo sapiens
MASPQRAVASLRSTVPCTVMGRPGLNPFVGGITRGGSRHASFKAIGVPRGRQRKFQIRSLRRRKKLGRGRGGGFHWPRKYSVPLIPNLAPWETPGFISHSAGSYGLWGHRKGSGVVRPKGPLWHAGALPTRGAYLGQRPLVFGTRQGPQMTEAPINFWPDGHGENALNRNGRNCQMRFPCVP

SEQ ID NO: 1012274 - protein, 257 aa, Homo sapiens
MVKLLVARNPVHGGRVLLRCVLGSPAPREDHLMTDLRRRIARRKILSRRATPFGGGVSLATCFNALLGRCEENKLQKVLSLGHISTDYPLAETILLLGFFMTSHSWSSWILTFRKEKPSFIELETFKRRSRSGQQTLEYESPVHGWALRGHALYVEPHGHGPVLSVQGLSLRQPVRLLRLAFALSATRVFEGLAWGLQEEGEKSGEPVRGGGRPRDTGGVALGISMAGGHALRDGGKLGVTVSGMIPWDIRPGLGIE

SEQ ID NO: 1012275 - protein, 303 aa, Homo sapiens
  misc_feature (216)..(216): Xaa can be any naturally occurring amino acid
  misc_feature (276)..(276): Xaa can be any naturally occurring amino acid
VQVRAEGARGRGPRNKVPGAWSGAGSGLARMTDPILAKAKASKLQRRGHPRAVPVSGRRATVSQRIAQNLVVQHRLQAERLLAGDTSRPAHEGGEMAEAGYREIVFGFQSACDHTPNDVRGRRTGVGQALGSLMVIPEETLGSRPKTPGTKDRVKLDLRDSDYDIFHLEDSLIDRSRVRQLRFNPHWRTGYYNAVYFNSELMVQWIWDDRHLVKPXELQAGGMINPGSKLRARPKTGIKEVAKAESVELEYKEAGGSASSKCCRTGTTNNNLARTXDALVSYKITTYSVQRSILTLANGQNLE

SEQ ID NO: 1012276 - protein, 264 aa, Homo sapiens
LPPGAEKMGSQAEPRPYRRRRHVVPQIPTLTRTPVACRCSRPGPRGPRAPAPMSVRTRCIYIVTLIKAPTSCWPIRCLSFIDFYLTMLAILQPSDLHSTAPIMNAKYTEENTEQQITYIKTRNTQNDKQYKQQQQNKQKKSASTINTPPHKTKNTRHPHTNTTQNKTPHQNYIQQTHIITTNIQHKTTNHNKKHHTLHHSNNNNINKKNTTHNHTKQQHQPTTSPAQKPKIKIKTQSNNNKLHHHTPSNTHSKYNNNTTKKNTQ

SEQ ID NO: 1012277 - protein, 214 aa, Homo sapiens
ARLAGDDMEVIATELMNILKKVVETYTLIWRLMVLAVDTCRSMVAADGVSNSTGKLGFEEFKYSVEQHQEGDMASIHNSVDTDRSGYHFAEVNSQCAFEAAGFHLELSISITSSSERYSDESGNMDFDKLHHAAWSGWYAIVPWPSNLLRKMASGQSPGEHPGVAAADYVLPELEPQEPTHSPFLAIGVTWSLGLCQGRSLSARRIFVGACCSH

SEQ ID NO: 1012278 - protein, 394 aa, Homo sapiens
RELGAAVPGSLGAERAWAGGRGLERMRSRELLPGPAPSPALPSRRSAGPAAAAPSSWSKTNQPPKDPEFTVPAAGARTLYPRVRREQIRSAPALPLATLVLTSDQIIPRDDEDRIPNPHLKSTLANVSTDNGKKMTKESHPTNETSSHTDSRSKHQTWTAKPTSTRQKATPETRAPAAQPTAKPPKKITQHNPREQSPKHNPAKCTTPKAIETNPSMSAPNPTNPPPAPPTATQPNKTTTHTQHTNQKHPDTHTQTPSQPTLNHPNQQGDNTTKQQNPQTHHPHHYNKPNPTRTQQTTNTAKTTEPHQLHQITARTQSHTLQTQQRRKPHENTPQKKIPNLKTTHKHKKKTTTTQTTNKTNTHTIHTITKQKPTPIHTNTPKTQHTTTSNKKTH

SEQ ID NO: 1012279 - protein, 167 aa, Homo sapiens
PGQWRAPLPQPRVSPCSLISDCCASNQRDSVGVGPSEPGAGYSLVVRRFLSRSEKRNIRVGVTDFPGASVTPFFDSERELPDPLRFPGEAMPRPASARAQCMHPLACIHCLALPSEMNPVPQMEMQKSPVFCVAHAGSCRPELFLFGHLGSGFGITCLNGKNQLKMD

SEQ ID NO: 1012280 - protein, 296 aa, Homo sapiens
MVQTTMNGVLTSDNGGAGLTHEPLSADELDILNNGNPELCSLLVLLQALDGMAIHTTGSGNNTPLETRTILEFIYIPFSVLVRLLSSTTVPAELRSELCCSRLYPCEVQMRRPVYRGYTAGSCVTQGKQDTTCGTYGKEQVSKYYCTNQLMICNSFVKETECIIYVKLPFQKAEVKIMSPGEFKLVLRNMCPSVQLAANSSFLGSVCSRVVVRVALKGLGDSPFRWMYMFLTLHYPSVGSKTGMRGAFWKGPGGTVAKLVQGYHLQCCTKACRTRKHVIEAPGTGPRFKIRGLPKD

SEQ ID NO: 1012281 - protein, 280 aa, Homo sapiens
RERTQVFWQWAPVGHTSGPGCRRPWLGDCSPRPEYSYLVSPAVRGVGDVHLKEAHLGDGHIWHLEAARPSALATVATLTPIHMCLESRLNKKGPQGLADSMGSDKESPEADCQKQFQACSERHPEAWPKNGSYRPSYEEDAVDSTVTTKQAHSWGTCLVTPARGSGTPMGRYKWDALESVWCKMSRVGGHVVPNIDWNETVWHRRWLDYSCPWVMVAYGTCGARSSPLYQVIADNARRRPRKPSLKKGHQVDAAGRDGDVGAVKSSQLAMNGGPEPSPLP

SEQ ID NO: 1012282 - protein, 119 aa, Homo sapiens
MVAGQLIPPFTLLLPHLAARRLCPRTLPPLSGPRQRPGLYFSKMVPVRRLPRTRRRAGVGAQRPERAPALVDFASPASPAPPPHDVPRGVRHQRKHTSDADAARRSVDPMECRVALRQR

SEQ ID NO: 1012283 - protein, 301 aa, Homo sapiens
MADAVVLGLSETGHCSTNGSTGDQPETPALHFAGIEGTEENRGRGIYTFSLLRDVASESLFLREIAAYRTYLSTYFRYRPVEAQEVPNTGSIMALTVHDIVCTKSATLGLPFHRKLTACIYGVQPQGLLAKSSNGIYVHAGEATNEGWWCISTRSVTVERDRDRTELSVQPLGSGPAADELMAFLKLGQPYTATWTLPKSDTGKRLSAEPAGIFLASHPGTMMPLAHISTDGHSKVRPFPLVFHRSRSQTDPWGTSNRLVSVNATITGNYSYVGISKGDTTIIQAGPHSFISFRRTIVQPI

SEQ ID NO: 1012284 - protein, 68 aa, Homo sapiens
ATNCSTEARLQNSPERGIIRAGRFRHGCQVQVSSTVTALGSPSRFVMALVRRESAVDVSSKERWTLRP

SEQ ID NO: 1012285 - protein, 234 aa, Homo sapiens
LEELHLRQLCAERYVPPGSDVLAAPQSHSIPSPPGAHLLKTRSCQALGGRVPGLLGELRSARAMGPAAWGRGLLPGGAAFPDLLAWCFLLALSPQAPGSRGAEAVWTAYLNVSWRVPHTGSEPYGVGRLSEEGVYGQDFARWEPCGLGVLVPALTGPRWPLKAALVNPHTKFHGVPTGLGESTVQSLLWVSGPHPNRRPVGLDTLSAMHRRIPFWALIARPRGAVPWETRSTLF

SEQ ID NO: 1012286 - protein, 367 aa, Homo sapiens
  misc_feature (90)..(90): Xaa can be any naturally occurring amino acid
MRIANRTRFRLAFLGQRRRLDSRSGHDGGRVRATIACARRPSHPCSRDVHRLRGDARCTCRSACALHLSWLTILGRPALVSGTLYGDSSXSMSLSNKVVAEFFAHLWAKRDFQGQQDSVPCRTYVLVHSTMIWPSPLCNSVGPSLPAPNVLVITTALDLSVPASHWGLGSWLAYISNERILRFATHVVTHGPARLSRGPFDEPSPKGSTRATGGKGKQHKLDPCKCFNFREGFEKFPSVGYNALSLRLDPRTSIAHINTKHAGGAAAHSSETGVSTPLSDARAPNTAIYAGLLPPGAAYALGSPLTSRVGTPPLNLCVYHAAHIALDYAGPQRTFMDPTTDRLCQQSAHHFIHCGVYHILGSYLCWE

SEQ ID NO: 1012287 - protein, 165 aa, Homo sapiens
MAPLSGRTAISACWWLCVSSPTCVCPETMPLDPLGLPVGPPDRTPLGAAARLHGPGYGAMDVGNHHEALWPLSEMVPGTETGNRDDREGVPTGRHGTSCTDVGLSCAQTLSQRLQHRYTRGRQGASRWTLVVKLWSHAPLTAKPPGRPLERYLSLSPWLLSRRRL

SEQ ID NO: 1012288 - protein, 241 aa, Homo sapiens
TTLGVGKQTSGPLLQKSSGWLLTSLRRGKGCETKQTQLQLPAGGGCATLRRPLGFRVSLSLSQPLPRFSVSLSLSLSLPRRLPQNMSTGSLSDVEELQEVEMWECDGLKMDSNKEFVTCNESTEESSNCENGSPQKGRRGLGKRRKAPTKKSPPESGSSAGGEVRSNRKQAQQTRESGARMRVLSNGFSRLKSSLTWCDPQTAKLSKAGSTLRLESSYIAHLRQILVYLTNTEKRVHSPGQ

SEQ ID NO: 1012289 - protein, 35 aa, Homo sapiens
DEETLRRRRSGWVWMPAEGEGRQPQWRLVCADVVL

SEQ ID NO: 1012290 - protein, 268 aa, Homo sapiens
SCGAGGRPRGGAMEMPLPPDDQELRNVIDKLAQFVARNGPEFEKMTMEKQKDNPKFSFLFGGEFYSYYKCKLALDAACSSSASSRPRSWSQPPPCHPCQQSSAVSPPEPQSAPAQGRAHPWTSSLSVSSQVVRAPDMSGSINFLARQTGASDSVPWPTAVVGMSDARSYLEEHPRRRPLIEFDNSPAAPSSDDVHSMDANLGRESKWMFSTVPGALSRCVLMAEQLRNPTHGDGAHFELRAATVIYLIKCPLLHHWQRMQAREADWTA

SEQ ID NO: 1012291 - protein, 71 aa, Homo sapiens
WIICKESISVSSEQLAQFRRPSIKVEGDNAVPMQHNNLPNPTSEGQNSESFILMILRRNLSFLKNTALLLT

SEQ ID NO: 1012292 - protein, 355 aa, Homo sapiens
RTGEEATKCGVCQKTVYFAEERSVAKASSFHKSCFLCMVCEEESGQITTVAVHGEEIYCKSCYGERSMGPRMAMATAQGAVHPQQLTTGESLRYQALRKPLASRSNNKPNALQYLPMKIGGSDALPPMQPGQSMLREKVIGAAECPGQEGLLLDVPSVCNRALTLNHPGQDKAWRMIYCKGTVTATKLRAQGLRLSVQGAGALGSTLSEATITTTIALTTPALFIAISHSHQLSETSQDHHSAHPCQHYHYMTRTSGPSGSPKERRGQPEVPPPPTRTPTRPGNPGQPRSKLAKTSKKIRESKSEESKAPLTNTQDPQEPPNTQAHHGKTDTDNHLNQRNTARHKHRDTQDKAAQ

SEQ ID NO: 1012293 - protein, 215 aa, Homo sapiens
  misc_feature (134)..(134): Xaa can be any naturally occurring amino acid
KETRSPTAHGDAGPSTRTSYAELWVANFGASCLGGLEILGPTPRGLRGVLLKAVLRCGNADRRGVPRRRPVAYCHGNPWPSGTCEAAHPPDVTHEGGPGRAAARRPPRRPSGACCPVNASIMTTTAVWLVGGDXYISGLDTDTAAFRLQYDKWQREGFMRKGTGASLDKQSGTVHFKHLAVNRSKSASTRGHYVVRRSLRLSKGTYLWGFRSGIP

SEQ ID NO: 1012294 - protein, 153 aa, Homo sapiens
SKKLERYLKGENPFYLTAPEEEKEQEEADGRCPGRGGAGRSGGDLGGRRVACRRSLPCPLGSHAPRGRCLPARTARRPQRRRRRAPCSLVVGRGAVIGSEIPAGKSLGLSGRVSDDRREWLARGAPETRARGGPGSPGPVGPGKSLGKNPKTL

SEQ ID NO: 1012295 - protein, 109 aa, Homo sapiens
MGPERPSPHPALAQQPGPDSQASGKRTSGGRSRVTQGFTPSSGSVLTQRRPGPHDWTPQRTGPPPANKTKVTHSGAGILQRTPQGTEGLQGFENQCRTQPSSLTARARR

SEQ ID NO: 1012296 - protein, 51 aa, Homo sapiens
MELSRYRVAQVDPGALLLWRCSAVSYGCVLRPEGIRAWAPTIGAFRGGDRI

SEQ ID NO: 1012297 - protein, 119 aa, Homo sapiens
MCEVLHVGALRFPGSVLSGRGTVWSMPEKKARRVTSQPEPRSRAPASWKSDVCYSSQEIGHDKSELPAEHFVNLISNSSSALRNSDLHLIKLVMKGTPSKEFSQEVHVHQFEEKTAIVI

SEQ ID NO: 1012298 - protein, 155 aa, Homo sapiens
  misc_feature (36)..(36): Xaa can be any naturally occurring amino acid
  misc_feature (44)..(44): Xaa can be any naturally occurring amino acid
MYRLMSAVTARAAAPGGLASSCGRRGVHQSRLVLPXLSAHVLGXSGGAPLGAGGWELALGVNAGSVALSGRWPLGAQSPRCAPPVPLERRQPFLGLMPCPTGQAGSPFRPPRVGDPFPAKNPRAAALASRCFARAIESSRDLLHRIKDEVGAPGI

SEQ ID NO: 1012299 - protein, 120 aa, Homo sapiens
QGHLVGIDIFTGKKYARISCPSTHNMDVPSIKRNDFQADWHPGWVPITAPETAGRYERTFVSLRETWARRLSQKYDCGEDILITVLSAMTEDGRLWRIIWPWADITGVPGLAVVAGEVIL

SEQ ID NO: 1012300 - protein, 506 aa, Homo sapiens
  misc_feature (347)..(347): Xaa can be any naturally occurring amino acid
RDWRVGLSSTFKPLLLAARRRVGLSRSGSPGPATVPGQSSRGRTSFIPRTNEPWSNPETVDNAMCEDAERRLDWADASSHRVSRQGPRGSGMGRAVSASRDSTGCQRHDQALMPTFGRSNLMLLVTESRLTVRPGKAVTLVSCMARSRCNFACCSPEQVPWRRTPSSPAIQHSPRTAWTRIAHGTLPDASRPARCPGSASGRSPCSQAHARSRNPLASFALTRADIGHPSEDRHANPLLIARRRSMPVGPLATPLAFPLALNRVDSFHFADPPPPRRCRPSSWGTQSSPLPSALENRVRPGLRPLSLLDAIVPTAFRPEPPASLEVSMRGLGSPPSAPQHRPRRHLXFHDGALARCRPAGYQRRRPTPRTPLSHVDEPLGAGFPRRTRPSAAPPSAAPAPQHGATLPRPPCHPTPFDNVPCIQPPLCRRTSFGPAPWFGPPSDCTLHLVPPSATPWSRPGPSRSRPPFPNAAPFWPWHAPTPSARPWGASPHSHRLCALDLRFAGA

SEQ ID NO: 1012301 - protein, 250 aa, Homo sapiens
  misc_feature (65)..(65): Xaa can be any naturally occurring amino acid
MENRRSPYKSRGRRITKTIRAKKSLTGKDTKFARGIYRLSHGLEDIYHENRSDVTQETSHVTGIXQQSTVAANGTTKSMNPRYINPTISGTSQRDCLTKVPRTIIGEQDTASSVKVMLGKLDSHTQKEEDLDPRALALYNQLTENASKPNCSDENDYKHYYKNNIRGPCFSTIGSHDRIPVNYEASRGTVTAKKKAITPEWGSTHESQHGSPGSPRNTKPDQSAIDKRTDRADTQVRHLTQSNGGIPDPE

SEQ ID NO: 1012302 - protein, 242 aa, Homo sapiens
VAGCEPRTASGGGCSQLLAVTDLPPPPTPHASSLPGSGRLSMGTSGDPAKVVETVIPGHTWQLRNVAVTYFEEMIVSETPHSSLDDMNISYGFVLRLKNLELKLAVEDQDVLCEDAGGPINPSDINMIQGNYGLLPESACCWTGTNGVAHGGYAVGSTCDRAERHGRPGVIPANAGLGTWRTGGCVHAEASSDPKFRCAHPSSERCFLGVHPCYCPTGCCMDFRATCMPGHSVFRMHPTAAV

SEQ ID NO: 1012303 - protein, 42 aa, Homo sapiens
MQTIIAGMHGQRQVLHRIAAVAAAGQPDVEMRMSRMGGAEPA

SEQ ID NO: 1012304 - protein, 317 aa, Homo sapiens
PAPGVPQSLARDAPAGLLGRLPRQWPGLCSTRLSGALLSPSDRPPSSPFPPVPGSPFAPSLRPPAWMDAPRLPVRPGGLASEVVLLFVYADDCLAHGVAKIANLTAGDGTTPYCCSYYAYIGEFLSGTAIAGMSWELVLSTHCAVICWDSPLCTLHCCMKNHTGDPALGTPQDDLTSTPLSSYPAGTTTLPVTHHSHWNTVQHIASLHTPPPPQRSTHSRPPPPCPTPGTPPPPPNLHAPTTHEPLLPNWRRLSAPGPPNQLPSTPETPRHDQHTRLHPPTQPPTARPTTAAHACAPPPPTDTPPTPPPRPPRRTPP

SEQ ID NO: 1012305 - protein, 85 aa, Homo sapiens
LTLRYYESSVRRVQEMAQHRPKHHIAHKVDGTQRQELSGAGPPTLFPPLSGARLLAGGGPCEFQRHRVGQARTSLLPATLTVLCS

SEQ ID NO: 1012306 - protein, 251 aa, Homo sapiens
MADNLSVMCRRHPHANEETCDAGLQAFQQEGMANITGLKDQLLAAETRSVQGHRGPARRPHEEVEPSFWATLPPAKKKLLEAQSHFRKVEDLFLTFARKASAFNSWFENARGGLEQSPCAVTPWKKSRAWREAHDAFRSSLSSAQADFNQRGRAGTLQIKSFRGRTPNPTPGFTMEALEENWRNLQKIIKERGAGSCGRNSGGQEGRTDKAGPRRFAPAPPMAFHPVRSKRPGEYLLGLGIALSTSAIRVY

SEQ ID NO: 1012307 - protein, 364 aa, Homo sapiens
GCHQPPGRYPPGENRVAPSQEAAVSSPCPRARRTVRPCCCPALPLAVTSVSLAEWCVRAVLPVSAVNLLDHERGLHLGAGQLAYALARWLHRPQASCQAHKIIAQNPQKMNLAHGCPRSGQMGVNLTRSNKETVEAQTTSCFLCCEATYHPLHPGLRLGPTCKPRHIAGLHVRPGLSTSQTLLDEERVMALSRARTPKRDYAMQCPNNTLCVRDTRKAAYSVQPPETHPNSPHGLRHGNAGQRIHLRIYTINESQTDESNRRKQRARQNKDTTKPKITSTQGEVNNAAPTTLSTLAPILHHLHIGASWVTCPLGTITLSTGLDTQSARYQTTTGSPTVAHHHNYSEADHQAVIYTPKVTRRSPE

SEQ ID NO: 1012308 - protein, 78 aa, Homo sapiens
GRTAACGEKCPFRARSDGAVPLYSHHLPHLPRCDESCCIGLPWPPQSDERSYNTLTAHLTMCSARFYVGDLARNHSYS

SEQ ID NO: 1012309 - protein, 310 aa, Homo sapiens
RAGHALAPAHTFTSAHEPPCGGCPLVATAVAACWLATWLWVPSSGRGAACGASTCVSAPAWCIRDAGVPGTASEQDLCCRWTVPDDCALPYLGAICYCDLFCNRTVSDCCPDFWDFCLGVPPLFPRSKDVCMDGRIYPVLGTYWDNCNLYAPASEKQAVGEYVTKETSALVDHRRLIKSHQPGQLWLGRLVNHSAFWGMTLDEGIRYRLGTIRPVYPSVMNHDEIYTVAEARVRCFPTGVEASGKWAKRDFMRPLEAKATCCKGTFGPFRMREGGVWESGYRGLKVEYSWRHVSARILTARETLVAMIQR

SEQ ID NO: 1012310 - protein, 185 aa, Homo sapiens
SSDWNRSNAPTQSPDEGQKADTICTSFMDVLKALSQNLFRPCSWVSGFCCFWHSLAPSDGLIRAVYNVPPIAQREKQTSNAYTVVNAEMEYYAMTSPDHSDDLCCFFILGSPIAVFRHASAQAKGTPWILDGNHGCASFPSQPRKVPSHPAPHIDARRACERTLPPTLIDVCPHVAVTTPLPQSQ

SEQ ID NO: 1012311 - protein, 192 aa, Homo sapiens
CQARCCGTSEMIDVLGVSKAEATMGYQSLDTNEAAPGRTTRGLRNVACIGAWHPARVAFSVARAGHAKATIYRTEINKTIYKIGQGYLIKDGKLSQEQCLSIDYDSYLTRASNLWVGFVHYGEVTNDFVMLKGCVVGTKKRVLSLRKSLLVADEAAGLWTQDRPEVTLTPAPSLAMGRFQTMEENESIHGST

SEQ ID NO: 1012312 - protein, 262 aa, Homo sapiens
RAEDEPGRGAAAPGAQPGRPDPYRPYGGAIEAPTHRSDREHRFTRGTQHRRSMFKVCNSRRPTGPASNFLSPKAQQAPLAPRGPLACLPAARTAAPCPPVGPGDIGSSACRSAGGSDRRQDRSRSSVGIQLLARGTAGAKACPIITLNETGVGGLDDASGKTARPGGTAGDTRNRTLAVISYVPIHGPSDSWRLKAIDPNGDVAEKSRRDATCQTEREPLLGERWHRDGGHQTRAEQGARFDTHCLEGLKDARWTQWAAVQS

SEQ ID NO: 1012313 - protein, 171 aa, Homo sapiens
FRVCADLSVPSAQPAVVPGQSSPPCGWGGGGGCTPGPPIHQQPPERRVVTVVFSRPPAGPPVAFLLLLPHADRAVGEPRAVPTDPLYGSWQGGVDLVCQLTSWMPVEKRYNSVLYGGLIWLGILCPCSFCVRTLTGANSELTMGRRPVMQLCLNRVKATSYTDIEDTSREL

SEQ ID NO: 1012314 - protein, 239 aa, Homo sapiens
WAAGRTADPERADEQAPARMDLVITQELARAESQQDAASLKKAYELIKSANLGKSEFDPSESFSPDLFVLCAEQALKMRQPEVSEDCIQMYFKVKAPITQFLGRAHLCRAQMCAPKSAENLEEFENCVTEYMKAINFAKGEPRYYFLVYNASVLYWQMVRPFLKPGYRHHLIPSLSQIINVLSQTEEEDKEWRAELMLELLECYLQAGRKEEAARFCSTAAPFIKSHVPQKSGRYSLLW

SEQ ID NO: 1012315 - protein, 57 aa, Homo sapiens
WYGRNFGMPGREHGACRIWRPWGTCWLPVAALKVCHRRLRRALVGLPPTPPSPPGFT

SEQ ID NO: 1012316 - protein, 117 aa, Homo sapiens
GSGRLGGRTPSPRAAQEPATARERDRGGGGGVDRDGRLSPEQQQQLQPPVSQVLRCPVPPASAAGCARSPVIRYSLFVRLKGCAVTVLERGGASSPAGAAGAMRRRMERAAGLAAAA

SEQ ID NO: 1012317 - protein, 120 aa, Homo sapiens
ALRKLEVEANNAFEQISMTCMRTRGVSSVYLWDLDHEAFAGVILINEGCESRAVKRDDHTGCSLEFHSTSGRTCRRNPSTRTDHYKLTSTVIAVRCETNRNLALGTMNLGRRSLIHEQIA

SEQ ID NO: 1012318 - protein, 61 aa, Homo sapiens
MPQSGYEVQGNTASLTTCRGTILHRTEKWLMRNLFHAHEILSSDATERPCDRDIHHNNVEK

SEQ ID NO: 1012319 - protein, 203 aa, Homo sapiens
MLIPPKQLATPGRQQQQQQACSRKQQPGCRWPAEPSQPRWTPACNHSPSKSGRIKLQRNLQLLPKHERPVGLMWKRKGSNVTMYHIKRRDDWSRSVKWHDSDLTRARKETRELETRHKIHDVEDWMAVKQKSGKAQSQERGYKIQRLARKARQEIIGIQESDVPTLEKAHEAALDSKGREETNSRNAYWHKSGKDRITPIKRI

SEQ ID NO: 1012320 - protein, 145 aa, Homo sapiens
GLVAGLQVDCVNGEQAAGSAEPPEGSGRFRLDACMPRLALSGAPGSAIVARGTMVVVLRVRASDVPVCRDVSQCAGSKGLHTPTMLLIGKSMTWVLKDVNLRPEQTGRTSVFGNVLHALWDRGQIMVPRSPQVTEYDDTRRLMPY

SEQ ID NO: 1012321 - protein, 182 aa, Homo sapiens
RRRGGGGRRRGGRLASGLFERVPLGPGPCAPAPRLDAALRWLSLSASPRRDPWSLKSEQEPPRQRHERTYFAIWRSDRCLLPLYAGSLRCLYASERDSAKRDAGTDSMREPAEPEGVVLRGGHSENSLLRASYVVETRQKAPPAGKRRSPSFPLDKGQGEQKRNLGKSSHRAIQNLMNALCA

SEQ ID NO: 1012322 - protein, 169 aa, Homo sapiens
MPLLQLVLETREERMESEKHGKRFERRQQEVETELKMWDPHNDPNAQGDAFKTLFVARVNYDTTESKLRRELRCTDLSKRIRMVYSKRSGNAPVGLIAVSIGGTDSHELMHMQLRLTKPRRIGTEALDCVSEGVLCWTFGSREAQNSVKVPWKCPGGAKYGGASGLVSM

SEQ ID NO: 1012323 - protein, 241 aa, Homo sapiens
LEKIWDYLKLVRINTKPKGQVTRLHIPSWCFLTPGPQLEDFCMKIHKKSYQQNLNMLWCLGSTLLKHNTSESRVQRPLALEDEDVNSNLCTEVNTFPFSHLPDEPQQRSPMIKHPTPGSILVSWHVTGVRIQGTGDGGHPNWELSFVLPWCQPCMSRLHTRDLARAESRLSMRRQDKTREDTHINHHDRTSPQTKNQKQTTIEPIDKEEKTQTDKDSRINEAIQTQKIFERRRIPYTGQGD

SEQ ID NO: 1012324 - protein, 109 aa, Homo sapiens
LALEVTEGSAAGPGDEETGVLDSVSQCNQCVLGRAGVCDALLPAPALWSDLLRCPCCMQLWPLLQPNECVPDLLCALSISCCLLWRLPGTLLHCGGCWLATLFGDTSVP

SEQ ID NO: 1012325 - protein, 368 aa, Homo sapiens
MCLDGSPRSVCGCAGVAAAPEFPARIMTCLGPRSRAASRVSGSGGGAQCSHVPVLCAVVPVMCALQSSLAVMRCEVLERAVEPAGCAALLLCCHSCVVGMWHVPVACVPAAIRQWSGCASQRESQWARVWLCCADVVMESQVCCVYGDCPECGGGVTWVSSCTVGKANFATHGLQDGLLVAVPEDVLQFRVSGWACCAGRLFGLDVWTPGTSLEIAALLAPVLPPDCGLGGQWFANRRKIFRGDNVKHCVIPFIVCWAMDVVALWRVTDQFPCYISFARLGARSRGDPKPIFAQALVRGVYCKTGLGNDLGVGPFTRITFVRTSCQSLVIRRTFVRRPGAIGEPTNSAGARHTLGGGQFNVTAFGGRK

SEQ ID NO: 1012326 - protein, 84 aa, Homo sapiens
VAEVLVLVGIIFIYEKRRRPEDVLWSELIERPCSASLKMQRAGPEGLKARNVTPEGTLLAREAGGAVEEQRPLTYRCLQHVQVP

SEQ ID NO: 1012327 - protein, 102 aa, Homo sapiens
MIHEMVGLERIRAVEYCHRTQAHSRTGHDQFQKWSWVMSRVWDNGYPWDMLLVSRFGTFLKNKNTEQPSLLVVHEADECKGFKHENYGLMPLKWSPEERACI

SEQ ID NO: 1012328 - protein, 197 aa, Homo sapiens
MPLPILCCVKLPWLVEPLEVASCEGWIREEDAGLEQRKLTHEVAAFLSEATESSSCEIGLLVGGSDYCEDLLSSWVTGDEVIEKFDYVFAENGTGQSSASEDVLSECENHPGTTLGGCELSCSDIEFTLSAIQLNNACLTTGLAQRRQLETLHRSSWQLAWLEQSRPKSRPRFVSPWAGTGIRVPSETGTRDENIGA

SEQ ID NO: 1012329 - protein, 91 aa, Homo sapiens
MRVSSPYHEQSACPPSVSIYLNRHIRLYYDLCPPFLEGVPHFRTDVLHCGVVILDIRRFCTNVVAKFLQHYRSCVFVALHLGLIRIGVNTD

SEQ ID NO: 1012330 - protein, 100 aa, Homo sapiens
MARTDVGSYDTTFPINAKHRHERVAHTTRQAREAYLRQRATQPPPTPANNTTKTPDRNIHAPGFVRPVSQQHVSSAMDKTNAHHTRNTPGQLAPGEEGKK

SEQ ID NO: 1012331 - protein, 140 aa, Homo sapiens
  misc_feature (132)..(132): Xaa can be any naturally occurring amino acid
RKLRLRWGEASIHPADYQPVGSASPYTRPGDWALSPTLACIYIESIILHDDEVSSSRSDKIESATTLKASQGVQVLRPFRHWRMFAEGPVPTVNMGTPHRADVRGRVERCSETDWVLLAQTRDGSMPRALSXVRGLASTP

SEQ ID NO: 1012332 - protein, 182 aa, Homo sapiens
MTIAGGGTLTLTPTGSIDRVHMDTKTVADHHRAGQTFTALRDSDRQSRPREQKALTGHQTPRDRKPAEVVVQELVPTGQKPTHRNQARSTMTEPSDAGQTMPRLLRRTNTTATDADSRAAKVPKSIRILRAKSIGQGTHNDTHRIPAPRSRSTQPHILTPWRTDSAAHGEPSHTLSRRKRGV

SEQ ID NO: 1012333 - protein, 105 aa, Homo sapiens
MTWQCRLSVQAKTELNRLVQDIGDEAIRLDLTLLSRESNDLVELIEARYEFAPDAGWKKEQGHFIVQLPRASVTKRAYYFQSMMTGLLYELVRTREHIHDSSKAS

SEQ ID NO: 1012334 - protein, 42 aa, Homo sapiens
MEAPWCRQLTGAANGLKMSVAFTQQRNVGQTMCPRTSPYETS

SEQ ID NO: 1012335 - protein, 30 aa, Homo sapiens
RLSARGTWSEEEQSRGPPEVGWLSHGSSGR

SEQ ID NO: 1012336 - protein, 226 aa, Homo sapiens
AKSANAPPATKVSGILSFLYPVPCAPGCPLSTTSSGEVKAGWGCPMCAEIVASSDDPLSGRARNPLIPLVSLSHRHTLAGIHVLAHQACCSLLPRGGLCQSCAPRAASAERGSLDKVQLCCCHDAGDSARSQTVEESRRSHKSLGLCIIVQARETVTGWRTIAAYILSGDYMVEGEKVNHEGVGPWTRQRKGTPMKSTKESGGRPRIDERASPAEGRPTVTGVTPD

SEQ ID NO: 1012337 - protein, 126 aa, Homo sapiens
MARSRAGRRMHRSGWFIYRGGVPRSAAWTCSTKRRVVQVYRLRARGGGVNRGLLAEAALPCMKRLCRQGRCKEAPAMEEAGSGEDAPCGHMIILAEMVGRMVGVFTNVKTLQACVDDQGPENDQRH

SEQ ID NO: 1012338 - protein, 182 aa, Homo sapiens
MRRCDIPADPVCHDLYGGIPWSPGRSGAGGVGQLGVRLIHPHFAGPCLVHILPGIWAFNARGHVPMLRWVHGFLAYEHSTGERSKACMIGAFAIPSGRRQHRGAPACWRSYHPQGGQGTAREKGRNVGPETDGNGPDGVQGPLRKLEHTQLRNHRPQGKPNIAWTKDTRSEIPQTLGQRTYH

SEQ ID NO: 1012339 - protein, 119 aa, Homo sapiens
MRTPSLPSCSSRRVSQASNALRVLSDPKLVARRDSEIVRGLSRLALLCSTRCSLLAWWSPCDVTHRYGLLVRSRGFRHDPFSLCVGLLSIHQTLCAPPDYRSYTGCSWKKGWAQCVLYR

SEQ ID NO: 1012340 - protein, 99 aa, Homo sapiens
ASGKMAACRAAQVRVYGSEPETEQEIVIIISSTVALHMLTLSAVRLVVGVPEQMLHGQYVGITGYTCELGSTLHPFHTSSLTSDQCQYMSDRPGKCRLI

SEQ ID NO: 1012341 - protein, 309 aa, Homo sapiens
TVPISNYYVGLAHLSRQVKTSERPVFPATGASSRRRQIQSVWCLDCSRLFTSCSLRAQCRQCSSRRGAPVPSQSSVVYHPYGPQAHTSWRRITLHIMQDLARVLLSGAVSLPSASRAGLACTLASLMSGAAQPRAGRADCGPWDVAAATRSSVYGSPGVAAQTAPRRHCPRPEARRARRACKHKRARRADAGPLAIPMVNWIHCSAPRGMKRVPRTLKYLDAWTLDERELLFNTVLKPGTVGMTVAGFLQSSPNRAGSKILVSRKFDRLRLRPRMHYEDYPHYGVVLNPYPSLAASAQAKANPKSLKLP

SEQ ID NO: 1012342 - protein, 79 aa, Homo sapiens
CTHQKAKAIGAPRSRSLCVVEGDGMMKVTKAGAPARTLCDLPSALSATHPQVTPHGETRVAAGSSQRVRHRGSMSLEIT

SEQ ID NO: 1012343 - protein, 282 aa, Homo sapiens
RQCRFGGGFLGPSGQWRLRPGPGQRAEDSMGVAVRVRVRSPGRLSDSRHGPVSWLLLHSRCLSSSVEQRADLSSSSVCLGLRGASCKLERVHGGLDLFSMLLEQNDLEPGHTELHARSCFVLPAGRHDSCCGASYDFEDGGVRPWVRRLGKTYLCAAFNVICDKCGERLEKAGSSAQQSQTTNVSSSIDGHDIPRYPDRAVCGMSLRIWKNTDEGERNSGPTCVGGSQCPVQMTLVADLVQEVQQARDLQNRSGAIVPDCHGYSDASTSEGVLMGRALRLVD

SEQ ID NO: 1012344 - protein, 331 aa, Homo sapiens
  misc_feature (113)..(113): Xaa can be any naturally occurring amino acid
SWRPTVHSVKWSSSLAADRGLQGSLAAHLRVTRGRPQYPPSWAQSDVTPRPCCPVTSPGVRAPGSRRRRSSPRGGSWHARLAPSPSLFPHLVKAVDWWLLDGFLLDMMPLGSXGLQRVPACCPLPPDGVGRDAWYSSADTLPSGFLCPRCPRETWSCVSSWRGAPVAGFVRVDWRCSSRWSVGRWDGARGLALCPTRLASWVARPIELPRLEQGPKPDLPILIRTEPVECAYRNEEKSGDNMVPRLHRASNELQQGRLTGSRLGHQKSETVIVTLRAQSRIALRCWTAEGGRNMEAHGWVIPAGSNRAARCVRLAPKGERVAGGQRVSVCP

SEQ ID NO: 1012345 - protein, 105 aa, Homo sapiens
MQAHRREIGHLQDPATRGLAATLCVWKWTSFRFTPRIQRLNELEAQTRVKLNYLDQIAKFWEIQGSSLKIPKCRTVDLGPLQSQQNCGGGRWVMKLSARTVGGLG

SEQ ID NO: 1012346 - protein, 381 aa, Homo sapiens
AQQPLALPSASPRRRSLARVGWQLLTVSGCTMARIDADLKLDFEDVLLRPKGGDSLKSRAEVDLERTFTLRNSKQTYSGIPSQIVANMDTVGTFEMAAVMSQHSMFTAIQEALLPWIDWKLFCHKSPRMPAECEPVSSGSGQNDLEQDDQQSWKLCHRLSLFAWMLANGYSRTIRGIRETCPCKFPEHTIMAGERGDRRTGEEELNTFRKHDIINSGTVGTRFCVHQPGTKTGVEDTPRLRMPYMKCAEHLPKGTEGTHHLMMEDCNMSRGLSTQRTEESCDSTLRPQAGREANGSNRMHTDNRVIGPSHHTGKAPKQRAKRKTTRNHTKQNRTRTETERKTEPNRAQDGQEHRTTHQEKPTDQNRGTQTHDTREPTTKRR

SEQ ID NO: 1012347 - protein, 256 aa, Homo sapiens
MRPLRVVGVKTGMCWACALRKDLVSSASYQARSCAGAAGSGGAERQGRRVKGSERVLSGPRRPRAGKGARSRVIGAVTQYQPNDEAVPITGVEGPDEKVERDQVSRRDKLGAGVRNREWPIIRHEGPIEGARGRQAMSAMDQEDPNGGGRPVKSRDCRSVTGCLAGGQVQGPHLFPAGADRGTLASSMGDVTEASGGRGDKGTGGPRGARAAWVQTSQGSANIGKAPRPREAGAAHRQVKQGRALGELRTTCRPLI

SEQ ID NO: 1012348 - protein, 105 aa, Homo sapiens
MVPSEFRDARLPSQSSVGGRGIRDPDRPANKYIHINEEASRSSKNQLSLEEPRNHLASSARNRVQRKDSGGLVEPSMANQLTSHERKSPWRILMYSRQSDCMQII

SEQ ID NO: 1012349 - protein, 112 aa, Homo sapiens
QVILGRPSGPPPPPALAGLRGPLPPMRYIYSRCAPPVRPHLLAHLRGTLCCAPEPRSYSPGYLGTCRRSETRPDGPSTLGGLGSPRAPGGNRLAFGDHQFVWNHPPGVSYSL

SEQ ID NO: 1012350 - protein, 44 aa, Homo sapiens
MSSALTSYGDRPQWSPPSYCGIQSRVTVLYVSRVLLEGYYVLSR

SEQ ID NO: 1012351 - protein, 275 aa, Homo sapiens
  misc_feature (13)..(13): Xaa can be any naturally occurring amino acid
  misc_feature (30)..(30): Xaa can be any naturally occurring amino acid
  misc_feature (84)..(84): Xaa can be any naturally occurring amino acid
MSDITEDIEPTFXRMVLRCVEADAQATIVXSRDRVDGEPQKTWMPAFSLNVASTAHARGRQRHRVFTRQFELTLLLAIELGSRXAIPGRARLANQQLRTNFFANNTSCTQHDKRLERDCAPPISRPHCAILRAPPTPRRTLTRKSHVHSASRDSVVPLHSRLSEPTCPYVICPFLLCMRLHSPPRLRDTPAEQGRALSPARHDGLTLPSFPRSWPFGLPLSTRLTTGTLSDTLTNPSSLECPRHLGSAPFTAGPTSLDKRSYSAASPRIRSLPDD

SEQ ID NO: 1012352 - protein, 113 aa, Homo sapiens
MCEERSQQVPSKSHAWRAPVYLEYSRQDLLRKERLDPNRSEHWLVLVPFWATWPYQRTAAAPCGMCGGYLRLTPAERDDLASIMKKLLTYRDDKPSLMTSFPYSMGWHGAPTG

SEQ ID NO: 1012353 - protein, 138 aa, Homo sapiens
MVWFPRWRTDGRDPALVLDWTRTAVGGIPSPRNIRSDEQIGDPFLEEYPVVQGDVQQQDAKVPGVKKARKRLGVASPKAFLCPRSVIRKNRYPEIAMVCPHISVVGQVSPRDLFRQKMGHYHRLNLGSGSVAAAIPFV

SEQ ID NO: 1012354 - protein, 108 aa, Homo sapiens
ARLVRSEFLDRQRMCWTGAVRTECTELREQAHGSVEPGGWDVRDPVVSRSPCLSGGWRWMCGPADAAMKPERRVTRRLLAVPGPWEECFQAACAAGAAGRTDHQKSPY

SEQ ID NO: 1012355 - protein, 176 aa, Homo sapiens
GTAGMLGCHHSRSSAQSAQPLVRSSPTATSAAALRRGPGGGGSSCSIISTLQRMEDLEELEVLDEEARSRGLSAVPVSHRALLAGALLMDFGNELRAVGAPGTPGRFVPPWPRRRQAFLGSRARVSVDRVPRHLPSCLSVRQFSASRKSLWRERLRLSWSVSVGVWLCLGGVCFGV

SEQ ID NO: 1012356 - protein, 244 aa, Homo sapiens
PAGPWSGHFFGLTRATPTHGLRIVVALCPPDTVARRRDARAALVPTRHTRQLHTDNDTCWTYRCLLARTHRSPPHTPRLTANSGPATSSNHTIRHSRTAARTLHKHDHSPTTTIGRADGTHNPPRQTTPPRNGRGCQDGANTDTPQYTLNSRYFPHHKRSRALARERATTTTPHYKTRRQGNHNRTTRSVVVSQEDRGLAKTHHQHTTNHTGRERNGITNEFTATLTPRTTGPLSNANTVPATY

SEQ ID NO: 1012357 - protein, 77 aa, Homo sapiens
QLYGRILDRGVGRRQTCDLVSWWLNSRLVAGTRCPDVSSALWLLPGPRRAATAAAVPFWTNGPQHLSRHLWWPLAQV

SEQ ID NO: 1012358 - protein, 251 aa, Homo sapiens
NLELKEEDFSVVVEPGVTRESPQRPPAGQAGSGFPWTQARTPLSVAWRATGASGTNCVSGYCATDAGDEACVNPGRLRACRDWVLCLAWHNVLCASEAPGAIFPWRHRMFWPRPLGLLARSAVPNLVVGPLQFSAGLGAGHIPPGKRAGAGNPGPFGAGRTFYCKFFPKAIKGGASRKSRAIKIHATTFFGPRVTPTLFFWPAEEAPRPPAFWDATPLPARPFFCDRHGAADDVQRKALQKRCYFIGRRPT

SEQ ID NO: 1012359 - protein, 177 aa, Homo sapiens
AGCTGPEFMDVMAAEGGGAECTLSPDPRKFEVRMPHQLSCGSAADPEVVDGRGSRGGKSGGNRAMGAGGDSNPLAGAESAVPRASAVPASFSAPSPRPEPGAVSRSRSLAGPAGLQAAAPGLAWQRRWLSCMPGPLLATSGALFARGRHLAACEARGPAFRGKLGREGPGPTGGRPP

SEQ ID NO: 1012360 - protein, 106 aa, Homo sapiens
PAVTAPELRMMRTQQSGLTTDAAGPGASLVSIMTDTCPCSVLRMDYKGDATVFFILPNQGKMREIEEVLTPEMLMRWNNLLRKEEFFTRKLEFAIFPSSPFLAPMY

SEQ ID NO: 1012361 - protein, 69 aa, Homo sapiens
  misc_feature (8)..(8): Xaa can be any naturally occurring amino acid
GCVRSEGXMANLGCRTVPGPDEDIFLYFAYGSNLADESIHLRNPSAAGFCVARMQIQTVLANMVKPRLY

SEQ ID NO: 1012362 - protein, 141 aa, Homo sapiens
LVRSESKDGRAPGQPVGETCIILTKWIHLLLRNKGSGTGSSTLEPSSLSEPPVTGLCRPRLDGQCGAALVILQALLLPFRGLMSDQPMPPAAFVVLWCDWGRGASNGHIPSRTRDIGTIAHRMIDSGLCSILVCRACMPCL

SEQ ID NO: 1012363 - protein, 321 aa, Homo sapiens
DGRQRRRRQRQRQSPGAESKRDDRRGWASQSRLEELYTCTRAGEEKQRILARIPGSLTPDWTGVMGLSEQIPMAGVLRQPPTMGWPFGMAAFNSLDHDIATNELQNSTVLPMRDKDQAGPMGSKKSTDQHQVFRHDRGLPSRPRMNLRWVLAPRPFKKVYQETTTNGWVETLLTRQIQVCPSQAAWSHNRMSSKQHPQGWGSPEVPTGLCQEPERTPMKVKWAFNEEPRRGDQRKRSQLPNAQAILGPRKWLASKCSEAKETLEAPPGLKKVAKGKDSLGWQTRRREQPQEHPQEHAQKTKWRFQGDFRSRLQRRWRKHHV

SEQ ID NO: 1012364 - protein, 208 aa, Homo sapiens
MSPFRFTQQCVFHNAPSNLVMTILLARCVPLTRLAFTPVPLSASLRVVVLVFSHSTLSFLRPVPLLTSLLSLLDQSVPSFAPSGPSLFSSGITTSSAAPTRGLARHPPLPPIRVSRSSFQRAPFTPSLAKPLSFFFRAVPLTDVRLHRHSRRCPLLIAFLLLCVRMRLPCYLSQSFPRPPAPSDGLTSPASPFVSSAPLSSPLPTASS

SEQ ID NO: 1012365 - protein, 285 aa, Homo sapiens
  misc_feature (109)..(109): Xaa can be any naturally occurring amino acid
KCTLAIRDAAWLLDTLLDLWLLLSHTGGVMLTGQDHHRAFTKLIIQLDESVITSIALVMSPENHSLIQIWWHPDSLQENLEGREITHFDLRKKEAWRQLFLTALSSLRXPNAASGDLKQQAPRPHLKSSSPSSPLGRAALGLSLRLQVTLVQLVSLPHSNRNAFLKASAGEGLISRLWRVSWWGGTQALTFNPLSWEKTALKEVLTHHTGSGMCVGPLHKVVNSASWVYLAQKKGRQEVFTVVLSNCFPLKATFNHALDLNRPENSSREGMHPAEEGKVKGYKWG

SEQ ID NO: 1012366 - protein, 335 aa, Homo sapiens
RFGRRLFPGLANPSHPRAPRSPRPGAAGPGAARKSRFRRRARQGSPGAAGTSARSSVTLRSLHARAVTSEMLLAAARRSPPPSGPPSPCRVHETHQHPPMMEPANVSTHDRAYRISDLHDTYTTLVPNGTTHATPGWKAAINASAHLRIHIHSVHPNTPPTHYHETETTTTLTTELQLTICLRPPQLHTYTSPHKRQQTRQLGRHATQNPPHTPISALHKHPRPPTPKYAFPRATTHLTTTPNNSRQPSPDTPTIQGLIEDHPPPTHPLRTAKRRNKPTSPRTTPLKQPTQRHTSEWRRPIDNTTNQTTIYRHIQNTTSHHSSKTLADGSPLPSQ

SEQ ID NO: 1012367 - protein, 111 aa, Homo sapiens
RLVLVMGLMDRAGERCACDAWDAMSAPVLGSGPERMLESGARPGPAPSPAAFPPCRSCGPTGRAPAMEQDNSPLKDPVHGPAAGACTLIPEAAEQIRRAPAHRLPPSLLTS

SEQ ID NO: 1012368 - protein, 207 aa, Homo sapiens
MERLVPVVTFPDTIVLHQRLPASALRGRWTTMELSRELQALPGRAELPRTRTAWDYDFQRGHACCWGPWTPAVDRTWTCDSVPAFYRETVQVGRCRLAAGAGGPSRSRVACHAPDTSEPGAAEVPSNGLPRGKGGTGKHRHWPYRVDPPGIPQWVTVSDMERDQEGLVSRRWTLGYAQEVGGLVGSTACTVSQLEITENTDDYGERR

SEQ ID NO: 1012369 - protein, 147 aa, Homo sapiens
GWYGPECNGSRWQKYSMKKKRTFRKFTYRGVDLEQLLDMSYVAADTSVQLRATGRTAEPVALRTRSQTLPDCSACVKAKKDGAVPMVEAGMLVEDDSSAVTSSSYPEMVGQAWWAVYNGKTFNQVDDQARDDSSTELGEFSITYQAP

SEQ ID NO: 1012370 - protein, 301 aa, Homo sapiens
VLVRNLGILKLTPHLRGLQHLVSATMRGVTTCLRFPGQLNADLLKRAVNMVPFPRAALLHARLSAAPEPCRGSSASTGRSRWARSSPQQMFDSKNMMAACEPGHGRIPDRWVPIFLGPACSMNGGGRDRCINRARTMNQQAYFDGQWIPNEREGLVLMLRHPDPAAWNMSVTFIGEEPRLIQELFKRVSEQFTAMCRAQGLPCTVYTGLRAWHEMEFTEVESYMERAGVLRYQQYQGQPTATEQGESAAEDGEDEGLRPSQSHSGILRWKCLVVLKPWSCYLVTYGGSGLPLVTNFHWLML

SEQ ID NO: 1012371 - protein, 96 aa, Homo sapiens
MILVVAAKEVWGDEQADFVCNTLQPGCKNVCYDHYFPISHIRLWALQLIFVSTPALLVAQHVCYRRHEKRKFIKGEIKSEFKDIEEIQTKGPLEGS

SEQ ID NO: 1012372 - protein, 191 aa, Homo sapiens
  misc_feature (11)..(11): Xaa can be any naturally occurring amino acid
MARLACGQEGXRVGLLVLLSSLRDGAELVGPGLQRKQGTWPMLRHRGPAYRARGLWRELERSTVSVGCSGNRIYQANGICCRRKKALHCLSTPTPSLHLDPDVDIKDVKVVILGTGSIIMDLIKLTGSALVFKGLFRLLPSLENIYKELSTDIEDSVHPGHGDYLGGPSKVYSILNAVLTVRAHQGQLSYR

SEQ ID NO: 1012373 - protein, 214 aa, Homo sapiens
YGPEVRDAAADARLPPLPSHGLSPPQWGSQTTTLWKVIGQAPERRLDEPRVPGHGLYRLSEPAGSGISGDQQHWPRLRDRDGCIQLKVNVGDTVSDAAKSRRALTIQEIAALDRSSLHGISQVVKDHSEQAYQTWPRAEWLTSLVEGLEQSRVTHLHAHGTQPYDTPIQTISEGEQEARYGRQEWLSKWALAEAKAPSMVYTVDGRGNPLMNSY

SEQ ID NO: 1012374 - protein, 124 aa, Homo sapiens
MASLMRTLDRNQPNEAGPVLPDLTETTGSINACMFSQQKTHSKQTNKIKTKRKERAVREVNRQECKRETRDAEEQHKKADDDEHERVLLKITRTYNRSTRAQKAIEHHKDALSQKEKTISSNKA

SEQ ID NO: 1012375 - protein, 161 aa, Homo sapiens
MKKESYSVAPLCLIRTCCYTVSIVLLLGVAGPMACHEHVRHSWTAGPQECTYRQPAGLRHLPGPQPTSLGGGRRYCRHWWSWGLGLLCHLQRSVVPCCAWLTRAHGPLVWRGRVASSVGPEGNGVVSLDSWLLELVVSLTCCIYSWWGSGQRIAFTSCRCA

SEQ ID NO: 1012376 - protein, 280 aa, Homo sapiens
RGPRCVLKHYVSHSLSGVPPWWDSDSGQWRRESRASIQVKSPRPAVGHSHTRGSVRRVDSYLSFTRPIVSRVPSANAFLKPRGKWREGAGMRWRLCGVNSELSRAVGERRRGQGSRRGAQPVGPPGCLADWGGHGGEPECEADFEPHSGDYEEIKLCNKSSVVEVGNRCALPGLTPILEILGEPIRPSLHEWASNGHGVPWEQPLGRWVLLSQPVLMKVSSSEDPFGTLGPLWSQENYQPETPKPSLVTTQRFGATQTIKGPTIRCRVILVLQWEKTFGH

SEQ ID NO: 1012377 - protein, 153 aa, Homo sapiens
  misc_feature (52)..(52): Xaa can be any naturally occurring amino acid
MERAPCHVSVTRDRFLAVASGPGYVGRRHGVMLDLVHPCFARIDMWTSALTXDAMSSGRLCKGPQREEQGFHSFGAPMSSAAEKALRLNEGSLGRIKAHQGGLNTVVWALSTLHGGALAETSHNPKEYYTSIVCCTPRSSKGGACPPRMGTFA

SEQ ID NO: 1012378 - protein, 133 aa, Homo sapiens
LGPGLTRIGAAVLQGFRLLPVPPECRIEALFLVQLTSAFMGSLAGRRGGDRCLGSRRPAPSRARFAGPGALMTRVEQSARLPVVPVVLPRVACGPGQSCHCEGFMEAPACDRELETPPWSFPPKAHGQSLDLR

SEQ ID NO: 1012379 - protein, 129 aa, Homo sapiens
MRYGVTSLGASEPQEPWGFPQSWPVEKWEIGPQKGYLFVDARLKCGGKCEKGLYTLNPLFPRVNIGSRGSSAFILTSLVGRYIGRTPKRGIAHGGKKARGRLENPGKAPWTNLGETGGLSPGKRLGGKR

SEQ ID NO: 1012380 - protein, 183 aa, Homo sapiens
MLAPLHLVATMEKPLGARSAALRFVLCRAVIPCPEGGELGPLLNDSSGWTIIRHRDRVGSFYLAARSTGVYPGAGRLLVPLISTLELTRRGRGGHAGAPGREASTRGLKVWIGDVEAETMYMEPAVPGVRGAGRGGLLQRVALAARSRSQSRMSLVRADGLLSTLGAFSFSYDPEYERAGRVS

SEQ ID NO: 1012381 - protein, 204 aa, Homo sapiens
FLPVGLIEIPTAALSASFSDIPLGVSLYTPSHICLPRMTYETMFVCPSSQMAMLKHPSGPQPRDCAGSQEPHGLSVPRGSVKIANKGIAPTGQLNMDSCKISPSIKRGGHAGGATSPSLGSEESQGRAKHDKAETSDLGNACQSLVPAGLVRERLFCSLCNCVAERLPRSCLDVSPGQLPGGGDGGRVEAAPHFIPKVLHLCDG

SEQ ID NO: 1012382 - protein, 85 aa, Homo sapiens
MGQQYNTTAKTKTLTETASKTTSQYRQRLKTRVAHTTSPQRYRQETNNSRLNKIQHLTKDHKYSANKHTAHHKYTYRYSSNATRT

SEQ ID NO: 1012383 - protein, 284 aa, Homo sapiens
VLAQHLRPLSPASRNHNAARVDLQQQIMTIIDELGKASAKAQNLSAPITSCITGMPGVTPSMLVLYSSTDTFSPDRLVKGAIIGFHSYTLRYNASSLYWYYRESLIMTVEPLLDPGALVHPMTSAANAMGHGRELFQVLVLQDTERVEAVPTGQLTWPSQKLLKFLNKSLQSVRPRVPQVKQAFVIFARLLLPINIGPLSPSLRATRHSRAAAVDPTPAAPSKVSCPPKRRRGQHIKPYSSSDREWGLPQVLVAQSCWYSRHGVGVIPHPPIQATKTPSREKQE

SEQ ID NO: 1012384 - protein, 202 aa, Homo sapiens
MSVGTNRIQKSMLLDLNKEIMNELGVTVAGDIIDHSQACQIDGAPSGHVAKLPLSQYPAALAPLTRRKILPWSPVLPPEMIIQQRCNHDSPPQSDPPGARTLRHSPRSRSLCPTRWQQRVPRPLQAPGPPASDVSSSGCSCQGGVRVLLLSMRGGTSRLRHALRSRHPVTRRDPASMQRAAKGLHEDVCVLTARAEDQGRLH

SEQ ID NO: 1012385 - protein, 73 aa, Homo sapiens
TGYRRNHAFAYPPGQQCIPGLYAGVLRALGHSEKWSCSYGLASSPQCSLSGKYQPQAGVFTNLSQIYYFHDEN

SEQ ID NO: 1012386 - protein, 267 aa, Homo sapiens
ARSSDCSSSSSSGGGSSSSSGGSSSSSGGTGGSSSITSNNNKKKSSSNPHLSFQCIQIHIFTQARRGKEERGAGKKKKTPTTLSGNFSEECSKTQQGASGWLGDQVASGKPNEGGTQEWTLVSPKEIPECGGLQNIQVERGTSGLQRVLYRVRMGGLWQCLGKLHLVTQMGMYDIWYILLVQTLLNLEPQGKAYQSKESLKGIAKGVTSRVFLAIRRCSNFQRMMAEVQEECIPASLNGEDIAKTETCESQSLRVVKMPNTIYPKEY

SEQ ID NO: 1012387 - protein, 304 aa, Homo sapiens
AGSVVRSCAGLPSLASGSAGCRRPPLRVHFGFKVGSQQVPAGTGHPKGTSVEEIHGGVHCGTSDDTRNPRIYLDGPARVEVWCNANSLTGTGWLRARASRDLGLLALAWVETRGETPVCSAAVGTRVSRCLTRAQAIANRASISWNPPGEKPGEAGGLSDHTPGCMKSRTGEFSLDVASMLTDKRAVAVGLAELGCLGRVPGPGVAGPIRQRCSTLTWARMASLRQQVACIKCLERIGWTGLEPLGTPVENCAAVSMPTGDLVGHPGPAAESELGYRGLGVTAARRPLWTRIRQPLCARTYLMG

SEQ ID NO: 1012388 - protein, 69 aa, Homo sapiens
WHRGGGEMAFSGSQCSLPEFQSVSSLLVIIQGGHPGRTFMISVIDIGDRYSDSRWKPSALRVNFSGPGY

SEQ ID NO: 1012389 - protein, 134 aa, Homo sapiens
LSRVPASSSRGRLHGGALTERGGRSIPETEWQCWPLCAGLFPRFASSYPSAPVVAMLRGRRRLGAGAARARSVVSRRLLPGPGPSVPLVLGCHEAACCGFWSYLAAGGARDGADAGAFALAPEAVAAVHLGVQF

SEQ ID NO: 1012390 - protein, 285 aa, Homo sapiens
DTGMEEVKPAASGFSLQLGLDLRSCASGRWDVWRRFSFNVLGRSLSEQGLRFADRDECWFPSTRDVAWVRSPSQASDTARMECRVGVSNRSGSKWALSRGKREHADVHAAELHTGSLTVKAGPASEACIRRQDMRGASRSPEDSSPDAARIRVKRYQAEHEHTSRACGSLAWRFGTLHGCMKRGRPDLPGSQMRTQGQRAARRSKISPQGLRSPGPALPARGRPGRTSGVVLRAHSRRGLRAPPKWRVCARERQRVQGAHGDRELVGASIPGGAFPGPEGLPSGV

SEQ ID NO: 1012391 - protein, 263 aa, Homo sapiens
ADNDHKMLDASAGNAIYIWPNQHCPLCMSLRLLCSTLMMFAVSKDGMEKLLTMMPTEEERQKIEEAQWPDPDIPLGPVENFLMTLASIGGLVVVYYSGPSSWTMTAWKREIADGHVSDLESGYGTAGTECHLPLIPGYPPSGWANFLKWLPEQSGFELSYLEKVSEVRGHRVRLTVTWYTHSSCIPSVVQDLGLRSAEPSNSGKSRCTVTRLSQGMDLLETAWTEEPWGMRWKRPRNPGGNARKGNRSRLEGKPLGAQNGHWK

SEQ ID NO: 1012392 - protein, 35 aa, Homo sapiens
KQVRLGQAYVVVQCETQAGQAQVLYQRMKLHRVTR

SEQ ID NO: 1012393 - protein, 346 aa, Homo sapiens
MGGPVPRHMTLLASQVFRYPQLLVAPHLAPPHLPQGAEAEGEGAYLLLNLMWGGHGWVDGGCPVGQAWGGAHQEPKGPSWKARDSRALGHTAGMEDGRVCASGHCGSDSNLDCRFCGAIPASVRSSVRQEPSSQALPSCKWVPMRCYVACHGAALLQLGCPLLSLSAACPCAEGLLLAAAARVCPRHRSLPSLPLGTTQRRRAWQASRAAPRCTPPPQLLHRYCATAQVLRTVPMLGARLSDQADAQPPGTAPLLPGRSLRACSSSRTQHPLPLLGSGPSTLTPDAPERPTPPCSLRRRRPPLHSTHALDSPPCSPPSARTPCPPPAPPRRLPPQPPPTPAPLPPS

SEQ ID NO: 1012394 - protein, 152 aa, Homo sapiens
FLLRRTTSDIVRVGDVQRGGGYRGRRRGGAVLPGELHCILISNPNEDAWKGSRLGDSSACFCEESRSVNELVCPALTLPECQPGGDFGLIDVVTPRGAYERGWRLWKGPSDGVPVVAAWRLAWRRGCACESEDGAASRGGARWSARAMAGPI

SEQ ID NO: 1012395 - protein, 213 aa, Homo sapiens
LGLRDGQRMGEGAVKQGFLYLQQQQTFGKKWRRFGASLYGGSDCALARLELQEGPEKPRLCEAARKVIRLSDCLRVAEAWRRGQQPPGHQCLLPGDHGAPVPPGVPCSGSAATGCRPSASVAFPGAEERTLSGPEGPRMSLALSWKEELDLYSERKFTSTGPLQGNFAVHHETYRSRVERCHLRVVLYPPGWGECPVSCAGGPEPGTQLYDWP

SEQ ID NO: 1012396 - protein, 299 aa, Homo sapiens
QLAQGQGDHMLIEWLMAAIRTVWNDAAEIIEIVSKWQSYTDLVQVLQEMGMWQAMFDLNTQGLNDEHFTSHMRDLVLGSAPLSAFGSLAAVPLRMWGATYMKVTTAMAALREAEGLWQDWGTHAIKKGKVSPLQVTTPGDQQGPQRVTLCSMWIDLIAAGVAWEKTDRQPNGMPLALWRQLSAEQQFQNMSERGQNTLDQPSPSQMLYSRTVCSTAKETRPSFDRELAKVPSRGHVWNWQSIGLPPMYMWVLALVDTGCQTAGFVLWKSRGKFPRPSLLHCMVLGGQLVTLTPVSLHLR

SEQ ID NO: 1012397 - protein, 258 aa, Homo sapiens
MCCDDCRVQAVCGGPVMALVALEMWEPVDGFRGVFLAVCILGPGAEASGARRSARPRISEWIALLTTVGACLVKDMKIKSLDGDLSLLPAHSRNQRSFDFFLVGLSQGGGSKIMPVQKQTLCRPAAPGSKAYVAMGDYKCATSGLGVKVLQWRWPPPYLCGPFILCQGSPSSPVLQKAYLGVTNDREMAQMWSPFARLTWPARGRVAGNASSLATQGALGIVIRQPVALKKLDSMMGWESIDCYTSRPGAATDQPFVV

SEQ ID NO: 1012398 - protein, 336 aa, Homo sapiens
MGRGSGTFERLLGFSRRLQGDTFLAKGTSKQTELSQPHRQGDQPAPVGDRLGVHFARSATCIPPKGTHKAKYAVNSINATNSQRQEPTRSPCMALRRSLATPAALQRNLCATHTLHCMQRWPTKHHHWAGTPATDPCHRRSTTLARYNRSANTRSVLALIQRLAPPCLSGNEQQSYQRLAPATRYHTPLANGWSAVYALTQQLQQQQPHCTCVCCASRSPQTTGLAPLQRNCHRMPGQPPPRGLTAPAKHQLPGTLWARTTSLLGTGRSSPKRNHHKQLPKLRPLKATGPAAALLADPPCTTTPACDTAKPRPHTHPTYHQPRSFVLSFLPFPSAS

SEQ ID NO: 1012399 - protein, 139 aa, Homo sapiens
MIVPLHSSLGNRARPCLNNKTLTTQKRKTRKTTPTTHYLLSYHTHTATRQYHPHHPSLLASMLLSRSYASTLLLLPGSRTEQPPDPAKACYSLGTSPSIGTHRVDPEININRQHHRSPAQRMQRMSAPPTAPLGPHQAH

SEQ ID NO: 1012400 - protein, 367 aa, Homo sapiens
GGAVLGGPADRAAAVERSYRRVSMKATSHGCGEHLTSCPRTSCCELFTALFPARQACLLELPLLVLQAYWRGPSVDPSVDLSGIRKVPCRDEALLIYVEVTLWDACSHVGLTVGKNLIVLLLYVDALATKGKHFALRLTLPGRLPLHTEGESVYHVSFGHAHCGIGRTIWEGARNCKVGGQGAWREAGQFPSGTPPRKRKPPCEAGKQAGNKVSCAAAKKLAEPPKGGYTGAQEAPKGPAQGHLGPGVGFSRKQELNRRKRTRVWVSAPGFNPKKVGLPPHWGVRGVYAVGTRDPEHSRDTAPSRFPPMEGAHCGNPGHLCSRPERGTTPQGAENRPAPVRARREKSGRKGVHPQRGVPNEDEIKGK

SEQ ID NO: 1012401 - protein, 200 aa, Homo sapiens
DAGLHSAMGLPHRAALAADSRVTDRYFRIHEVLKHARHFRGRNNRVLQVGGSCNRGFDAFVKLHPKSPYTAVMKNETLRTRKRWTRDPAGQRTRVSLRFCACDPASVLAALGTLSPVPFIPCFEYSDDIMSPRQARLWDILLSRGAGAPANNNGQQKFDLTSYRLLRLSDYYSFSFTKEYNFLLIKKQHPTKKKKKHNTA

SEQ ID NO: 1012402 - protein, 93 aa, Homo sapiens
MAQHLGINKQSDTSETTLGVAPGDRVGKGKDQQHQAHCYTERRPKGTSLAERRKGRLPQGGEGPTQTGHIRTNTGYRSTQYTGNPFAQQACKR

SEQ ID NO: 1012403 - protein, 246 aa, Homo sapiens
MRLTGAKENVADKFPLSVPAERWIVAWDVDGHPSGLVDAYAVSRHDEADRQPWIGSVRLTMPGTNAVLGSQPGWKVCTDDPPRLTRPAQLTDLLTPDLITCAAMEKMSRVTTVLGGSVLTGRTMHCHLDAPANAISVCQLTHAQVVVAGRSIFKIYAIEEEQFVDKLNLRVGRKPSLNLSCADVVWHQMDENLLGTGSPQWRGGHVEPGRPSRNMQDQLFTEHERTVNTGLVSTQRSPRAGTVGPG

SEQ ID NO: 1012404 - protein, 169 aa, Homo sapiens
PLTPAERREGRENRSRRKERTSVGMATNWGSLLQDKQQLEELARAGLWTWALAERSTELEDLDDGAHFLGGGDAMPLVQRSFPSLVPIALVYAEAYAVLMDFNLLVDAVRPRTLPSWRQTLLPSPVKQDDFTARLFDIHKQVLKRGHCPGNHSQSLLRSVTCPSQSLSR

SEQ ID NO: 1012405 - protein, 224 aa, Homo sapiens
MAVGVSHKRPKGWMKKHILVRTAWWTLSIEFVYASIRWDDARGPVISTCETGKLCYVPDKRVGLTRRRPAHRLQRCMERGPLLLSIAYVLKGPTEAPWGTLEATYHGGTHNAFFREAPRSNEHFGTYYMPPSAERSCDGPPVGRCWGRHRGMGHVRGVQAVTAHRGTRSLLITRVKRAMARQGGGNRGESPPGVAHDTEAPEPFPTKAPMVRPTPPKITQGQRN

SEQ ID NO: 1012406 - protein, 78 aa, Homo sapiens
MIPSFNRRLTVHDRFQLVGTRSYATHRPLVIGSACPFLAYLSGLACAQLECNIPRWCSWQDYNGSNLQFLVLLNALDH

SEQ ID NO: 1012407 - protein, 313 aa, Homo sapiens
MLPSGADPSTWCAACTCRGRPVGRPSTVPSSPMMPSPSSIGPFLPALMKLKGPLSECPAALVLVSSRSQLRPASSVSHASGSSNWRYQSARASSGERLDRIGDSSIVQMFKTSFFDHLVSLCRIVPAFSGLASRLVGRGAWRLRARDEGEYAVTTHGVHVQFLICQGHPLLSCSGKWGTFGLPAPHRLFLSSPGLEAPGSFDFTSSYPRTAEEGRWESLPARLLVGRWDPLVVLRVTLVRGGQDSFYNPNKKFLCQRSGQLDFTNACTFAGKRQSSLCSSQREYIPHGGTQATEGVIQHLAPDRLGIEEKLNG

SEQ ID NO: 1012408 - protein, 291 aa, Homo sapiens
QTAAALTFPCAQLFGAAHSSGCEKWTRALRHGLKKRSKTCREGFVIILLPCKPKPPACGPSLDYEESSCMSRPALVDLGQACGAGCGIRSVFEPSGAHLLGALEVTCPLGTGLALPEWNLTVCEPRLQVASPPRGSSYSVGVRAASVGKLQREPQRSEERCAPTRDSLLPLTRIPVLMKSQTTLHKGHPGPNRDRSADVRPRYAPIASGAPEQRRRLAGGEGKDDRRAMRDRTPKGPNLRRLHRPMQPRPTDFHGTEQQDRQTGKPERPKSYEEAAMEVTSGPTVTQDEEG

SEQ ID NO: 1012409 - protein, 265 aa, Homo sapiens
AGTGWRFDEFQELQSGPPGGFRAVVVYLADVWTIMPTLERVGEVPVTRRKLQVVQVPPNRMRQKGTRMPVREQDTLSAIGARSQTVRRRNAETPEVSIQSGNGRLSLLSESPTSSLCPYEHVRVTFGYQLQWPGCKSRWYPSDWGFVGETRACQRGEEGIVLVELLSGGYGPECLDIALGAFGVRGGGDFMGELVITRLEVHGSWLNLRKVRVFLFGHERVRGGFRRQCWERAFGEMVAGEVAVDHRVKGKMPKPNGEVERKASD

SEQ ID NO: 1012410 - protein, 62 aa, Homo sapiens
MAIITTSQCTDLILPLTRSACGNLIQKHATCDPGLPRSKPAANHPRETGPQPSTSNSGVTGW

SEQ ID NO: 1012411 - protein, 171 aa, Homo sapiens
  misc_feature (44)..(44): Xaa can be any naturally occurring amino acid
ITSLWLPWADYIIMNYSVNIPNNHLERLVPELCPSRGLLIRAQXQELVITYWPGGPKVLTKWVVINLLSSWSQGMKKMYKRGSSTPSGNRSTAHFKPVVGPEQRPLLSLALSELSVQQRTSLENIRRERGGRKQRGTDGGAGREAATDEQLGSPERRPFRERRKDRGNPGA

SEQ ID NO: 1012412 - protein, 185 aa, Homo sapiens
AGEWRGRNAAIYEDWPISRGSPTSMMEAISAVPSWSKVNQVLIRMYKAECREKLRCDPAHSSYGSHACHIASLYHVGLRRGQARRADPRPQLPVPAFARPERWGTTVSAARGTSRIGMSRAATRGRRARSTDVASQGRSETRLGQIGAGTKTERNTGEQKRYGSPCRQGSADAVITREPQERKQA

SEQ ID NO: 1012413 - protein, 48 aa, Homo sapiens
MGGKGVFAHVPDYGAPTPYDRYGHTSRKHRGVSRHGPGENIGRTTSLA

SEQ ID NO: 1012414 - protein, 81 aa, Homo sapiens
GRLGAQLVGRRGLQEHQRGRTRDHGVRGLVAWWAPVGRRLGYEGCGSVHLAGTRPKCGVRHEMNDVCCESTEGRFAHGGLS

SEQ ID NO: 1012415 - protein, 270 aa, Homo sapiens
MVARSSDLPYLIVGVVLGSIFLIIVTFIPLLSCEQRPVSNCNKHTTEPGFSSKMPFHPSMLLYTIGVHLARISPGPTHSHVVQPYLSGISGRACANGIHMNSGLPLGLQWATRGMKPQQHCPGELQQQSDTSSLLRQTHLGNGYDPQSHQITRGPKSSPDEGSYLYTRAPTIVHITSCCSPITHAANAQEQPAAVGQSGVRRAPTVLSGSSVGPSISLRAPMLIWALCQLKEGGQVLTPAKLSWTETGCPQHPDRGPYVGPGNLECQLYT

SEQ ID NO: 1012416 - protein, 161 aa, Homo sapiens
METTHLGKNGTSLTFYNVRNLFTPWLPGRFKGPSPPMGKESRWLLESFALEGKNRCVINLRNGQGGSDEEETTGFPPPYRLLGDGPTSEQAKEVPTSQTKFEPKENHTKGKRPKGNLVADKQKGPQRETKSRATENAPNSREPVTKATGRETWDSPWGYTT

SEQ ID NO: 1012417 - protein, 291 aa, Homo sapiens
MTSYYSPEPGHFLTCFFLFHASLLDRLQVARTDLALSWADCQCCNALLLPAGFSTYDTRVSTLSTHLFSLTLCLTDSDTVTLADRSTRVLCPCGPRDRHFRVSSLSIIIFGPWPSVAFHARLIAFPRSNANFTHPHLPAFTFLTESLPTSCTRCPTASENRTPSLAPAYSPLPAPDSLCLPSRPPPRHSCLTNDHIMDTAHSTSLSRTTSRSTHDSLLHPSSSSNPTFTNLDLTIPLILRVYSHGPPVCHTPIHLVQRRSHDTLGPLGLCATCDETRTPPYPRPAALNPRA

SEQ ID NO: 1012418 - protein, 290 aa, Homo sapiens
  misc_feature (217)..(217): Xaa can be any naturally occurring amino acid
AQPPASRPPASRLPPDCDVRPRLAAASGLQFEGDLVAVRMAEARRTFSQSLQVACTRPQTHTVVNNSYRSAQHSPWLCSVGHVWHLTGSAGNHSFAVIAAGWLDGAYYIQRSSSRIRMLVCGVHAESHFHERTSAAVGSDLESQRSRQLRNDGPCSPIGDADSYRMLMMPKNLVTIVQVYYASGAWQLKVLSKVTGDTGGCLPASDPEKLSISAVIXLMSWVDEENILDVYRLAELFDLSRLTEQLDTYILKNFVAFSRTDKYRQLPFGEGSTPSFSSNRLEVSCETEGI

SEQ ID NO: 1012419 - protein, 254 aa, Homo sapiens
MTAPPFVDNRAAPCRSLNYNDDGGALNNTPDADTTSVTATPVDNTRHHRAGGPHNRGTHPQSKKIDEPPEGGNNKNFHERGIRGVDTTTGSTIESAASPDKQLAAHPARICRARDKTLYYPEAGPMYKKRTRQHTQHTTHKTRTDTRHTRHHGRRVREQGKTAERSSTRPRAPAVTTGEQRQEEQQQTGRPGQHRRDAKVGGRKAPPEERDLCRAGWGPVDTTRHSGPRRDSRRAARPRTRQRARGTQEQRQKQ

SEQ ID NO: 1012420 - protein, 106 aa, Homo sapiens
GVDEPPVFYQWWLVYSSNLPERECICPRWCAKRSATPPCWMPVISSRLASSCAKKLHVAPGLRVLVYELLGRGLSMVCGGQWKALLGQAPELMVLSWLVLQGSSVV

SEQ ID NO: 1012421 - protein, 214 aa, Homo sapiens
MYAVPLLYVLRTSPTTYIAARPPYSLQCVQPAGSHTPHPHLITPTKHSLTSRTHTARHKSTTTPIHTYNPRPHQHSTLTHTHLTINTSPSTHQRPEKPTNNTTRAQPSTPSAQTKATAQDTTAEIPEDDIISIITHKQHHNNLPYQLDAPLTTKTTATRRNHQPTPANYQPPKKQNSHKHNTDPLHKYYSQYQLLIATLANSPNAPNSRHSKPD

SEQ ID NO: 1012422 - protein, 104 aa, Homo sapiens
MPSPAALALILVKLTLCYYTSRAYSISVVRLLTVLFHSDPVIGVEVDVFPRISAVCPAKAHPHFLGARYRSWGHIVCVHRVCISGRACLLCGCQDREGAVREQM

SEQ ID NO: 1012423 - protein, 208 aa, Homo sapiens
MAPARLFALLLLFYGGVAESIRWRLMVIDPHGPPRRPILLRSPYLDEGGCKCGPGQESDDFELSGSGDLDDLEDSMIGPEVVHPLVPLDNHIPERAGVWEPKSPPKPKKLEENEVIPKRISPLNESEDVSNNGVNVHALCRAARSVSRTEVLAASESLGGNRRAILFAVFLNLAGHVPYEERRMKAAMDLGNETHATQKWPQQLSSYA

SEQ ID NO: 1012424 - protein, 170 aa, Homo sapiens
MVSSGATQLLFMSIFSPRDCGHLADVIRSSLGGWRTSLTVPKLRIGFYNFCLLAMSDSQSPYSVTSFPDAGSPGGASGWPGGLDQAGCVRVPGPHASLPRQPLLLAHLQACDEQSVAVLAVVASWLCPLCVLAGGLGLFLSYVWKWVTLSLPGPGLLALGSAQAYSSSCL

SEQ ID NO: 1012425 - protein, 236 aa, Homo sapiens
AGGGCFGGGWWPCGRGGRGRREEEVEKAWARRRLTVGLPAGPSPDKREGSAVDPGKRRSLAATPSSSLPCTLIVSRASDARRRNVNSDADGTICLKAFQDEMGFSSAMVTMMAQKQEERVAAASKLTLSPLMLYGLRNYWPTYYYEHTSDRKELFEQLKIKKPSAMTALRMVETGEILQCKRRVHQIPDSGALAQSEETPAACMQQHVQLLTTNPPFLPSCKPNLNPEASMHQDMS

SEQ ID NO: 1012426 - protein, 85 aa, Homo sapiens
NPLRGPLNLERINSWRFSGGCALPYSDRSLRSILICSVGENCRPKPGVPIQELGSSNSLACLAPYDRSLSPTHRSLFHVLQGIVE

SEQ ID NO: 1012427 - protein, 119 aa, Homo sapiens
  misc_feature (19)..(19): Xaa can be any naturally occurring amino acid
MLSHGPRDNWQQSGNLYLXSCGILVETGKITRELNTLTTAKKETLGGAWQGVPQTKLVCAPSVWGGVPSQNFLIQVLLHPQGEIIACWHTHNVVGGAAQLKCEKTSGDLEEYIRTGRRL

SEQ ID NO: 1012428 - protein, 112 aa, Homo sapiens
PCYLLASSPSHITLITRLEMAAAASVCGGTRTPAVIALIVFLLVVNDPVSCKVGWRRYLPGGDRLWKAEDEGRRTVIGITGDDECIDETIEYEPSNVNTYEVKNFRKEKNYA

SEQ ID NO: 1012429 - protein, 290 aa, Homo sapiens
CERGGEQRTAAVAKGQPPPALISTGSPVRTGECRDPVLAWRHVECGGPGAAVDEAHAGSRSHQCPPAVHDGAMNIAGLALCPADSPVPPACLAWIGLSLAPLWGNCSSLWLFLHRPRVCAVWMVGVACVLSVPPVSGCAPLPVALRGPRWACVLASKPVPAWVVDLATLGMKTFGARVPRPSYPGQHRGTVEPLQKDERAIQGDPGRDTVQRHLTGTLEISWTALSKEPWLRKIRGWCGLSTGACPASTTLEAFLTTGLTRVAHRQAFEVPVQDCGDPLAAGTKPIREAF

SEQ ID NO: 1012430 - protein, 144 aa, Homo sapiens
VFSKAELWGLSVPDCRGLVRVTQEWGSTEEVALVCCLLASSSRVSCTGGLDVGIKRRNVIRADQGARGGPLHESGFAISLVPSEGGRVLTRVVPFHRCQTILRIDLYEKLVLQGGKSTLACSKTGGCECSLFTRGCWHTFQNTH

SEQ ID NO: 1012431 - protein, 67 aa, Homo sapiens
PGQEGRPGSRKETPEAFYGNDTKTKDVLRCSAGLVQEASASQEHQTDDLSVLAAGSREHESAKALSL

SEQ ID NO: 1012432 - protein, 166 aa, Homo sapiens
MTAGSQMLYQAGVFASRSSLRCCRIRFTWALVLLQVPSTWCSCWHDVWFGFLPSILPRLPDHSVLRGSWEALAYLLIPLPQLLSLDDHVMSPGVCSVRATCISDLSGDLPVCAPGFASAMSSSWPALRDSSRILMTQVDIHLWAERTGRDTQGPLLETLLDLCSRP

SEQ ID NO: 1012433 - protein, 210 aa, Homo sapiens
MDRKHIQQDQTDSKGDAKDPARLAQATPKHVNEPDMPHRLAMMTPNSSHVRLRPLSQWRHGPDGYIHARKRANKQQHPRHGRIETGITTTREEETRRGDSTAQDGPQHEETTPRPQGAGHYTRRQLRRQSVAVNHAPHIHEKRDASNTHKMRHKDSPTPNKQYDGRSTLEHNTLRNHPQKRTPHNPTPGPTSSTPDTEEHRHYTEAEHKT

SEQ ID NO: 1012434 - protein, 342 aa, Homo sapiens
MGKPGVEAAPGSELARFPEPMEHADHHSAPGLGPPSRTGERMIVLRAKALACLELLVAPRSVGQSSLEAEVATEIYALNNGGSSVQISTELVRTFTITRHHAPYMSSTAGLIIVRMLQARADLFCACELSRGYVVAGAAMADVRPCPGCADPQVRRLEPLVQFPSVRLPMSSYTEVPSVPGRRLMTYEMSTVSAQDTMIPENEQHRAGELAVSVAMPPETQGSRAATRDPKSLGISSSQPCVPRKLPGEVKWALEHQEARQQALGDACGNLGRQLQLQPERSPGQPGIDCPHRLSVLCRCQGTGPPGLRLQCPGAAAAQATGTLTPFLTPAPCAGRPWRRPR

SEQ ID NO: 1012435 - protein, 99 aa, Homo sapiens
EMDEGGCSVGRGLPPPWQPQAPGPVDGTASAEGREPSPQCGGSLSEESWAKNVTLPGDTGGDEQCSTLGSLLGALPWLTRGAHSASVLWALGLPALQCE

SEQ ID NO: 1012436 - protein, 146 aa, Homo sapiens
MLEHASSHFTTKETPTSLKRTTTRSAIATNPCAPQKITLKLDTVQHALSYGMHSVSRRCPYLPGRPAGVLSSSSLSCIRCALRQSCARSMRAFVPRPALKRRFDRRANGRSPGAAVSPGLSSFGRRSWFVGHVHPLSWTHWRAEQL

SEQ ID NO: 1012437 - protein, 251 aa, Homo sapiens
LCDASLSSLRLSGSTVAMLPPGCEDVRSFVGVCARSLAMVPVPLRKPGSPWAVAAVLLPHVPVPAGSGNGGGNGRFRTDAVCAIGQAPDEVLWKCRELGYVPRLVPGSVPSSEGSPAAGSSERIRLLGLGGRDGAPVGICSPGPCGLGPRLISARGPRSRLLIRSELVRLAQEPSGVIDWNQRSWTPFPVRGGPGCDLDHPRVLPEVLLSGFNAQQTAVALGIETRRNVGPTDFQRAAFRGYNRTIKPTGE

SEQ ID NO: 1012438 - protein, 107 aa, Homo sapiens
MVARGPQVALRRHCRQRRNPNLVLVEISGAQFNRHKAMARLNVRSEGKLLIPFHVLALCLLSHMSLLVVTMGSEEYTSPQTIWQKYSRLLPQSHMSALLLEHEDNVT

SEQ ID NO: 1012439 - protein, 108 aa, Homo sapiens
MPPLPSASRIDNSWGNIGNKVTKEEYNTRKNTKRKTDNRKRTINVDRKIAQSNINTQKKRQTESIATTPNRHSHTNDHKAENHTKRNKRIALHTESRANTHEKTNKPP

SEQ ID NO: 1012440 - protein, 170 aa, Homo sapiens
MCGREACINTNKVYARTSGRHTHRGFKPPCGGQYLQGVDQRGNPLKHSSSARSVLPHHNIWGQQHLKQLNRSTNIFKQGPLHQRGGHQIHSKKRLVPHEVVSSNDQGRLETTIQPCAPIRSTMYPQALLEHTVLRGPLNTGETNFAPSLHTQNPYSDIYTHQVIIKREIG

SEQ ID NO: 1012441 - protein, 191 aa, Homo sapiens
MAASGVRHSYFYRNSHLRGSPFSVACIMNEAKRRVRELYLRLAIWEVPDITVHQFPAGTSLCKMGRDKVREMFDEDMPMSTDPKGGLIFWSFKGNSIELASRTIKVWKQLDTCYAVLRIETERANGQTDFLSKFYVGHDAMKSFRGKMHVDTIFRATNNLHLCKWVKSDEEDKERTQKSKNINSERQNSQK

SEQ ID NO: 1012442 - protein, 103 aa, Homo sapiens
QPSCKAISMGSPLQVRVHVLAGHRGERRPRGDVREKQLRPVEEKLDPSPAGETSFHVEDGMGPRTVAMSPHHRAVCGGPYPSIITLIGRTVDPDHVTLSITCM

SEQ ID NO: 1012443 - protein, 209 aa, Homo sapiens
SVVHAAGPAADPGPAPGIPALDDLFPPPIFPAEPAQASGPYVEIIEQPKQRGYALSAYKMRGALRGQHSQAMRSTDIHQRPIPTIKINGYTGPGTVRISLGHQRDPFLHRALTPHKLVAKGSCAGDGFYEAELCPDRCIHSIPEPGNPVCDRSGTWRQAISQTQSRPTTNALPKFPIEEQRGDYDLNAVRSDFQVTVRDPSGRPSDLPR

SEQ ID NO: 1012444 - protein, 120 aa, Homo sapiens
AFFQLEALDTTPTRDVTMNVAALQPPVVQLHDQQPLPAAGAPPSPTARPGRADDYPWPSPYSTARSPRDRRARTPRAEERRTVHLVERARNLKSPNQAQKAPETSHPGGTTMGRAKKGNQ

SEQ ID NO: 1012445 - protein, 341 aa, Homo sapiens
IAAQDHRGRTTGRAVRVVLRTVDLPWPASRRLVFTDGDDPELELLGRGPAGHQATNMLLADAATRSGPVVLAKDVRMEVLTTVHFESGAAMWFLRYVDDGRELNDECAQCSPSVSDRASSRDFFKRPVLREVLPCVAGLEPCGNQSPFDWPGEEWSSGWADGCDPRSRKLLGLCLTWWEARGSSHPRQQGRCRVSASELPWCLGLGVDGFNEARGCSESCRTCREVTACRLGVHRWHRASWVAPTWRATGPLLANLQPWRRLSEGVPNAKTTCFQAGLAFVGHWQGPVEDLDIPWLNGGLEGFQAVRSTNAKNRFKGRYPMVFVVPQTPELGSQGRQQGAP

SEQ ID NO: 1012446 - protein, 124 aa, Homo sapiens
MRCRITRCDEHTQTQASFYFTSRKPLIQAGAVELRAGLTYDAWPCRTCTMTSSERWRSWHSPLLSFIDIMKDTTWHMSLPSIVFHSVYRVATNRILTITCCLVTSSRGVAKVEVVTKGRVWGYM

SEQ ID NO: 1012447 - protein, 254 aa, Homo sapiens
MMPAGYGGSWHYGDVVKAVHRPCGVFAAQCHSITEIDPINALQVVPWRAYEVTTMDEACLSEGDIFVNTTGCIDDLILGLDFEQMTDDAIVCNIGHFDVARSSVAVANENAVEKVNITPQVDRYRWEEWAAAIILLAEGRLVKLGCAMGHPRFVMSNSFSQPGDGARIEAVDSIQTRKSRMGLQFSVPKTAWMRQCAEAHLGNPEVLTFEQVYLRSKASYLGMSCEWPPSSRITTATERQVCVFNASRWCLVQA

SEQ ID NO: 1012448 - protein, 311 aa, Homo sapiens
EKWSILEEPGLVSHQPGPEAPALPKTCGQLKKEAKKREKRREIPSRSRRSKEQQPPPGEKKTKTREEGETGIRGGQLPYDTHRTPSRGETNRCQVVRMLDVATDLGMSEARCVPLGWDACRDFFNARDMGVLNVSAGKCPEVVFTECAVPPTNVEQGSLKLGHASVYQWPVRGTPRDSDGDRMRGETYLWGTRGCDHCKVLPTLGGGGEEAMAVSRVLEPAPAGSARPFYRNVCNRGRWQKGDRIYHQLKNAWQRPWIGIGACVTRGTLNSQQLCREAFVRLQEEGIIYREYPLVNCGPGTLNPAIFDIEV

SEQ ID NO: 1012449 - protein, 178 aa, Homo sapiens
HCQHLFCVDEWTAYPYKVKMSAQESCLSLIKYFLFVFNLFIFVLGSLIFCFGIWILIDKTRLRCPYVGLAIRAICRYWSKDPWHISGIFTHGHRPPGIDVEGPQGAHDEHPGPVLSEMLLLLYATQITLGILISTQTGPAGAKLAGRTVEKTHPKVRNTTPAGDRGTEESRDNVQIPD

SEQ ID NO: 1012450 - protein, 254 aa, Homo sapiens
GLRWRRAEAIYGNMKKFIRYLISSNVGEVVVHLPHGNSGPARSPESLLQLLWVNLVDYGRTCHGSGASYPVQTWYIMAEAAPESPDQALISGSGSSSDTCAIGVYVCLATVDCRQPGGLCMTAEGPQINFYQLRNFLKCSEDKPASLPASTVRCSESRFPTMHGLVRARDLLSTGPALYSVSENHSLLRMPPWYEALVCVVAVAMSMALHFLILLVPPLPLIFQVTPLSGRQWVVVLQISLPVILLDEALKYLV

SEQ ID NO: 1012451 - protein, 112 aa, Homo sapiens
MTGKRSLYISSHSMVVAIIMARQSKAGFPGTMGGNDSAMGPREPSKKNRENWTYEGFCALCELKIFTQGLVRSWTRMVLGSWGLAGARAGDAQDPAHWGHWRLGDPGSSKAC

SEQ ID NO: 1012452 - protein, 172 aa, Homo sapiens
MDSLQSSAGGASYLGASGCKGAKDFNVALSISRLTPGGKAAQAGHGLLGDWVLSIRRRECGETSHTSEAQNKIRACGGAPQDVGDPAGSHSDVCQMTNTLHQTEYGGMGRGTVHGPDGTECMRQQKQEPEHVQQNHADTNNCKTPPKTTEHQNKNRKNTGEQQNGGKRNQTE

SEQ ID NO: 1012453 - protein, 227 aa, Homo sapiens
DSLCCHFTFLREDQRPSASVTATLEDRSQQPYSGDEWRAIPEGPYIGHYGCKVVSDTTNLCLLHLTGIEALVLVGKTVLRVESALHGELAIFESMHRCSESIVSGPHDQVTQERCHVLQTTGPPVVDREGKSWWLTLPSYLLSSQGPITSMSLLASISVGGSCLHCFSSPWRPPLVLLSGRIQSVALLSTVSVYIMGVAYQRTVNRGPLGSGSHVVPCGSFSLSLLS

SEQ ID NO: 1012454 - protein, 366 aa, Homo sapiens
PEATNIGKGGVGRGMARENRAGERMGTGQDERIGLGERRSLLGEGARGASVCECAVLCIRCGCTDARLRSAYLRDVMPSCVVVMSWMSAVSRSARCTCMSTAVCWVGSDVLCGLAVSCPCRSPAGGLCRTCCAVRYTGFFLFVLWHELNFHGRQFAYRRWPLLSSLAFDMGPGRRFFSSRAYASPRALRANLLAACRPCAPARPFARACIEHCSSSLAQDAVRDAFKGWGWGTVRTAHHRLGMRSTIPAVLELGATLRRTHLDSCPCGRFSSPGAGGCGAAARPPGASALQASWEACGYFMCQWAPGSWLWVCGAFSPFERPGLACRIGRKWGHVALSFWGQGQRQAAALSSLVAILARLRGPLAL

SEQ ID NO: 1012455 - protein, 126 aa, Homo sapiens
CAGSLTAASSRTAAPVYTVTCMRGPETVPAPKRSRSKLMAPTRIGTHNGTFHCDEALAAHCFASCRSTGDAEIVRTRDPEKLASCDIVVDVGGEYDPGETDIDHHQRSFTETMSSLSPVEAVARPS

SEQ ID NO: 1012456 - protein, 260 aa, Homo sapiens
GSPLPEQPDRELRIARPVPTAPVSRVTGPPRPSWSRDYLAPLRLLIIGDSGVGHEIRLLLRIADKHFLMHDYITTTRMLDFNASRTVEINGEKVKLQIWDTAGQERFRTITSTYYRGTHGVIVVYDVTSAMSFVNVKRWLHEINQNCDDVAEVLVGYIRSDDPERNGGGDRKMPTNSPGRWASSLFETSAKENVNRGRDVQLHHGAWSSEPKTDNLCITMHAWDNQNGCGEAHEGTGKRKEELLLMGTHSTAETALRFPP

SEQ ID NO: 1012457 - protein, 245 aa, Homo sapiens
AGVPRIKLGVHPPSLDHSTAPQVFPNPRDSAAVDRCYVTTFSLRCREGNLQFVAFALLAGQLRSNDLNHRGHDHGFYLPCRLGRAREGRVCLLVDECVIHAGGIGSNVMNSVGMTTPLASWLPVMDTDEYVYRSNCMFNGKTSQCSELNTVIVPLHQWPRYYGGRMHQGEQSDPVVCEYWRPLVELVCRHTMRRKMPLCCTESQRVYPVQQMLLRERCERKMGQNLNRIPFMDTFWKGTTSHSAP

SEQ ID NO: 1012458 - protein, 253 aa, Homo sapiens
MVPYRAWDMLQCKYDDPTKVVPPRGFVSRDCIVAAPTEREATGAVTTLLLKSKSSVVASLIAYGHRDHRDFLICARGIVYTQSYSPSPGREVAEGPRSNDPEMGYPGLKSQALATQTQIQDIEVLPRHWQEGRAYGNCSEAIATEGDPKLVMKGRVRNNQRVQKSFNLANPIVVGGGEETGVTPLLRKAGTYTRGALCGGRHLCERFPELPRAPCLSRPSIGLFGPRFAGPPCGDCGGTPRGGGPFGSGASGG

SEQ ID NO: 1012459 - protein, 331 aa, Homo sapiens
AQAVAQLSEGIEHPACGLTAKPPAHVMVSEFKKKLFWRAVVAEFLARTLFVFISIVFLLLWRSNTQVGNNPSTEDPGTYVIGVSVCPSGLIICHCVAQRCGPRVSGSLSTIERRLVSTLGAAVVEAAEESRSLFPLHLYDTCHSVLEGADCVGAVWSTNRTVRLEAIHRPSAALGELVLCPQMYAGLDRLSNIGELQGLVVRSDAFDRRDPHSVGGIMRSLATYATGMAASGERVWVWGSNAPRLCRFGALLLVSPLWGRTFPLGSFDITILGLVGDVNPVAQGPFWAPAGWINTPSLQANQLGISGRGAQITQEEKPLGCTSSTNFHAWA

SEQ ID NO: 1012460 - protein, 89 aa, Homo sapiens
MQRLTGVTLRAGGQTWIAKSPNGRKLRRDGGTILVSKVRGLSTGSPGLTKGKSLKNAYLPGPKGEWVHLTPSLMAGHENLPGRSLDVER

SEQ ID NO: 1012461 - protein, 220 aa, Homo sapiens
MPTGSGMLTLLLVLNCNWPIIARHHAVTLIGSLVYSVERGLYSMVPISARPFTVGVERPAVDYTWITHGLFDLPCAVSVSGLPCGLGHCLALLPDYVPVCVGHESGNMARRIACLVLAMGLAGTPVTGWGQPLSDQPLLQFFNFLNVHPRGQCLVLGLVPGAVARVQCPRKHRPSHLPDFLCASRLPFHSHKGNESGEHQIPGGAARFHSSHLKSGASPP

SEQ ID NO: 1012462 - protein, 142 aa, Homo sapiens
RGITLGLLAVPVRGLRQMAFGWRSTLLKHLQQPQRGERLYHCPVCGKAFGQSSILDTAPCACTVVCADGPSKCPAFAAKGFWDMRHQRVRPGHLQRCINRAEASRIAVSICAERPSGPIAFNVRPTESDRRRGLPLQRVATR

SEQ ID NO: 1012463 - protein, 167 aa, Homo sapiens
MAGSLAARGPPAVSEPRALAVAAEADAASASGPVLCSLIYLSAMAGANPRCVELGLGTAVEWQCHGQLLETCEDDSFMACGPGRNCAGRDNWIKMSEAPTSIWQAEETRHKVGPCRELPEEVNGVYTVLSLTVSRNHKNCVTLICKSTMVVDLSKVYAPVRCNHGPH

SEQ ID NO: 1012464 - protein, 37 aa, Homo sapiens
MRLLEQTKSVRLEKARSSAQVQTKYPSSDKRLYTNAK

SEQ ID NO: 1012465 - protein, 209 aa, Homo sapiens
MEPVSVWQYRSIFEASGRLGGTDYLGRVLKNILLTCPRIFHPDDLSRVVKASASKRAGGPTPPGRERAVAAAVELRSFLSSSARSEPWTPGLLCPWQEETEAETVSVSAGSGPVGCLSPKSLRGMLSLFPHQIPQAEPFANTSSASSQCRGLAWPGDLQTDRAVDVGCLFAGICEILPRAPSKHCVGGNPSRFSQSIGWVPRRCITSLP

SEQ ID NO: 1012466 - protein, 91 aa, Homo sapiens
GCLGGDTQSPGGGRKAACPMTGDPPGRCALGLQASQGGIDFNQLFGITMDYTRKQGGSCGNLCPGDVILGRIDWCLGQRSMTSCLMRRERM

SEQ ID NO: 1012467 - protein, 264 aa, Homo sapiens
MVSGRFYCVLPAAGVPGLYGILFTIYWMQYWRGGLAVEWLSIYMFETGTLVAYGCWHGWEFYGGASLVVRACAQFVGGARTCLEDSSSAALPPAWPFVLTVRGGWFGCLYVFTTMEGTGQRSTARFDSWRGAFDHCSFLFACQLGFAWVFAVIPPDPGRRCGMRSAPKTYPRSVLGAASPSRLIARQSGHFGASRVRSYALSFEKTPPGPYQQPCPVRRSYANQHRDAGGWPLGCWCSTILSGVHLRRRQSGDPDRKRGPDCMM

SEQ ID NO: 1012468 - protein, 222 aa, Homo sapiens
RSAQPEPNPVLPTLSIGIYGVGKSRPAIPQPLAVNSDHTPDGATQDHTPGVGKWQSSMTLEASIIKGKTTIRVDERETAGGEAASLSLEGLQEPQSSKGFKDKPPRYCFVLVTDESRVGPKCEQGPRMTFRPAVLMGNMTVLKSTSTDCRGAGVVAGRLGVSKCIARTMGADSQSMGHWPLHDRGIKGSCHHGKLTTAAVLHQTDAELERRCLVVDARAETV

SEQ ID NO: 1012469 - protein, 267 aa, Homo sapiens
  misc_feature (88)..(88): Xaa can be any naturally occurring amino acid
EAETEAAPAVGCGADARAGAAMVKISFQPAVAGIKGDKADKGVGVGPCAGLWSPRSCLTPGVGRSSPHERSIQRGGRSVGGAVLPVDXAWSVLLMGPTMFGLVIYTLQIACFLDTGWARDKLLPAVVCCMRTPCRSQDPDSDGSWKQDVKIYLDEKYLSAVNVPVPLVWLAGDLLQTSSIDFQRGLLRTMSSLPGASASVSRTQHQPLCCPLASFWELLMNVNEGDLPAAEQYIIQEEMVVTEHVSDKEALGSFIKHLCNGKDTYRL

SEQ ID NO: 1012470 - protein, 142 aa, Homo sapiens
PSVEAGEPDARPVSILEEAAPSVEAGEPGARPISILEEAAPSVEAGEPGARPVSILEEAAPSVEAGELGARSSLHTGGSCPICRSRGARCQAILCALHQPFAVGTFSTETAIKLSSHITALLQCALQWLSGYSQGCTDITTI

SEQ ID NO: 1012471 - protein, 105 aa, Homo sapiens
MSSLPCMPTRHVPVSLPDMPLELACCRCCCPHCLCDSAPLPVACPTAGSVTFAQRHYSIPSRALSRGTICASSRSAVSDPEAASAGRRPALHVMDVPTSVRCPAA

SEQ ID NO: 1012472 - protein, 337 aa, Homo sapiens
  misc_feature (31)..(31): Xaa can be any naturally occurring amino acid
  misc_feature (39)..(39): Xaa can be any naturally occurring amino acid
  misc_feature (84)..(84): Xaa can be any naturally occurring amino acid
MKEWSVCQRTQGRLHDGPRGALWGFNHSFSXEPIDALLXRICSTEEASRIGETVWRALRNRCEDRAPFVSHQVCAGHIRYRFSXLSLYVSTLSSMLRGRPRARADERDPNRPPAKMTLTFHMGYAVDLCSFVGYPLRVGVGVRGVRPGARNQVWALESRALRGEGRYRNCVLPLAIEGGPEKALGLAGNWVLVPLALLWGFRRYSYRTFLAMEPVVGDLLARRAPKGTSRVKFDSWSGWGVLGKDLIKAKGRGVVLVLKPSVDLRFRGGKAFTNGSLCREGREHLREGLESFQFDTNWSSKGTQRVVTHGVGHFQGFTISWPVAEISLIKSIRCARK

SEQ ID NO: 1012473 - protein, 66 aa, Homo sapiens
VLALCSVTEGSGLLVDEPQLCNVAMGGASRRVEMWGMGIPEPPGACVRSWSLLGRDRGHVRCWQLP

SEQ ID NO: 1012474 - protein, 228 aa, Homo sapiens
MMHTERKVDVYGFVSRIRAQRCQMVQTDMQVCLHIPRALLEHYLYGDTELEVTSLETHLAEHLQQNPMRTSNDGLEEEFTRKLNRQSTIPGMTTYACTGTTFQATCTKNRVLQIIHTEYNRVIIPAYSGANEKHDYVNALLDVTGYRQKDSYIASQGPLLHYKFEDFWRMIWEWKSCSIVMLTELEERGQEKCAQYLATLMDWCPMEILAVELTDRRRNVRATPSETF

SEQ ID NO: 1012475 - protein, 109 aa, Homo sapiens
LSGSWRTVPNSPRPKSLGSLGSPELGRWLVGGLHCSKNAACALNVVYMLVSLLLIEKWMLAGKEPGSGVQHSDIIGGVIAVGVFLLLIARGWTGGCMSNTHKSLLVLLR

SEQ ID NO: 1012476 - protein, 113 aa, Homo sapiens
MANFTQEPQYMPDHCCPSSGSILMSIHEAGLILPQLPESRWRPGASNGVSSCLPVRRCSLLVGRILWFPFAACTWTADGRLIGSTVGRHSGSHESLQPICWRVLGSSIAMNGG

SEQ ID NO: 1012477 - protein, 260 aa, Homo sapiens
LPSTGNNTMESNVRRHCKQAVVTQANDKLTYCLGPVVSLNGVGAVKEDQSCPVLGGRKQSSTVLFVGGLVEAGEDAGEGLQKLPLTAVGVHRGNRVWRLSTTVLECEVVVISAHVRTLVPPRFEAILRAYSLTEIAWDYRSSMGALRSPGGQESKAISDSDGGELALVRRTPQRAAPCVGPQARGTPKFIISMNEQLLSPASTWAVPVSESNVAKLTNIVPGPELHHWLDGHQCTPANDMISPARRVHWRMQLSTRGEPQ

SEQ ID NO: 1012478 - protein, 128 aa, Homo sapiens
MLEPLRIARLRVIKVNDTDAGSEFQSDWSRIIQPLSTVGLQAKFGAMDDRVDANPRSLLVDHHSSGKDILVSVYGCVMHCERMPLVEQLCHEAFQHSQSLSTGNKPWMSLPRGNGRSTYLLLKERDKR

SEQ ID NO: 1012479 - protein, 128 aa, Homo sapiens
WLVCHPAPDFIERLLTVHGEPVMTALQALRHPWVVSVAASSSMKKLHRSLSTEPPYTVPPQRCKSTKSAQFHASSRSTRSNKSRRVRERELEELNLATSSNTMAEPPGCAHMQQEPDLAHTLCVPSGS

SEQ ID NO: 1012480 - protein, 298 aa, Homo sapiens
CGSLAICRSVVFPRCHSDGEQLDADKPGPALDTICTLLLEASRRVTTMTHLRHAEAVVTPVAPGEPNRDVSSERMCLMALETACEDLPGRTSSGEDPVGQRTRAGRTEETLFHSDLRARGLAVVISSRVFCSSPRVTVLPSRALRREGMLTARHRAKLAVVIEAYEKLASPHREAIRWGHSNVVLRRANASVSFTSRDGLRNSGQQFASRGVQAVARVAFALIAHRGPLGKRTEPRLASQAETGRYGGLRRNLALGPWPGVHWDALVGPGGLWITGSNEPCKQGAEALGRTIEAPASE

SEQ ID NO: 1012481 - protein, 34 aa, Homo sapiens
QAGTVWSYGMGIAAHVELTVTVWGRVRCRRGAFP

SEQ ID NO: 1012482 - protein, 58 aa, Homo sapiens
MCGPSLGSAVLGPRASAGSGVGRRGGSRALLLLRVLFSRLVAAGALAVVARVAVAPAV

SEQ ID NO: 1012483 - protein, 111 aa, Homo sapiens
MQVRPGVRVDPRVRGCSQSSIRWNTGPPGEKLEKAPKELKGLQPYRKNNNMNKLVPPELVSLAAYVAEDGLAAIIGKRGPLVLQTLYAPVQGNARPRSGSGWVGEQSGGKV

SEQ ID NO: 1012484 - protein, 276 aa, Homo sapiens
RESLCEDVNHSVSWLSKRRRWMAWTAQLVQFEAGHARVIHVVTSHDGQTMRPESTSNRCNGIVGNAHLYDVVTPTTVYARLSLEARYEARRVRALMLETLSSRPMDEEGSIIDDFTTVDIVNGDPGHQEEAVRDCIRDAHEEVSDDVMTFEKKIEMSEAGRAVRGQKDDQHDSWPIVARGDSVDSDFPRSAKNAKSRGDRWSSFPVKRRAKRGCAERVQMGRQMSNDSHSAGQVGCALLMMGDVQQLLPERRRTIFTKYIGCSVSAVQESGLRQES

SEQ ID NO: 1012485 - protein, 81 aa, Homo sapiens
ASSFRRPEGAGVRSPPGRYVTMLSRPPEYEHQATQNERKELQDKRRREAITAGNVPDYRKLVGGVTVKCWDWDLGLHVTSR

SEQ ID NO: 1012486 - protein, 69 aa, Homo sapiens
EGLRVASGPCRMLQSMLYRALYHQARKSQRCILERFTIPSTLVPRTLVIATLPKNRTTMSKNTYIRYER

SEQ ID NO: 1012487 - protein, 111 aa, Homo sapiens
RKESVVSGGDRNGLAGVLRADRSEARRTSGNRKARCSSAVLKRKPRADDWQAGLQLPEVDRHPPVTGVSYGIMDDLTASNRKNQTKMGYSQSNEPNDYFHIPQKLWEDRAG

SEQ ID NO: 1012488 - protein, 336 aa, Homo sapiens
  misc_feature (249)..(249): Xaa can be any naturally occurring amino acid
MTRTCVLHLSAIPAWVSFENWAAAAECKTGSWDVVGSWATGISEHSSSAQAWGPERVYAVRRPAPFCDKPCARARVVRVQTVAVMWPGCTVLGRGPGGDCMSLPGTGWIAHQWSEWIGASRNYLETERSIAGGFRPSNADWNTEVGLERKGRDKHTFAGTFRHEVYLREATPIQGDQRIAWGHLAGPWGLPLEAQGMEQASKLIGWWEQLRRLGPGKGDLITQLGGPGPPLGAQHPGRIRVGGKGEICXQSREREPIAMVARDRTVAGLIAPAEALEDIHSTSDRWHVAKTMWKPCDSGTEEVCCTCGTAQFTGLDSSWQKSRRSGEGRQIAIWGV

SEQ ID NO: 1012489 - protein, 315 aa, Homo sapiens
MYTYPAITGIHNASYIHHNTHSLRSKRHLALQNSIMSSKTYILAATINLPSFHTSLTHQPHVLHPISHLCGIIIKRRFFNIKPQKHTAKSFTSAHIHQPHTISPVAVRMININSLHHSQLPQSPIAPHPATTITYRYYSTNLHHPPLTTTITTTPSAVNSTRTTYNTHVPMREYTHRCHTPAPSHEQPHHTRPRPHGELATTASTQHTTTHQKREIYQPTPPPNNRESNPPTHNTHTHKRTHRHQRSHSGNNQQSQHPTPAAGESIPRIRGATITIQRSTMHRASNTQWYTAHHTDTAAQQVTPRASQPCARTHH

SEQ ID NO: 1012490 - protein, 114 aa, Homo sapiens
DSDESWTTESAISSEAILQAPVCMNGGEMRSLIACPVPGCKKMIQECEWHKVSIAKNGHRNTMIRVRKAITQVSVLWEELQDLAPRDLRIRQQSTFHPPAVGRDALSWKMRATN

SEQ ID NO: 1012491 - protein, 362 aa, Homo sapiens
  misc_feature (75)..(75): Xaa can be any naturally occurring amino acid
MGSVTLTGSSMHRKRWWKTYVGRGRGGPLHATRDLFLGTPTSYVAPKKRIGLGATSTRVVELWAKDRVVYNPEKXPTERAGPSIEQNMYLLPTSEAKRIMKRCLHLLDNRRLNRLDSVRSHGISWTVENSVPMCDTPYDNKGCVCGGINGAPSVCQFYPPKTIVSGRHGLLVEGIVEKDIDTHRKCGLLQPTPFADHIAGHCVPHFPCGVTPYPQPSRECRHAVICKKAVPPVSSYETESTPTQICDGRWQHHCGVAPKGIEKRGPMSGSNGQGAPDGGDRVARVHENAEDREETPIGEAERKHRVDYGRTRSGRTVDVQDARPQELRGTTAHAAQVPIRVSYKIGGSPTPGIYGPVVGHTR

SEQ ID NO: 1012492 - protein, 338 aa, Homo sapiens
MSRAGGSAVLESLALCVAAERGSQQRSAAVRSTPWGPWAPCSWSEECGPGPALSAHMRAAYTCVSRLGELGLVEFRDLNAYVSAFQRRYCGMMFWRCEELEKTFTFLQEAGAGRAGLVLPPPKGRLNVNPKHRDLLRIQDGEERLAQELRVCGDKQTGPDGTQACTSCKIHDTTVHKASDHRTSDWKAEPHKKGPQKRTPLESKAPPGGADTKDHEGSNIWLDRDARMESPNKGPMPLRAPLHLGRGPSTEEISIICQAYSGEGWEDKPGSESNPPKNRDGRAKTNGGKHQYTTIITYRENEDRIRKHERIQTRIQETSNTTKTSEKTQKCETAEGRT

SEQ ID NO: 1012493 - protein, 303 aa, Homo sapiens
RRGPLVSVGCAQPVSRSPFSAGCEPPGGAWGAGVQTVAVGWGGGSSGPSEFGGRSNQCCVGGGGWSMWSVVPHVPRPAVYVTELAYWCALPLHSAVGAWCVCALWIWVKLGEPLVCAPGEAFPVLCCDDPWVGGLAGVVYPWNGAMWKAQDIWVTISCRQNNGPINLNQKAMDRCAQVPMKTAAPKAERTGYEVLGLVYASLCGRSEEETLGLSHYGGSRGVMSLVDHTAWCRLDKHCFVGTMGVCLGPEDKGGGVRQQASLSGGLQALMGGCVVVPLNKLPIRTTPDYLQGKTLPKIPVHIP

SEQ ID NO: 1012494 - protein, 247 aa, Homo sapiens
AATLSRSVAGGRQGQDGGLQRVVTTLRCVIDEDETLTPTSRHGQSLPVACIRPGCERMEQFHKEKLRNWTGVCREVAKLQRCAVGAMRSTDRQLAGVPRAARLGAWKLPCRPEALADLRQRRARLAGVAITAVSRRLRHRGTNKRAPGTLDTLMPIDWRSSKEAVGTHTWALYEEHPGTGRGTYMYRDTLDGGNEESRNYRTFSAGEIAVHRRKTRASKPHFGRTGFPHRHWGMHQHLIGTMARHGR

SEQ ID NO: 1012495 - protein, 119 aa, Homo sapiens
ISGASAVRCYSAAPYSTRCQGCETRMSDTCSSIQAHKTAAGLSAGQAAAEAGIWIRGHLRIYENPEAALVSNLPVVTAHVAYLHPPLVALQPRIKLRAVPDISYMILSYQKNVRYRHTL

SEQ ID NO: 1012496 - protein, 92 aa, Homo sapiens
MQATRLLKLSVESLDSFEMPQVDQMLRSYQSVLKPPACELLCAYPSDGAEETLKSGSREEPHRQLFSTPHQTFCLHEPDAEPKNDYTTANCA

SEQ ID NO: 1012497 - protein, 81 aa, Homo sapiens
VPPRVTPGPPPVPPTGDSEAAPVPPYRYESEEAQMPAFIRFEGAMSLGIHRLLETVGRSHVSVLLTQILSVFLEVNAFDTA

SEQ ID NO: 1012498 - protein, 176 aa, Homo sapiens
SASVNTVSVSWSFSEWLLHPGGPAALVSPVVRAVAERSRVAVTEAARQTSLEFWPVFVIPLFAPVGVRIPLSPPGVRIPLSLPEGFGIPTLAPEGFGLPRLASRRVFGVPSLDAPLQGSCARFQRGSVLNNGRFHVRRQSSVSEIRDYCYSDDPECSRPTPFNEVAVSKFSMTIDS

SEQ ID NO: 1012499 - protein, 222 aa, Homo sapiens
MEEPQKSYVNTMDLAEKMNLSKAPDPQISVSEFCLPLRATIILVNPYHSFNCGHSILHVTALLYGGHLQRKQNVQNAEKNGKVSPKSDILLRDAIEKSYVPDAIVDVTHCASTVSARSELTVGPQQVLQPFQKLWDMIQIPLAPNTGRANQREEEGDSFAGAAHRFNWMWQMVLPRRITGSHVRGIVKQRPPGPQCCGQMDGGRKSSSGWSSVGPWESSLPE

SEQ ID NO: 1012500 - protein, 188 aa, Homo sapiens
QNFLLHGTKNVTEFKQFKIANDKDSDGGARKIITREHIIDSGDIVVTLAKAIMIHEKHESGVPKYSTPKNGYSSNAYERPHLTGIRLRDWTATTAHKTHDRRRHVSSSETAKQNIRPEQDDQTTTRQEPTDKQRYNKIRERKQRQRKKHKSNITNTRENTNTKEHNKEHRHRNRGTRQQSNNSEKSKK

SEQ ID NO: 1012501 - protein, 264 aa, Homo sapiens
QVFWEEGHGATAACPGPDGMVLQCSSLHVGSDLLKFMEPVTMQESGTFAFLDPKGTAPGQAGSAAGPQGPGWGGGSPSGLCGEGQQGDPRDQSPARGSPCPVLLGKPPLPSASLGTEWHRAASMGFPNFRHLKASPAALGWEGTRWPQGGCPCEPRPTPLCGGRKCSVPLRVPQLSHDANETLPLHLYVKSYGKNIDSKLHVTLYNCSFGRSDCSLCRAANPDYRCSVGAGARAGACMRPCATTAPSARRPVITGSNLNGTPGR

SEQ ID NO: 1012502 - protein, 185 aa, Homo sapiens
LESGSPSACRLELRTKSSEGAIDISSSDPWTHTALDDWSLGAWQVQSTLGALAAWDPYTQCTGKDPSEEAPMPTGPLYPPRDPWYLTGALRHNTVALSSIASYDDHCGSFSSTGQNQKCRWKHVKLLFEIASASHLSETNNVSKLLVIREIKAWRDELIHGLTWRAHVDSYQNQTRRCPRQSDML

SEQ ID NO: 1012503 - protein, 275 aa, Homo sapiens
EILEGPMHARDGWLASGVPVDPLAWLWQCGWILACLRLPEFPQPPPCCVAACEEMGWGALTFVVFPAPGASDEPVSSMAKLLGVRCSPKQPDQPLASRVLAAVMGLPWGQSHLGLQMLLLVVDTVSGPVLSLELVPYTPQITALGPVKGKVTATSLLPWSSRAVIFDGLDQRLADTVWLVVAFNNASRGLPEPGDTGLTFRAPHRMLTDGHYMTAAPVSGPVCSCGDPMAGQLEAAPVLRVGTMNTAVTSSPSCNAPILAWTLSGEVPPDGHQGH

SEQ ID NO: 1012504 - protein, 212 aa, Homo sapiens
MRGTWLTYGLVVSGESLIVECQRLQSPRVHDACPASKLRHRRDGSRRVYSAAEHELGRRNGDVSDGRRTLACSRQTLWKHARAPRWSDEDYSAIAAASVSREMLDLEKQFSELKETLFRERLMSAAVAAWTEVGADESPWIHGSPLGVLQSEPQRSRFTVAVDLHSGFCLDVITEKYECELQGAYNMHLESEKLLLYDTLQGELQERIQRLE

SEQ ID NO: 1012505 - protein, 290 aa, Homo sapiens
IDFTFEQGVGICTSFLGISWALRRLPPGLAHSASPPSPSWCLCSSVIYVLWNLLLLWPRAPSCGPVLSPLPQYVALHFLGLWLGTAALGSASRHRLHCWTPVPTYPLLSPGSTWLTATPEAGSTIHLALPPAGDRHSPAWPPVVIYSPWLPEPDFHLQLVAACRSADSFFLGLAFSGFVVLLHGYHPYAWLLGELQARDHGWYMGPMDVLAFRQEPGYFWLALHDVSWFIVRRSEAFVVPPKARYSGLRCALAIPARAHSADERGRILWSYPPPAGPCAPDSHVPDHEPM

SEQ ID NO: 1012506 - protein, 488 aa, Homo sapiens
VIDHCVPELNLFSHEAKCIPLDKGFSCECVPGYSAEALLQTDNDDCVAHKLPATRDPCAWHTTQLRLHMHPAPTGPSSCDRLPDAHTPRIPLAPYLTAPTPHCRTQPTDAMPSHTGDPQACHSACAATPQASYPTHTAQAPDSPTPVHSRPPAQPPPTAPHNQPLHLAHSDPKHTHPTATPTTATITNHRMANKHRQHNSTDPTTRTPPDNHPPNGQAKHQHTSPTLRNTAGPRHPQHRDTPTHGNPTPPRPLTFPHLTPYHQPPYRSRNGTREPGQTHTTHHAEAPNPHARPSPPWALQTPPCSRTPRGNNHTWAREVPLEGKTSIKISTKPLGPTHAVAQRHSSPRHHNYCPKKHPPEPRPTGAHHQTPGDQAIPGRTRQKPKRRPRRKPLRDTTRPADTPQGDQYTSHTDTQPHGAIRRPTSAPPYGGHLRTRGPHHLPTRNAPRDKATSASHDVGPTQTLRPLKRANYIHPHSGEADHRTTITK

SEQ ID NO: 1012507 - protein, 338 aa, Homo sapiens
HRGLHPSTEEKRDSRMAEEKKLKLSQHCAALGSSMKVVAESMGIAQIQEEHLPDCYRMRHALQRFMHTGEAAQAHPPVTLDLRLERPNRTVEPLYWLSTPRHVHSFSAFRLLRAGPGELYLRTERTNLDGLTPEPHITPIPPLAPGVPPGTLLPSQASLALTHRSGCHAHAIPRETRPPASHKSKPDTRLDTPPRNTPLKRSSPKPQAHATAHGPGPPCNPATPGSQRAHATARTRHRGHPRTAKRGPAPTCHRARGGPPISRTRCNTPPRYTNPPSNIGAVARTANPEPRYVNATATTQPRTAPLPLAALPRGTAQPPGPGKPPLPTPPYSQRAPPG

SEQ ID NO: 1012508 - protein, 303 aa, Homo sapiens
RGSGAACMARGLGAPHWVRVGTCCRVGELVASGWLDSGRHDDLRLTDLREDVPCAYVPTCALTCKISTMVMGMPMVMAISAHRELSGMDIHHDHDHGAFTIEAIYHTVADRSVAYLPIESAVLLTMRTLDPLTHECTTCNGRPNGGDLGAPSAFHAWTLDAGLVYWRLDALVVATCAVTLQACSILWSSIRYTRRGSSRRLSRAIRLCVLSGLSASTFFAFRVVLLGTKCCPCDFISFIASLNSSILYHECLEQSPGRLHTSAPCVTIWGRISGHRWDVAGFLKLRESDGACLVAEEHCVRQC

SEQ ID NO: 1012509 - protein, 132 aa, Homo sapiens
MAAPVDLELKKAFSSSFTAKRLLTLNMKVKLQTVQIEQLNRRKSMHILQIHEIMIVVVDETRPCTERCTEGTVFIYLHVAKGRGIFSTSRSLEKQTYKQKNTQIKELEQKKSYLERSVQEAEDNIRADADVH

SEQ ID NO: 1012510 - protein, 261 aa, Homo sapiens
  misc_feature (109)..(109): Xaa can be any naturally occurring amino acid
  misc_feature (115)..(115): Xaa can be any naturally occurring amino acid
MPSPHLMNSPLKRWSSRLQFHRLELRNGTNTLGYSLPFGQRITCQQTWLADHCKIMLLAVLQTLLPHSWLRDHTKKLIITIQSTKQNSGYRDAHLVTNSRLLIPNSLMXMLAEEXVNKKLPYNTLNIEKKRTIKTHDNHIRGVEPLSSEVYSSQAGAPQNISHESFMAPKTYFVGMHTSVCVPPLDLRVMSVLPFIVKDGHEDARGAQRASSIYTHKRLEKNARGEHEGALVPARGGEVLSWGPKEHTPLSYDVSSGGARA

SEQ ID NO: 1012511 - protein, 157 aa, Homo sapiens
  misc_feature (154)..(154): Xaa can be any naturally occurring amino acid
MTTSMRLDMTRTMNRERSLEKRHPVIAYHKPLLYQNQLSCHERHPSCKLRGFGNPKRMIGRRTIVPNQCGWARTPKSRSGGKRRLNCERVVNTSNRLAGQLIHNLYDIKVPSKCNKIENAKTRLGLQLMAHSPPYMRGTGRVGTTLKRRNGVKXANT

SEQ ID NO: 1012512 - protein, 177 aa, Homo sapiens
  misc_feature (106)..(106): Xaa can be any naturally occurring amino acid
MSSKVGPKYVSARGFELPLGKAIRRMNDNDYRADKTAGPPQVTHNRLISRRGIQHLFSSRWIKHRCKIAHREECVRDNRVVDSPKGVSDISSRNGGGSDQGLTEEXLSRNWRGRRHQLSKSTIHEAAGRMTDQHRDKRAEEISSRRSENSGRGRLGGDKAQFTQQSERTSSAPRDDS

SEQ ID NO: 1012513 - protein, 393 aa, Homo sapiens
EPPNPVPQAPLRPPVPPTVYFRKVVRLSKFRHVFGQPVSNDQCYEDIRVFRVYLGTCTFCAVNPKVPGACLLERQVEGVPFLVAPPNGKTSAAIEQGPYSERMYEASTETVFTVTIERALSLNELTQRHTSSWSRELTASGSIEIAVDYEFATEDTVGLYPSSRRCNMEDSELGIGYLGRGDIDANDRTVGAKFNPSRSGGPLNRDTRTKLVGFACKVVTGIAGGDTIGLTPICAEVSRGHHDGNGVGIGTQGLGNKALDHAPLNPSVRNRELGVTPLGKRYLTMSDSPIDYYSVRAECQKCIPKEVSFGRPISYSGDPRAGVPRGVQPPFGLGDTNTRRVARKSGPSTLLARAVSPLGSPNCRWRGTTIPVIPLWHTKLWSQKGGLHCRNGD

SEQ ID NO: 1012514 - protein, 257 aa, Homo sapiens
MEAEPPLYPMCGGCGGLCGDGGPARGPGRARGPCLDELVWRVPRTTTEERGCELPVTYLPASAFGAVLKERAWLPVACGAMLTLRRLRWPSCRCSLILHYDETYREVEVLATMGLALNNRAAKIAGWAIPTLTPIAALALTQPCAHSGFLERSGLMFHRLLGILNARRMVYKQTTWEQPTKHGYVATSDVAPMGQLSPIVGTHLWEPSNGGKHTSSPKCICVKNSTEGSTIAHDTKGSKELVSRGNRTQRGFRWEYT

SEQ ID NO: 1012515 - protein, 94 aa, Homo sapiens
MLRTKSYAVGERAAERQHTQSTNRREAVRPQTPQNDDVRTEDTNCHAPLTPGQRKDQSASTRLEQHDEARSDLMNNKPREGNKHTCVHTLTHAD

SEQ ID NO: 1012516 - protein, 75 aa, Homo sapiens
RPHAAEQCAREVRVLRVLEHAGGEKTRDLNCVCGAMQVSSLNEVKIYSLSCGKVTFLSGFSDYDRNESAYRDGKM

SEQ ID NO: 1012517 - protein, 237 aa, Homo sapiens
MTGWVDYNSSQGWAGTNAGFDTLLIETSPYSGGNAAAQSLSGSTGPRRISDSRQKGTCMKIGLVRKACKSHQGLAHPIVELDPNTLWGNTCRGTPLWRKDALAVARLQPQRLRRFTKAAQKGTVHSYPSHVALFRHSNLRPKRSYNNMLAQWRMPSRGDHGACGCGVGDLGAWVLASWILTSFGPVFPYSSSRGPFDTPGLVVYPGGPNSFLFLAPYTLGVTPLPCSTQEPTGGDFH

SEQ ID NO: 1012518 - protein, 427 aa, Homo sapiens
PDPRSDSAGQIPRLPVSKPESQPAAALRLRAVSVLRTRAPCPFRDPCPAGMAANLPAMDDPVPAAAPPDSGAAGQLHSAVAHPDHPAADERSDLHAAQLIAWRSTSTVCARCDRRPQRLRPRITAVSTQVVQPRALSLRIDTPAYAGRARGHAPQRPLTPRRPRAAAPPPVPQPGRPRSTTSRRATLYTGSSQGAGQITQRTARALTPDSRCLPRAPGLAGPPASRLLPRTSHTAMPAPCHHCLSQLAPQPLRLAHAPHPRLASSRAPHAGPRPTTPPLTAERPPTPSPPSHLHDSPPEQCLSNQAPARTHSPEPNPQPFTHPNIPHRQHAPSSTHRPVNADPKYPSPLSTHLSNQPYNSYSTPTCSQPTPPKPKHHHHPHKTHNQPPQHTTTQHTHTHNTHTTTHKTPTTNPTHTHTHHHPPHTHY

SEQ ID NO: 1012519 - protein, 174 aa, Homo sapiens
MPSRHTVAEEPNLRCRNRCVMCSPLQQSQQNGPPQTPFGPHDRVEQVFKAFCKNTMNSARAQLQDLLRGRHICPTEESCALNYQESCVCPRVEPGGCAVGCRSEAFIARRLTSSVDSALLWLLARKTFIYLDVSTTSRVLQRVALILNLVMVGLVSRLWVLYKGVLKRLILLYE

SEQ ID NO: 1012520 - protein, 189 aa, Homo sapiens
MVKLFIERPVPVEATESSEIRSLFEQYGKVLECDIIKNYRVLCIIEDKTAAEDAHTATCSHYKLHGVNIKRGSPAMNNEQEPLTKLHVGNISPTCTNKELRAKFEEVMVLVIQCDIVKDYAFVHMDRAEDAVEAIRGLDNTDVSSDNTEMHRACMSSQSGVITAPGMGAPAAAAIGAVKRRGTGPKSVR

SEQ ID NO: 1012521 - protein, 134 aa, Homo sapiens
RGLGVPGWVADPKPALGRAVGCPGQRKGQVQGHAGRGPWAMNRCPLRCLLQFFRLQNRRDHGPFPSVTPGCLKSRPHHWSNALLSSLLIPGMPVPSANARPMTCSRCRHLLDSGMVSSPDNISRHHPPAFLRGV

SEQ ID NO: 1012522 - protein, 112 aa, Homo sapiens
MPKAKVQNPEEKYGYTCQPKASESGMLDGSAAPADLNGEGAVVFRSGQWASCLGRVREMTGSCDVYSLPGSFPHPDMAVGPPLKSVRQNLARDGGWPVDPNRAVPPLYRERY

SEQ ID NO: 1012523 - protein, 169 aa, Homo sapiens
MRHGELELKEEWQDEEFPRLVPEEAGDFVKILKTPKGDSARLAARYPQALQPVCGHAPRVLLSVLSAPRVAAEIWLRGLEMMELQPNQSAPSSPDGSSDLEIDRIGDDLQDSEQLVAVDMNSNWEDELPRAEGLGTMLRQLRRLGRGCMWDVTGERMDITGRVFRMGPR

SEQ ID NO: 1012524 - protein, 194 aa, Homo sapiens
RRAVKCCLVHARRHAVQGSACSSVQVFGTLLRQRQLWRTANACYGLIKVNGSAPCEMIEPRTLQYKAAYGATCCFFWRRERFLEGRLGLYHNPVVLVVQGVCCATVARRLYAYPGRRPISQSHVVAVLTDEDLVDRGLASEGGSDRASVIADSDRQPCVGRLTLDRCESIKVWEALVPALATRNPTDKPVVTQN

SEQ ID NO: 1012525 - protein, 361 aa, Homo sapiens
PPKRLHARCPAPRRCSSCCSCWGRGVDGCGLLRSRRCPSWSLPSLALQCRTLAAPTTCGSSGAGWITPGARDGPSGVPRDLLMWNNNDKKYACRSWLAGLLGDRSNGCVLVYGMSSEELKPKGSTPRLKHEVPNAIVDAKERSPRFLEWSSKLGTGASAFCQRSWALAETYITVRARPRRRNDSWTQRNQALVRGFSSGGQWSLPCVDGPQIGMVTPQNLAISKQSCVRITHTPMGLHSRSAPKCRRVRIQLMPNESRHYVPVWSLLFPDGHPKWITTSLNTIDYHLADLAPFDGVLPWTNGVRRKKTPRPLRGSSRIEHVDAKQYHPKKRKPNDAGPPYIAERGKQIPITDDFRARQLAL

SEQ ID NO: 1012526 - protein, 204 aa, Homo sapiens
WNEWMKNLPKHNAKLLILTRQSSYVEALDLDEAQCVCQSSSVCRRYLEETGHYQRESLSDVYSDCCNHCQDHSTRGYRFHERAPIETHSVNPDRVVVVLSKIVVTAKEAGEEQTGGSRDIVPVVEWEGDLLHKLQCYGARRRTQEPEISGTMLCQSIVANSRSQPMALGTVARWGYARCPVGPVDRSMMRYIMLRRSKTYLKGQ

SEQ ID NO: 1012527 - protein, 140 aa, Homo sapiens
MLGRVPTSHLAARSNAWSCINMLLASSASSSLFHSHLGDNGKVPRGQGYALWRYSTVSILPRSPKVARADECKRNPDVTILERGVFEKRCFERWLHRVGGHTINSSRVATVGFKCNSGSLGCGEHFTRYIGLLQIYVVKV

SEQ ID NO: 1012528 - protein, 133 aa, Homo sapiens
MSDAHTTEAGDVRDEELRYTMAGLSNQPTEQYVAPETPRERSTRGSPGRKRRPRAEGSRSLEECLRFLKEPAGPTLDNRDCPQSNCGTRYRKRDFTELVATVSSRTGGRKLGEKAGEDSGEIARKEGIGRERG

SEQ ID NO: 1012529 - protein, 177 aa, Homo sapiens
LLPLRRTVASREEMRCFALKPWDAIVRAPCNVGWSSGDLELPRLGGVLGRPFPASSHLWLVPVSSCAQCWTCLGCPAALSPAPRSDPGLVTWAVCCFPDCRLGDSRGNTQGLRPRRRPHGLAELLHGLPDSPQCDPGRVGNLPSEARYPTPEGDGATADGPGIGDEKTKEKQSENGP

SEQ ID NO: 1012530 - protein, 227 aa, Homo sapiens
TLVGPQRVPGCQAVRCVIKETAAPDTCVPETFWHRTCALQARFDDVPVFRMHLLHALACLQGPGVAPVLRCAPDPRGSVYSNCERSAVTIERVLSAVGLPMPRPASALPRWGQTRLYYTAQALAQIPPRGTPALKPACVLVARGQIHLGAEPIETHHEGVRAGLGASCAGEYRTCQTFLAANAGGLARMRSERAYLTKSLRSQRPSEETLPSAYMTGRDNLYPWAIP

SEQ ID NO: 1012531 - protein, 99 aa, Homo sapiens
RECQNAEESTVLCISTSPRLHPSQEPANPLLSTMSLPSSRSAVSGSFGRPCAALLGLLLLLTPPGPLASGDELLDTRGALPGRLRGRCVPVETLPVNLP

SEQ ID NO: 1012532 - protein, 256 aa, Homo sapiens
MSAQESCLTPHSSTIALRLYKPLSSSSSADLIFCFGHLESLTRRSYLRFCSRFCLGVALFRASCMDLCPSSPGPSLVTLTPVGIALLGCVGALKELRCLLGLYLGMLAAPVCHHRSPWVILISTQRAQLDAKLAGRRRENHPISTAATPEETAGRGRAGTMCSSSCAVAAGTTRRTGSNVLILRGNGSEAQRVPCILLQLVRRPTTSTILAYGDLCPILSRAWHPLARPDYSADICAVPCKKSQHLPGGLAARASR

SEQ ID NO: 1012533 - protein, 110 aa, Homo sapiens
MMVTLLSKNEVCAPEARTMMTRCKRRQEEWEKVRKPEDPKKCPEEVIDPRSLYERLTGTRRPGSEQELQRNTSKVQKHGQRLHEDETNFLDEVLSTARNYLAHCSDEKTT

SEQ ID NO: 1012534 - protein, 332 aa, Homo sapiens
MCLCNMHWGLWGLGRLNVIYQLDEEETRYLVKIPVPAERITLGDFKSVLHACPRCAKYFFEVYVIMDFGVVNGQKFHDEQRPCHPLLQLEGWYPVLRVLMSNSRKPKTGHHPGPMEPSGHELGSHPCSPSQFSPFPFMTNRVTDEYPKRSTIVGELPSGAAISIHVSPDTVKVAVFARPKTPYCKRKRFRLRKVTLGRELGVKSPVSDSKREEDWVPRRGTAARCVQAEGTHSGLAWKRRATKGRRHGTGPDLCAQVAMQNTSAAPIVGPPTYVTMDAPGSLGNTVRVSIWRKQPHREIAPTPQDGTLQFIGRLGSSRRLERCHTRGWRVRN

SEQ ID NO: 1012535 - protein, 118 aa, Homo sapiens
RLSPPRDRGAPGSSVLRAGGFYGPEAIEARYDVRIDARSREGGVLLDANYYGSLTQAVTVSLGLDADAMRCSYPSARCCPWLAAPIDLVFDGWDISSLNLAEGDAALRRCLDWGLQEQ

SEQ ID NO: 1012536 - protein, 111 aa, Homo sapiens
GRARCYEHQSHTHGERSYGCPHCGKAFVAELQLAISTCASHGRACLRLSVLFQWPFGLEAHDACSSRPCTCDSGLSVPSAVSSAVKAFGQASSLTKHKRVHEGACRCVQMA

SEQ ID NO: 1012537 - protein, 122 aa, Homo sapiens
MVVNELIRNGDEVTLAECVSTVLGAKRLETGFGTWFKARTVHSDVPMSPLEVQGVVNYTLELTGTRNEMRSSLEEQVLDFESLLFSTRHGEVPAIKGSAEQASPLEYLCGRFHEYTHLGLAK

SEQ ID NO: 1012538 - protein, 97 aa, Homo sapiens
RPDLVEARFWSLLHLTWYRFPVSQGLRGEVPMWVDSSLLIFVRVLSEPRDGAMLRCVAGDTLEHYLDKQLTLVRGVLLHCSSDHPSRGSAPYYSTEW

SEQ ID NO: 1012539 - protein, 108 aa, Homo sapiens
MILEKERMMREVLAMNACKIFQPVDYIMEPSIFDTLEERIFRLEMGLQRIVYPGSYLENYTRVCARDLVKPLLDPHVGLSFKTMGWLSPVPGFKEHFVCISHLDRGLA

SEQ ID NO: 1012540 - protein, 286 aa, Homo sapiens
LSGRNFRACEGGRLSSDTDVSSGGTLRCWRQHLKLPGPPEWTGQFCTEDVDECQLQPNACHNGGTCIQHAGMATADNVCQLAGQAEKLQIRISDDWCQQHSVLSMGATCHDRSGILNITDDTGATMRQRTWTYQMFTRGNALTLTLNKKAPGQQHDMANHREQHDRHRENTGTGTQVLTQPVDTKRKRTYQATDTGRRRNYTRDQRGTCIEHQNSGAHQPSRQPQSTATSRNRQPQGAHERSEQNRKATQPSSKEHKHPRENRQRQRNQDGAKQHVGSRQTDKAEQ

SEQ ID NO: 1012541 - protein, 84 aa, Homo sapiens
SDVGLWGAGRRWKLVSDGCSSAGGVLPLIPLAVMPRAVRPLQCLSSEEGTLFSTAVFSSLWIMVTCIPPHPFRISGLQWDSGFY

SEQ ID NO: 1012542 - protein, 294 aa, Homo sapiens
MAPTACNQAYRSAAAGWPAAGLCWKEPSFSLLLYLLEGPGGIPWLHPSLMATEGHSTSSTVDTACSSRLSKNDPRAEANPSRWAQSLLTQPAYRECFYPLVRYNPIGVSYSCLQGRHNTHSMTHMGANSHPYEPRPFRASPPGEATEKIGGNSGAYGEQELAHFSVSYIQFAGLRNSQNRLHHLRAPIVTTFTRQRTLQEKRLLFVVLFWFETYFPVVSSPVSLPYDKSGPFCADYDELSSEPFKIAIPTLYVCVIQPVWFPNPQLNYVAKTPSHSLPSGYDIVGALLSVVSIS

SEQ ID NO: 1012543 - protein, 127 aa, Homo sapiens
MESILHSLVQTGCLEENSSEDHCILQYSNRGQEFLTEFAPLCNHLLLRMVKNILCLDLVVRKDRYLTRRSDMKHLLLSSTRPSYCLSMEYTAESYLERLASVRSLVVTLRESLIGKDKIGHKPMRGG

SEQ ID NO: 1012544 - protein, 184 aa, Homo sapiens
QLYCLGFRIAEEAAGRELLVQWEALAENRQSNRWCAPKFYFHEALRAFRGSRYGDFRQIRDIMQAYAVYWPLGKEHTVSRLLRVMQCLSRIARKAENLDCSFDMEAELTPLESAIKCAGDDYTRNFTLTEGSGSNPVEKLGQGKACCSIILYQENKRIVNKASQNFEQETYVQRTPTKLMKLSK

SEQ ID NO: 1012545 - protein, 104 aa, Homo sapiens
MVSGRREHTHQYYACGRNIDRALGSTVAMGTRVAVINFTQELRSYAPCLETYTSPATTIARENYCRSEQASLPHNHLCYSKRVVQLTNNVCVGRQLNSLLFEIR

SEQ ID NO: 1012546 - protein, 146 aa, Homo sapiens
  misc_feature (78)..(78): Xaa can be any naturally occurring amino acid
MHLFTFPKPSPASGDSGGSAYVAYYIHVNGVLHMSGALQPAPGAATSTLRQGVWGQCASCIPPKSKLFSLTPAEVEQXDDDASYENVHASCSARPIAWEQGDFQQFPASGTNRRLAGGPHSRQVSLEVLLSSGQKVLVNVLTSDQY

SEQ ID NO: 1012547 - protein, 189 aa, Homo sapiens
MKLVRKNIEKDNAGKVTLVPEEPEDMWHTYNLDEQVGRQTDAHSNQSSKVQTEVHPTGTRWDMQTGDPTLTPHSLTWRDIEHIDLYKAMTRHDGINMEGPNTPNEDIEFMSRMGGLTNNQSETWTTQNDSYQTHEANESQGENKTKDTTDNAIEARAQMNPSMEDSRKTRGLTDQYSERAIEHKSAKNT

SEQ ID NO: 1012548 - protein, 174 aa, Homo sapiens
SCSVSEVSHRGVTSDPPSRFLWNNYPSETWFHPYPSLELGRAATTVLARRGTVFSGSDNTLTEEKEEAGQMGPSDGDYGSEPAYMFWSFEKGGVYLHHQLLRSIRTETTLIAGVTPCSSDTRDTVNDPSMPLWHHVRGSAAQLPNQIHLSSKNSTSIWARDSMCIHERGTNTIE

SEQ ID NO: 1012549 - protein, 31 aa, Homo sapiens
MWLGLLVFAALSVFIISSFVCVLDSVVAPAC

SEQ ID NO: 1012550 - protein, 253 aa, Homo sapiens
RSPPGFTGSETLLQASSGTAPLCLLLLQVSTIAAPVALLVHSGCCPCASPWGRLTGEQLLCASLHAVVMQLNRGAHPGQGRHGGAGHPHSQVSGPVLLALLQRSHGDLSRGKKRFSQSFPERWPAGVLAVWSGQTKPCMVCQCIGARGMSDQTSELVQGRAGENLSKEAWSPKVPDVLAHGSRVRAVSPGVKTPCGHRGMTRSKVVMARFRGTNWDSKLTLTFIRNPSGVVVPGSQREEHRAIGQKETLTRTR

SEQ ID NO: 1012551 - protein, 146 aa, Homo sapiens
MFEKEALSEQTRSSAKIEAKRQTSNICRALGMGRMGELDGVALVKKLDREQCSKESQFTNGKLAFKKAIKVTVATKKPTGGQIIHIEFVRKKRLVSCRNLRAKANHINSEKATAKDHRHLSWFTLLNVDWKSFSKLYTWIGTKTIG

SEQ ID NO: 1012552 - protein, 185 aa, Homo sapiens
KCWYWSGDFRIKNRTEAECEAGTQSEKERLDIERRKKSGGTCTQLRERETVSYTETLLKCTRQGSPGRAWEQKLKEIDDGVAGCEWVAGAVDLELSIMEVKDNLKKAEAGPVTLGTSRGHHSYLDECEPRVPRIAVTPASDPELYPSQLWLDSSTRRTGLSRSVVTGEKVDCTPAKPRQWSEERS

SEQ ID NO: 1012553 - protein, 175 aa, Homo sapiens
MPGAGENNELMDRLPVVCLCEKAYLLARERFAGPPVGFSLDVLTATPPGLPTLRCRRSLNMTFSSRLDSRKNILKVAFLNLAASPGMAGASTIVPYHRTGEKPPLLGSVTEVISVDTVVAGTYATCGRKQSGPDSPDVLEKRLDGMDRAETYHILQAPGTINSKLLELEPSIGKV

SEQ ID NO: 1012554 - protein, 95 aa, Homo sapiens
MGNEREWDATLNETQHFTSCMKTPIILSKPPAERSKQPPPPTAPAAPACSSPSVRSPSVLMKPLEDGEGACGRDMVPLPLRAPPTLTPEDPLKPS

SEQ ID NO: 1012555 - protein, 310 aa, Homo sapiens
LDLPGVDWVGGGSSQVDQVVRLAPWERSPGPSRGGPGGWPALPPVDRVGAGSAGRSPEARPGLHTCFFASKPRRGVQEKALQPRGKNSQSRQEQERGRGGSSAYARKGVMGISEGQERKREHLGKRRAGVGLTGADSHPWALLRSQGHLPALTLEAPPTPKLPAHDVQLGGLGMDVSHLSCTDQRKPRLKGPRSFLRSPHGRGLFLWGSVGPRSLLEHAQGLAVPGRPGQLISPGAMALFFASRGIHWDPCNFSGTLFESEGLLLGLRRLMEAALWALGTFCVPGTGSFQDGGVLLFRGFRAPPFQKGHI

SEQ ID NO: 1012556 - protein, 124 aa, Homo sapiens
MCKWARTSAQSKTAGNPGVQQGTPATTMTKTSGNVPSDSQPPQTKGETGHSRERETGGRRSGAQGAARASAARRRDPDTRQQPEKPRRDPEPSTQSPGARVRRRENGGGRASHGERRRRGRAEG

SEQ ID NO: 1012557 - protein, 236 aa, Homo sapiens
MSKAAEPQSVDDRRRGLSAFERRYAHYWESTAEHARRTSTRSLSDTTSTSSNRDDHPKQQAQTKTTDQRVGSRTRQTRGDQPSDNRSERKIGVTRKEQVSGSDSTDSKPEATNRSNREQTKPETQAQVTRGPHPEADGRSPQLNLSDGQRVNRTETRTGQVTKSRQGAPETRQAACENGDNSQSHEANAPKDSYSERRGSNHASAAENGTCTGTNGSTRHEQPRGRPEGGREREYT

SEQ ID NO: 1012558 - protein, 223 aa, Homo sapiens
RTCEWSRLQWKEPPTPPDHVAEELVLERCDLELETNGRDHHTGDLCLGELLVCADVGQPFWLTLHFELAATTEASVDSLTFRCRDLAQPLSQEAGTKARFPQEMLWSEGDWTATVVDQQDCTHLACMLTTPGNCPHRPVSHSAWRASNWLPGIQLRCWAHFILLFQTPWCPADAGSTLDSGRRSGRSMSSPRKGFIYQGSAKFIKNIPWNFGQYDRWDPRRSG

SEQ ID NO: 1012559 - protein, 270 aa, Homo sapiens
ARRNGHACAEPQCRVSRGGWGCSGASSLGQSPAQQLRVTCAAQCGPSHLAAALRVPHVSWLSSSACLLGGESWKEERQIWWSGMDVSRGTPLASSAPFRCPELGCHLLLFLVIPWTPSKGTKGNMLWVQLPQEWTVRPFPTWGQVSLPGNSRFLGHQPACPVLMQGCGHELTLGKSHSQQWTFVRVQGKELASQTRPALQEGTFVIPGTVPHQWAGGLSGIFVNRVLGFGRRQQLRGLRLVPMGSPKWTGLLKQMGKAVIEKFTLKGQFK

SEQ ID NO: 1012560 - protein, 224 aa, Homo sapiens
MCRRTRVSAQLRTRPDSQVQGRFSVLSAILGASCGLRGWHPKPMMPMCLNIACTFKGRRLGLQRNVWHSAWTLQDSQIIRGEIITPISLRAPSRRESYQLGELYTSAPLKALKQQSPGARYILVKTVLKEFKGDTAVERTLGAPKRKQRIVASEKGRDSEMGHKFFPQLQNALQYGDVSDWHECAGKPAPFHIDKFYADNFRDKPSPLSRTRLFKGNIGSEHQR

SEQ ID NO: 1012561 - protein, 333 aa, Homo sapiens
WFLTGAHLWAEPGARGGRVWNCPGIDGISLAVVCCCIYPEYIQLAVHPARNGPCARCVLPDTSVPNAVTRWWFLCALVWLQVCPPRGGWTSVCPQVERPLAAWQLPGRPPPLPVLRKPCLARFARGDKNESKFPNRGSRNFPRRRLPPAPVSGENPRALRVSNAEIQMCGSGMRNGMVAAGWSKGRPLGVTQPGPGVETARRKGGHRTFLNNNAKLPRPRGPVRKKYSKGWARDAPGSEVRQRIKTGAKRRQAYGKKGMPEEELGRVERRYRARAGGQYRRKRMQSEQGDTEGPYGGRDTGSHEKEADGENAPQSTRNTRGPSTEPSAQRRTK

SEQ ID NO: 1012562 - protein, 300 aa, Homo sapiens
AAPGALFASLGSCSYLVQRLDPQDSCVQHGLASGSRGPRGGTRAAGGTAAHLLLVSRSDAHDQPGDKLAVIERRVYDISRWAHAAPRGQPPHRPPGAEGRHGIAFRAFHQDLNFVAQVPTGPCRLESWLRKNPGQDGARECAGLVEGLTEPLHQAQAEDIEGCLMPVRTFYAFLTGATILAMGGAGLAPYLGSWVLGWVPSALGGFIPGHRLRAPVPWLSAGMTWASGSIFKKSLVESDGGARRVRVDWGGSLEEVALRPDASRDGKVPGKFTEANQAEGPKESYQAKGTQDDKDGRPAF

SEQ ID NO: 1012563 - protein, 80 aa, Homo sapiens
APVTAPGHGALGPLWLLLLGVLLLAAPIDAQCGVCACLYPRWWMVMRGNVCHSGLHPYGNPRPLYAGMVPYLTARELAPA

SEQ ID NO: 1012564 - protein, 67 aa, Homo sapiens
EHQLLRLPGKRMILNKALRAGGPRSDHHDEPCGGEGMWDPPLAPCSFIEMDRGCKTKVEKSDSEKGK

SEQ ID NO: 1012565 - protein, 265 aa, Homo sapiens
KVSPVTNSDAEAVTLEDYLRRSKQKSLMTKYNISIHIAQYSSKESTSYREATQQISLSTRKMEVLEEKCSSLTQYFGWTGVSKYHGYQTSCENDHPGTIKINLSPLEAARHPDEYKIAALVYYSCIFIIGLIVKHHCIMGFQLYHQEENQGNHLYDECGMELDLHIYNDFTLSEVYHYAEDEWAYGEYLLADSWSSHSVVPKQWFMASGLVLVLTDTWPLYSRSTPIELKNTCKAVLACVGVWDNDPDHDTPLLLVYKDPDKDSS

SEQ ID NO: 1012566 - protein, 208 aa, Homo sapiens
AGLLGGAGEDSVRRTASDGRAEGDRPGRLLAIGLHELVTELPAAALMDEAGASRPLLRGLQGNEDAILGRPTTCDRWYSLYHEKSVERACTSGMPYQDSQVCEIGQVQRRVVRSAMDEEGYREDRGCFAPRKAWGLMLATLAGQVAIVGFTGVHRYKRACRHRFVNACVPRWRLRSMPDSNFSGEIPLQEVIHNSRRIDHGGLNPGVA

SEQ ID NO: 1012567 - protein, 135 aa, Homo sapiens
GRLRRRLSADSELARSPCLESGIMDVLAEANGTFALNLLRTLGKDNSKNVFCSAMSMSCVPVPLCLAWRAQWDNMRPAQDGPDSFLSIKVAVVETSTQRRSSLFIDPKDEHRLGHAGLALRIAPTGLPVAGRTSL

SEQ ID NO: 1012568 - protein, 267 aa, Homo sapiens
LESERVPLCMKEAIALPEPVRSSEVRKTYRPCERASCLLLLLLPLVHRLCEHSYNLVSLDDEDFRVRLHTSPIPQPDWSEAFQCVSAVEVEIHAGGSLDLEPFLKRCDADADPSCSMLTTGQCALLRAVAHSGSRTGSCSCYLVRRPAVVLAYSLAQGTDVLEDLKITGYHASGASGKATGVALSSLRLRNCVVGDRAYLAAELAAVAQARPQGTEPLPKHTRLPFPANRFAAFPGLTSLDLSGQSWTWANGGLMAGLWSQQGSRAS

SEQ ID NO: 1012569 - protein, 247 aa, Homo sapiens
MRRRLIPGASGGDDAAIRWPVADPECCLSRPRCARAPRTGPLAVRPCHESGEPVAGRPAPSRLLFANFNHGQHVPICWIRKSGYKFFSLSSVDKLEQIYECTDTEDVCIVERLFSSSLVAIVSLKAPRQAKGLPLLRRELRSANYSYSNTILAVKLNQAEADYVCLEEIPVHPQHYGDMKVAALRSGRRLETLAVPCVALVNSTRKTCYLALPQGKRRPIGRGAGLQKPINLKKLETMIPRVTESSI

SEQ ID NO: 1012570 - protein, 208 aa, Homo sapiens
SSAGSTRRRVSMDRNLVADGAEPGPRSDVSPPQAPPPRSPTTPSDSRRPCTCRRQAERSLPRECWVTGSRLLPYCVSYSCRLSVLLSLVPGLDAVSTGWNAVCAVLRRQDAVTKSPSSKMRVQTVAVSYRLAYLSEDIDRHRLKWAENHARCRGLYQNGVQPGLSYNCWVDEKGQRGNRYSPAVSMFLTCNCVEYRNKYIQTLGVQMS

SEQ ID NO: 1012571 - protein, 121 aa, Homo sapiens
MGTKVGYPLPLEELKEFFANGRAGSVRLIKVVIEDRAARAGCLAGASNAAGIRTMTVAVLATCWTAQQPCYLIYLPRLTELLSGFDGSYLDMVALITYPLLRLERLLYRRDTAECHQVNIT

SEQ ID NO: 1012572 - protein, 119 aa, Homo sapiens
MQESYRVINGLRAVNKRARGPVGNPQDLESSRLLSLEEISGGYRKNVLQQENARKPKKGTKTKLIVVQTKAKSQIRWTVDRREKQTLPSLNLSATHFPPRVVVFRIPVKGPLFSLAIIH

SEQ ID NO: 1012573 - protein, 91 aa, Homo sapiens
MASAGGPPPGGQRDPLLWGDVGGPDSLIVRVGCHLRGLCALDALVARMGLPLSEPRGHPVLRKFAGGFMGWMAPPPRAGFPDIPTFAIGPS

SEQ ID NO: 1012574 - protein, 101 aa, Homo sapiens
DLAGSAFTSERPSPWTSQAARLRQSSRVHAPRRQYVYLRAPESTDLAGSAFTSELPSPRTSQAVYLHGNWIEALTFKSWLLLLPSRQRAHPLPSQTPEAPT

SEQ ID NO: 1012575 - protein, 295 aa, Homo sapiens
RRSPAARRPCPFLPDQQLEALTPGKSSEWPGSGSRQVVITNFYPGHGRANCGQETAYWKNMLFGSFYLLEFYPGLSLANSRGSVGCFTREDLRSPGTPVRTCSLMHRGRGSDLSCVLVLPTRLVYQFSGNHLADMGKSRARLDRLPLLPQHVRRASTSSPCIELPTVSWRIVHPVKSRQAPVGPVYARPGPVPSCGWWWRVVHGPAAGVAHRTVLDQCTRWSACRLYREKASQHALVSLAVAFTFAVHQPTVSCYLLIIRSLRQGPACWEKRLKTKEVRMIAIVLGIYRGHASVP

SEQ ID NO: 1012576 - protein, 34 aa, Homo sapiens
AVLTLPFDVVKTQRQVALGAMEAVRVNPLHVDST

SEQ ID NO: 1012577 - protein, 224 aa, Homo sapiens
VVASTALQDPRADSRRPEFVLEWQLFFCQLIARFVHYINIYKTVVVVSTLGSQPETKPSLWDRLTWMNDRDCLALSSCYRLAHMTCEAEMVALYVEVELSTEERRRSIPVLNGGHELAVPGDETDFIRRSGVVDEERDGKVGWRSPNLVTHTLGRLSMYIIAASDCASAPKSIIWVGESCQYAEARMARGISVEGYPAKYPVRLMESLKRSLHWERLCLGWRAS

SEQ ID NO: 1012578 - protein, 260 aa, Homo sapiens
CQTQVQPSSQNIFCILKASRWVHPSMLMDRKTKTSEESQRSSCQDRKESPEALQRVLKSRDCAVWGQALALCFRTGNPGVQTSVRCSPESCLEHNGCSALLPEPHHLQRGSSSQFMDRKTKTRGGGLSSCSEETFNSFTCLDLAPSQETATKVMKIASTHHPSSVTPPINPSLRSHPLSSRRLSPEKRQAPGSSSIVGSCLPWSICNVLKSFSLLLIQEIQDRVSPHPCSRKPPFSGLGFHSLSLTSGLTRKAPSLANAL

SEQ ID NO: 1012579 - protein, 370 aa, Homo sapiens
STPVLALLGLGSGSLPRVPGLGGLSWRPAGAQQPEVSGPSGATLAGPAVLVWLRVLWLPGRCLSSPPQWSPSADYSMYFPGLCLLPALRGMLAVGSCGLVPVALPLAQANLYFGGMTCRVFLAGVLALPGCAGLREVRGTWGCGARAPLSAPGETPCGTTLGQTEPMGRHLGHTVKAPATARELPEEWAEQAAGRRKGNYGKAPPKVGKEAESWAALARHITRTPDVALPGHPPLSDNPQRRPPEAPGITPPRGGAKGRTPTGASRARPNGARRHNPLGPTKDNPRKVHRPPRKDLRTRNALSNATNAKAGHDEFENKLWPRGNPFNKRGRQPRVSATRCALCTPLAERLWRFTVRATHLKRTPLYFDPR

SEQ ID NO: 1012580 - protein, 78 aa, Homo sapiens
LAVVPHSPMERPPGSRGAPSSCPAPSLGSLGRLLPPGSRPRPRVGPLHLESNLSLNELLSNDELSVGDQTVNTLLRKR

SEQ ID NO: 1012581 - protein, 402 aa, Homo sapiens
  misc_feature (88)..(88): Xaa can be any naturally occurring amino acid
GVPDNSPKTNPLCSSPSVPSLGKDGPMVPRKGLDPSCALGPSALFRQKPLQASLSGSPAPSFRAFAPRSIVPRATIPRVRGTEPDRGXKVAQYLEHMGLAENRSRVHNISDVNTGGPGGGTEEIMLPISNIDHQRITSAGIDVVRRHAAGGAVKKLMNVSDGAIRAVCVGAERVKGRLHGIRLVIGLFHEMAKASEGPLRTLLYASVPSLPTRISPCKGIRRLDRTLARSSRLPRGALRCPFHPRPLGGDNPGRTGALTCARSFDVGQAARQGPAPGGPPPRGGAPTPGGRAFVLTVVLKGAGSISSGVSRPAPWWGSTLVGALLGAERYRRGEDTGDDLPPAQSLGVTCFRDSCGGWGAPLACPRCWLQSELLCTGVQTSGVLGNGGGLEQWRLVGPLGNY

SEQ ID NO: 1012582 - protein, 157 aa, Homo sapiens
GVRWLLARAPAPVVSSTPREYDIFCSHRVGTACFLKSPGCVLAAMSRATLLRCTELSIQVVTSRKDQWDEYAEAIDKDEADYEVNAGDPSRPCSNTSDYCQSDYERGRPKKSYSVARPLVNKSVSQSTQRAEAILSESMDTTMNDKLPTMKIRGSHP

SEQ ID NO: 1012583 - protein, 288 aa, Homo sapiens
RGLPYTGQRSGLRSLAARLLPLGRCSPSPAPRSTLSWRRHGARASLAGGAAASTTAPCGALPCGWLPAARSRWAPLSAPVARALGACFTRCAAHPAACSLRLVALSEPALALLGLGAPARALSRRAEAALFFSGNALLPGAEPAAHCYLRAPIRPSPAGQLGRPAPPCTWARCCTVTGEPLGRLQLQGAAGPRPFSRQADGRKVLRSSIREFYAAKPCSTWKSQTTARRLGHVRIPTVRAPNVFYDWYSQILNNATVVLALELTTFHKGMKSLGDFKVLRIDTNGVSE

SEQ ID NO: 1012584 - protein, 162 aa, Homo sapiens
MWGAPWATGPRLEVHSSIHLACPVARLPCSRPVPSDILRPDSSTEVPVQALICWMAALAGPGLGPEPHFHLLSTSSASAAAGPRAPRVQDPLAQGEAASPGAALSTFSPDATGIGNRIYYGQQVRPVMGMSPAQHLRCMHRQATHISNQLTNPGGWRQVEQG

SEQ ID NO: 1012585 - protein, 36 aa, Homo sapiens
MNVQKILRYNKLCAWGPNALSSGHPKSTFGRRKALL

SEQ ID NO: 1012586 - protein, 70 aa, Homo sapiens
QLDVWMNYWKLLSVLQQAISNPEEDLLEEVMGGRVLTYYVKLLFGVGHELHVTLCHSGNVSWMTNGDLDL

SEQ ID NO: 1012587 - protein, 289 aa, Homo sapiens
LGVWEEESGAGRERTRTGVTAGQVAPGRGEARGLEHHRTGGSGVASAPKEAIGEPGRGDCVDGPLASWAPVCQRYEADSIVLLLLVPVLAGSPPTVTDNKYPQPLPGAPRAFQARRATMAAMGLAGPRWPRRPRRTRPGLRERKARAGGRDCRELEGTPGREGEAGPAGPIGPAGECSVPPGSDFSAKALLRAGCLRRLTRPLPFGPGCLVNEQGTITDAGHRPSSPARCLGSTTFAVHATVYRGQAAVGSGEEWRIHWLLRSRYSGRVAQGKPTSSGAALWRLEPEGP

SEQ ID NO: 1012588 - protein, 353 aa, Homo sapiens
GQRSETLSSLRAGPSEPTAREGGRRGPWLARSAKLDPATRKGGGGRSLEPDPAQTGPLAGQSLLGYVESAADRGLDYGVRESHVRLVALESLALSAAPVPESTSGSKPPGPSWRLAPSPDTHPPGPVKEPQEKRRRGWVSGLSSTYGSSSLTYSPVLAWVGPRSAEGPWTPTAVPIPPDVGALEPFSELEARHLHLLRTEDTLVHLGSESMRPQRCCICCPGFACPRRVLERFTHKHLHRSALQSWLYHLDQTGGSTVRRNWVHDRVEAQAKGNYHGTGQMGDHEARRSSCLGSCVKWDPSPALLHFGGPRLARCIGTWAVAINATVLVRNDSTSCLSCGTIPVLVQIVGNGF

SEQ ID NO: 1012589 - protein, 135 aa, Homo sapiens
MESDGRPGRCWPRWGSMRLELIRILFVPLHLAQPEKPSEALVGRLEEHRSCEHLERTGVSRTHAVTSFSYWRRLTQLNGQYARLMREMIGNSYFTPIILGEIIESSASACSCSLLGVFHGTRDLNHYAGRSWQDG

SEQ ID NO: 1012590 - protein, 149 aa, Homo sapiens
GRAGSCGGSAVKSCALSVPCAGTRHLRAGRVLERGPHGASPGPPGRGGCDALKAGRYKGSWVLRRWRGALHRAAEATGVSCSRVPHCPLPSRSREGSTWGTPRPEGRGLEWQGEGMLEWAEASPAAARPALLWRLALALRRSPCVASAP

SEQ ID NO: 1012591 - protein, 294 aa, Homo sapiens
ADSKEGVLPLTAAFHCPNFIRLHSQRPHGGSAGPTRETCAAAISGGEGFLENRGREGCCICVKPQEAPKELVIPFDPEWSSQAGTSPALLVPSHMILGPCAGWGGVSRHVKELIAESKKSLEEREKLRVSDPTLAIPMIQTQDAPPAGKGQTAKPWSEYSVQQRELTYEASPRGVPMVLDQCCGGMGWKPGEGIGRTFNQVVKPRVNSTEAQGVGLGANLTEDQALSPNGPVPPCQDQMRQHGERIRKDQALGLGAWEEPDGGFFLALTEGLYGKGWQVPLIPDDDRAMGSGLA

SEQ ID NO: 1012592 - protein, 170 aa, Homo sapiens
MASVPCIRVPKCIRGAAACRKLVATHGLSVYLARVDQMRGVCVLEAVDLAVLQNMRDSKHLSPEGWSYRGPQSDIDLSAHLVGPLIPSGARDCGNRLDPGSKWRTNRCNSPKQGSTVNSTMRENSRILREQRKRLTPNAHTIEMRPDNPVDTTRIHGDVQTQYPIGPGTL

SEQ ID NO: 1012593 - protein, 243 aa, Homo sapiens
TWRRPEPEPRWGPSDPPAMGDEDDDESCAVELRITEANLTGHEEKCELCENFELLKVLGTGSLRATVFLVLELPWLGTTLGKLYAMKVLRNAALVQRAKTQEHTAHLSCSVCWSWCCQCALPGHAALRFPDVMPSLHLILDVIVSCGWWRLFTADFYQAPVLQGRAEGALVYGGEIVAGPGTPCTSSASFTETLKLERCAAGTPRGPQFVLNGTSGPDAIEVSLRDVKYKDAGNFVTLLWHQV

SEQ ID NO: 1012594 - protein, 207 aa, Homo sapiens
MSGQVRVTVQGYHVNASVLQGRVIDARVPTQGISPCVISTLVSYDRVLQRMTPRDEPSKFAPTEQTRTKNSQYDIACCSTDGEEYALTRASTEPRVISAERYQRQFANVRMKDLEAPDMALVHGGDVEGRIVRTIRGEEAGQGTFHKRVTGGYPCARCGGLSGIPSEAYKAPPGPKDFEGQGYGPLGEGGTSRGYWIEGGPYSVPSR

SEQ ID NO: 1012595 - protein, 75 aa, Homo sapiens
RVSLGRGCCRVCALRTEGGCPWAWTAVSRLWREAGTGAGCALVRGTWEAAGTWTGSLMSAQPDCVPEMVRAPLRA

SEQ ID NO: 1012596 - protein, 127 aa, Homo sapiens
SYSQSCGPTAAVPELKLREQDVECASALPSSSLSQASSCSRSPQEVLLHSEQSVRADNQMSPNVTHGVPHSGPTEHGRSMGMRKDKPQWMKFNEAWSFHVPQFMVCAPHGMKRGGLIQGSRGPQALS

SEQ ID NO: 1012597 - protein, 107 aa, Homo sapiens
MFAAAPAPCAVTVLVCFLLLLLVSDELLACRCGDCSCGPVGLVLRSAGGCPCAVAAGVMVWLFSLHCMVAMMVLGCPAGEPLLDVIFVAYLLGTNTKCAKAYFRFVT

SEQ ID NO: 1012598 - protein, 217 aa, Homo sapiens
  misc_feature (89)..(89): Xaa can be any naturally occurring amino acid
MVQVSEEVGGGEPGEEAASRWDMSDRGSLSDVLEVSRTRVRLSHSHTTGSVCHNKLTMVPPNIAELKTLDGASICELINRKRGKLVLTXTTQCKPFSKRHERRSEIPLAVIEACSIFWRTTGFGSLPALEVRDLTYNNLSENSLPGNFFYLTTLRALYLSDKIFEILPPDIGKLTKLQILSLRDNDLISLPYGNSGELTQLKELHIQGNPLTVLPQN

SEQ ID NO: 1012599 - protein, 300 aa, Homo sapiens
WRRVGGRMESGDEAASRGTCVHLRSATLRDAVPATLHLLPCDVLSVDWALPLVWALLHCPAILPVAPDVDSERVCFGGLLSTVCEMDVLAGCLTVASLGYCDVCQKRSVSDVVKPRTPMLGFLVTRLTQRGVSRLELLTIDTAIHMCSQLPNFQSSAFQPLMRRSRRPQFLLSTSKLPKIVSCRVAITTMGPKPMSCKAEYQTAPMCCPMEEKLDVKCSRSMAVCKNNFFHEYDPRRKFRLFTELTVIVLQRTLSAIHYMAATPVSIHPVRTTRKFNTGEVLLIRRRATRGFKRSGRADR

SEQ ID NO: 1012600 - protein, 241 aa, Homo sapiens
MAPWGKRAGWLCGGVLLDISGVLYDSVRGRRHGHRRARCEAGGQTEQRSRLKSEVLHQLSLQKSRAELVVAASGGWDFDISEQEVTSPVEPACLPDPEGARPATIPASSMTGVRSEFDQDEHIQPKLCGNLQDAGESLTYQNMNNCLPGAHGARKKAVHQYHWEKGVTTRRALDLMLDEGPQMKALDMPVGIQRRRMEGGSLTPGGYDKDKPMKPNRQWKPSKCDNGNADDIDGYIEEDTT

SEQ ID NO: 1012601 - protein, 202 aa, Homo sapiens
MPAWESTRGSWARCEYLDEPIRERMRIDIANSRIIPTVSFRSKVGYKVSFMVLPPLGELKLMSLRVQQPIRCEPWEGGQVTPTFLSLSRTGASIGISNLWGPPAPSGSRPPPPSPPPDPWGLWWSEPLEGWGATGRDGLTAAGSRREGWLVHEALTIRFPIRTQGQGTTFDHSEATPQHTLRVIKVNDRGLHRFAQVERPSV

SEQ ID NO: 1012602 - protein, 187 aa, Homo sapiens
MGLSSIPVHWDLASGGGDSKVHQPRWASDYLLHFAGSCCLTSTVSVSPWPMCTDAGGPSVPWMECDAFQWMSSLCLPWTPYGIASIYEVHSVPCAVALASVAMGMIHISSASRDQPGHSCWDRTRCSCGTCSPWSVFFSISHLLEPMLLNVENNTIRPPGRLIGPDSHGHSWPHGEPCAWPSDSKPS

SEQ ID NO: 1012603 - protein, 287 aa, Homo sapiens
GALKSQVQAGKEDPVRGTGSVSWMPPEVYPLEKTEQVWISEAGSMYPEINDVCSPGSVLSLLADGLPRDDLQYSVWESQNEQLQFYSEPVCNVLACWVSCLGLGTWVTFGGQITDEMAEQLMTLAYDNGINLFDTAEVYAAGKADSVYCGQHHFTTERMDARSSLVITTKIFWARKGWRLETGPVQERTYIEGLKASLERLQLEYVDVEKPTVRSHNTADATETVRSHDPKFINRREAMYMQGNINASEATKEEPWEALTPEGPGNHNPEPAPICHQSKKTTHMTQR

SEQ ID NO: 1012604 - protein, 202 aa, Homo sapiens
MGIGVSLLLAVFSNTWGLPECGPKQALQPRKYPQEHPQDVSWKKPHPQLCSLQGRVWPLLCSQSTPQHVSARCVPIPRGEREMAYSHILGVFPCAQFLTLGHAGPNVYPEKRAVAALGDIEHVSVSGSAVEPCPQEVGPIMGSRKLVFPITVRFSVKVGLLCSDSPCARTPVLVLWSNETLEYNVWQQPWVTAIGGMDLVAR

SEQ ID NO: 1012605 - protein, 262 aa, Homo sapiens
AGAGGRNGGAGWVSPAPGRLHPHRAPGQLALYCHVCTSAYAKKDTREVVAIKCVAKKMSEQGIVWMNLLTEIEILKVHSTSPHCAAERLSCGDSDNIYLIIVSFCSSGCDPVSLHPYPASDSCLDDSVGCSVFMQAITLCCPAIPAIERNISHLDLNAKNILLSSLEKAPPKTGRLWISNNNMSPVGHEKHCAPMEFPPLHWPPEDGVPAGSMTARCGPLCQWRDHPVLNATHQGQSPPYLTVHKGYDTIRETSHKQETTTR

SEQ ID NO: 1012606 - protein, 190 aa, Homo sapiens
PLYTLGVNYPDENVDSSCSPVYIAIFYTAAILGPRLTVLALIVEGCPCVENIYHERHCVHRRRPVRRDSSERAPLLVFGRLWMGSCYPGALCVRLRISYTGTFPIHVWCTSTVMLASVSTATSARSIESGWRTDDADCNGSKQPSEVKRLTPSLKGSYGEQSHHEDLDLYSYSLVSVLISRLTNSYIHAC

SEQ ID NO: 1012607 - protein, 328 aa, Homo sapiens
LALPTLCSCAWQSQRSRMRLVRSSGPGQLARGLAVEGGSRVSDPHAPDAGLGGVPPAPGLLTVTYHTHSLSKLSSGAVERINDPWNGSGGLPFIQGGGLCMCVHRQVAVNQQAGALLESRSDVGKVDLDISAALYETGPYSDIRHELQDQICWGLVQQHANPTLRSDLEAAIKMGQAPRATKPQAQEATNYTVTPESLMQLGGTAGKLGNPMAFLSFGESITGDNRPVQDGLGASGNTPGQTEEGWSNANYTQSRWAPKCNKTYRKRQTGKGNERNGRQGKTRVMQCIEKTIGYRRTAGTYMDHGAWGNAPGSVGPLCSGKELALGLT

SEQ ID NO: 1012608 - protein, 187 aa, Homo sapiens
MPPTFPLKRQTGPYKLGRENGGQDDLFLSRPKTTTLQLERLCNMVGRRRQETHHVKRNWDHEVYYGPTRWKTYPSGLPRKQLRNPSGDTWRTFRRWHPYTREPELIFHHQQAFLIHPRAKGPIIFLHTINIDRGAEKVGRPRLPYTTLNANTAWRRHYPYARAVDVALGLCQTAAHGLNVSNSSITP

SEQ ID NO: 1012609 - protein, 220 aa, Homo sapiens
GGLHGRMTQNTVIVNGVAMASRSHPESTHVDVHNATRSQTLTQLLKAGGSLKKLSFLTLEVHVCRIRSSQDWLGGMLCSRGDSSILAGGFVMLVVHCEEVSRVLGPWTVLSAVRLMPSGRGRVDDRRQELGPWSMEGTRDKTVLAIYPDLHRNTGDGLCATAYGLPVVRRAGELSVYIWQKLEPFLYIDDCAVIAIRTLSFPYLLGVTSMDAGRSPTRNR

SEQ ID NO: 1012610 - protein, 285 aa, Homo sapiens
RRRQRRTLAPSGGARACGVRVSRVRAGRDVCAFESRGRNGARPSALAAVSLSIRRHHRLLCPTAYLLPTWMYAQEAVKEGLLTAVGVRRNETIVVLGCRERQSVRSNCRMKEQMRKICALDDNVCMAFCMASPDDARIVIKLVALGWTCHSHLADCRSDPVSTVASTFTRYICQVLNATLYAEQWAQRQFWHLCPHRGYLTLMALLGSIRLTPRCTYHAWKANAKSRGAKSRALSSLDEELYVTKPLNTDDSDPLNAGDQGTPAKLVQSGGQNIELADHEGKQSL

SEQ ID NO: 1012611 - protein, 344 aa, Homo sapiens
  misc_feature (75)..(75): Xaa can be any naturally occurring amino acid
  misc_feature (99)..(99): Xaa can be any naturally occurring amino acid
  misc_feature (117)..(117): Xaa can be any naturally occurring amino acid
MLNALPARPVRISEVRKTYRPCERSVLLCLACLTCCATECDSRLQYTQQLETLDAALWTTGTIFACAVMRDFIPXPSETPDVVVAEDTSHGVMLVTSLXGWTVIASDRASIIQTLAXPLFLKRDWIELTGDVPNTLRRESNAVHQRVISHPTDCCVRSQLLGEAGNTGIHDFKAIWLVTPLSLLHKRYSLISNGTLTARMYLTDLPGDSSAFRHVLLGNAIRVVERLFTGVCCPYSIACSDGGDKRTGSVRLCSDALYAMVRSNGPGPLDGYLDAIWPNSIASTLAFVLSETKGFRAPFPVTRYPIPLEALVLDQIPWIMGPKRRDLGMAGLLLFRKGFPGHST

SEQ ID NO: 1012612 - protein, 68 aa, Homo sapiens
  misc_feature (12)..(12): Xaa can be any naturally occurring amino acid
RAIQHCSPQYEXDRHGPERACSRDQSTLPDCDHSAYKDSRSFPYSCKVFISPGCVLAMCACLTLSSCG

SEQ ID NO: 1012613 - protein, 30 aa, Homo sapiens
VTGLHCVGDTYPSNDRCCHECRPGNGMVSR

SEQ ID NO: 1012614 - protein, 259 aa, Homo sapiens
LGFAWTAPASRRATCVPQRRSTQAQLVPHLHQYLKKWGLTLPASAIWNGLVCTDGKPVCGVVCLGGHVGRGPACGTSALELTSASSASCPSWARRLVSPIYGSPPRTFRASPLSHDAEALPVPLVSLPALRSSMLGTLLGTSFGLMPWVQAWLGALAVTSLACGCCPGPWMVSRAPRTPLSPSSWTPAMGLCVEPELLQDREAPCVAAVQATSASSSDRGPSRRVSALMPLQPGPEGAEGMHRESGSPVSEVPPGDLLS

SEQ ID NO: 1012615 - protein, 265 aa, Homo sapiens
MFAISNVNEETRCMARERISLVVGERVFPPAFFRNARLRRSRRLRPGPSAGSGSVSARHVQARLPWRPWCPRHALRGRSVPRALPRHWPFPSERIMAKTSEPVRPLSPGLERQRLDGSQGKKLLNLTARRMTLYDTPLPAPRLRGAVKRHCSVNSELWKKQTYRDWAGWQNRRAQSAAGQNTLLLQSYPSQNGRAKTISKGRDKKKAGPYTAPRNRATRPQSGQTLGAIKHASNDIVLTTTAVADGLHIEIVGQTRSQEPNENKH

SEQ ID NO: 1012616 - protein, 38 aa, Homo sapiens
MAAEQTPGCALGAACLRPWPPLRPPRASFSPSEVQRRL

SEQ ID NO: 1012617 - protein, 310 aa, Homo sapiens
SGGGGDSVRALVALENPAGAARRRRRAPRSGGGWCPFPAACRALTSSPGEETSRPSQDGRYMPASSTHGSCGSSEPLCPMAIWWREEPPASWRTSQYLLTLLETDGGPPGLGGLGTWYPLSSTMVIFAEACNNATLCGGLEATFMNPLRWRSTERVLRYAWRMRAGARRGGGALAVGRTGGERTPPIQPRECFQRISRRLASRPQAQSYPHWKLLETWEERLLRFFSVSAQAVYTAMQDNSFERLLLHAVCQYIDLNLVPVLNLEGVSGRLKGQVIGSLDFLSAGLLLAGYLEQHLVMWARRNPVHLASS

SEQ ID NO: 1012618 - protein, 237 aa, Homo sapiens
MREKIFLELVVFVLVRKKRLQSRRPRSSELDCSWALTPVCGIAFRICILFRPPPSARSFQPVHLCKSPSSPSTPLVPSRGKLQEEVGPRGELNAFTDDMEGRAEPWTWACWLMTSRIHHDTRIFDLYAGKGGVERQKPSRPPLTPSPIQPEAKTRRTSGDLHRVELAWDLRIGFGADYHVLAYYEGRSDYYHLSLYQGRTDNNTWCAYLNAWLWQTVVCLFFFLGPRSSTLAPPSGR

SEQ ID NO: 1012619 - protein, 411 aa, Homo sapiens
MPLEGLTCELRFLLCCLIFVTCTSFRHAWRRDVLMAVAHRPFSSNVRRTPYSAQFQGSNLDFFEKSLQLTDGWGTKPRETTGVCVYWACAAKIKLADLTRMIWTFVRSHLQLPFGTNEVVTPKQESFRGKFEWVAYPKCGPIECVTFLQGGKDKPPKRSGGKLPLHGRWCHQLNHVKENFLPRLTGGALSPHREFETPPRQQRQGPEFLMPMVGRASVLTSKGDRIENRVVKHMMTGVFPNKSSLRAIYFKSPPIFGTLQQCCTNVERNVATDKRRIPPPVDNSRQNLIEMNPRHIMDCADLYMGVRTHHNINEDASDTRDEVAHRCLIEEHNHQLYQTEVPFYGYAIGRAKDAPDLSHRFGGSKKNNERRGILTEEQGDPATHGASSYGSRQLDSWDTPVVGEEARQKRK

SEQ ID NO: 1012620 - protein, 213 aa, Homo sapiens
DAAEAATAFGASGGGRPLPRALAAEEIRQMLQGQRRWPTAMRPDSAAGLLRGTMQRLVATEAYPCVRLASVADRTEESPSAVIRVCGPAEAAVKNRLWLTIIVAANMRRKHSIRFVTSESAERRCLSTQMNDAHVVVDYIPPEDSKHSAKKRSRLLSNTWEQPIRLFLNSSEDSVRIPSKNLSRTLTFLTWNVGRSLLIGGQPLENPFLPGQR

SEQ ID NO: 1012621 - protein, 201 aa, Homo sapiens
MTPNLRSLWLPHWPIINYVDGERTGVQPRGLHFRAPGEARPGGVHPACEMAERETKTCLCVHGTIPLRVNCDAGQICIFMSTAYCQNTENPAGPLGAPDEQEVDNQEGTNHTKKDKKYYTHTGTIMKKDKHIHGDKHNCETTITNRHSRKNLAKKNRPKTERKKASLARFKTTTNTCSKHETRDTDQTEHDRKREKSMTRM

SEQ ID NO: 1012622 - protein, 185 aa, Homo sapiens
MWDSLVLHYTNVLASDVLCRRIFLHVVFTLYSTDSLHGSLTSNRHKEECRKFSRYEDRRYVQGVSQCILFLLQMPLLVRYSCTTGILLGGLHGHVSYLSTQLEGKYSYVECLAKEPLWMRCQNSPRSSGTSSTRARTSVIGVERTRQNHGCRQTLVSEPKPRPNCHICRYLDNVSAGYRSKMLQS

SEQ ID NO: 1012623 - protein, 325 aa, Homo sapiens
PLYTLGVTYPDENVKSSCSPVYIAIFYTAAILGPAAGYLIGGALLNIYTEMWPDVTDVYHRDAHCGSAPGGVVLPGLWGRCFLHRRFPSLVTLGSCQVPSATRLMKGGGQMHQIERTAAAGEASQPGLLGKPFRVLCLSPIWLLLEEPPTVHSVLLLVAWGRLRPLVIYRHVQRSGAQMFLAVARFSLSASEAATLLWVPGAAYAEWRRHLPGAASLCEPSSGSAGSACHPSTALFCTVVHPAGASVDLLTALPQWCPWRGRHRQLRREPPARRAPEPQRLPGNRCLQLAPENLQPCDGSEGPMKTQLPTGYQHTRKRMWNGRRH

SEQ ID NO: 1012624 - protein, 219 aa, Homo sapiens
ALREPRTPCCDGSLSQRVPGAAAAESDAETRDYAPPSPRLLASRSPYPRVLLSFPRSPHLPAMATLLLQQCLSRSWATSVSEQGPRANDERLCSARMGSHGGLRHDDGGGLRRIADRRSDFEAACQGLARLVHSLKARVVKLLTWGLRSDMKADTDRRGMIDSNYSCSRAYRDASVMAAPSSDYQGLTVGTVGRANSCGEPLTKAQEITGSADGRLANQ

SEQ ID NO: 1012625 - protein, 318 aa, Homo sapiens
TRPRACSPSRLGAAYTGTSPACSPRIRQKTRPRRGRRPAVVTCELPTAAACSVSHARTAKGEQRPERSASFQGPLPGWRTRGKAASRTDARLRALRVERATPEGMAARVPERLCAGALLAARCAPLATHARWPGSARLPALQLHGVPLHLQRGVLCQWARLASAVLPDFLPPSALSTSRRSSRPDPAPSGPSPRRFSGTTSFRCPGRHDAAAVRKPLQTALHLHPGPGTFSLIIATLAAPMRLYLRPGGLAHQHALLAQEFASGLPCCGVRNWLLGLAPFPAIPSHTACRLAPNRGSSGRCRLTTGEHAASRRVPDTR

SEQ ID NO: 1012626 - protein, 136 aa, Homo sapiens
MYINTFQKGARDYQYIRYLSSDILIGMMYLLKLVHVLATHTCNHVIDDCLLVTVSLSLCHSRCVPISLCIQALKLTSYNLEASRFYVLDKSFLGERGTPWSWCLTVCECNSSSTLTRSVLTRRVPPRGQPCQRGHP

SEQ ID NO: 1012627 - protein, 187 aa, Homo sapiens
AGGTSARVLAAPRRAASAPQPGSRPPLHAPGLSPALTIHKASKQRSREIDQSMTRDREHRVRETIERRTRKTTQKPRAPSTGNTKSRTDGRQQKAKSTSADKSKEEHTRNERRKRKKKRNKETTEEDKTHRDEATHAQKRHHSTAASDENKHSNKTRSTSRPTAQEEHTTTEEAPHGHRGTDGDRDH

SEQ ID NO: 1012628 - protein, 188 aa, Homo sapiens
MRVERVRTLSPARNLLTSRIPRAADISVSQVRHPESIGLYRRSSVSQAGTPAKSNLPGKATISHIRYNPLQDEWVLVFSSPDEAGLAGSSGAPCFVKTVPRTVTLSTPLCPGAIRAKRRGDIATGTSSTLPCLSKRRSQYSMAAWVPPDPWTQLIIPFSKQSLLEELCKVMCFHPVVGCNAATRCLVP

SEQ ID NO: 1012629 - protein, 391 aa, Homo sapiens
MRTCMAPLVDPVPRARGELPEVGGIVPRRAESSRHAAFEATVSRRTALPEGGRMNAQAIAYARASSGDLPRSMALELPPAVCLVPWVTWDLLGRTRLWLPLRTHSGRRPGYLQQAGLGPGDQFRLARLDGSPPDGSPNHGRPGEGRKGSPLSLGPRKGPRTPGHGGEPWERTPEGTTKRHGPQGAHIQRALEHLTAPSCEQRRKDTSSPNTEDNHSKPRNTSRHSRLGTLPNTAGKTTHAITLTTPQQLRGRRHERYKAEAKYHRLRSPNKKRTNSTQIREAPTYAKKPHNDDKITKRRRDPPITLTHGEITPERASTIARANERAHLSPWLTTRTHALQPSDTLKLETDNNLLATDIAPSDRDTEPPTDHTGHTARHATGRVRDLPRNKR

SEQ ID NO: 1012630 - protein, 121 aa, Homo sapiens
GASRVLSAASGDSNRRSSWKEPWTTVSVASIAIKPDGVQRPVLWDEHYQALIAREEKDSAVVGSATFMSSVSDRYSPRRLLSLSCKDQLLFFAGRGVKSTCTLAVRDSWTSGSVEGTECVR

SEQ ID NO: 1012631 - protein, 438 aa, Homo sapiens
MSVPGAVTSSGDLTAYDVVLELNESEQRIRHPEETRYQVTNRLLARERRVGMDLEDTRCIGAAGRALGDSKREHMVTRQRIRSVIEGHYTDHTGPQQLAEATSFSYYVDEQSQTIPNPNELTTATAGPRERYTGPNEGPPRETPTPTAESTHSVKRRAKNDNQEAHKERYTTPKNNKAKHQEEHPEQDNTEHRNTTNDPRKTTRQKRTRYPTTHKRRTEQRHDTTEVTTKGTAEALKPQNRETRTRTHPDRHTPKTHAKHKTRKHRTPPNKICNTKGKRTQEKGTEKRHTHKYETRPDESNDTTNPTDAQKEPGHHIEQETRQPTNRNRHNTKEMQQPRKEKPLETHHKTTETGQPHKPHDTTPIKPTLQHTVRPKTQRKDTTTHKHEPTTWEHNKKQHQTNKHNHMQRPATTLHYDTDTIHPHTHQNTHENTDNTTQ

SEQ ID NO: 1012632 - protein, 214 aa, Homo sapiens
MALPTSGAHRCPAQAPCFWLDSCPTGTPMMATQEMAQEDRGVTPGHDRKGPVAPVPSPQGDGRVTRCYEEEDTGLALAQGGQLWFHYYGPKPLRQVQEPGTVSRAQCPSGSGEGVQPGGPEQGGAETGVTTSSLSRPAGLHPLPDSKGHRWEHGVDIVPPASWIHIRKDSKVKEAGFTPAHSRGGGSLRAQQLAQSAQECAGAGPAGPGPLTLP

SEQ ID NO: 1012633 - protein, 91 aa, Homo sapiens
RRKLDTGRLVRHETPPPHCVHASLTRVPCLCLVPRRSHMLVSSGYNIFTEDEESVEDSIIEDDDDEAEVEEDEPTDLGTRYQRTKMCLGEP

SEQ ID NO: 1012634 - protein, 180 aa, Homo sapiens
  misc_feature (119)..(119): Xaa can be any naturally occurring amino acid
GRRRVGALWPHACPAGFALKMDTGRGSPDTGWCEAGGVSRLGQGGRVCSRSSWSLGAKGQGAKLPATNCKADAGSLRPPGASCGRRCYPVVQTYPMRLTGSMDLRLPRGTIQLGLAIAXRLRLEHHSCRVTYPNIVLAPSACRPAVSTLVKRGIRMRDYGESEAANEAPTVAHSESAEVR

SEQ ID NO: 1012635 - protein, 108 aa, Homo sapiens
  misc_feature (34)..(34): Xaa can be any naturally occurring amino acid
MPPTPRDPPPPYSIRQDGAAPIERRECVYYIYRXRERRGARSRTFYNQHARLLAQVRESKKRCAHRWRRRTTNLVSAKQRTHLLICVVGWESERKIEVWERTYPSLEE

SEQ ID NO: 1012636 - protein, 258 aa, Homo sapiens
AGWGGRFFLLRGYEGPSLGKDGPMVPEGPSPTLCSGGLSLFLNLPGPIWLQPISTSPVFSSRLSPIRVILSGDWLTSFNKGLERTIRDNFGGGNTAWEEENLSQIQKDSETRPWVEVLEGVCSKSDFEATALLELSEELVESWWFHKQQEAPDSTSSGFAQDSHEALLPPAVHRSGPIAALSLVLGGTETALTSGLRRRSDQEQRDTEGGSEVTVDQHNAGYRGSEAMVASVALGYYVRQKRNASHLRMFGIVKAPVP

SEQ ID NO: 1012637 - protein, 115 aa, Homo sapiens
MDESWFVTPPACLRLEVLDSVPSAPEHVPLEDLLIEHPSMSFTSPASTIVLEPGSPLPAPGLRPLRCLESEPLDDSAELRRPVLVLLSSAGARCASLLLSQRGLALLEKGVCQVL

SEQ ID NO: 1012638 - protein, 33 aa, Homo sapiens
MGRKRTKKRGGPNDNNKMKAAAQRNKRHQPLHQ

SEQ ID NO: 1012639 - protein, 124 aa, Homo sapiens
HKPGGGQVEVKSEKLDFKDRVQLRRLVSLGQYHPSSLAEEITKIETHKLTFRENAKAKTDHVGLEIVYKSPVVSGDTSPRHLSNVSSTGSIDMVDSPQLATLADEVSASLAKQGFVIRPLAAVN

SEQ ID NO: 1012640 - protein, 188 aa, Homo sapiens
  misc_feature (31)..(31): Xaa can be any naturally occurring amino acid
  misc_feature (77)..(77): Xaa can be any naturally occurring amino acid
QTGIGEDPGVRVMAYEAWGPPTGWAVVTADXGTDPCGALVDGSDSCGSVTDLLLTTLHMQDLPLGAQSYQDTRDMKXFPRSGPAGLAPVAMARFTRSIWHGHTHVSRPCVHSAVTDLAPWTDRPWITPMRSPLPTRMDMESCTIEAWTMDGYGELGLQGIKSGAWSAVISLGLCGCGATGADLMQALI

SEQ ID NO: 1012641 - protein, 182 aa, Homo sapiens
MAGSSASSAVLGRRTSPRWGLMPNSDIDLINLERLEKYRELLTSVPAAEQSEEAAGPALVADLTESISGRMTDPKEKIDIVADSMPKSLRTQQLSGNGIQVHPGVFEANVVQRERGCSCSPTTCQMSLLGCLCVADVWKGPCGPIPQVSVWLSITASTETCSTVPPLCPVVPLHVGYAVGDG

SEQ ID NO: 1012642 - protein, 232 aa, Homo sapiens
RNPSLGCTRVQPVSCRGASPGPVFLVRTPSRAPVVSRVSLRRRLSRPRTPEAGGPMAPALDPQLVLPDPVTRHFMSWSGPRSSRSRARLSARSMEALQVVPGYCCCSSWTGCSPSSRSILQQAGGGAWTFSSFTRRSRISRGRQLPISYIETSDDKAPVTDTNIPSHLEQSVRYTGSRRTMNGNLERQGHVWNICFITRSWKHYSTLGKAECKFLIHTMFLGISTCINVLRI

SEQ ID NO: 1012643 - protein, 81 aa, Homo sapiens
WIAYRRRHVRHIFMPALRSRATIHQTPELLSTDMLALCTCKSCRQLMLACESSCGDYDAEPQRQSCPEPWEPTPCVSVAWM

SEQ ID NO: 1012644 - protein, 312 aa, Homo sapiens
GRKCLGGRTHSGATPRVAVVRAMRGGACRVYSRTGGALRGRRATRTCVVGPETGPEAPVDELVGVVRPGIAKRGRYGRSAAYYALANAVLWSVLNDTDAWIASVRGRCSPTVVYLVLRARCISESLHVRTRLLPCESEVYWTTVGSVPIIDSRQMLMEHQRELPVASLCSYENHGALIEEFGMANEVGSHCSIGLVRHRTARHLSSYTIYWELLLQPHLVPSDVDLRLAIVASILRTLAWRQNYNHLVSGAGTYHEYLPRTKEPGWAWGIAIMHGFTLGAPARPIILDRSQGLVVLSGFVSIVRLRLRPRCP

SEQ ID NO: 1012645 - protein, 240 aa, Homo sapiens
MGRRRSVRPPALPGPACGCTTLCTLLHCTASSAAATCRCCSALRVGEVSRLCLVPACAPCCFRSVVCCRLCAGCCGWPGASSMTGQSLWDVSEANVEDGETRYQCGRLQEEAALAHAAALPRDAPWAACCSCHSREAILELCDDYDDVQREYYFDRNPELFPYVLHFYHTGKLHVMAELCVFSFSQEIEYWGINEVLHLTSCCSYKLTMGRKVEPEQEKWDEQSDQESNQSPSDEDLAFY

SEQ ID NO: 1012646 - protein, 90 aa, Homo sapiens
YVPFPRALGVSRFLRPTMGYEVESGPRGGISEDVERLGHMIHLHTLLCNAYLRRPVNHPVSALRLSCTQIGQSYRIVAAHNKCPRAWPYT

SEQ ID NO: 1012647 - protein, 164 aa, Homo sapiens
MFGLANGVFAYSTTGGPHMVLIRSWAGVLRPNGSSTSLFRIKRGPPREGGSPERFAIGGPPGKCAYEHANLGVRLNAWSMAPLFNAQREGWRPKRATPKKQGICEGENNAPLFPNFKPLPSFYLPSTDDRMQPFQTLDRTDTCGCVSAAHGSDHDVKCKRGGDR

SEQ ID NO: 1012648 - protein, 228 aa, Homo sapiens
ETSLRGLPEARGSNIFREPCGKNKPTSKMKENKENSSPSVTSANLDHTKPCWYWDKKDLAHTPSQLEGLDPATEARYRREGARFIFDVGTRLGLHYDTLATGIIYFHRFYMFHSFKQFPRYVTRSLLASFLAWERVKKPPKTCVRYLFKHESAKLIITMMYNLGQFGQHDPKEDVTGSGRESYCRPSSLILPVEHPYQFLLKYAKQAQRCIKTKFNKLVQHGMDILST

SEQ ID NO: 1012649 - protein, 106 aa, Homo sapiens
MQWDFVTPQDPCTRIILSRTTDYARCAKGTTQTSRHPLFYANKKNKTKNNKQQTQKYIKHNKQIKYNTHQRHNTTHNTTQDTLHHNKNKHNTNTHTHSAPRGPYYP

SEQ ID NO: 1012650 - protein, 344 aa, Homo sapiens
GGEETRETHCRAGISFRQSLTGDGLKARLSGDAAQKYACGCDAGPGLGAPQPWRCRQDGESCVFPLGLPPGSGCLAIRSWFSGADVLLLEPLEAVLRWPGNLRGRVLTLLEPGRLVLLDFPWSGPCPWPVGFHCRRRVPLACCLLTPLRPGRYRGIALGGAWVEHERACAHSSPSRGTHFERHAVNPSAASRDEPNISPIWSGKDVTPHQWSANHPLMEGTDLLLAPWCDLFTSIDALTQDYYQNLTCGITHSILPITQQTTNSSYYPRKPTANSSPSQKHQFTFNQPPYFTPHKLKTTPHYSTLTYSNNSIITTLQLIAIGKYITTYPSTKRAATDNVVLHTK

SEQ ID NO: 1012651 - protein, 264 aa, Homo sapiens
AAARVGPGEPGPRLQTQLNAQADPVRAERLLLRPVPLFSPPDGVLGLDGPLSPPAAPAAALGDLGMACALWRCLGSDCGAADAERRFVPDECPRTVAASGDFVLLPLRGDVPRRPEVRPPAMTSHSTFNCARGKKDMLITGMHHGSCWDVRKRSDVFVNIPPKLAYATLHGVSCCDPPPNSSRFIFDVTFCMGIISCNFLTLIRFSIHTYFKPPDRCPSEPIQGVLDSSVTGTHFNTGHVPWDWYLCSSSESPFAFILIINRYV

SEQ ID NO: 1012652 - protein, 127 aa, Homo sapiens
SGIHPPLPSYSLFWNKWWVRYHCLNGNPAMIGSGIHLTTYGFASCVPGLSVLRVRYATSLQAYARIIHGLPPYLILCNNSHVLSGDTTVACSYTNVCINISELVGHEHHSFSPTIMRSVCYTHLSPS

SEQ ID NO: 1012653 - protein, 121 aa, Homo sapiens
QKEARAFRFLTLSPGVIFSIQPRLASHSASCVRKHLQIFMYPLAGQLGIQILSQSSRSTWVRSYITVEFAPESDWTWSGRSGSMHSPRLGTSGIIMCGAGGFGCLVLIRVLHKVHGTYNDC

SEQ ID NO: 1012654 - protein, 86 aa, Homo sapiens
MGVTNGPLARWRKAKVGTVGLLAKNSKCNTQVQQISTDEATHVPTLREGANLGVRQHNFREIAAGRTDLTRPRTQDETEDDETSER

SEQ ID NO: 1012655 - protein, 129 aa, Homo sapiens
GLQAHLCPAFTPLMLSQCFLSLSFELGTPVPDPDARGRHPMTGGPVEQKTWPYQPVPGLRGGQPSEATATPATPCAHPDFSHMTLLFRSPLGASVSWWCECEASYRRLMTRSRRELLTRTCESWPSRAL

SEQ ID NO: 1012656 - protein, 289 aa, Homo sapiens
PEALRAGPPRLAAPCSPEPHSKSAMVPRGPVSPREAPVGRRRAPLAWSLRWSPCASSPRWCCWPWLGAPGGAWPGAQLQGDVGCAGPLGGPPTSRDPGTHLAPRHDASYTHDSMPWLRVGPASSRHRTGILVLPRGTLLRPSGETADGAARLASRSGNVRADVVPAIRLSSERGHPEAAQATLRSRLLAAIKPRRDCLGTPALRARAYDRAQREARWPSAVADRPANARQYHDSNEQAEILGIHGDPKRDSSAANERGEPGTRAWTSLEGQYYLHAQHKKALSRTERGT

SEQ ID NO: 1012657 - protein, 113 aa, Homo sapiens
MVAPRRRPAHLGAPHALRDPRRPPPAGREPRVQAARTGLRQAQPAGAAHSRWPASPLGVRGSGAGGGAGPGAAVFGLTQRSAPGRGSALTSDAPREPLEEPGKGGGAARMNGA

SEQ ID NO: 1012658 - protein, 305 aa, Homo sapiens
AGRLGRQLPLARQPVGRTPHSLPPSHDVFIVPTHWLRVGPFQIGGPGVPQLPVHPQSWGCVPPDFSLTEVDFSQGCDGSQYPGAVCVETGVFQSENGPGLHEPSLVSPPGCWEADSKGRIVPMLATLPLFMSHEVNQLMSAHVNGPPLKLTCARHPCQPQIRSPEGSCKKYKILDTSKKASEQLDPKVMSSVGPMITFTIFATSETRGSAWDAVSGSPYPSPFLGPLAQSMVQQRSAFIHGPAGPMSSYLLPHCICVAACPNACLALFRRLCQGSRGIAIANHEECPGMPGSPGPSSLLAFPDIP

SEQ ID NO: 1012659 - protein, 50 aa, Homo sapiens
MRGHSFDSSNDAEVVAPTCYTVEEGAQHVGVPHITEHRTSARFKTRGKSP

SEQ ID NO: 1012660 - protein, 322 aa, Homo sapiens
  misc_feature (54)..(54): Xaa can be any naturally occurring amino acid
SSRGHAGKSASGGIGIRVCFCPQETQNPGSSVSEAVVPSPAPVGASTCSASVPXSSVYSPMVSHCPTRNPGMMALRKASGARLRTLLWARRLDGETGTRSSFPSIAGCTERFSGEQQAVLYARATIGASLVAVGPCAERCREVWGVDREDRWSRVTEHRIGSKLSLHPRGSVFRGASASKSMLAASLRSIYPSGSRGSVGIRLSVEQMGGNPKGSSMGPKTKGAPDVPCVGVPESIWRRYKAYPLLPPMLGCCLGKLCAFPIRNSIDTGAIARLRKVGAPGNHDPQEETLVRRLRQNGLGALGGASIGRHWTLIVAKGSAQF

SEQ ID NO: 1012661 - protein, 354 aa, Homo sapiens
MEPPDCTWPKCLLRGPAGCCCSQSCWRAHHRCPVLECALCLVPPLVECDARKVCHSGLHPYVGTHDHYMLEWFLTDRSGARPRLDLRLRCRALSSRSQCTDTRGLQYPHTSWTPRGCLGAVLEAQVGDERDYVCVVRCMGGQAHADVPLRGSACMQSQRPLRSPTNEMDTVCEMEDSAQEIATCKQRNGNPAPKDHDGYRKRAAPWRCPERLSPEGYSDQTGKDREDQRGLIDARKPLEHTEDRQSHRQRTGPENGAERSKVAAGPKKARLGPEESTAQQETAHRNRATTDIYQPIKPPKKTSREEGATEKQDEGVGARAEPKPRQRGMGNRKRERRGGTGEGRAKKETEKQQE

SEQ ID NO: 1012662 - protein, 401 aa, Homo sapiens
LDIASRGPASSLSATLLLRHNFTASLLDPADQGRRRGSHRRQPPAQPSPHSGLAKLDRSQGLQAPHHPHHRRHRARRSQSQIPAVPSQLVSSSYRVGLPRAGAISTRLGGRQPVTSPPLTSRSSALPQGPAPLDTHRTTSATTTGRPRATSPGAGSSEPRRTIRARPIHSPHLAPEAPQHRTPRAAHSPTPPPTHAPSRTTRPPQAPIAPPRLDAPYDSHPRTAAPRPPPPLAPPVPPPTAHPHTPPPPPLSPATPAPQTPPPPPYTTPNLTHAELPPPFTHKPAHPALPPRTQNWHPSSRTNNPPGSPTRTSATSLPHGPPHTRPQHHGRTPHRTTQTRIAPQTPPPPATPRRTRPPAPSTTSTSARHHPHPPPKSNTHRGPRQHPSTDPDPPPRHTATR

SEQ ID NO: 1012663 - protein, 127 aa, Homo sapiens
GLGVPGWVARGPKPALGRAADARVMMEGGRSNDTRVWSWAKIPAPRPGPCILVFRSAEQRGRGPFLICSPVVLEVIAPIAVVQVRSWVASVSQRHRAAASAGLNCHRATCAEHVDHRKALPRQVSSR

SEQ ID NO: 1012664 - protein, 229 aa, Homo sapiens
SPLTEPVVVLEGHTKQVGIIGVAPHGPENVLLECRLTTTVVLIWNVGTAEELYPPGACLHPDLILQLISWNHNGSLFAQHCKDTETCGISRAPCRGHPGGRAGEWLNEGARPMRAIIPGSDGKVFTRGFRRMSERQVALWDPENLREPMGLQELDSSNGGLLPFYEPGNQVWYYVCGKGDSSIRVHSEITEGAVPRSTFLKQVHQAEEPQRGMGSMPNCGDLEVRQVTE

SEQ ID NO: 1012665 - protein, 244 aa, Homo sapiens
SAWAPRLLQAARGPECGLGGAGLRAGRRAGGRGRGLAAVHGPGDGCAGVQQPHPGGRNPVIVAHAEAVSWYSCGPSVYESCAPWPCLLDSVRVGYHSKDPNQGLSDAAIVMVDGYYEMYDDEESSNRANEMKYFPPLPVGQLFMRKTFKAGAWRALEGSPTPRWYLRVTENIFRQSNFLSLKRHHVLVGNRLVSNGQRGNGRYFESDSLGGRTQYGNDWIGSGSRGSKSGRCQAAPPDKGVIAQ

SEQ ID NO: 1012666 - protein, 133 aa, Homo sapiens
GSQLKCHLLSEAALTSVYKRLFSDFLSYLCIMSSSHSSLSKISCFFLSFFFFWKGSYPDPGGVGGDLLGPVIPNKSDSPASASQVAGTTGTHQNTQLIGYFSRDGVHHVGQEGLISGPRDLPASASQSSGIQT

SEQ ID NO: 1012667 - protein, 256 aa, Homo sapiens
DPRAGTARAGRRLAVLPAKGSGGAAQKRADRALAKPRDSPSPCGGGAKAVPSLGGPWAAGVTALAGSLLRSSSPVAGLHRRAARWSARVGLLLRRPCSLLLVVATLDAQPCGSRLDGPVMLRKWMCVRAFPRRKYGIPQIERGPRKAPKLPLEFQRMPIEKRFHVWCPRLTLVKQGGVGTGANPAARIDIVPLHAGVTGIPNRLCVPWGLEKRSRWTLIMARTTREAKELSAVRNRFWPKRQRVKQSGYKGQHPSS

SEQ ID NO: 1012668 - protein, 288 aa, Homo sapiens
RTAGTCQELFLTGCDDKSILDVGQWKSYIPYWRNWRRSILQDRVMKSIPTQLLFRLDQHSRKETNLDETSEILSSSGKHKSLAGAARVYYQYPGAQLSTVKPKSQRNHHRLLKRQQLLSWMKASMGELGRPMQAKVAVRADAGKKHLHRASRITRPPWTQRLGGLEQELQDLGIATEPKGHRASLPETDSWEGDAMLIGQSWNPEHVVCTHCKEEIGLQIPYCEPERHGLLPTDIPQITHPTQLHEGTSTHPGIKLQHSNRQQTMEPQKQTYRPNRRTSEKGAQSNQE

SEQ ID NO: 1012669 - protein, 264 aa, Homo sapiens
SPGWSQAQRVGLGAWALRLLLSGGIGPPGECVLQPLCDAPWSGGLGVVREGWLHLDELALTNFSVHDNVGVYVRRSCGQGHACMGASGGRPSSVLSGLPLQWCFKDDRIVFWTWMFSTYFMWRNVAPRLGPEHACSYVTPGSVAYSGYEERCETGTERQLSPEVDGGRCTESGLQEAARPGDDLTRAGSESVCLSLILQKAGLHGDLCVCGTPCWRLGTFTVRKKKSQQVYASPVNTPMDEKGEESQDSYRQHRSSMIDELRGQ

SEQ ID NO: 1012670 - protein, 170 aa, Homo sapiens
GAPSLSRRGHPRRRARSRPAPPPLARSVLPGLPERRRAGSPQALMKYRACPCGISRAPLRKLRLAILCGGAGVRGVDTRVCAPAAASGALGWGRSRNVSGCADKRNSTIKQNMGTQLYEYQRNTFREALPRGLHEMAVTPRSLHRELLCPTRVRHMLEEHHDYKGDVTSL

SEQ ID NO: 1012671 - protein, 325 aa, Homo sapiens
GDNDGGGSVVECKNMVMSLRVSDLQSAPGFRWAGSKSWTVSDEARHQGPPAGAVGLYALSCSRKIKELYRGPGTPKTGTRSLSPQAQRVPWSPLTLCTPTIQSGAWRLCLQDIRMVKALQVLTYPRCIVRKVLKTDMGRLVTARKDTCKGHEKVLLVVEKHSRCVLSNCLDCRTGMERPKPKFSAPSRDQSEKAFTRMERPVSILYGTLERTKEGGDGKDRKPRRPNPSGSNVAGTREDLKEPVARRCRSREGKDLLVNILGSKTNAWDPSPTGRGTQEHKTPDARNRFRKLSREGGQDTTQGNKRELPRVPMEGVNIKDAITKI

SEQ ID NO: 1012672 - protein, 126 aa, Homo sapiens
MPDTFVSYLLTAHRILLTVFLKYVYHKRDEHLKSKPCCVIPSRQVLNERVQKLCKPSQNCTFQRSCAFIFIWLGMKAKSTGLPGSGLNSLVHLLTWSFRAMATQGVKRRQSTVGPLLIGQSEQGSA

SEQ ID NO: 1012673 - protein, 130 aa, Homo sapiens
MRPAEDGVAVQSCEAAMSQPVYLCTGMHLAIGSAGCYGKRDETSGLGAWSAQLERSWRLLALAQARQHCQPPHVNAHRGMLAQTRVDDGAWRKRAGGTLDKTLEINALGRKRCSKASRMRAAWVSVPGPQ

SEQ ID NO: 1012674 - protein, 259 aa, Homo sapiens
MAERVGCSPGERGDSDHRAAPSCLLGQLHHLHLCALEPRRGKLQPRVTEELLASAVLSTLYNAKPDWTCLYPTTLNYRPAGGLAAEPCQWLMPVHIQPPSENWPNLSYNLRDYGSVYTRPCHAPWDTRHYGNGTISEQWRYIGTDDQAREGVLYGYHRTHVDPIGAPGGGRYYHAEHGIINPPRTQERSQDICRHTSRQERRYWSMRQRNRRSSEYQHTPDLGEQINNSNRTLGLCETPERESNKRRCAPEQLETGDIG

SEQ ID NO: 1012675 - protein, 157 aa, Homo sapiens
AAGKGRRLQETEGGAGPVGPAPTACSEIIASVDHIKFDLEDRGGAAAGGAAMPFPGMDKSGAAVCEFFSESCLQAKGGMCPYYATSVVRRQLCANTWHEVAYAKTGDQCEFHALSMTLTKNCPECYFITPSTGTCSTQGTVPYWHIETESKIREHEA

SEQ ID NO: 1012676 - protein, 77 aa, Homo sapiens
MISFQIFRVEILSGRRVQSSMWEIEHKLALHANFANPWRTRHILQSMHSATPPGSNPYRDGALPNWRTGSPTTLDSN

SEQ ID NO: 1012677 - protein, 96 aa, Homo sapiens
LVSLTAPVCLRLGTASCVPGQRGPGAAGGMSACVRWSGADAADLPGRHGYAAEFSHVPSLGRLCSEPPEQHYGIAGCGTLLILDPDRSWAKALKKL

SEQ ID NO: 1012678 - protein, 217 aa, Homo sapiens
NPGAGAMVLLHVLFDHAVCYALLALKEVEEISLLQSQVEESVLNLGQIPQHRTSGGLWSPLQLIPRLLVGNMPTASVLKGLFMRIYRLLLEIQLPSKREKKSTLGNRGSQDWCRNTSDGVQGTTARPGRQSEPEILARKFVCDFQNLVEGSDRSVSVVKAQSGGWGTQASYPLSIELSSNCELRVGHIVISPRPISRSLDARWSNGQSNYRSSDACQ

SEQ ID NO: 1012679 - protein, 314 aa, Homo sapiens
AELEGLCKLVSCWGINKVRQSNAYYLLLRRWPWPGFLPVALSPSGAQGSTVGPRTPCRDSPSLSPKGRRALRAPGAPRRSAGLSPGYRRGRVRRAAIALNLAGAVCRGAPGAGRTQRRRRPHNARGLRGSHAHRDYPSRPHPEERPDCRPLVTRAKRGERDEKSRRRDEGERPPRHGAKSSREPRGRHSEHETPIATGNIPQTTREEGTPLTRKRAGTTHRSRPRRGTHLGSPTFRARAGQRGAHTARQTGGNPQRSHEEKSPEEVVVRLREALWGAEGTPQEETPRDLPEMRERRTAADHKGPVWKGGRDHGV

SEQ ID NO: 1012680 - protein, 131 aa, Homo sapiens
MNQSDDISMHLEQPKETESTNRTIPHETEAHNPDQRKDTAIEPETEDHTMKPDRRNEPDKAQEDETPQPETTHQHQRRNKQHNKTRTNNKQQTTTIKTHKATKTTAHTPRKQSKRTTTDNHHNPTQNNTHQ

SEQ ID NO: 1012681 - protein, 203 aa, Homo sapiens
RGCSGSVRSRRDLTSAGVGVLLLSECCSCHCGHGRYPVQLKFTGSSWRSWPGRRRTDSSAEEASEEGPSAENVSVPVCMPRTPSARRTNGVNWLRMASRVTQWPPRCRTAVTYQGGDPKNMAQVTKALDWALSTMDLQKVSSCDGAGSSSEVQNPGRPYIGDGGLHELGSILSTPQEHGGQAHHADRRGRNGWRCWYQLSQLH

SEQ ID NO: 1012682 - protein, 237 aa, Homo sapiens
QEGWHRARSDDYLSLGHPFWRGTGARALVSPRFERCGWASQRSSARTPAANRDLPGPRPTPLACRAGGPRVRSGYRELRAIIPAPVAASSMLLSFRDSTLWGGLRYPFEPLAQSPCRPFPTQRASGLTKGLCGPVTPLGLPGPVRCRYRAGRKPLATDGGSYEAARKARPERGRKAFMAGAPRERKQRMTRLAITVATEGPQEEKRQMGRSGNALRQGERGDPCGPTTERTHEGNHN

SEQ ID NO: 1012683 - protein, 77 aa, Homo sapiens
HLLQWLLLLLPTLCGPGTASLDHLILEPVAQLALEYLGSQEPREQGRLQMAKQAHRGQYGQYKSTALGGTIGWGSHE

SEQ ID NO: 1012684 - protein, 315 aa, Homo sapiens
  misc_feature (147)..(147): Xaa can be any naturally occurring amino acid
WPLRAHRIPTPAELRAMRPIRRGWMRSTTQVANYPHLFCLPSAGRFTWGWGIQAGGRGRLALVGKQPRLKVLKGPLVSDAKARLPARASVHAASLPHGATVSPGPQRLGTLLFDGPCVIVCIENLETTTSKVQPWPQFAVHNPRGTXTLENRGQKRTGIEPLNPEGELLESIRETAEEPWVHPVHSGFLQLELSEDGGILKANHKSNSYQAARQSSTIHDQPVKKNLADEDAVSVPGAGHREQGAPGAGARGLHILAKDEPSQRPVFLEGAGQFDLLSSGLPRAGRNGYHLFSEKRLQAPQVLLRAERQLGDLCG

SEQ ID NO: 1012685 - protein, 161 aa, Homo sapiens
TARLLWVRRTSRGGHGGAAGPGVAGPEAGSECLGLVCRLRGPRPTNAWVLWLREIQSTLRERRPERALAKTAAPSLRPVTWALRGPVLPDILYRDVAFLQPGSTPSPMTCYVNLARDCKCPKKLPKNPMLTAPARCPAMSIDTAPGCVAVTSQRTQTPSHQ

SEQ ID NO: 1012686 - protein, 146 aa, Homo sapiens
PCGPFLCSEPICSASSCRCRARHRVLARRSQNTRSLPPPYSVRPPLGHPDHPRRLEGSLSREASAQHSGSFGDLIWSLHRKRGPQHRQTSSSPDVVPYNGSNHGRTRSGQISQAFPLTLKKIYMWCGKMGRRVSWQSLQPQFICTL

SEQ ID NO: 1012687 - protein, 279 aa, Homo sapiens
  misc_feature (70)..(70): Xaa can be any naturally occurring amino acid
EHRCTCCHGGPASWPPCGPGAAAACCLLLLLAACRSPALAVGPRGCSPVQLFLLTQACGLQLFCCRATTXSCLNEVLFQMRGLPAGLHDTNITAGECNGCQEEAALLSQEFADGLGAIMANGAVLNLILAELHWTLQLAVIIGAVRTLGSANLPLAKRHACTTALLSNMSRIYSTWPRSASPTMTATCWSLDPDLTNILASSAKHTPCSCLPGRAVTNPLAWHSLLKPLYGGSHCPQQLNAYKAGTGSQDTGGLLALLVQIPHLRGTIWNNSTKDRALY

SEQ ID NO: 1012688 - protein, 186 aa, Homo sapiens
MKPNSRVARHGCMRRKRARRKQRKEPQEQNEESQGELKGNVVLAKSERGDWITAEGVQVLQMMLAVATGGLSSQEALSKLKTFIKKRKKRLKNEGGRFIRNSTLPERSPNGHTRCHPTPFLDPATRWAPKIEARPRYVIHARGTTATRPCVRNKQTRTTGANTRCLKSLGREIPLGRKRSTIIIHP

SEQ ID NO: 1012689 - protein, 132 aa, Homo sapiens
  misc_feature (65)..(65): Xaa can be any naturally occurring amino acid
MSRRRDRLRSGIDIKYAWTGDEVKKICMQRFIKIDGKVRGELSQYPAWIQWMSVRHREDEVNMFXPWSYDTQGPFCVFTGITFGQRRKYKLCKGEEDYCGSEEESLTVVTHDARTDPGTQILSSKVNGYCAD

SEQ ID NO: 1012690 - protein, 305 aa, Homo sapiens
RASPFWSQCVDSARTSARGKQSYSYPGRRSRLTALPPPPSFLQTPKSQGAHGRAWRYCSHRQRLAYHLQAGRARLLLALGSGDTSVTSAWVSVTSRVPMIRNVRTAASWVEQQVNDLYCPPGMSITDGSTKAPCEEAITVESSMILNVLEYGSQQSGRLDPELGSIIIDAEHLGDFHEDLQEQVRTLRSPYCRLAISHDLSMSSAEQANVSRSPTGRFPPATAREVDPLQDSSMPSTHQSAASPGVIPWARVMSGEKTLTLFGPRRRVGMTCGSLRSGFPKSPLLTLPQGSERIPPGAVPPGLGW

SEQ ID NO: 1012691 - protein, 146 aa, Homo sapiens
MGFGRDLGRYGLTIFVLSVVALIICFTCSCCCLYKIVAADQRPVVDHHHIHRAVVHAPYPHASISVPPEATLDQATRATTPCLAQTRVCQLAPYPMQYPRTVSPAQPMGPPAYHETLAGGAAAPYPCQTGSLQSRPTVDAPIGVVL

SEQ ID NO: 1012692 - protein, 103 aa, Homo sapiens
KRNCTSGHAIVACLLRSRPPGSALASRDSRAMAHKYETVSAGSILGFQGDAYRQKTAHLLIADLAWRPHPRSPRGFLGYITYDTRTLLCPRELQSPQVVNEIG

SEQ ID NO: 1012693 - protein, 100 aa, Homo sapiens
RGLDEYPHSPNPTPTILCATSAPLFQPKLVERGNIPNDEQCSRWSWTQVSPAPCPLTPCMITKALKNPHSRKPQYYFWDASGGTKHPLRFRIIHFNEDIV

SEQ ID NO: 1012694 - protein, 203 aa, Homo sapiens
RARGISRRNWHKRRTTGGERKPYTRSGSMRWGAQSANTKMAPDGSITAVCGEVTKKYRALRLDVGKFLAWGSECMYVEEQGIIECCLAMHLDNRAGSYRRRLVKELHCARSDRLHSYADEWYESSYAAVPWARKKGAKLTPEEEEILEHNNIYREIQKKYDEKEKECHNQQCPGGAVPAGTSCYACHRIQGPGTGWPSRMAMC

SEQ ID NO: 1012695 - protein, 124 aa, Homo sapiens
MPFETRGVTIRARKVPVGGPFVINLACRMHPGEFSRSPFTRHRCWCFGNNTHCGSRKAAAVSLLARSWNSPIAFGPFFRIRRLGHWHPLSGLWALDLAPSPEPRSWAFPIVAFGTLGFGAEDPP

SEQ ID NO: 1012696 - protein, 136 aa, Homo sapiens
MDPWLALAGPPIFQKGKEGRKNISLRNGSTTPGGRNFPPPSGSSHRGRFPTQPLTEGVSPHEVVPRCKPAGFPRVLLPPHGCFTARRGLSAPEVFLRRGYTLVGPGMVGVHTSRAAPLWDTSPSVVHCGAQGWAVH

SEQ ID NO: 1012697 - protein, 195 aa, Homo sapiens
LIKLKSSCTAKETIIRVNRQPTEWENIFAIYPSDKGLISRTYKELKTNLQGKNNPIKKWTKDMNRHFSKEDIYVANKHIKKSSTLLIIREMQRRTTMRYHLMPVRMVIIKKSKNNRCWRGCGEVGTLLHCWWECKLVQPLWKCVWLFLKDLELEILFVPAIPLLGIYPKEYKPFYYKDTCTFLFIAALFTIAKTQ

SEQ ID NO: 1012698 - protein, 116 aa, Homo sapiens
VAHSLFASLYRVTLIFSFFDAICPTSGTSSLLCAQRCCAPRLACFDITATPVLLGSGDSPWPDASQVAGRTRCAAAEPSSVSLFPLFVFAHLFLGLPVGFLICLFCKHLLLCPWEP

SEQ ID NO: 1012699 - protein, 415 aa, Homo sapiens
ESGYCELPGDAVAAAVIRRATVPQQHPFPDTGTHPPYRHAQPDPTVPGSAAPSSYWPRKPIQTPDHAVAQIGKKSLMPELEEAGTMDLTNNWALIQQHEALARCHGDIPVQRPNQTCGCGQGTIEADCWSFHVWIKDQRRFPSETQLVTGSLWAIERRSKKSFEEFPTYHTRQTEIPSKLSKRILRPYHVMANNDTFKQDKDVYDATAYLQYFIPCTTAFVKEAQTRQARDPCDIEPIALGYVSVDHRNEIHVGTGNPRGDERMGDAQQPSASCTPQLTLETETYIHRVGPLQRESDRRIGSRREKGPNADGTTGNMPPDGTPHRKTRQVTGRRQGNPADCPRELHSFPAAENNEVIPQSIPQIRRPSVFTKRAYRRKQRERTAHYAQQYALGRTEGASGKARFTHFGSAAISVL

SEQ ID NO: 1012700 - protein, 175 aa, Homo sapiens
MDLRALRPGRPRHMKLFDASPTFFAFPTGPHPWPWRCWSLAPYLPPWVLAGVPSALAAFILAISQGSVPGVCRMTVGHASIFLYVLVESRWPRSRDGAVQGFSAHWVGTYGHSSSHAKAQHLSTEGPRTVTGVAATSSSIVGVDRNVWEECKAIRNPTKQDANVYIPERAGGEIT

SEQ ID NO: 1012701 - protein, 132 aa, Homo sapiens
MARASSDIVSLAGQCWAVQLCRGLSRRSSVTVEERARERVPYGVSVVERNARCDQVVVWARAGSREAQQLKDKAATGPGIRAKDGSYRRKWSLDFSCIHSLDRPCQRVPPMCKLGIGGKGLRGWTRLLWGKE

SEQ ID NO: 1012702 - protein, 248 aa, Homo sapiens
MVTPAELYDAVPIQSSVVYVPAHPHQVVRTQTESSTPPGIPGGSRQGPPVDGTAAEPRPGAESLQDAQLRRARKKLCLRTSAFGNNPWGRLFFHGCPWLEKLGTSREYATKGQIIRGNSAVRSPERAHGEVRLVRVQTFGLLDAKVYQRCGKESQAIPSLETSILYCRKIIKLEYDVSEKRFFHKCKRTRGRKIGGKHATKAESAGDETIGPDTGPHKEHNTCDYQSPDNVGATLHQTERRPEDSPAN

SEQ ID NO: 1012703 - protein, 182 aa, Homo sapiens
TVAANRAAAAAAVAAAAAVTEDREPQDEELPGLDSQWRQIENGESGRERPLRAGESWFLAGGATLAGALEDESASVLTCHSSMKTGSEDCEARYVLSKCLALPGQLVWSESMAAPMNASHRAANIQRSSVPSRTAVSDMMGNLTRSAATIYGYCAVGRSVEPETRLGKSKSGSVDQIGLRAE

SEQ ID NO: 1012704 - protein, 115 aa, Homo sapiens
RAAVGSAGRGVVGPSTGLAPVIAPRLLSFRLFTESLQDTLPRWTSLASDTTPDSYSIRTCKMCPVLRRATCSPVLEVTTREARRLRVMLGRARWVLDVGFDHLADGNGLSQFCSL

SEQ ID NO: 1012705 - protein, 105 aa, Homo sapiens
MREPSGLAMRLQSLMRAQWSRDPGWVTGASYIAVMGRQYSDWAVTIPGRGTRIVPSRNRLRCWSYSGRSWMTALRQAYHAWSQACSQGPFFTMACGNQDNIGVRP

SEQ ID NO: 1012706 - protein, 69 aa, Homo sapiens
MTASCTEGPESARRDANERIVETRSPSSANNTAIRPVTRNPRWIHQRRKGAHQHSPHRSRLPPQSHKAR

SEQ ID NO: 1012707 - protein, 171 aa, Homo sapiens
  misc_feature (74)..(74): Xaa can be any naturally occurring amino acid
  misc_feature (149)..(149): Xaa can be any naturally occurring amino acid
  misc_feature (160)..(160): Xaa can be any naturally occurring amino acid
STRNEESSEHDLLGDEPPSSTNTPGSLRKFGLQGDALQSRDFHFSMDSLLAEGAGLGRGRLSRASRMKEYERYXELLGDQVPPVRNGKPAWGLPSFPGASVRQHAPLDVNRNWEPWATEDGPNAGGEELEGTWTFTVPQTYCVAAEDAXSCCERCMKRLXCWTEETPSSDL

SEQ ID NO: 1012708 - protein, 485 aa, Homo sapiens
MKWPKGCLHVLNKPQAAHSALTSGQFYAILTRTQRWNALSVTAQRPTRPQQASRSAPWYATGPLTRRHPHENSPTAPGPRHRENAHTRGKNPLSRPSPPCHHKTCEQTNSHPTRTLPTHTQPPETTRPPHSPHPTTPQSQPQQQHTPTHPPPQHNRTHTERPPPPTATTPHGPPANTPPPHPDRPHTPTQRQRQPPLTHTSPPKHRSTAPTPEHHATAPHTPGQPRTQNQATPHHRRRKPGPHHATQTGNQEAPHTTDARQPRTRAAPPAQPITPHATRRAHTTKRGQPQRNTTPTHHPPHELHTTPQPRAPHHPAPPRAPTTPPPPSPQAANRHRQPNRQDSTPGREEIRSALESDEPPNQAQTTTPAETTPAPPRAAGKDHRHATAQPPPQYTTSGRRAQTARRARKTGTEHAPHTAVRGESKTPQSRNTAARQRGHAENCAAEAQPPPGRTPRPPRQPHSHTARDEEKRRKSGERRTSRRKH

SEQ ID NO: 1012709 - protein, 129 aa, Homo sapiens
RGIGPARQVSKRVSGSREPSEESEQRVRKTSEAKGSRGEPLIGSRRHFPLTASDFAFPVAADERMLELWRLSAQAKISQLVDKRSCPSPEKGVTKAPASADTHSCVASRVKLVLRSEDASTRVMLKKMF

SEQ ID NO: 1012710 - protein, 205 aa, Homo sapiens
  misc_feature (163)..(163): Xaa can be any naturally occurring amino acid
RDLCTRWKDQHNPHSPSFPWCARWLYAVLSPAGPLGSGQTSDHGKEVRDSLLVVRVKAVRDAPEMISSGGWFPAGTEERVISSASAVCKVMHPEGIMRRKAVFRHPLVNDRKTNWWLLAMLCTTGLALHQSQSNCFTHCDRSTTLRDSFGLYFPIAPDLMPRXLRPRATIRRSNSKHLTRRFNKRASFHPVHNCTAAAWQMMTVF

SEQ ID NO: 1012711 - protein, 302 aa, Homo sapiens
GPRLALEGGHKALRPELARVECAVALLVEAQLGGLRSVCAGGSASVARPAQPRVQCRFPCPGLHPQEGSWGKGLNSPRAALGMQPWVPGTIIQDLPPPQPLQTWTRRQCAVGPPGNFRARSCGELPKEGDGDGHYREPQTHVARDICRGCARDLHVLTMWQQAQATRPSEDGAKGQGLAWTRGGDGHRQHELRGQPPGGDSWFYWHNCARSAFRLPSGGNPTSRGAARTRRAIAPRERSEVKYLFALRVPSTHEPGGPDGPAGYATSPSWTPKSDLCAQTSRFVDHIGSAPSSRRWPEARQD

SEQ ID NO: 1012712 - protein, 109 aa, Homo sapiens
LLVCCITLETWLWCCVKRCLCGSLSSLVGGLWSACAPSCSSAVFSHALPACLPASVWTILLGDVPSVSSCLPIAEWLWKEQDAVPHVCPLELLCSLCTVPALRPTDYAV

SEQ ID NO: 1012713 - protein, 73 aa, Homo sapiens
HARCHILPSPRCYVRSWRLPPEPSEADPFSGPGAFQVPSVQRTVCFMMRLKASFHIIIGGEVGIVHVLNHRLR

SEQ ID NO: 1012714 - protein, 172 aa, Homo sapiens
RGDCWGPSSAAWVPGGPVWINGDAHPLTAVPETFWHRDRALQARFGWTARFLEHLLHALACLEGPGVAPVPCACAPEPSQGLSLLNWQRSAVFERVLMAPWPPYATPVSPVPRWAIGVLRTRAQHLRERPHCRHSGVSPGVRTVLVGRSPWREPMQRLTGVCVRLSASCAGS

SEQ ID NO: 1012715 - protein, 379 aa, Homo sapiens
LEQRQQPDEHAEAVGSDGEDGGWRAAEAALCACYYGGGSEGVPGPLSGSRHDNAWLTSTEAGGGGGWRSRWLAGGGGGGENYDDPHKTPGLPSCPHQGCLIELVMDGRQDACGRPLTGEVMEPSQHNVVGNAVREEDKHVVEDLKGVLEGLQTQLNYVRPNNQRYTVAGSPSRCRSNYVIPATDRYPSLGDWIELPGAVEQVMLFIVYAVLKPRVQFRFTHWMFLVTLILLSLCWALVPGATWSLLSSRKERWDSSRDAWVGKFWTVRVSQGCTQAGAREGPLLLHTCERQSNRSFIVRWGEVAGRRSHGKRNFTDNINIARGVPLTQTGPYVRIVLFSTDTAAQPGLCSTLMRRHVSKRVGAQRVEVRTQELVTHRAF

SEQ ID NO: 1012716 - protein, 153 aa, Homo sapiens
MRSGLMENLRQDGSTPELPKRFSLDDYSLCDRQDLSSLSPHKILVDPRTLESELRLGQPWRCRPLCEPQCHPWGLLPVGVLVSRERCELVAVGGEPSPCRRELSCDLPDPSAQAVTYTRLNAESKTLLDIFRTRQTRAYRSRSRFDELYLPGA

SEQ ID NO: 1012717 - protein, 435 aa, Homo sapiens
MPCPTHSYPWPTPAGSSNHGMAASSLAFCVWLTHDRGAETPGLQGLVTLVGSPSRTSFSCVKCLASTVGLTIQGFRLIDLEIDPLYLLTGVLVTDYQTDVCTDQSDIRVVCIEKFSGTRSATTRRGACYSICVVAKHLRIIEALVFVGCHKHIQRNRAAEVTALLPMDVAPHGGKPSLAHDDSKLLKGPHSAVHGFYRINTGGGFSITLLGAGFGIAHKRAGKGSPIEPSGAEYPVVVNAKNMGNTTRLVGSKTELVETFFLPPGPLGHKRSGTTPMLTGFASDRPMEPAVYLPLTVAQYCEKARHRAYTKGEPPWAGERNGKVPQTETDNKPIRGPRKVGVAGPIDSPTERSGTTISETTRRQGEIAKDALDGRRQRGMSIRGRKRVKQDRAAHHGGPRTTKPSCYAEGQQQQSREIGTHKRPQKEVGRHRTQR

SEQ ID NO: 1012718 - protein, 133 aa, Homo sapiens
KCRRCYRPPRSYGMAGVRPPAGPGAPSACLVHWDWCWGLLTSWLLSAQDPVRRPLPSVTLLGRTPSPASAARCSSCRARSGAPFSPLFSSLLFLLHFCARGDSGRPLPQGCSNLLELTAAPVATLPEVSWKRH

SEQ ID NO: 1012719 - protein, 425 aa, Homo sapiens
WIFPAIPPLRSLLFFNNPKEQEKNVPALSCYADHPLDHAPGEGGGSLQSGNLHSGLPGTEAYRATRSRDARNCTAAARLGALSSMSSMVAAMTTLGVSFFAVEEPTCWWLHGWLAAGPPDAALTRASDGSCPPRGCYEKETSLMRGKTLSRHGKALGQCVMRQSGAAHSRRSPDGGRFWPRNNSQIAIIWILCEELTQSLGPGLDLALCEVPDVGALRIGKVVSQNLLVIAVVAAPVLRGLPPHFPPPVDSPVRGWIVPWGALQASSGTGTGPASVLGQQMACPPFVHRAQIVPMRFFANYYKGPNQEDFQSRMLIPNWKASLGLAAHLPEVHAVWFPVSHKRPFLALPQGIPLSSNPGARLWACKPSRPLGKSFEAILLVGDTAGRNRSNVYTHRKRPSFTIDSFDPPFLKTVLRHFNRRGLGH

SEQ ID NO: 1012720 - protein, 216 aa, Homo sapiens
MAAGLTGRLLPDPSVPAWGSLGLRRLPELHVGLVAAPEPRASGPRCPRGGAPPRQRYGGGAGVAVARLPTRRKASEATGSPEGDLGASQPRTEGPGRQKRSRESRPSQVAPRLPPAGRPWLAWSPGGAGHGASGPDSGGRSGRAELAANASPEGPPGQDSPGGAQAGGPPREGLASSRLWATGWAACGGANPREGHPREGHPGGGKQAAPRGRPPQ

SEQ ID NO: 1012721 - protein, 349 aa, Homo sapiens
EYRECSLDNVGWFVRKLSVLLILRGALRHLAISCSASSAPVHAGTRACRRARDSGPGLRGAPDRWGAAGACPDDWLTDSPCSCLLLTEAAAWLSGLTCLDMLAGWLAGGRGRRWALDPSCASEHEMRVVSPVFLQLPSYEEVKYLPTYEESMRLQQLSPGAGRCCQLSVLGRPRGAGSPRSPTAGEGRIPSYLSARGDRRPGCKGCGAAGGYAPAGGACRNCAQTLSGTLAYTARYPADWAWRSLVSLAFSRDLLSLCVSFPVPSDTLVPLRWPRLRHARRLPLLGRSRLDWPFSFASCPIALRYLQSSPEYRSPRFPTFTRAPPPAPSRCLPRTRPPSFFAHSSSDRL

SEQ ID NO: 1012722 - protein, 217 aa, Homo sapiens
HSYLSTSSLYLQSPMAPIKPEPKKDDSQGSPLRSDSSSPTPPEPERPKEVEFDCFHRVKIGVHYTEHDLNELRREAIQCCTSLQRSQRCEYDRIIRTGHVWCDVLTGRCGLGTRTQGKNSAPDVLRGKPNDMRRSSEYHRNDVDVMNTFPCRMHPRSTFHKKQRDEQASAMKDLIVVGELAGSIDKRGGIGHWSMELARSVSHTWLLGPTARAAEEL

SEQ ID NO: 1012723 - protein, 164 aa, Homo sapiens
MDGYSLIHYSDGEQGKYTQSKILTLEISAPSINIQELRSIEYTPMQGCRDNKIAGNKSDQRKIFRPNDQRGKQLNAGNRDGTKPQGQSETSENLKEQTNTSAKNCEVATKREKNTKRNHRRDTGATETMIANEGVRTRQKRGGVRQLTSSAHERGHHEPKERTT

SEQ ID NO: 1012724 - protein, 108 aa, Homo sapiens
MNERLAQEQGLPRGMVDHREVSSSRPALAEHGERRTSSKNSVYLGVSSVFMCAKGVFSEEFKGDTIKSEMEQTSAIQSLCRSEMLQREGDSVYAGNYAGKSTWVAGKK

SEQ ID NO: 1012725 - protein, 296 aa, Homo sapiens
MRLRRLETLIATTLYAVLEQRSLLSLYFTDCNLRVQCVAPGSRRMAVLTCRPVRLTSFLPVEKPNAASHPVAVGTTYVPVRGAVAGAGEEGVTGMDCAAELASDALLADGSIGKVLAPPCHAGPQAETGRPPACAHLARPTHGFTGASCPVAVLSSFLTPERLPYQEAAPAETFQPAQVGDSLRDPPGWNLLVPGLAADHPSRHGMTHEVNLSLTKVMEHRLHVTLMEKPCPTVNPKRADTHAATLHDLDRTGQDNKEPTTRLTLPTDGKIPPHTELHDESHTTATTTHLDTSHKP

SEQ ID NO: 1012726 - protein, 237 aa, Homo sapiens
SCTLGYGIPVRPRLSDLELSLARLPILSDPPHYRAVPLPAPAPAAAAARAPGRSRLSAPAEPSPSPRRGPEPELRVAATARPGGPGTPPRFGSGAGWSASASSNQRCGRRPLVTRDYPVLAPRSYAQPQGSLVIGGGKRPFNRQTSVIAVPMRSMTADQYQGLKTIVSPDHEWAFRCGKGMRQGMATIGGCATGLETVGQALRMDVREGLVGETARRPDSGTLVIRKAPKTNKSVGR

SEQ ID NO: 1012727 - protein, 117 aa, Homo sapiens
MVVRAHPGAVPLTMLFDNLVHSEEFDNGGAVPLGVPVETSFPWLAPGAPLGGPGAPVLLPPAFAHRLSEPRIVGADGRIARRAPLCLARGRQVGAWRCRTTMHPGGIDGSWAVLRPS

SEQ ID NO: 1012728 - protein, 215 aa, Homo sapiens
EARPEPWMPRRCPGPAALRLCPAAAHRLSPAAHGALPGRRAGSRFLLLLLRLCLLLLAGRSGRWMSSWMACCAGLDTWMATHQKDCSLPYATGIQRIAGWCSEQCCHSQLDGACTVPRASALANEQDRMCHDTHGDNAQPGGHIIVKRCCHCSTAEGRRPLTRDQRLQRYSLMVGYSVDMVFRDMQCQEPQRTEQISMSETGHPKTKRAIQQIRV

SEQ ID NO: 1012729 - protein, 249 aa, Homo sapiens
GCTSVNGIVDTLVAVLERDTLGIREVRRVQCLLSAVSWGLSVSVQQLQVTPENRRKVLVQGPGASFAFPAHDHRGVRCSVPAQYGTSWWTAEVVSLFLHFTVNPKPQSGVHMTWPRLLTCDGNGVQAINLHSTHGCEDVRMVCNMTVDHGDLHQGIYRIRQRSIIQLDGDFAARNGIHSHWGPNRPTNVEHSKITFNTRYASNRFYGAHDNDELRHIKTSRDTSIDDQGNTNPCRFSVPQGRPAFGIVA

SEQ ID NO: 1012730 - protein, 183 aa, Homo sapiens
MDECSKKDQARFDGGLERTLNKVYWLVAEKVAGRVIVEVCASNSCQSRLGLLACGAGVKCCWMQGSRARWRIQDYRQYLALCKTRLLLVRAMPHEVAEVRTGVSGDPGQSNYEYNVSAFELPQGSSWEPILSHAQNMRVVIALNVVLTGLRTCNQTESKTNVPEDYRNNPFEGPVDLGDTGPS

SEQ ID NO: 1012731 - protein, 185 aa, Homo sapiens
MPADCRIACGKATHGLGQQESSRSERTRPRLGVPGLSGCSLEGGVSNARVRWFLGPTRGPPNVQTRMTGSLARPKMRSGEFLASPCWPPSGAGPFGPSRFGRVPWALLGPGPRVRYRPPFWCPDVPIDDPPLPWTLRLGDPFGVGQRWNHVVRRALLWGWAWALGWFPPFQFNGGPKPPVTTRTP

SEQ ID NO: 1012732 - protein, 104 aa, Homo sapiens
MSAAHSALYSVMPGMLGTSPSQEPAPYPTLEPVAIQRMPWCNVYLMTIAPKPGGTRLLHHTGRNSKSVYDQKVSVGSSQFSHGSEPNPDICPISQAVTSPGNLN

SEQ ID NO: 1012733 - protein, 235 aa, Homo sapiens
MVRGGGTGSKAIFRMLTCGAVSGLEGKLYATHSCSPVRDSSFDERLAKSKVKRENNKVREARQSESVRFRSVCCSFAIPQAGQSPDSPEGRAFLTQTHKKMLNQASLSCDLALHFQYVAFVSHPSVAAEALKHKTPVDSRQAQEQANCCAGGDRSSRPKVAKLSSLLGELNKKQERDWVSVDMQVMELESNSKRMDVAGSEMLQSKYSEMNNQIDIMLLQAAQTVTQNSADAIYE

SEQ ID NO: 1012734 - protein, 217 aa, Homo sapiens
SNPGSGEARLAAGLGPLRKSIRAAAPRRRRAASAAEKHSAARARTATTRRTDPPTQASGPADLGAASPEAEGMSPAGMWYRKRRGQTQDTNEKIITREKKRGEPRRQKLRNEKMFTKGSSSYTETTESIRRGPRRHRAEERKQNDPEGRTMEATKRKPRKPYRRHPARESMTRRNEEAKQTQGERPQKIPSDMEDIRQTDRPAKEEHRQEKYTCRIS

SEQ ID NO: 1012735 - protein, 282 aa, Homo sapiens
MKTVILKATISESNFCASVYHGQTEHVENDHRDQHSIILKEYFAEMASAKKLTRDGSKEPSSIKNRSTRYTSHVDSKGANWSERGGGILGSRLQFGNAWHTGFVSYSFTFGENLLYLSTLTHFGCQVLGTFPSFPSWENPFSLTSCPWPLWRAPRSCQPASAHRPETGRLGEALHHDELLALALHLVAVGKRQYGPINCAAILQGVARRQKRRPRANTIIYEGKNKEARSRGPFLQSGNTTASYATIPSPRSEYTSGDSIDVTKGQMVEGLVRATRLWRRHT

SEQ ID NO: 1012736 - protein, 225 aa, Homo sapiens
APGHRARQPLMFRSDAYLTLTTSELQPTVGRRTDSARPAELKGELYCLPCHDKMVRPHLRGLSPSPLEGRVCQAALGNAGAHVDARLSVPMCEQAIPGCTEHYDARRAWPYVTRVIYRASSFGDCLLRDVRAECDLRRRMWCQAPSNRGPWCVSMLRPAPTCNERSSTLKNKSVEYGRLKPVCKRCYEKFPLELKKRLKKLSELTLAEKAQSEATVAQLWLRGPS

SEQ ID NO: 1012737 - protein, 108 aa, Homo sapiens
GYRDVAANAALQLEGGLTAFWRVAVVEGDELAWPVSLLVPMNRDATSEGTRVAVEGLIVFHVSTSSVTCRRRVSGTSFPPDPSGFPFPGTPRGRLAATVDRERYRSRT

SEQ ID NO: 1012738 - protein, 34 aa, Homo sapiens
DGSRCREADGPNVGGLSARVKRATAGLRRPAGGS

SEQ ID NO: 1012739 - protein, 229 aa, Homo sapiens
MEWPSSVDMLLEEVRAVRPAEWGGGRGDVQECAPPSAPRAECIPTPSTAYRQNGAAESLMLCVMRPPIVRGSAVKLKGAIPQWSRTPSVYQSSPCRSHALVFLVHTLKVHSGARGLMSTCLMAPGHFQSIWQFKRVTLLWFSLLAAESDLHRRDARSLTPLELALQRGAQELVDILQGHMVGPAVIWGSPSPATRTPWGYVSDREGEETLSLLVSPAHCCSRGGAQFCG

SEQ ID NO: 1012740 - protein, 103 aa, Homo sapiens
MRVYTFRGQELGTHNGNGLEKEKQEDTIQINIRILHDLADIDTEERYKYHQKNHEIESNEIGENRTILRNSEEHHIDNNREQEKLETKIEENNQQIKATENRK

SEQ ID NO: 1012741 - protein, 152 aa, Homo sapiens
LMFDAVHCGGELLYEKLNRAEENRCEASWPVHRPTFGPTGSDLVNYLRMVEYDGLTGRVVLSFKPDDIGAENARATCLRKSKTAVPCQGHREIGVWYSNHSTLVMNAISLDIKHGLQRLAQIKTLCGRLDHRVENRNTSMRAGPNIPRLLSG

SEQ ID NO: 1012742 - protein, 75 aa, Homo sapiens
LIRPRFKRAACEYQPPLPLGIGVDYCYAILSRMLVINNSSKKCNGVLSPPSFPTLLTLILRQMPLALKVGFNRRV

SEQ ID NO: 1012743 - protein, 200 aa, Homo sapiens
RLLVASTGAQAGTQVAEAEADAVAVASGTAVGDDVGCLGAPPARKAQAGHRSYNLQERRRIGSMTGADARHCCPGSPRMRIECPELLATGLTLDLMNEYRFEDVPGVRRRLVRKNAKGSTQSGRYGREPGPTVSGPTPGPRQKPHEVFVEAEVSCSMDKNQEPQWPGDELAGSHLKEDVEEETERWGKPSCGLPLLPQSP

SEQ ID NO: 1012744 - protein, 312 aa, Homo sapiens
QAGTLGVRDRRARVCGRRGGPYKTEPATDLEADWRLNCERGRKTWTYLQDERAEPEQTGLEAYALGLDTKNYFKDLPKDPTDFEGALNGMTFYMGLQAEDGHWTGDYGGPLYLLPGLLITATVDSIPLDSRIQRRDCSGYLRSVEDSLTGGWGLTQLKDNSTDVSGLRSTIVSLRILGCRGLTDPDTGYETRNILHKTGWMLSDIPILVRRSSLGVGMILGNWLIQGMRERPVKIPLISPRRKWMGMGRQEHGEAGTKAPKQKNTGGPTWHGQECHREPRKANGIRPDAGHAAARRKNTAQESKNKQGKQRK

SEQ ID NO: 1012745 - protein, 196 aa, Homo sapiens
LGRAAGRRPRAQLLRSAPCSTRPDCGCAACRTCSAARDALFDRLRARLAALEGDASPSLVDALLDQDCCASCGCELRSAWMGWRLSMAHDAHIEIEECMILSDRRTKTDEGDASSAEPVPNTRRVRRNVCLSAYGEVRHGLKGGAVAPGADQLTVLCRSLANETHQLRSDCLTRPPYHIVSASGRKCRGLKRRAVH

SEQ ID NO: 1012746 - protein, 271 aa, Homo sapiens
MPESLVMVFSTVKTFEPPELTNSCAPDGHSWHWTVLNDVHRTYIDAHASSICTASLGYRRETLSLNKRRKNEEHDNIVTIMYLHEINSHSEFPTLSGVSLGTLSTVLVGLALSPMEAMERSLGPKAGASSLSTRRPFCRRPGSVWLLSWLVWHPRAGGEWSRDSPLAPMIGYDSSAGRTRSGYSDMSVEQKCPFGNCLQRRKPGVSSLDLARDKLPGLVNLLYWPMPCAQFFGHYKAQRAKEAVEDDAETAYKPGVGPTPVLYFGGGSLSA

SEQ ID NO: 1012747 - protein, 268 aa, Homo sapiens
MGIKTALPAAELVPLRLLVLSGALAYAGRGLLEASQDGARQEGLPGVCASWRGSTVAGRWMWLTFEWVSVVHRPFQSTVNHRLPHLRDMCCLLKRLHDGAPELRSWMYAVYGALAVMGTNGPWYLLLLLGHCVGLYVASLWGQPWLCLGLGVGQPVPPSRWTHLISWQSGLVTGTLDLQEVLCHGGSSFTVLRSTSFALEELCPPMSDDYSLAELVKYKFYSMTLLPSYGPISDLLDRHSMLRVSQVEPVETRRVSCGKSKPRAGYSV

SEQ ID NO: 1012748 - protein, 302 aa, Homo sapiens
TGIAGRRCRGWAGAPQHVGGVLVVLAAGMGLGAAGCARGLCAAAVRVHAMDFNMKKHVLSVTLGIVHSPGAVQFTGVRNFGQAEKTELDAHFENHSGPGHDSTKNWTEKILSADRGAVLQPNPSARVEEFLYEKLDSEVSPQGSPTGEAAGSGTWTDADSELGPDHPRYGKTTDQGWQKLRSKLGTAERDYNPTQTVTYSFTHTTCATSMEGGLEEQSRPQRADSSKTGRSWTLACPATSRGADSNGPRKREDRPKGQRKRGALTLTTEDLEANGREHKTNDESERGRHEERHGGTAKSSRN

SEQ ID NO: 1012749 - protein, 215 aa, Homo sapiens
  misc_feature (166)..(166): Xaa can be any naturally occurring amino acid
DGVGRSRPRMISFLDCLPAFSAVPEDETQEIPLVTLPAGERQRMGQDPLLLLQALQTLWSTRERKQRRSLVLSPRLECSGAVSAHYNLRLPGSGDSPASASQVAGTTGSTMLASIKVYRVETEYRMCSTDLSGTPELKPSGCLVFSKCWDSGRGHCALADAVYLHXAHRLSCVRPVTTVAPLSQVACWLTESRVPRDQRSCLYTLSGQLTRGANP

SEQ ID NO: 1012750 - protein, 120 aa, Homo sapiens
RLLRSGVNGLYAQSIRTYVLGTTDIVLMSSQWSSGWETETSCVGRCSLPLLLLLIMGGMAQDSPSQILVHRPGPAVPEDPVALARISCLRLSASQLATIRMVAEWAAPEHGAPRPTPPPA

SEQ ID NO: 1012751 - protein, 107 aa, Homo sapiens
MDNRGKNEMTQNQKKIQDEEKANDAKKGSRKHKRRHNRQEYGDKNESGKHTNEKKKPTKDQQREERIQDNQQTNHPRKPQRRHQHMHPTKRTKKQREAKAKPDKRHR

SEQ ID NO: 1012752 - protein, 289 aa, Homo sapiens
APPDPENARELRPGGDGAERLRVLVDMDGVLADFEAGLLRGFRRRFPEEPARAAGANAAASVAREQYRALRPELADRVASVYDSPWVFFLDLDAHPGMPWTLCGDDERATRTRRSSSAASPLSEVPPLLPLGGRSTLVPQVRRHRIILTRDKTCGLGGPCSLMTRTQFEARQEDPKLGAHLVHLLATIGTWSCPRPRRRACFSLAVEQAVRAGSWISNARELTQRGNCSGRFPCEASKALDAERERRRAHRWDTRKAQSREDGNRAWFPSGPRVSEAQADTREALVNRG

SEQ ID NO: 1012753 - protein, 245 aa, Homo sapiens
WLYWPGILGCLALSIDCSLTATSPVEEDEEDGSDCWMTEELRVTCEACWCEGLRTLLTEDEESGVSLLWRCSQLVPVQNDMWSRNWLSHEGPCVGSRHNYPGSGWKRDWQCGDTAKPEFLQNMRSGFLPNGCFIEDILQERGRDNYDLLEDNHSYIQLACFLCEEPGVELGNAKPLTLREVEVFRSSQEIQERLVRAYELMLGFYGILVGGPIARCHGGPSTWNTRRRFQKLNLAQPQQPPHHTH

SEQ ID NO: 1012754 - protein, 200 aa, Homo sapiens
MHVTLESEQPLCARFRRIVRRSGGSTVRGLSPLRGRGWRRSEGGWPRVRGTLDALQLELGEPWVSSASRCLRCAVRTRERQHPHRAWQDKKGDRRFRKLGRDHETRELPPKHGKPKKAETGREGGTMGRDLVQDGPNAESLQPKIQAYETDWMTRIDVARIPKQVMPANRILGVQVEAATVPGHHQRRMVRPLEGKLPEG

SEQ ID NO: 1012755 - protein, 112 aa, Homo sapiens
MAVNQCGTPTVGTTHVGKSKRGRSERGAMPRHHEESGPARPTCGEPTKGHNKRALMEESSKIREQLLNASQTRTPERNTSHRGRGPTTRYLEETQKHTHTWGAHSDLRQHLG

SEQ ID NO: 1012756 - protein, 153 aa, Homo sapiens
VAQAELLPGPGPPRAARTPEAPPGVGSGAAGQLCERPALACPADSAATSDPFYLYHQAHATRESITATPSTLSSTECVRNDTHTPSLRLNPSPPTHTPYPLLSHPSPPAPPSYSPRPPPHTSSLSTHYPYPNTSSPLLSRHPHLFHHTTSFLQ

SEQ ID NO: 1012757 - protein, 67 aa, Homo sapiens
  misc_feature (52)..(52): Xaa can be any naturally occurring amino acid
ACSVVTTPSAWALGTAQLQPSGAIRLNLWHFQSLIVSGLKCQLAGYVIIYTXKNYDEVTCSLQFLIV

SEQ ID NO: 1012758 - protein, 257 aa, Homo sapiens
LVRRECRDRTIPEAAVSSPVSALPTVQPLGCPPFPKRYFRSLADGGSVRLPGGVNRGHERGRSSGPVQRGPMTRGRGAYNGAQASVWAHKIKPASPEVNLPTVSALRKMGVNRDTQQQGDGEALAYVLFSGVCKPLIIPFILDEIGADVQARHIVAPVRLVSHISSVEKKLMAFQAAPKVIRCMTQHNCGSAGRRYECTPRDTHAPGGGMGSSCEQLMSSVGFCTEVGRRSSYDAVHGAQWQRACLCIHGSGRIGDG

SEQ ID NO: 1012759 - protein, 255 aa, Homo sapiens
CSGGLGTGGGELGGCWPCLCLAWRRSLALGLRPAWPPTALMLLAECRWETSGPAPGGEPACCWPLSDVGAVAMCGHASPCVLTWGAGGAVPCGRSGLVSWPPWTLPLLSPGLEMGPKLGATPRALRAFHALTEPSASPSCRILRPFIRKSRRSHYRCFWMFTLLMHLYRLEHARYLSSYLLSSTQEKCLGLPRYSSPMWVIPRRHCLRYHTLVNVWRDTTAALCAHSNVQGELRSTVSHHPSRVSTYLHNVAGTF

SEQ ID NO: 1012760 - protein, 243 aa, Homo sapiens
MEPGVYIIQSSMPSVLLVAMWWVSFWISQAAVPARMSLGITTVLTMTHAHGLVTRSSLAQGHQTSRHWTSTSGSAMYCRCLPPLVEYALLISSADLQEEAKKAKVKVSRPRAEMDVRNAICPLAPSLRAGVHAGAWPSPVGSAVIPGNLMGSYRSVGVETGETKKEGASPLRRPGGIRCPAQAQSTQTPLTFTPVLCALQAFGAAQVSVYCGWQYADVSTGRQADHRLSLVARRMHGQETSWE

SEQ ID NO: 1012761 - protein, 119 aa, Homo sapiens
AGPELRRLRNGYVLQRCSDFRKPVKPVCDVTCSYVCDALSQSPAIHPHQIKTSPRPQLGACPRGHLTDSILGSGKSMMFNLVLENQTGNLVDFSSMGMSALGAVSCCVLRVPIILNVPG

SEQ ID NO: 1012762 - protein, 101 aa, Homo sapiens
MHPPDLLATQNGIQNPISLEDSPEAGGGSGRRSRSGRRSTAFLVIDSTVHEVSDTCPSQQGAPSRLHARLTCGISTKQLEKLVAYELVTGRRLWKNVYDEL

SEQ ID NO: 1012763 - protein, 82 aa, Homo sapiens
MTGEGSQCPIPHGPGNGQVPSEIARTVHILGGEDFILSLRDNCLLHVGVQDINDKRFQETFEDEFSDRPFARVPWYVLGGNH

SEQ ID NO: 1012764 - protein, 342 aa, Homo sapiens
  misc_feature (87)..(87): Xaa can be any naturally occurring amino acid
MAPVEHVVADAGAFLRQCGSGGDIGKNIYTIREVVTEIRDKATRRRLAVLPYELRFKEPFTVNTCGWVKVSSVDSRTRGKHRRAHFXVSIVPLQGLRPPQRNRTQGSLSLVEPEYPGNCEFLSSLLDDNAFAPNIRVTESAMDAELIVQEVTDDTKVREAGSEERRTRLCTDSKQDDELMTDRGVGWYRPRSETSEQNPSTEPGARVTVPRRTLLGVASLYHQTSRMRECSCVQHGRCNVLGRWTGMLDSVMARSYSLAAAMGCFKDKSGHERECSAHTCGNKILKKSVRDQLSDDGTCTLHVLPEPKVLNPEAPVTRFPSQRGPIRINPISPRIRASFSAI

SEQ ID NO: 1012765 - protein, 448 aa, Homo sapiens
HASCYSWGSDHGCLFIALGGSRLTYDTHERLPCCNVTCRHCLCTLQAPAHYRSRTAGALRPTSAPPRPLRRHCSRTPRHTTSPRPHWRQPPTEPPVRAPRRSPATLGAADLHTPPAAAPRPRRCPRTPEPLSRSHLPLSRPCDWPHPAAALHAPPPPNAPPSLPHGPAHCGRISALIRRTLLQPAMRLRTCCNLPTTPTPPPPSTPGPRHSSPARDPHLFHSGPGPFSAPIATRPHHTWRSLARCNSALVPRPPSRSHPLPLLTPPSPPWAAAHGCFSPPPAAPPAPAALLRSRPTSAPLLYTPFDRNATPHSRPSPATRRAVPLPYPPSRHSTPPLAPDASSGPPLTPTTRSPRREPHQGPTPDAQHANATNLTLRDHDPEHGPPTPGTPPTTPNVPAPNPTHLTPRRPHCGTVQHSTTGRGHGLRASTHYERTRPRTNTPAPDLTD

SEQ ID NO: 1012766 - protein, 62 aa, Homo sapiens
  misc_feature (9)..(10): Xaa can be any naturally occurring amino acid
KAIYGLHLXXKHSGGLKTCRRSDRKHSECLKPIGHRAQCREVGSVSARGPCALRACILMRSA

SEQ ID NO: 1012767 - protein, 268 aa, Homo sapiens
MTDGILGKAATMEIPIHGNGKPGSFLKMMGWQQDLQQVMVSGPNLNETSIVSGGYGRLWLMRLIPTGLWPPSISQHHSFWPWRCTWLGGHSLEQKSRHRQRTLAASTPTKCTKQLSLSNDSRADGSRHCGPGSQQLPALELACAEHEAPRMTECPAAWRRRTDSPPLQTAARPSMHWVTAFADLSQKSTELQEELATMQRPRNYYARMGETPPGPAHSPASHHHTLDTQTTLRHLLTVKRLHAPADTSLRTNKRTRSGPGADRAAAGP

SEQ ID NO: 1012768 - protein, 193 aa, Homo sapiens
MPWAVGRRWAWAALLLAVAAVLTQVVWLWLGTQSFVFLREDDRRSWRGSTLGRVTTELCLLSSDLWSCGGCTQATCCPTRSCVGVVNAGGWMGAMCLLHASLSEYVLLFGTALGSRGHSGRYCAEDLGYHHLWHLPPCGERAPSKVRSSTQATTVRTTWPGEATSCGVGAKHNGLVEYGRGVSPIHPGFRCWA

SEQ ID NO: 1012769 - protein, 225 aa, Homo sapiens
MHEATAGTQCSCCRGHETVLTPEFLNRCRMHAISGWQVFFPMHFQSLPPSCGPSHIGPGPPRVWAVTTGRFDRQASQARSLSSTTSDLRGSPVGAGGRPLESNEEELLESLDVSEAVPPRSPSLHVLRAVGDLVLLSVYRAQTCSAEAHVEGAVTSRWPPRDRAGGPSVHRIPWLGQCYSFDTEEGREHVRTSVEAQPVEPQWVPGALVFKGPPLPRSFSSPGYS

SEQ ID NO: 1012770 - protein, 357 aa, Homo sapiens
NAPACCFIPPHMMCIDCTYMPPCVSTLLQCPHQPWSNTPEGLTTACGPYPWSRAEAHNMRDMLRVVASPRACMHNTRACSSCLDLRHDDPFRSAMPTSSRTACCRPLARHPPLHPSPTDPPSTHDSRASHHFNSSPLACPFPYPPSPFHSGIRPLPSTPRLALCIPPLTLPYPTPPFHTPYHEPKPDPYSPPPDNGAERPLTDTTSQQRTPTPAHLTSLETGSNRGRTHSKHAEPRHSPRPSPPNLVPPIPTHKSHSAQVGERNPHPPASPAPMAGDPARDPSIDPTALRRITNGSPGSPPLQTPPAPRHTSQHPTFAPLVPRAPTHLPCYEGESTERCRQRHHQPAVQTTVCGYAT

SEQ ID NO: 1012771 - protein, 191 aa, Homo sapiens
MPTDVHSSQKQGLVVRLLAGTISSVMQPHGGKCKQAPDGAHDPGGPPDRFTCSGCAVLSPAPSHEGARRLDVLAVMACVDGPVLVMCRRRGCIVTHGPGAARGSVVASKLHIAVSLRGARLAGLSRGRIAHEMLRSQLAFSPGSIPASHLTWQRNCRTPLVQIQCILSEDPVSKALLAAAMQAPGPETWRP

SEQ ID NO: 1012772 - protein, 222 aa, Homo sapiens
WYGRNRRIKGGQKLETCGCRSLQRSPMGRVLSTSMGLVSRVPRSTLYGNIAHRDWCWHERIEAHMVRCVDEIEGLRGRMHLSSVLGMHGETLTEAAMLHGLTIWLTEKDWIPKLFQVLGPRYKDHRAGGYITECVHDPYNRQFGLVANDGSDSSITGHCLPPLPLPRRDQTILHSYNRCLQGLRQGPLGEARVNASNRQFPHRSNTRDLTGSDESAGLNQYA

SEQ ID NO: 1012773 - protein, 121 aa, Homo sapiens
MRAPSTGPRGRWRWVGAVSERQRVRPVLAWGWCWLSVQYSPCNDGRRGGKTKISRAVKIGLMPYEMIYTQGCSAAITAEESDCQRIPEGASVRVVKKPYHMSYETKTSLCWVLLRKERAVQ

SEQ ID NO: 1012774 - protein, 56 aa, Homo sapiens
ACAITCKRCTVRILGSAAAFLSAEAAPCSSSGSALTSGAGPHGTLGAPQMLLHLCF

SEQ ID NO: 1012775 - protein, 223 aa, Homo sapiens
QAVPHRSYGISGSLVGIDNKIEQAMDLVKCTSCLRSGSEVEVLKEQIRELAERNAALEQENGLLRAWASPGARLAQVPPSGVPTALGPPLRPNGPSGLKPPFPLYKLLPFGGLPGPCVNAVFATLLILSEQRAFKLSPSCPPAAGAVTKGRQVTWALGPPRVPFSPSLPFDFNPPSRCMPGKSVRRLFRMYRWGLNKASGRPPSFIVMGYPQIPKITYALLLE

SEQ ID NO: 1012776 - protein, 219 aa, Homo sapiens
GVGRRQIMCILVMLGGLTAGLVAGTRCSDGQFCPVACCVYPGSEPGYSCCSCLLDKWPTTTEPGIWVAAVPVFDCRHLASCAGQSLAVLKTVIRGTFRLTCAAFTQAVPGVQSRRDSCRISLASAHGWSFTPCGCHDWGDSLASQPGLSVKGSSVEVAHSMLCRLATHRFSGSLNLRLELSYPEQVGCVSNGLRLGHPLAGGVACPRSGPDGLLVSCSQ

SEQ ID NO: 1012777 - protein, 255 aa, Homo sapiens
  misc_feature (35)..(35): Xaa can be any naturally occurring amino acid
MRYWEEGAMQYLLRTPFLFGYFSRLAMFSRATLCXKTLALGAQVRWPNLRARPPIGKRGGPLYGGKPADGGQTGALYSRLQLLRTGKFPHLRRRTLLSTENPRNGTLPQMDPSGLLGATQTLPVTHTSGRQATTLDHGANTLIHFNSAGAASPQNVTYWGIPLLAVHPVSLITALRDVTSLLGLGRRYWRPWRHCMREISPYVGMGWPLSACWCPTRVTLMLLTGDLSAHLRCSVRGARFPGVGCAPPRGAVPAG

SEQ ID NO: 1012778 - protein, 200 aa, Homo sapiens
LLQSQIFPPELFLPPTSKAKIEVMFHKPRNAKGLPANHRKLGERTRTDFPTALRINQSPDQKKKKNKNTKKKKTTKRKQPKKRKKQKEKTEKNNKKNKKRERHTKHEGARTASDTAKAPDQTALAISMVVRRLLTRSRCESGEMSRELKQAEQRGWTRRLSTNSDIVKSLGKLEPSVALVGRGDTHTSSGGWRVVGAASG

SEQ ID NO: 1012779 - protein, 182 aa, Homo sapiens
MTDPLTWAGGTQMSDSSESRLCTMNLPEGCHNMGPCDLIGHLSQNAQHGPCDLESVPCRECNPPLPDTIWKPNAYGVHELLGAQCKPGHRTLLLLSWLRAQERLRPLGLLVATEGVSAAVRTEDLAALEDKHLPPPSLSLGVARQEESSDADGYRAPPGLHRPELSLAGELDTELLQSGPEI

SEQ ID NO: 1012780 - protein, 259 aa, Homo sapiens
GCCNDWSTSPASSNSLRTARCPHTRSAAAAGSSHRVARTFLKSWAGQDIGDPPIRYGRLEAQAPSSMPFGARKKRSWFRYLEAIASDKPDGPCGRFCQTGRRCSFLPGDCHCQVLKSDPGHSATHHLKPSELTQSHEQDYDEALAAVEPPTDAEASGSPAAVLELEAAIQAPHPSYYVAQRWHHGALDWTQRPAQPTRRGAFRMAQLGPFKHQTPYGWPTGSNGTSTAGDMNHVSLITFTEPDARPCASLILVTDGKWP

SEQ ID NO: 1012781 - protein, 213 aa, Homo sapiens
RHRGHVRGKPQTRAGQAAVQGVRLVLRCAAPGPPPGAVSAAARGVRELRVPGRAVGANKYPGMRAVLCVRWLLLWCCMALAVWPAWCCWCRGEAWCLGPGLGPRLTCQCLTLLPSVLQAGIPSWPILGYDVCPTHYLGESMQEHSEDPCRDYLRTLPLKPTVDYGGTTFHPEPRPFIRPTNTLRKHAGQSGNAGAILVDIGASWAPQAIHYPN

SEQ ID NO: 1012782 - protein, 126 aa, Homo sapiens
RGEPGRPSPARRRARSPRRALWGPGRRRDPAPGKGRVETVGSEPEFIPPQTPERPDDSRGSALGKPIVTAPVGVMRTASRGLEIRWSDVRVDPWHCDWNLVLPGCALACVHNGLLTRAGTWHPLPW

SEQ ID NO: 1012783 - protein, 217 aa, Homo sapiens
  misc_feature (99)..(99): Xaa can be any naturally occurring amino acid
MKGKNTYSVWGLESYSSDMNRGKSHKLRRATLVPKGFDPGKVEPFAVSFGIALGNQEVPYINNGKSPKANVRRLPWGPKGHTEVILLSDLVGNDLKFSXRQDSKIYTHVEAMEGSLTRVHSVWEVPPQIPNYMGHPEEAPVLWIHAYVGLLHNLAQFRFAECTLEKKVRFITGWGPFAVLRGTSRKTGKTHFPKCKGPSVPRGWDTTQHNRVESGSP

SEQ ID NO: 1012784 - protein, 269 aa, Homo sapiens
LGRTSGEPERKSHSLQRCDVGHCCLLLCAGVVASWEFPCLRVPAELCVNSFSGSFDFKSMDVVSTVRPYSTEAVPARACGRCAEQLEEDKRAHNNGNHTFDEVALNQFSDMSWAEDNIDKYLWSEPQNCSATKSNYRSRYVVPTHLPVDWREKKEISVSPVTKSGCHAAVAGLSPVTGALLTSADRHRNRDKMLSLCWNSKLVDMRPRTFNNHGCQGGLPRPGLRDISCTTRGSWREDTYPYQGKDGYCKFQPGKAIGFVQDVANITIY

SEQ ID NO: 1012785 - protein, 205 aa, Homo sapiens
  misc_feature (178)..(178): Xaa can be any naturally occurring amino acid
RPQALAGSGTAGRVRGPHQDAEDGRGVSGTGQAAGDGMAVGMRSGEAIAHAERPLLSEPHRRYRLGEHWTVRCSGYETFSFHGTAFRMLLGGVQSVISSSQNILVVRDAVSSSCFSNGLGFGKSLLLHESQQPVQLWAGGMPAIQLPALLHMALKRTAQLVWPRCTSLPPCLLTSIPXAGPRCSLWTSPGRGVHLLLEGHRPGLY

SEQ ID NO: 1012786 - protein, 230 aa, Homo sapiens
CTDEPWGPAHFEGIYDHGGAHYGRFHESPLFHMCLPEHLLWYSLLGYWVHGESPLVMSAGTLQANVSQDVSIITSNRSLEDDRGPCRLQCQTRLCYGLQSQNGEIWAALKVYAGTERAEAHRVWRYEYTGSKKEFPCVDGYLYDQKHMEKHCGDPDGTWSVTEKWLAMLSPAPIYVVESYWDGDLGYFSDRLDAGLVVVGHKQVTHVLVWPSSGVCSRLLAPSWLLAFFL

SEQ ID NO: 1012787 - protein, 113 aa, Homo sapiens
AAWSAKNVLSRSLETGLFLRQVREGSTLTMWLYLAGLLWSLYYPSAVGYPRMTARSRRATHQDKVCLYHRACDSGRLGEPACQTAGMHEACRVLAAMLVDGEGCAEPAEGPDV

SEQ ID NO: 1012788 - protein, 182 aa, Homo sapiens
MKPKGIEYEVLIILSYVPQYSQEAKERDDSVVAHIGLESPVECKWTSVKLRYVSTLLGSPGRFQDTQGLSHDQVLVQRTLIILGASYRSTYSAYNDDVVPILWDAHTEREVEATPGLPSLRDCIKDANFYLKWKSLCANPHKRETSSPRNAPCERLPCLVCGWFEVPVGWETGGAQPEFGWR

SEQ ID NO: 1012789 - protein, 197 aa, Homo sapiens
VTGKTYVSPSPGATRSDKAFYIVCVRERKDGSLGVLTQTVGPWPRPVAYFSKQLDGVFKGWPPCLRALAATALLVQEADKLTLGQNRNIKAPHAVVTLMNTKGHHWLMSARLTKYQSLLCENPRITTEVCNTLNPATLFPVSESPVEHDCVEVLDSVYSSRPDLRDQPWASVDWELYVDGSSFINPQGESICRAMRW

SEQ ID NO: 1012790 - protein, 209 aa, Homo sapiens
MFPEPLIPGAFLSARRLRPDSSRISHGPVPTAGPCAQQSVLGLQELSLYHSSLRVSCLIPEELSGGWTGQEEAEGPMPRSTFRTVNGAGPGVSIGPNGATLRTYDGTLEAYVTHSRRPGHACVGKTTHEARDDVQESRGLMTFHELAELLVGILANANWDWQPWILVAPRTPYVRVYLLPDQTEAVLRPTCIGSKLKPHFGETFAFKVP

SEQ ID NO: 1012791 - protein, 121 aa, Homo sapiens
MVALPLYAQVLQLSRGEGSSRVSCPCVPCSIRNPPARPGASAAVRAPVVLPTRLLPSLLSQTPESSFYHYLHALILITISQKPSDQHDNAITNLPMCQFLPKQMSPHLVLTRIAPTTDYPK

SEQ ID NO: 1012792 - protein, 225 aa, Homo sapiens
MHCWRGGELWANTMGGNLSNIRKSPDRSAAAHCVSRSPGQLGSGTRNRASDLSRQRYRMNSHPRLKCSQCGTWKHLVTKKTHRDVKHIVSELGESVSRQWVGCPGDVGILDSRSLCWRAYQISQANRPCEYVEYYYTELLNMGSAQTRGKANSDGSQDATWRGLGHNAVRIWQYLWDNNYSSIRDRSIETCTLVLGPWDCRWIHPFQELSETRVEKKGEDTLDTP

SEQ ID NO: 1012793 - protein, 246 aa, Homo sapiens
MLPKEDYFKLEYAIEAIKLCSTAIGYPDIRWCVPELWTKRITVPTDGSPSALMRIVEIDAHIGCALSGLIADAMTLIEKPELETQNHWFTYNVDNDSGECDPSCVQSGFAGLAEDTMHDPGAMSRTVRSSDYYLGGLLTAEQDPSMFHMDPSGTFVQCDARAHWLCFRGCPVAPCNEVYQQVYDFETEAIKSSLIILKQVMEEKLSGSNIELGTVQPGQNFHMFTIGKNLNEVITDISGILILRTS

SEQ ID NO: 1012794 - protein, 110 aa, Homo sapiens
MEDRRILGNGVLEVMQCIWLTNEKGVGDKCVMPGDKLQSPALCVETRVHAHMPDGLWVSRTRVRITLLKEIRKDLLKNVLVPHTCGDLTAGDLSPEVRMLTYMKPRALWS

SEQ ID NO: 1012795 - protein, 150 aa, Homo sapiens
TKRLQRRERCGHEGLDPGLRQAPPSLPPQWIMPRAAAAAVCGGESDWCGAASPAGRCRFHVTTQGVTRNDTTATEALWHYFSYQLRQPPRRLTAYLLQKLIETLKPFGVLEEEGGTAAALISNFWENYNNLVRESGIGVNRVKARIFHNL

SEQ ID NO: 1012796 - protein, 251 aa, Homo sapiens
AVAAVAGTGPGGMSDGGWRQLVGYSGPRGDGARDGVQGGSGGGTGARSGMPSESACWRRVLCCGVLEPASGPLLLCDPLVRLGSRHPWAILALAVSWEPPGPPGPGVRADKPVLAIQVLGTVKWFNVRNGYGFINRNDTKDKMSLFTRQLLKETSPGSFCAALEMGRLWNLMSWKERRAAEATNVTGPGGVPVKGSRLCPQTTVSSADSSPVLPQLTEQPLWQRSPRRGQDMTVKGSRAEELWQGADDGAP

SEQ ID NO: 1012797 - protein, 137 aa, Homo sapiens
MDPWALWTGNERVSESRTVAFPWASIHQPPCDAACKRRLWELQRSAMHGPVICPVLEDAHAGTRPLQASHCRLRLLRRAAWRAPRERIRGGALIIFDSRGPRPPGRPRTKLLRSRSYLTLQAALSSPLRRARIHRAA

SEQ ID NO: 1012798 - protein, 66 aa, Homo sapiens
RGHGSSAPACIAYLSLRISVIVVYAYAIFLCNKVGPKRPSFKPSPKPYSIVEHLKDSGNFEDLVNM

SEQ ID NO: 1012799 - protein, 138 aa, Homo sapiens
GGGSSNGAAWAALSHPSVRAMGRVRSRTLDCDLRAKESVKRTRPRRGVPGSVGQRWRTTIRPPPVPPAGPFKHGMPTCLLIRTGGGGGEMLGKTEPLGMQLRGGTGKKSTNSPLSLLACHVAIGTRRASKLHSLLKTA

SEQ ID NO: 1012800 - protein, 104 aa, Homo sapiens
KGKVLKCLRKEFLLIRLNTPPLPSLIYTIHLLSRLWLPREDSSKPCPIQVYMILNHKKMDSEIQFLQDGEGLNGSGWASGLPCTPPHAGQVLSMSLGVTAGPAC

SEQ ID NO: 1012801 - protein, 210 aa, Homo sapiens
RQSSAWDPGAVVLSLDGSAPVPSHYSSRALRSHQPSTISPYLGQDRCVCDWTVEERLPSGHPTANHQSFTPLLPLREDGIDARGPCERLIDKPAPLGPPEQSLHDPIAHLCGFDAYAMSSLHPQAATTRYPSCGKNGVRDLTAEKGLESNLWRNQCNCDEISQARNERGHCECAAECPGENHESTYMPGDHATILQKSWITADAAKGDLS

SEQ ID NO: 1012802 - protein, 101 aa, Homo sapiens
MSLSKPIMKKANQPQNGTNEQDIRTGLPVIHNSQIKYATKDITNTVYTYYLDKEWNIDTHAMLRFSNSVYSQQYVIDLGNRPLVGVTYWGKQVYILWLDLT

SEQ ID NO: 1012803 - protein, 135 aa, Homo sapiens
MTAVRLRESTEHHPCAQSGPGAQKLAKTSCSIFICIHAVLAYGMREPRPSREEAHAIQDRSEKALTRGKPGPDREVALLSDPRPPEGHGLLFQAACCCPIDLAENQGLGLAQGPHARESEHLLCGGLLLQTELLP

SEQ ID NO: 1012804 - protein, 77 aa, Homo sapiens
TGVMAAPKTVAVGPLVGAVVHDTNSTRLLVSIQKAAETTKSSQSGINTRVPKRRMGGTRTRNTKFFSSVYELYSENV

SEQ ID NO: 1012805 - protein, 182 aa, Homo sapiens
  misc_feature (62)..(62): Xaa can be any naturally occurring amino acid
STLLQIVRKCAIRGVHCILSPTGLQCSFGGISVWPRDEDGGEWGICLLFSSIKMYAHFKLCXVTRYLRAMTWSLTWVTLLSAWEGIDQVKVLSLLQCLIHNRLAPWSLRCQMVRTSNDEAMGPSSNNKKLSVLPMLNRGRTTDDSKINLIVKLFTPEYDPKTESQGVSSRSDLVEMRILRNL

SEQ ID NO: 1012806 - protein, 122 aa, Homo sapiens
MANRLLGRIEVLCFPLDLLEHSCQIFYQAEMVELDVIERRREVQKTHKSPGVADKTEGIIAEFSLRAQVDPVDKAGSGECWSISLETGTEQFDQGESPMERLSKVSQNEEKPVHMMSTLVYL

SEQ ID NO: 1012807 - protein, 117 aa, Homo sapiens
MTLGDTSAYFSHGGGQGVRMALKECYGCLGRGPCGPLLKNPTHAQRSSEKGWDGLRLGGTFQARLLFTEKSSTHGRQKNWRSTSWSAFGDNNAARFVYTGPLVLGKNPWAERSNLVR

SEQ ID NO: 1012808 - protein, 216 aa, Homo sapiens
MSWSVSSSVGSTDWQRYRSGLLQDGQPQVHIKHLETIDKSCPCLEPDTRSMKTSPRNRDHDLLLPSTKSKSPASVYESFRIQTWDRQVQDREDKSESSWFAQVQLLGKDKMSQDWRVCLRESRSQPPSAPSAEAIKSIQDMVGSARRRVMLTMITRQVHYTGAASGPQAAMYQQVCMRSRAEHPMAHNSEAEALPDLMSALVCKWGHNVVDRLRRP

SEQ ID NO: 1012809 - protein, 70 aa, Homo sapiens
SSPRRRYKCLLKYWVKNRHRSLQTVLGVFDCAKSTGSDDEQQSTIQVEANEVLIRTEFVFKPRKYCNPGR

SEQ ID NO: 1012810 - protein, 277 aa, Homo sapiens
  misc_feature (218)..(218): Xaa can be any naturally occurring amino acid
MKLGNPQSFLDQEEAYDLSSVHGNQKVVEDLTPSAANATAVSFHDPRGPCSPALMSSSVLPTATTMQLVCCKGAHYVHSHGRLTQDNTGPLVLVTMKPALVELLFSSHSFQMTHQTPFGRDSQQACKERVGLTSIMSHTCPGVADCLRATLFWHRASYASVPCMSVDCTCFTVAEYRQRCLSLAPTVARVVGSEPWLAGTRCYGTVLSERGFRLRPIXLVALGAAVSPVQCYPSLGCSRVVQMSTLIDSPYRSKRQCLSHQSMTCTCFDRKGRTGGQ

SEQ ID NO: 1012811 - protein, 120 aa, Homo sapiens
MGLVGAGGQTVGAGAAQRLGLICKHMGGGRIGLVGAPNWTRLVNRETGGERPGRKAFGLSKTNHPSGVRHSRLGKRATSPERQAKETPPHRLTVDGTSVLWSPCPCCWKGPATVCGRHFG

SEQ ID NO: 1012812 - protein, 100 aa, Homo sapiens
  misc_feature (4)..(4): Xaa can be any naturally occurring amino acid
  misc_feature (13)..(13): Xaa can be any naturally occurring amino acid
MVVXDYAVATLCXTDCERCLNPSLVHDEMRITLRVCERLLHQRVGRYPTDVQVADDVKSINTRWICVQTRERLQLTSGTHSLVEDVQLNCSLRNVEQVNA

SEQ ID NO: 1012813 - protein, 67 aa, Homo sapiens
MSVIIPGSDGQIIEQDPHVFSHANNERQLVHQDGQNKNYGPGCGGPQAVIAKHLGKADAGWTGLRPR

SEQ ID NO: 1012814 - protein, 142 aa, Homo sapiens
RAGISRSRERGASTGRETGARLWGKCRMGGQGRSRGGGWGTIAGLAGQGPAHEAGGGERALLPGLGRRGPRRIVAAVGGGGRGAPLLPCGAGGRALDRLDDPSPPPHLPGQRFSASNQGHFYVHSLEAMGSPRPSEAATPVP

SEQ ID NO: 1012815 - protein, 238 aa, Homo sapiens
EPENGAGGPGPGVVGVEQHFIAAGVLGLRAQCRRHHGLPVGQAHGPGRLERCLILEGTIPLETRQPGRVTVNSLSEPRTSERRSRVLCQVVVTGHDGLPASRTATMSVTEGAAGHLAVRLRSTAGRKAKSVEDDTDGPTHLPCLGTWLQERYEYRQHLRQRGPSAELVQLLLTIARLWGIEVQPLKYHLRNVGERISARQAWTLDESHSARDQKSNEVMDPGTEPSWWYQNAVTGSDS

SEQ ID NO: 1012816 - protein, 126 aa, Homo sapiens
RRRRRRRETTTSTCSLGYTFPESIYIFIGNTDVNVTDELQKESSVKKMKHRFESNLEDSDRKPAYESKKKIKIRLHNCFSNPWQQTTHWILANNTKIFAGEVFRNWIDVKPPEQKWSGHGICFFNL

SEQ ID NO: 1012817 - protein, 206 aa, Homo sapiens
MDPGCPCPAPTVRGWSARGWGRRRASRATGLASMDVLAEANGTFALNLLKTLGKDNSKNVLILTLSMSCDPGPWSTWGQRESTGAQMGQILSFNKTVAVCGDIHQGFQSLLTEVNKTGTQYLLRMAKRLLRGKVSVISSHLSEIPARKCYQAADGGDLSFHQLPIGEVREQHYKRPGIARTRQKVENCGVGYLRGSVGSIDQGWYW

SEQ ID NO: 1012818 - protein, 203 aa, Homo sapiens
MVSLLDVHVRILPVPHYYKSREAQKRESEWALLGERGSSMRASKYHESVTVMRYESSPQENSSLLQRGNEREHCVYRRRACGTSRFTAYTVVKVCDRPVKRLGSSVDAHAYTMHWLGRGPVALDLGSRESIARLHTTYSYFSPKAPKFGSEVTSKIQRVAVKCKWHDANVPLSVAVVELVGNCLLLIARKHKRMMKEGPGESS

SEQ ID NO: 1012819 - protein, 191 aa, Homo sapiens
GVGRMGSGRRPHVHSREGLGGRSGKEWEKELGPGIPAPEDILRTRGTVTHAEMSAQDGGWLMELAHAAVLLQSGAPEAAVGEGQDAVRAVSGQGSLGVKSLESSSSYNSETPSTPDDVLNFLEHLLPTGPVLRVGPTDACRGGPPCCGQIGGGLSTHCQIARTRSPGPTEDPVRTLAGHLKPEGTRALKEV

SEQ ID NO: 1012820 - protein, 75 aa, Homo sapiens
MNRESNPNSRIAEDHEFVILRECVFSHEHRTPEQYPARNAGRFLDRTAGSPYGLALAQIPLIILTAEGRESLLLD

SEQ ID NO: 1012821 - protein, 76 aa, Homo sapiens
PSRCPRIPLVRARRRYVRGRSSRGGELPAPGDAVSRIRRPSETLTILVIDSSYTDRRLLGYTFFIGAKTLASCCCS

SEQ ID NO: 1012822 - protein, 86 aa, Homo sapiens
GFSIQVLEFLVPGAPHLAERSLSLRHDASSGRLAGHAFRGLEDYEVLVHRLAQAPIGRLPEDRGGMSDAQDISLERTCTMAPVTRS

SEQ ID NO: 1012823 - protein, 211 aa, Homo sapiens
AGLGGAAGLDGGSCGHLAGFAGFSGNKATGDSHYVFRNRSAPLSAPQMDLAAFLATADWAPGARSAPAGPAWALGGGRASAPFPLPPRWRRTPVLVCACQAGPFPPVTGGSLSPPFVSEQAGPAYSVCQLSSRMSPSILGKGRVGQTRGSVFLPRRPSLLAPGPSEAAVMAQPARFREFPKRGPLHAEFALSRDGDSPRTLLTAHSGLQRV

SEQ ID NO: 1012824 - protein, 134 aa, Homo sapiens
  misc_feature (60)..(60): Xaa can be any naturally occurring amino acid
FCQLYTDPPQESYTSYHSPGRHHCNLMIDIQKDTAVEGEEIEVNCTAMAQPQPDSQTIRXVRTGNHRAKRQIGGGKSGSDMYTVTSQLMLKVHKEDDGVPVICQVEQLLRVTGNLQTQRVSREYRYKPQVHMSD

SEQ ID NO: 1012825 - protein, 154 aa, Homo sapiens
  misc_feature (114)..(114): Xaa can be any naturally occurring amino acid
FGLLYICFFCFNFLKHITSGGVLCSARPRGRKSLPARDGGFTLEDIYMLRRKDRGSTSSALACDLLPGHGVVPQEPHGQLPPHEACVELGPSECSAYTPGYAWQAMQPKSILFXLELSSCGYLADETSLAGPACLPEQGLAEAKVFQLPTSYQT

SEQ ID NO: 1012826 - protein, 249 aa, Homo sapiens
MQRSWAVLRTRLAYSLPVAGPAGAGAWVRALPVGGWRGAAAWAWKTRRRPALGRRGNGQRRAPEAGADGLSLRGAGSPARGGSGSSARSLRAAHWASLAGVRRRRRWRQLPDPAASAVGYDQRHGSPRSGRSDPRPVPGRLRWAAPVQRFQPRLPGLRPGAYADFLPARLPCPRPLAPRSLAGPAPFPLPELPIAPGREGRPKARPELAAWRRSPGEAELGGSEARNGAGLLRHLLKCGLASTGPQQGF

SEQ ID NO: 1012827 - protein, 110 aa, Homo sapiens
  misc_feature (61)..(61): Xaa can be any naturally occurring amino acid
MTNRHELKAVVPSYLARETGHHQQEFHPFNRVFQEIVRTIVMDPYFITRSKARAYRVEVSXVYMSVEALEYCGLLHRFTVRGPSNSNELIALIRTGSHWSRRFIDARLLT

SEQ ID NO: 1012828 - protein, 73 aa, Homo sapiens
WYGPEFLDDPRLQPPGPGGALRCRSLGCLLLSRSAMSSEVRPPGRGGASEARPSRFLPDACRPAPASSARLFS

SEQ ID NO: 1012829 - protein, 258 aa, Homo sapiens
MTKTDWPCTDRRYPATHRSTTYHNDHLLVPWGPTYESVEVTTRASVHEPRGVSFVLAAAWMSYLLAFSLVAKRGQPGRGSMGNWSMFTWCFVLRPGPLIILIVELCGLQARLPPVLGANSPSAFALLQRSLLLASTDLQSSTPAPMYQYPVATDTIAETTPSPGNFFSCIACVAYATEVDWSRAQAGEITGYMDTVPGLLKVLETFGCLHHLSRFNHVTPKLVPWQQDEPLDVGYGAKEIRPYAFNPKRSTSQTIAEN

SEQ ID NO: 1012830 - protein, 110 aa, Homo sapiens
FRPVPMDALGKLKQFDAYPKIGEDFLGQDLSGAPACTIVSGLLDAATCVLSDAAVLRSPRRVHAELYVDKSRGDKLKINYLMYFFRNMPCAYLSIDAMDVAGESACWMWN

SEQ ID NO: 1012831 - protein, 115 aa, Homo sapiens
GTSEDAVWPEYRLRTVLQSCLRHTAMGCTQESWLCDIRARYCLASQAKRPFYMLREEDISPNRSLGIGDVSKHITRRSPAPYAAGVTPFSLLGSDKPKSFLIHPFSHPRSQGLIL

SEQ ID NO: 1012832 - protein, 111 aa, Homo sapiens
MCLLQYKRIPIADGLIDRSLPGFDWCLCENNKIVYPNVRPISLKNSLYVGALVMDIRATLYAVTLIDIYVNRLRGVSYCTTHECIYVMMMLNMVHYFIWDQRIAASHSALE

SEQ ID NO: 1012833 - protein, 190 aa, Homo sapiens
MAANAEPERASAAIRPTCGWLTSEVPDRLGSLYLCKATDNDIRVAVQRGEVAWSEMVESSSTQVGQTVMYAVLSRDEGPQALDCPKFVLINWTGEWRLTDVLEGSLCQARSFSQADGQLPERGPMLTINRYGLEEDVRDHEVHHGMKCGLTVFRMPTSSFHNGEWRFRGRGDLPWPHVWLCVPEGPFARV

SEQ ID NO: 1012834 - protein, 118 aa, Homo sapiens
MSSWSVSSECLDEKEEVLLDRPTLPAGKGLVRFLVTALGHRSSHSSPKDVVSKLQESWSASRGWPRMSERLPQSCNASGGPDELSNRRGGPGAPFHHPESGCRRCCALTGLHWLSCSW

SEQ ID NO: 1012835 - protein, 144 aa, Homo sapiens
MASEKPLAAVTCTAPVNIAVIKYWGKRDEELVLPINSSLAVTLHQDQLKTTYNRPSSAKDFTMDRYLAEWPGGRMWGEPRLLGRACGEIRCLAQKRSESRAVMGTRVPSMPQLLKVHAVIVVNNVPHRAVGALASLSVRGYALP

SEQ ID NO: 1012836 - protein, 124 aa, Homo sapiens
MQKEGSSSRGRAKKQYHSKDYTEGWVEFRDKRIAKSVAASLHNIAYGYPQVQSPPIMTYGISSTCTISPGPTTASTLPLSARCAHRQHLRVEVTQAKCETIFYLQSVQWGQCFLAVDGDLAHPD

SEQ ID NO: 1012837 - protein, 102 aa, Homo sapiens
MKWQYCRASVTQSGAPNLWQNCPDCVGKPCGNRKPLSSHGLPPCQPPSKGAWQNLSSNHFVTVPPASLTTSRPKAFSGKHPPVWRTCSDTSSGVGMHLFALV

SEQ ID NO: 1012838 - protein, 41 aa, Homo sapiens
EESGYESVLCVKPDVHVYRIPPRATNRGYRAAEWQLDQPSW

SEQ ID NO: 1012839 - protein, 250 aa, Homo sapiens
  misc_feature (125)..(125): Xaa can be any naturally occurring amino acid
  misc_feature (128)..(128): Xaa can be any naturally occurring amino acid
QRPSQHTTPQTLGSRSLLISEAGQAWSAGQTCQGALGRATPTPKQLPVDAPPECLPDPLEAEDEEEDYDAVGCVINSFIPQRVARTSRERLTMRNLVQRSVAVSDGPELHETMYAHLDVDLTNGXHLXASCRHFMRPIIRIMLAAIPSHYKRNAQVIGLNMTRQRDTHTDVRPSIAHLEHKFSTPLQQRTVSRSHRNPLARSNSWRPGLSLRRYRGSPLSDGNIPFGPLQHTNPAEAHQGISVITAMKPQ

SEQ ID NO: 1012840 - protein, 297 aa, Homo sapiens
SGPVYLKAFPPQATLADLPQNGGDGETKAQSKVPLMVPGLSPSRPRNRPYLPAEDGRAVPLDRPSSARMATTESHLTRLTHECTLRFALVIVQGRGNLAATKLFRGNESTIVQTTEWNSTLRHDRYMGKCMAQEVCLNLKLDNHVSPVSHWSAPFSQYVTMNRYKNNCAGPSSDQLSSLLRGMSTDKGIHKVQTRPLIFGHGLTIMNSISPCTHLYHRKGEIFNREEGANAPRTPILPWGFRRTYQENKRRSHQTHGKSSNTNGAWTAPGEKPVRPHASLKHFPRCTWEKDETHMGA

SEQ ID NO: 1012841 - protein, 152 aa, Homo sapiens
MLVSTLRGTPQPTQCRTCDGAASIIDAQFISTGCVVKKLFLGGHRRGRIDDLDDQIDDKRETNARFEYPSNSQTVCSQSRLLLVPYRKSHYYIRCNTHDKSSISCKTAAMKTTVSVGSYKLQILAVTVTPSCIVLDPARRLTERRTGLFAGL

SEQ ID NO: 1012842 - protein, 124 aa, Homo sapiens
RSLCREASDAGGSPAPSTPSAFTLLLRAAFQSLLDAQADEAVLGKPLGSARSWILPGLEGLAREKRSRRSEKGKAPGRGSLRCFALRSVTECWRTWLCQDSERDSEHCFVPHLGTCIDANSIVT

SEQ ID NO: 1012843 - protein, 82 aa, Homo sapiens
TTICQLLSSVIGHGAVATSAFSVSDGSEWRSCCAVDAAVLGLLQAGGSVLGQAMEKVTGGNLLVHSCWIAMQPFTTHVLVIP

SEQ ID NO: 1012844 - protein, 104 aa, Homo sapiens
MSEMLRGMYGILKPYSWPVLKSKWSWVFCVFICYICACLYPAVSPGAGTGCMLWLVHDPAGVWGACEGGGETGMPVQCAWCSPELGPVGLDSDATGPSAELFRM

SEQ ID NO: 1012845 - protein, 269 aa, Homo sapiens
LPSTYHTHIPDPSRRSVAVEQDSQSRTHFPRPSPIPPSLLPDPRLANLKSRRSYYDSSATYRQTFGLSSLTISLYNNVCVDKGSSSELRGYISLCLDPITMPQLLIQQFLQIRTQHFPPLTLPTAWRFTPRMSVWSCGMVKDGCPCVVIEGVSFGAAGGTELPGSMCCVLSSMQVGWVQRLSHFACLKAPEPLGPADQIRAGSISSRSPTVGESSDEEPVESRAQRLRRTGLQKVQSLRRALSGRKGPARATVHPVKAARLGAGRSAEA

SEQ ID NO: 1012846 - protein, 137 aa, Homo sapiens
TSVTRTTVVVSRQGERRTNWSVKKSEVEVRRLGPEENLVWSPACIIYVMEESGVQGTRYSTRPGASHPWPSQPEPRPSGRLMRQTVGACEVGMGLEKTKAAETIYVTQEHATGSRHRAHEGQGTTAEHCAQQVLSLC

SEQ ID NO: 1012847 - protein, 247 aa, Homo sapiens
MPAPATMWELVDSLAAYREAYVFRPKRRCPELPMYAQRASVSHVPPLVGEPCHSFPQTWPYAVTTSSSMQIKIVAPIYSVRMGTKTYSDESVTMQLAKEVLIKKGKDLLLERPQHGNSETVASNNRKGIAFADLVHTGQLHRRLEMATFALFKDGDQKLEKIICQESQYIAVICWTNQNGQSIDISFPVFVAVTTCHLLDLLQYRSYKNGDPELTVIQNDNEGLHRQAEHRQPGGPSPLVDDLPQQN

SEQ ID NO: 1012848 - protein, 69 aa, Homo sapiens
GPRAPAWGHCCTARTSSPPRPCQRRFPGSRAVSHKHHAVHSDATRYYSRQTDDNMNHSITRTKHTKLRP

SEQ ID NO: 1012849 - protein, 250 aa, Homo sapiens
MLPALYVDARSKLKTRKCDDKYACNIHTYNYQYVMTSLETLLDQDKDTGDQRHPEKPQRRRHVSFPSFEFGGPYRYVMDGRRVTEDMLTLRTHKSWVSRMAWAILFCINLDTKLCLLIDDHPVSIYLRVLRNHTGQVNHQIKITAHKRKDNKVERRTLSGGTPLDKNGLDFTPNFQPVAPSENKFTRLTNRLLIYQSSKRMKHGYTQYPTLALPEQHTIVHPNGRSSKGGYRTGGCPSEWSGRLLTREIH

SEQ ID NO: 1012850 - protein, 248 aa, Homo sapiens
LRAVDYLSREVVRNSTLFAGSSNAPWSHVDVVSTGAGTTGLIEAAVKMLGVPGVEEKMHWLPLVLLRLLRSPMLRGHGGASWPECDYLGVSGSLHVAEGSHRGAPLEHRRHLFSETVEAATRRGAQGRDASIPNCLDGLPLVGRLPGPEETLPRTGQLETGSPAGPDMGNVQHWYRKTLVRSIATATSTVQQGCTDLVGKVPRGQQYCKDSQAGLTVTKGAECAHGKATDWAGHTALYGGTADSRNHK

SEQ ID NO: 1012851 - protein, 354 aa, Homo sapiens
RGGGCRDPSSVSRHVSGGGGNRWDETGGRSVVLHSRPTMLCEQQNGAFLQGRKSTAGPRRGHSNALLRSVATRGQHSGKWPRGAVCLRESGDMEDQEDIDCALTSCPDNEVLVTRQSGIAAGSVGPVQCGHAFPGCRMASNTNRDPVGAAIGSSNLLGFLSTCYGPQGGLVIVGPVRCLRTVAAATSGTTPVAGGLDTGCSDGTLGETFHTGSPTTDLSASCVPRAHGIAAHPSCGHVLGSRSCRGLVLERVHYQRPSPSLGASGRPTGTPCVKLPGTGEPKHTVIQSGGTFSEKTGQGVQRKGTGGPGGYGKSAVKAWLLLVAQEAKARLGPSVGVSSSPKGSVRFLNRPGGT

SEQ ID NO: 1012852 - protein, 120 aa, Homo sapiens
LYRGLRVSSMASAGLSPGGGVAAVPGGTFQPYLDTLRQDAAADGPNAVVRSGGGSGGAADASLLEVNPEHKERVRELVLHCEAFVIPGKTLLFVRLLTGLYQRHVRRPLLTAVLYSMSQQ

SEQ ID NO: 1012853 - protein, 305 aa, Homo sapiens
MQLHGARAKDIHGQRWMQGAEPVSTSRSTESDRMCLVLTIGADTALEGGCYRYPQCVQYRSVQKAHEDAPAGSGGGIAEAAEASEENMQKAQGFLGPITPSWKVHSNTSRPENDASGGHEQIPLTIRMLKPPKLEVTRHSHLAQETPSEAIGNSPRSNVVKRLRLPPRSPQDLSEMAKVTCPGKALTRQEKRSHQEEFLIPGKHEGTDNERREAEPSSRHPRKLAKHQREAQGNKKPTEQTQAAKHTKPRKDNGTDRKKGRTHTMTNTDATTRNHQPNRQRNKRRKRNTKLEGGRKTEGTKKQQE

SEQ ID NO: 1012854 - protein, 96 aa, Homo sapiens
RVAALRGEMATGTDHVVGLGLVAVSLSHLHLLQGLGDFSWCVILPVLLLTFPEPWHRQSNYYIGSRQRRWLHCLPHLLNSPEQLYEEDASGTAFYR

SEQ ID NO: 1012855 - protein, 213 aa, Homo sapiens
  misc_feature (3)..(3): Xaa can be any naturally occurring amino acid
MQXLTPDGVPAFLQEANEVRVQIGVVRRLLTYCKRIRCMQMHGLTARDSTRHLKERCDFIVFAEATGRVRVIEHWTDVASSNARPSRRTHLVGRAACSDFDQNYLASDYMGPASGWPKKGVEPFHRASENGIAEHLAHRPELHPGGRGIEVRPESWDKKTEKRSRAERIGGTPLNKPEIWLGTGLKGSSQGALLSFDDLPRGTCEQRYWLDNL

SEQ ID NO: 1012856 - protein, 298 aa, Homo sapiens
GCCRYWTRRDERGGVRQRGLQRSPRRRCPRRRQSVVAVVVPVPAGEPARKCGCVAWLAGGVLEPASCAPHAGTPSAAWCSLHPLAILADWRSRGTPRPPPAPGVSADKPVLTIQVLGHVSNWFNRPDMVTDSSTGIDTKEDVFVHQDSYLKETTPGRYLRRRREIGGELLENLMFGGSGEQCGCRKANIKCKLGTWRRAYPMKGGMSVICTTKRNGKIRGENLQIHPRKINQRQRRLAHKSRATIRGSGKEESHSNTRSRRDTKRSTMRQRINRGEKHRGRKKTDIIRDNRSHHRYYN

SEQ ID NO: 1012857 - protein, 385 aa, Homo sapiens
MERPWKRPLWSDSVSFKNMEEGRVCRRNFSRCSVLSVTCLPTDPCPEPTRPAMSSVSLQPEALPTWLSAEVKNQAGPEVLTSQLGAGADESGSECVVDTCRLHRQQLHGRPSTDGIILCEFINNAAGQCSVKEDAMSQPKIGTRLENIGNYIEGQYTKYGVKPLRHMMSANNLYENNYTYTGASTTTTWALDQTMANDANGTQRCTREQVALLPETIVSAAWHIRFSLVKPKHDHWSGNESIVCMPDYGQPNYCCAQYQALGNEERDKYEAKHENGQKPLIRNNAKSTLEHNGTDEASVKHREDTSAGSVHQLRQRRTKMIAKNSAVDIYCTQGNDKSGNEIFTDRPWRYSRHNGMAQCIKMSPGFHTMWQDRDEQNKSASTRDR

SEQ ID NO: 1012858 - protein, 198 aa, Homo sapiens
MNFLAVKLPALWLTQCVRAAAEQSAECCFPAQCSCNRHGMWPLANVPAPGPHEHGTGYTWGTAPQAGETRTLGRGSSAPNRMLSFSDCPAVQSSPTVMILPVTHTEISPEQVTGHVLLLVRGVALRKDIGSPDARPGTGLLTLQRLRKLLRLRSARGGEASGPPYVKRGQAESNKVLHQPVLTPVRRVPGLPGRGCGD

SEQ ID NO: 1012859 - protein, 106 aa, Homo sapiens
MGKLNEGNEAGHYLRMRRLDHAKGTFLGTQEKSNSGKVYNTFWNGIRGMHFTIGCDRNLGEQTISTRTTHLKGGVRRRSPHDESPASILPEQKCNVILKVNRAKKQ

SEQ ID NO: 1012860 - protein, 145 aa, Homo sapiens
MAALRFERSLERPLGTMRFIMRTVLPFVHRTVGDTVCSVSSDLFVFCTRWLMLHVSRERRLPGGLHLDGNAASCHHAHTKEGCSPYGRDVETRRRRGRPERRQHRRLVRRLPHYFMETHPQEGSGDDKPVYSTHRVMGEPNRTPK

SEQ ID NO: 1012861 - protein, 183 aa, Homo sapiens
GKGLQSRVVQCMHKVTVRLRRASAPPSRSLPPTDSATRRSATTRINANYHLPPPDRCCSAPINMRHEYHVDAYIVRVYSEKIEPLARHMRVASQQLLGMTLTGSIHTVQTESVASRIRRSSLTQQLPEGSAHKSQYFEVLEEPTRCALMHSPGACGPSPHSPVGAHKESNCHRDMRRGLGVRH

SEQ ID NO: 1012862 - protein, 162 aa, Homo sapiens
MPGSRSDPGLQPLPPPLPAPSARLRCCRSGGCAAGALSAGHVLAWPACGPGSCCLRWLEWLLSEPVSAGCKLLANWRSTRTARRGVSRARARRCSSTGPGCSSGSLLWIGPQAPSPLLGLAVNVVTTLVLISYCPTCTEEAPYWTYLLCALGTFYLPVTGCY

SEQ ID NO: 1012863 - protein, 107 aa, Homo sapiens
MSVAVLPHLAQLAGQCVTECHPSREGGPAEVRSIRFVPQTWESILCSERWHEVLVHGIADEGGGHKTSACVFRIHAAWQPRRLGMAGRCAGPFVVITSESHAQQDAH

SEQ ID NO: 1012864 - protein, 124 aa, Homo sapiens
RPSRGLRESGVGLSALPHCGRPLGGGAFSPPGGGVFLTNAFGLPGGLRPFPCLPWTLAPNCCGSCAGRGFTTTPGRELRVGVRCLRPERGGPAGRTAGEGRGFEPLPCSAPLTAGRRGHTVPCV

SEQ ID NO: 1012865 - protein, 155 aa, Homo sapiens
  misc_feature (29)..(29): Xaa can be any naturally occurring amino acid
  misc_feature (111)..(111): Xaa can be any naturally occurring amino acid
  misc_feature (143)..(143): Xaa can be any naturally occurring amino acid
MSRARSHLRAALFLAAASARGVTTPVFGXCGGGAFWKGTLGPGFLGGPPLGCVLCPLAQRGLNGPPRNGPTLGRFSPNGGTLSQDGLAYCPSNVNPLCPMKHRVALVLLLXSKGESRPKSVGLIPFKNQQFWNAQWGHLLPLXDRNVVGFASVGT

SEQ ID NO: 1012866 - protein, 36 aa, Homo sapiens
  misc_feature (6)..(6): Xaa can be any naturally occurring amino acid
  misc_feature (25)..(25): Xaa can be any naturally occurring amino acid
MGSRGXFGQAKPNETWGKTISGSDXKGLGRNKHAFI

SEQ ID NO: 1012867 - protein, 197 aa, Homo sapiens
  misc_feature (28)..(28): Xaa can be any naturally occurring amino acid
RQQRKRVSYSPPGPGTPESKKATSCFPXAPLTPPENLDQFCPTKAGGSLGPKKVTPKQAPKPFKPVWKGGAPEQHAQTRATSFARPSPLPLYTPTVPFETPVAPKFEVARSRHLPFKCRRTPKEEQAYGRHHSAFPVRVCVDAPSHANRAPLFQMGLSPHKSILRQLVGKTLLYHEFSFPFDPILAQTLAPSKFRKS

SEQ ID NO: 1012868 - protein, 40 aa, Homo sapiens
  misc_feature (31)..(31): Xaa can be any naturally occurring amino acid
  misc_feature (37)..(37): Xaa can be any naturally occurring amino acid
TRGSLDVWGCFCPPVLQRSRFQPWRAPKDGXDGFQKXGKT

SEQ ID NO: 1012869 - protein, 127 aa, Homo sapiens
FRTTVRLVRWGARGRRAAPGPLVLGPPAQGPGSPASPPRAAQLRRLPPGKPWYSGGSPGFSPGLRSRQTPQSSLSSSVLDVPLGPSRVYRLSPRAPLALCSRPTLLFLPRAPPPSGLTVWTAGVSSL

SEQ ID NO: 1012870 - protein, 132 aa, Homo sapiens
RRRGEFVLRTCTGLAHVPAGLAPRVPAGLGRGDSGSRCPSVRCAGLGKAPPPSRLLRPPRRNVSPISLSGSGGVHLRRIFEALGAGSNENPLPCWIVRSQESLNGANFAFVKPIAPSDLQFRKGEYFLDNCV

SEQ ID NO: 1012871 - protein, 142 aa, Homo sapiens
EQRGPDRAPSSVPVPRDVAHVPEAAGPVPCAWPPQRAVLASPRSVRGGPKPPGRGGARASGGAAGPAPGMPPGKVLQPVLNDEVVDELFLYWLSEASTQRMLQDCLRRIKAPGRDQPTPGDGEQPGAWHTDQSTNKDKRSRT

SEQ ID NO: 1012872 - protein, 72 aa, Homo sapiens
MLLAECGLCLGANWERRYIRFDTFRFLLFLLKASVVNPTLTRSLKLVPNPWFQGADTDTAMVDLSPKANFLA

SEQ ID NO: 1012873 - protein, 261 aa, Homo sapiens
MQDERSQCKVVCTRVHEQGPHGYEHNLCKVEKQLVLHMARQERGKTHTMGGDLVWEKPRNASKGIYAMDSRDVFLLKNQARAYRKLGLEDLCDITSRSTMGSCETLINKKAKLRDAGGRQATGARGRGLTRSIWLHQTDDSHQEMIDMGSAQQKHLGKTSAKVPKSITRNPRVHSKSTATETKGRNAMDTDTAKDQTQAREMTRDRRNTIARMAWTRVRTPDNGREKDSSNTEASKPPVRKRHRGDHKATGNKVQTRERET

SEQ ID NO: 1012874 - protein, 47 aa, Homo sapiens
MLIVSCRLNPVPEQFHPSWSKLSILIIMHPDKAFRESARCRVLDQEP

SEQ ID NO: 1012875 - protein, 147 aa, Homo sapiens
GGKAASTLMSHDEDRRSRKEGGFPGTTWPDMSRSQVDQKPQGLPLQIPCVEPNIVGCSPASCREMGSAPGCRAGAPDATTQGAQHHWSHPRGHHTRYIAVMATVADDTRHVDTTVRTTREERDSWFDRKAKDATHSSRRDTDSHGPS

SEQ ID NO: 1012876 - protein, 116 aa, Homo sapiens
MAISWGLDASADCSLQRFHVHANIEGYVTDWNSYSDDTPEVNTNSSSILALMGASACGNLKNLPQVEALQGWLMGLPESCFLDPSGRQGISSNLVNLHQKQLRDILLPPKSRCPAP

SEQ ID NO: 1012877 - protein, 80 aa, Homo sapiens
EPTNDTKHLPGRPGVVEAPAAPPPPRKDAYRECVMLGAVTRTVRFLTAQQHDATLWIPGRVPDGFWEGASSFLPPRSRAL

SEQ ID NO: 1012878 - protein, 416 aa, Homo sapiens
  misc_feature (102)..(102): Xaa can be any naturally occurring amino acid
MGVFLTESDSIGGCESMEPRCTVPAWSYHCPLALCSPVVHETTDPHEQHELDPTRDDAIMAGLQACSLACSSDAMGVHRTILNGPQGAGLTLPGLAECRQMXSHRFLEAAAWSHQGCSHGWAFADKDEAKGSAAKTIHAEDKPWSGREQWAKSLLSLKGYPNATFETHGADQRTRHTRDPRCWRNRGDIIMPTTKALRVHARHWGVNVPDMASGAAPPGESSLPVGALLSMASGHDHAHWERPSGPMLLPFGNLHRDCASLGDPFWVFTHRGIDLGPCAITKALPSLVWRIRYTPSECVLALVPGRGLSARWSTPFGVCRAFIRASLLSHLGGFVWNRVVGDALRTITQRPRPPKPSQLRGPRVIQTQSSLGRPKCGSIVQAHKGDNLRNARRSTVPIFRGATGKDPPTRGGPPRV

SEQ ID NO: 1012879 - protein, 220 aa, Homo sapiens
GSAGRNPALLGPGRIRIRPPDRVLSAEVTQLGQRQAHAALQAAASVSARPCPQRLRSPALTPSPVRHRALPRLLDADTDAATAASDVATAASDVAQSRGKSFRPRPQLSDGPASAPTTPLDSPAPSASGSLTSGLGPRVGNCRARKRWAYLWLIFSTVAQTVARSQLTAAPGCRAPKVLGLQQHRGCDVWCSCERGAGRGRLLAQCLDDGGGKTLLWVRS

SEQ ID NO: 1012880 - protein, 217 aa, Homo sapiens
MGATIHERRRPPPSGLQPGPVAPRHLATNLNAQPPPGKRPCPPARLGRPALRHKSTGSARCPAGRGVPVPSLLSAPPCGDGCEPARESLAPQAAPPNPAAATLRDGARGAKPLPRSRPRQAPPANRKQVQRAPQTMRSSHLEHPKGHNAQDGDRTEGDTAERFKGTSKTSRQPFIRNMTAGPGEETRTGPRGGQHMEYTIEYQQDNTRKQSDRSAER

SEQ ID NO: 1012881 - protein, 37 aa, Homo sapiens
MVGHKNLPIQREILETGPPGGTILYKHLRARVLQGGV

SEQ ID NO: 1012882 - protein, 89 aa, Homo sapiens
MSWLGAPDAPGTPPASLFPRPSEDEACSRGVMWRDRRRCPAGPPSVCGVSPERGGSDVPSAGEGSILSGCEPTLCPLFSYFVLFLPHMW

SEQ ID NO: 1012883 - protein, 58 aa, Homo sapiens
QCTLDIGIGPRLVASRRHGLGLAGCGARLPGGSGLQSAPAPLACGADPRSYRSVRECP

SEQ ID NO: 1012884 - protein, 219 aa, Homo sapiens
GAERDRASRGCAWARAARAVTRARGRERHGFAGALRAAMRAGAGGPARGGALRLLDSSNRLISAGRTPAPAVPPARGARRRPLRPDLLLFATPQAPRTTTSAPGPRSATAVKRRLDLETDHQYLARAMGQLGAEAAIQWTGVNIPGVEVNAMRPHWNLTNKRFLELLSHSTDRCRPTELGCEGSRNVQKRAPSINHNVLEGHTINAKKSKNKSSEEVSK

SEQ ID NO: 1012885 - protein, 102 aa, Homo sapiens
MTLVEEASGGQHAQMALSYREVRECRSEQHLVRFTSSARVYSDYLQTILKELQIGRDTPPDLCHHELPASGTSPGMVRKSWRSYLENLEKPVQCLGQDAGRV

SEQ ID NO: 1012886 - protein, 136 aa, Homo sapiens
ACLLSYASSGSTDPRIWCNGWLALGRLVTVVGSVRPPVPKPAFSVPPPCAQVAASHELDAPWESDVASQQEQTPEKPSLNSYPRHMNVLSDPIEKEMFMTKAESRQLKKEAQADPASLHPWTSLTMYYWCVVDRPG

SEQ ID NO: 1012887 - protein, 207 aa, Homo sapiens
MPGPGGGVGEAEELSAWGRLGVVSAEEDALWDANRRAFRHSVWLCALIARSKSHAVSAPLPGHRGAGARMEVLSTYRFPWRVNRDRGRLMDILRCRWQEGLVRPSWKALEFVLAPNTSRCSLGRGTRALALRPMILDEEWAVGPDPNSVDDERCDWLAGKLCKSQLQLVSSNCSARGRVLEEERAGLEQRLQGPAAGSGALTKAAGG

SEQ ID NO: 1012888 - protein, 218 aa, Homo sapiens
EGCIKNNTPWKQYFPLAETDQKHKTRNPRDAARRGEKTRVDWDDHWVDEESIEKQTVPSAVYGKKRADEEDMVTYGLVIWPLPFSGTNSDCQFCEQRTVFILTCIMRATWRDSSICPWKNLADTGKSARREVTTRIYSHGVHQGKQTDCLPSWIVMALVDGSELSDDKLEMRGRDTDRKSILLWWNQFFCRPRCPWFLQQLNKVISEEKPLTFLTLWG

SEQ ID NO: 1012889 - protein, 119 aa, Homo sapiens
MHAAKHGWSEQRFFSPDERRSFTTTVGKRTAAPPGEENKREEKADYKKECQYARKKNSDVKIGSFFMGEEPEQEKEKTKGDLLSDPEELLKKESGLFTKQRFNFSHREENASYVKMYIE

SEQ ID NO: 1012890 - protein, 191 aa, Homo sapiens
PRCWLEKLVEEFEMKEDEPWYEHLRTSSKIFNLLLSLEKTLLDGTQSWMDSVQRDVYNQFRSSLHGISRYLTKQVGTFYWLGMTRTRQCKWFMTRSYDDQQAQGTGKRTNVNKLVCVTSKVPQHVETVFVQPGTEQRVGIAMPKRKRVRSSTPKRPKGAMASIGKSIFGRMVHERKPEGNVVDTKWRKILS

SEQ ID NO: 1012891 - protein, 69 aa, Homo sapiens
ETSRTPKCGENNLLFTGAWPAGCSTRNWQNDVNREVRQISVHCKLAKEIRPQTRESCFGTVNYSSFETV

SEQ ID NO: 1012892 - protein, 205 aa, Homo sapiens
MVSRAQSGVKIPGLCAKLATAASCVPPCAEWLAGLPWALCALWLECCLLNVFRKSGCHLWHCSDDRITRCPTCETVIRSKCLSLTRYLGTLRVDLTPLSELSIRRGIYVANRRRPQVGQSPVGKYASERNAEDDSPFNVPRANDIGKASSVMGNTKEKVALEVVHEEKRFVATRSATRISHKVLDSLEPTVRRKAYPFPLALPWR

SEQ ID NO: 1012893 - protein, 148 aa, Homo sapiens
FKWVKQQCEFDKTSPRTQYQGPKLDLGFKEGQTIKLNIANMKKKEEQLGIPESGPASTGRAEPAYHPSPQGGKPPHLIPPPGGDSVSCERGIPRYQNRQLIPVQEVHPVPLDHRPILTLLTSGETYTKLYRIKLTEQNQHRTQAGSRY

SEQ ID NO: 1012894 - protein, 198 aa, Homo sapiens
RRCQEGAEGKTRISTGWEAARGGQRGGSLASVPGARALADAVVTSGTPGPEARPGGTRTPPVSPRAWQASGRVSGAEEDGEEPRPARQRPRREAGAGGRASGRRTWVMESPKSNKRGRAGHSRSPRSSTQCNGCSRAGRGGGARHERRLRKWPAVGCGSRVVGNPTAVTLVTREGPLPPWSPFGRRLGSALVTPSKVP

SEQ ID NO: 1012895 - protein, 264 aa, Homo sapiens
GRALHWPRVPTAPYSFRALTRVPGPRAVMEWSASWCLSLRLGPSTVPGTPEVPLAVGPASRLSPAPLYSTTRREAEENQDHLSRWVGPGSREVAPSVRRSCTKYALHHNLSTVGPPCASRRVTAQGYRPRGAKRQAWARATTPLATGTRGAQPTRLTPTSAHEPTPGTGGTPFGPSPSTRQHAPQQGQKHDPHNHATPDPATTLTNDPRAHRSGPRNTPPIENETCDRSDEPHNTAPMGPGTRKAQQTYRPQRSRTTQVGNDAT

SEQ ID NO: 1012896 - protein, 86 aa, Homo sapiens
  misc_feature (29)..(29): Xaa can be any naturally occurring amino acid
VEFYCQSARGVDSPSATEDYLPDQEPVEXENFLQKTQDQKDTSLGSLCISHRASDLELQLLGGRDNLQVKCMYQCTPWKSHLAFSR

SEQ ID NO: 1012897 - protein, 194 aa, Homo sapiens
MAALRLLASVRGRGVPAGGSGLGLSHGCARCFAPVPGSVQVLQRTRWMMVKDISDGATCHDRWLRALRDPLRTCSPAVRTRVKDLQVCQAATVGCGRTSGWAYLLAARQVLRIVCSYVGENTLCESQYLAGELELELTPQAPWPSASRAGGAGVPAFYIPARCYGNPGPVKGAPALSAKPPEGHLALMEPSPMR

SEQ ID NO: 1012898 - protein, 206 aa, Homo sapiens
MRRREPYREFIAKARTTHDRIARGIYCVHEEARLCRAVCFLWVDVERVLRPALACKCRKDTIALRRPSRCAQLKLPQRASSCLARTHSVRHVAELPQANNSTYLAWLPPLRKQLFDSKETRTQYTPVPTLSVGHRLSRYNLPPPLGTLAHFHTTRGRSRMDPTPSTQTWRPHLANLRSKGVGRNDFPLPRDSNSTAARQTLLGNLG

SEQ ID NO: 1012899 - protein, 178 aa, Homo sapiens
RPQAGRRPQHTSPSQRPQRARAWRVKAGASAGGRGGGGTGAGSSAALASPGSRPSRSLGLSRGAASASFLAETGVGHGVAARRGAHPAAQTPRGSGEGLGLGPGPGLLWGGAERLQLAAAAPGEEGVPGSGQAGAPHSAAAAGLARTERALPVSAASLCKPRAGGALSLAGPELRGVA

SEQ ID NO: 1012900 - protein, 188 aa, Homo sapiens
SAGAAYWKGAAPLRLVSSGCIGDCGHRLEGAPLLPRRRPCSPLRPDLFPHDCPRALLATDVAPASGFNTDNPDREAARWRMEGDSVSVLRPSRPGSVPRWESYDLLLTQSQLRPGAAAHRGLLVNAYRQGAGRRVGGAGSSEDDCAEPPLTSMDDETKGDVQGNAVEPDGGSAPAWASRTGGLQIISE

SEQ ID NO: 1012901 - protein, 68 aa, Homo sapiens
  misc_feature (68)..(68): Xaa can be any naturally occurring amino acid
GAMVRGVGETPRDSGGVRAFPPKRWSGSQKTRAATGGIFGTPHTSGFLGSKPEGQGLRQSPEIQAQRX

SEQ ID NO: 1012902 - protein, 178 aa, Homo sapiens
MLGKCETQRGYDESEKKNSGGLEKENPMRMADLSELLKEGTKEAHDRAENTQFVQDFLKGHIKKELFKLAPRDFDFTYSDLEEEMERNKDHSGFGPLYFPMELDRKEALTKDIEYFFGENWEEHGARGPRVARSTLERIHLHWAERDRRLLVGAIAFTRYMGGVSRGGPGCVKKVCPR

SEQ ID NO: 1012903 - protein, 127 aa, Homo sapiens
SIRVLCWILECTAAAWLRCCALLCCTVYDQLEASCHEYWFNCNLHQQQTSQRQTGTLQAQNSFPCWQNPPQVLYFVSLWQSLIHVIQVVIGYFIMLAVIVYNTWIFLGVVLGSAVGYYLAYPLLSTA

SEQ ID NO: 1012904 - protein, 210 aa, Homo sapiens
ESGIALLGPSSLPSCGSRCHLEPLLPPPGGCPREGPAPIRTPDPCEVNNRRWSLCVPVVKDDYHPSRTWKYRSKDRVPLKVLWSVGPTDAWGRKLVPTNRHVLATIGVDFKVPLPMVWNGMVHHNNRVVERNGRGLGGLRSGKHQNGVRDHPLVKQPFFPTQGPWAFLPKDFPLFILKVFPPLLCGTNKPGGLSPFWGRVVRGGWVKTRT

SEQ ID NO: 1012905 - protein, 140 aa, Homo sapiens
AQQADAGFSGWDPPPRPGPAASMRTHHADRGDRRYLLLPAGHAPQRRGATGRASMSRRLATPFVEGFKPPAPPVALAGVKRLIAREPRPQPLPPPPPSSASSDAAQGDLSGLVRCQRRITVYRNGRLLVENLGRAPRADL

SEQ ID NO: 1012906 - protein, 121 aa, Homo sapiens
MTSVTEVALFICPCMRLSHRLDQEVTLDATCKANTISIYLSLDRKEAVGTIFTWHSDTSLPKKTELKDLNRHRCRTDRITDTQRKWDPIVIQGLKRMGADTCMGKNRLADRTIKPYIADFL

SEQ ID NO: 1012907 - protein, 293 aa, Homo sapiens
GARLSCRKRDCSVLLFGCSGVVTTFPGWSAAITVSVPDRGRQEIAVQIAQRGGLDGTYTVGIAVVLVLSVSVLRVSGQAKPRGARAPARVRRAGKGLEAAPWVTTARPNVSPRGREDRLMEHLSGCTPTSKHRRRWSPSALPRRPLMQRVRENIEGRSDGARGGSDKRPGAVRSRKGVDLSKIVNDGYLKSLQTDPRSPHMTSCRCSVELQGVCGQLSTPGGCQDTSTRRLRTRCKTETKACRIHRGPRRGPTPFIFTGMEACALAGDQLTFCSSPQCLVGADCMDRHDLLDA

SEQ ID NO: 1012908 - protein, 242 aa, Homo sapiens
  misc_feature (79)..(79): Xaa can be any naturally occurring amino acid
RDLGLGSFLTSNLEACAAGGVSLVGCSCAGGWVSRPGTCGVCPDPPLHIPPLNAALTWAWSLAGVFPIPWKSPGPVCDXTNGPETPPDPAEPNNMGPTGPWLRGGGIGPGSAAGACQLGRVTACLTGHGTRMSWLDAHGPDAAYAATGTWLPWRRHECRGGSGKVRGPAPLPCPTQLLTLYFDNRRRSGRGPCVELATDWACGGVLTFTSKPADAEQGLGPRPIIALPWLPSLSLRASSTTS

SEQ ID NO: 1012909 - protein, 196 aa, Homo sapiens
MKTADELSSPYDHQLYLRPGSHVDQLLDYFYSGKVVISDANTVRGRLLRVGSMYFEPTSHAFEFTVHDLPYYMSICRANCLRYLFLARAVMSLKEVYDVAYSGIRDNFHYWASPEGSMHFMRCPPVIFGRMIRDENLHVLNEDQALQRHSSLGWYFRTARSASTYSGQFFQYINLNAVINKTLVFAQQQLVGMENT

SEQ ID NO: 1012910 - protein, 177 aa, Homo sapiens
MAFADSTAIGAPTIDTTVHPFAQNPATIKHRRRVSAHCTCQSLCDLDTPPTFSPQPKRLQAPNLWLKALRRSVHLRLETHNTKSTLRNAGDTTPYSQHDIAQRPNYIPPCHLHRLLTTYCIDPILSQHLSPYSYILVYPPYTPPQLCDIEPTQIVCILNLNSMYHGVNPNPTLTSAP

SEQ ID NO: 1012911 - protein, 394 aa, Homo sapiens
EELAGRAGWLAGGRLMAGWREAWWRLTPAACGWAPERAQALLADVDTLLFDLLTGVLVAAWDDRLCLGCCPEALRALRSPAVSCLGFITNNSSNDPVAALLPEECSRLPRASGVSLLGGPGCQGLVQGLSGNGPLLGTWRLLNLCCPVVPCAWSAPSMSPYGRLTLTGGQAPKVPLGPSGNAGEGPVGRGFRPEAGMRVFGGPTDVPNLVQAGQSAVFPVGGRLGLCQTGGRGFGGPAGTRLPVVVRWVGLGSFLERAGKRFERFNLFEQGFEPIEGAPMAAYTLCERMPPGCIALRIPLLRGHSKTDFGQPIAPVALFRGALSRARPGGPGAFPTFQAQGRLRRGASWPPWGFQCIGPLYATQILRPASPIDRAPSRGAPGTISIYVRETRPP

SEQ ID NO: 1012912 - protein, 280 aa, Homo sapiens
VPNSRVCPQLPLSACGQCGAERPGAPRGRARVGAGPAGLPGLGSGRPRHRAAPGTGRGGARLAGNGAGTCGGVGDERGRGQLQGGRQAESAAPWAWREPEPAGLGGGPAAGLGPVPSPAQTWPGRTCTGRRPWSLGQRMTIKQGDGDRSQKVRSMGRSDGVTVGAHVPIRYLSSVVPRGGIPKERGSEGRGRVRGDQRRIPVSRGDVRRPGGARSPDGGCALSILAGILLMRHSNQRYPIREGVHCDKGQQEPRPWGATHRAQAGLEVTLPERPKTGGSR

SEQ ID NO: 1012913 - protein, 217 aa, Homo sapiens
LNTLIRRLKLQLKSHPPRVTSPISPHFTVTERQTFQPWSERLSNTTWNELRTIPPLSHGRPCEQAPEHYSRSKDVEHRQEPIQEHKQDEGRTQEEPEEDTGQTEGTQEEGQGTKEGLGGCVSAAEQTQSPSFTLNLYLANPSSFAPRVREVESTPMIMENIHGAHSDAAQEIDEVTEICDENSYWRKHNPCSLLQLAHTEALLVLCYSIVENTCIIT

SEQ ID NO: 1012914 - protein, 279 aa, Homo sapiens
RRHRGGCVRARSPRGSRVPGRVGVLPPCESRGPSALADTMNHLTVLAKALYDNVAESPDELSFRKGDIMTVLEQDTAGPGRHGGSARCMGSQGIVPGNRLKILVGMYDTEASRAWLRPSLPPRPSLSLASMPQAPSGLPSNNAHARQNTTRHQPDSVYLVPTPSEGSAKAFYQKVPGSQPYSSSSPPGQARQFQLLRSRNTISPDFPGPAHKTCTKGAPGPWKGLAKEYLTRVTTFSCARIRGAIDNSSKGTTPVSQWYNMRQALWGGALIGNDPPGAK

SEQ ID NO: 1012915 - protein, 147 aa, Homo sapiens
MYGTCRLRKFDCESQFAGTIHLLKRIIQEGSWTQNWAALPAQELEEYNKILLDMETTYSVATVLPTEWQLPAARARSDECDGHIPEILRPVMGMGGLARQWRRRAILQFNPEIRGTHQPGCPGSMAMEMPGDSVEVYVRDTIPGSMN

SEQ ID NO: 1012916 - protein, 235 aa, Homo sapiens
MACGCTRWGVSCLLLTSAWRKYMEDVTQIVVEPEPTAEEKPSPAAVCCLSLFASCWPSPGLPSLAGEVSGQMAHVVGSPRGSRASPWICRGPRPGTLAAACLPAVSVLWPFFCPLCGLCALAGPGEGGAPRLWPGEATYDREVYPSQRKARRGYTIVQRPGLNGDLWPPGPHYPATKGSIYPFGLWYTPFGPMVVTTEHIIASEHIGPPKCTSIAPAEDSYHRKHTHTGVDTNLD

SEQ ID NO: 1012917 - protein, 193 aa, Homo sapiens
MINTGTQMDLEVKGVAATSRSQIQPFFGRKKPLQQRWTSESWTNQNSCPPVVPRLDLGSLVDSDDEDQNIIPENFPAPTDKCKLKYQQCKTEIKEGYKQYSQRNAENTKSNVTHKQSPRNKKMNKCVQDEEANTDDLTTLDRKAILQQGYADNSCDKQQRARKLDAEIVAAEKKKQIVAEQVMIDHLSRGCHQ

SEQ ID NO: 1012918 - protein, 257 aa, Homo sapiens
  misc_feature (188)..(188): Xaa can be any naturally occurring amino acid
DPRLPAGALVLLGPALVFALGPVPAPEMRERLCGHHFVRALVRVCGGPRMVHRSSRRSCGRRSDRELLQWVEETILLHGLVADSNLTLEAGLQPLPQNSHLSPDITGGSLPTNPATADWLRSVACTAMKDRSCPVMIPTCMSSFGVARHYEVGLEGPGGVLVLVTLTECPSTCDHRSSRSLARPLYYXPGDGLLNYLARRPMTTWQPCESRAAVDKSDPKPMAVAGSPGFHQMSGQLYSLNVAHVQRSPRKLRSLHV

SEQ ID NO: 1012919 - protein, 179 aa, Homo sapiens
SSPGLPAPGSCSEGKTQKGQKQFLQKREDPQVPSPRRAAKDKHKDEDSELVGVYAWRKGQALVRSLLGPPPVLRRHHSKDPSRDPALTVDLGDSEKVIAAKVLTGLCPVPDATSAHSDQQVSGNTPSLASFDQPATIQTAMAILQDLRQQIQAGLELAQARKGGQELGPSKRRLQDVAG

SEQ ID NO: 1012920 - protein, 170 aa, Homo sapiens
QSARPGSCVVGPDGLYRPSHVLSALGACCRPSRSRLAKCRAAGLERRRRMALEGMAADAGCGACRVCGKLLGPALRGDVFCQTDLWKNLTVDEGTMRGMRCLACPDRATTCTLVIDDETKEAAIVDPVQPQKVVDAARKHGVKLTTVLTTQHQWDHAGGNDETVSSWSRD

SEQ ID NO: 1012921 - protein, 202 aa, Homo sapiens
  misc_feature (31)..(31): Xaa can be any naturally occurring amino acid
MSNKRPETCYIRNSISSIRGPTDYFTARVGXEARTSRFRTRHPLEGRTSKSSEARASIEVRGASRSPLLMRHAGRSVARKESMFTDNRSSIGGTNKEAQDQSWTGSLWTLFRPPGVPGRTVKGEGDRPWDFATRLDLPRNVNSTMPYMGRNYFDVKRRNGPWVGSFSRAELQKGRGTDMPLEVARRLAGALFRSLRFAKGPS

SEQ ID NO: 1012922 - protein, 134 aa, Homo sapiens
MRSELPLREKKKENTTTTIAGERAETTTMGHSQPNPPLQNKSTDVYIKSANRGGKHNDKITDLLASECVSTYLGVCAQTHKPSRDQLYQRSVDRDKKTNITCACHPQHDENSAAVYDKQTHNLFLLTPSRRRDY

SEQ ID NO: 1012923 - protein, 316 aa, Homo sapiens
MVRYRVRSRELNRSHEVYYGTSMLHGGNEQWITTATEEQGLSPEHVYVYERIHGPVSLIGRRARLSNGRLHRESTRRHGSFLQKAASRRIRAGTGGGPRTRACMTPRKSNIGEQRQAYTLSRGSPPRAPTGMREIEEKKIVCRDQSTTRGGPIGKLSPLRVTYCFHSPTQACDSFYGKTEDPALGSQTNKQPGTTVRGTNKAKGFRARSTNSQGVWPVRNRRPLGRFWGAVTPGLGKTVAPPEAQTENSSGTPVVHTWQDPTGKGVPKPSCASRWHNSSALLWNSETGEPNHHNMINNKPDQQPPLGSRSNPAPKD

SEQ ID NO: 1012924 - protein, 97 aa, Homo sapiens
RGRTAPPLLPPLPSFLLLVSSLTYTHYAYTKTRKKQQGENHSKDGKRKKDRPVARKKSREATDRIKEQKMKTKTNSRQNSRKRRERTNRKGNRRNKK

SEQ ID NO: 1012925 - protein, 280 aa, Homo sapiens
PAFLTEALRAVLTFDSWFLECSLLTPCGPACVAVCGPSEELVRQPPGARPRPQEGLVATWSCWRCSSARVRQLQAESVSEVVVNRVDVAACSQNVAVEMVASSHPGRSRWVAKDASTVCPVDSWANDTGELDKRTHQMRMQRLKANLQIAIQSGEFNGAETGALQVEPRLLSKQMAGCLEDWQRKGRREPTGRQQLGHGTACREAPVARLEAHRRCIKGRRTGARHVRMGTNAHEWSAKPEAAIGEFIQQLLAMNQLTQSSPLEPSNMAGASRTPGHAAR

SEQ ID NO: 1012926 - protein, 243 aa, Homo sapiens
AVRLVRERYPKDCLCSGGIPAQWSGLVEGTASCASYCFVKALVRVFKIYLTDRYTYPYRGWSEVGRYPGGDDTVRARWVGGRHVRGLAPGLPCTLAASENPVRVGCGGLGWCFWAHWRAGKAGRKTDLVGAEGGTAWPWVGGTGRRSATGLWGGAWPLANGPPIEGLGQGWGGKYRFLGPRGQIGRSPGRGKSEALWGATLVYGYLAGLGTQARARSPAGLRSTPRVITMCRIEKSAGGRLDL

SEQ ID NO: 1012927 - protein, 235 aa, Homo sapiens
CPLGPQAVVAGVWLAVGPRRGGLSGRGGWIAEQVEGGMGAAGADPPCHEAPLQPVQETWRTQHLLCSVVNWTCCVCDPDVPMHDMRMAPGELIEQTKRVYDQVAPSEFEDVSYESTLKALADVEVTYTVQRNILDFPHACFRPPGHPEQPAQEADKRALLSFDVELTHERRTCTMRTRVAPGRPRSERTQLTARRPAAGTLDGALPRTLRPRDNWGLQPSPMRRPQGPSTPHRQS

SEQ ID NO: 1012928 - protein, 205 aa, Homo sapiens
  misc_feature (162)..(162): Xaa can be any naturally occurring amino acid
PGAVGRRGLRLLLPLLPLLPLPQVGRAAFSLGSATAGRVLLVTTPLPGSPLSPQVCAGLLRTAAATLGPVMSGCEGAGAWPRSYGEARGCECRASHASACSMCRRPHRCPPQARCEHAVARGVSGGRGGAVRPTVLGRGSPWAMVPSRPLTSSSAVLRLSPXVPDRLGRELTLEQASDLPSHLSRLGLRRESPTDPGSACWGTSL

SEQ ID NO: 1012929 - protein, 121 aa, Homo sapiens
MRDETATRFHHRLLVYATVETTSLGGETNQVANTFSLRPTYRKQKLGYHTRRAATDTDSPCCRTQFEVPAISYGVRPTTTRRYHSWDHPHKTRKFSNARSLPQSEFRPQARGSPLAKSHTN

SEQ ID NO: 1012930 - protein, 215 aa, Homo sapiens
GRSERCRAWPESPFPLPRLQPALPELADISVRRRLPSPGRAALLAHPARADPSPSKESDNGIDQRGSGATTMSHGVAVNGAILSDQSLREIPTDDKGFTAIHFAAQWGKLACLQVLVEEYKFPVTCCQQIARHPCTSSIHRDNTTVASPASTNLLDERGQTSTAQTCNGPRPLHLEPVTVWMDLCERSWCRVGAKVACPRCHGLKPIDFCTIMEH

SEQ ID NO: 1012931 - protein, 47 aa, Homo sapiens
MLLCLEPGLKQAVRPESWAFFTGAVAASEAGQDTIALELAAATDEPG

SEQ ID NO: 1012932 - protein, 150 aa, Homo sapiens
MAPCIISSPIAQRRAWGPGSRRSNRRCLRISKSEYVSRNVHSSGVRSMARRGRRANHVTPSNDHQLVRSTTPLVKTQANNSRFLSLSISEEAALPRWALRPREARAILDPPSRGPAFLLPSYSASPQRNLGISALAFKEKRNTDKPQGPM

SEQ ID NO: 1012933 - protein, 215 aa, Homo sapiens
MSRDNVMNPAWGVKSAVVDSGSWRARARLCAGRGQASLCRLPPLVYGGGGGHRRGADSALTLRESGARAAGWVPCRGRLDSTPGASGLDGLRQREHSWSRTVTVLGALEAKTGVEKRYLAAGAVTLLSLYLLFGYGASLLCNLIGFVYPAYASIKAIESPSKDDDTVWLTYWVVYALFGLAEFFSDLLLSWFPFYYVGKCAFQLFCMAPRPWNGA

SEQ ID NO: 1012934 - protein, 257 aa, Homo sapiens
LYRPELWDGRDFSGSKPSLFQACLLKPWAQPELFSFLSHGRFPRHAIAAIVFSGIACVAYATEVTWTRARPGEITDYSGRPELGLLKVLETVRGLSHSSGSSSSPYVYHNAAALEWCVAVYALCFVLAEPQLSCVTPGCTGTRHAAHPRSPVSCWGWPCMSCPPLVPLLACPLAPLRSSTEKYGVQPWQSERCELQLTETPTLCVSGTGDWLDRELTGRRNLLGYVGELVYSAHLVFVKVSGLPKGPVMLYNLFILP

SEQ ID NO: 1012935 - protein, 227 aa, Homo sapiens
MVRPGITGLAADAVAEVLAVCGDFLCGLQRGAWRLTVREPCDAMRADARAEPPAVAMVPERPDGHVPEDYCRPVTSVSQSSTCPTWLRLLSDTAPSWRTASCMWFQWSEQRDYIDTTWNCGYLLASSFVFLNLLGQLTGLRPGVEQELLCQYACFGLFGIIALQTIAYSISWDLTVKMRNLALGGGLELLLAEYRSEGKSMFAGVPNLRESSPKQYMQLGGSVYAGS

SEQ ID NO: 1012936 - protein, 293 aa, Homo sapiens
AGRGFRAGQAGFRRYRGRGLPHTGQRSGLRSRLPDSCPSSAVPRRRRPVYVSGAAMEPAPRWLAGLRFDEPAPCAALPCGRRLPPWSLMGCPCPAPAALCPGACFTLLCSPPPLRAAAASVALSGALAAGACLGLGAPALRCEGLMALRAAAVSFRRGKRRPPAGAGRGPGRRHVATAGPPNSGPVRRGQAGPTRAPPIVPLGAGVARAEHGERLGACRSRGAVAQRPFFQGRTGRQRGPYGAKAFRGDSYIAGESQLFHPGEFPQPTRVPCACGQRPEFPRWLRDVVLMMVI

SEQ ID NO: 1012937 - protein, 133 aa, Homo sapiens
MRDRPAYTVGKLYLLRIRTRSERDAGIGHGRMDRGTLAEGDVFARREPHAWSPDYLGRCVEANCPPSFETARVPLVNVGFPPKVVTLGMGKANGADWLGWHGVGNRVPTSLCLYVGKWLGSRTRRTSGLALSP

SEQ ID NO: 1012938 - protein, 94 aa, Homo sapiens
  misc_feature (2)..(4): Xaa can be any naturally occurring amino acid
MXXXIVCVPNVSIPPPADMIDGAGTRYGDLELLLPGNLKCWCVGLRSFPLREMGSEGGDQQHENLEKLNMRAILDATVSRTSPFRAAGHPWEGP

SEQ ID NO: 1012939 - protein, 289 aa, Homo sapiens
RGCYGSEFRECAVGRAVMTAWRRSAPWCYCDPRRRSCAVYCSFSERRLPRIAQTGARFAHAELSAASGWRDAALLAASVALAVAAGGPGQPVRPVRRFVCTALPPEAVHAGCPLPAMPMQGGAQSPEEELRAAVLQLRETVVQQKETLGAQRGGHPRAHGQASALRGGWRAAMARGAGATGKDTMGDLAAGPPATSWSSSGRSLARPSMDRLGGASRHQLQEQTFSNCWAARATFREVPPAAGLGGAWKRQASWRKVLARAWRHEQVPWRAPHEDLGVQPGRKTGRGNP

SEQ ID NO: 1012940 - protein, 69 aa, Homo sapiens
PGTPRIYGMRSSGLAALKRSCLARYAPTSSRNLGVGVYSEAISFRSPAPAGCVPSLEEQCDPFDVNNRT

SEQ ID NO: 1012941 - protein, 83 aa, Homo sapiens
HGRRQRKTHRLCHRPGKRLGEEEEAKGTETGVELESRESGGGGFPGPGLWRYHVRLAMSHRGSHTTTSVGHLSRKGYICWSSD

SEQ ID NO: 1012942 - protein, 48 aa, Homo sapiens
MIRDTTDDTEEQLETTSTQKERDKGPEKQRQTQRTNKTTERQVKGKQE

SEQ ID NO: 1012943 - protein, 81 aa, Homo sapiens
ACTARSTGSVTSLRFAALRPQAAVHPAWMRGALDDVLGLFDCDHYIINIMEKRLFILNCPVPPEGKVAVILTPEEVQHACR

SEQ ID NO: 1012944 - protein, 235 aa, Homo sapiens
CPGDKHASLSVCYKVGPGAENGEEGDIQEEMENPEMVDLCSEKLDSHPAAASGAVPLPVSVESLPATRHTGCKVQIVHSLLKRGRDVCIKVRTMVAGRISCFIFSSLLMPQQKTRVSWLDNRESIRDSETGTRSDISRLVEKKREEDGRDQYQVGDPGVGGAEATHRQGQIDQYLGGGPVLVERPSHSGPGLASTLQSGQVQVLHIEAACRLSRRDINHVSTPMDISPRRTSYEI

SEQ ID NO: 1012945 - protein, 183 aa, Homo sapiens
YGIEASMLAVVGTWQALCLVISFGFDPDPWGWSRTPGSLRESGRVSREATVPDGPLVSELPWLPSASRLCPLVFGRVLNSELSSRELYEGLRLNDYEINMTYVLTGYTRDKSFLAMVDGHLCRMLKQQNPSAGVLCVIQTWLTCGTCEGSNVTSRSGSFSRTTKDISGAALQTIITAQYKFEA

SEQ ID NO: 1012946 - protein, 137 aa, Homo sapiens
MPLPDPMFCARLIHIPPELAGHPESQFTNVLRILLPQSRHDWCLLAGSCVADFFMRLSDAGDPPFAVKVAECEECSTCNPEIDSRHRPESRTPESYCSKQCHHKRYVALSDLACQKWQELVPAEGNNSKRSYNMDSL

SEQ ID NO: 1012947 - protein, 180 aa, Homo sapiens
MSCPRLWHRRGSSFPVYVTASRPCAAAQESAGPRSRYGRPGTAAVPGKLNVLVRGLRHASRYTRDGLPKGGTELAGEPGQKLIMQSASSSVHSQLMVEPIQELLVTHGRFQQLVEELIAGGRCRKPCTGVPCSTARAGGRSKSSQINLTPQSKMVGAPTEGSSIESNLLGDHVFFALQEV

SEQ ID NO: 1012948 - protein, 142 aa, Homo sapiens
MTVLLIALCPTCNTIASEGFAKNRWGKMMEKKQRTIDEIEYMRLIRSSTVDGLEEKTPHRIRWKFNNVQSIQSVDIQTRRHGDNDRLKPPPQASFTMYMPLGQDYSRFLLRGVFHPLNYVVLATLCTDEANKTGTQVTNDAK

SEQ ID NO: 1012949 - protein, 141 aa, Homo sapiens
AGWYAPALWDIGYRYVVECYSSGGRPARWPSLLVSVTSKGPCDVHEESGGRAAWSQEHLRSMMETGRAMWARYCMPPCRAVLHKGENSLGPKRQKVGFHGDDLHIKLLNCGLFLLLFLLNPVRSVFALSACDEFTAAFGTM

SEQ ID NO: 1012950 - protein, 143 aa, Homo sapiens
MGSGSAVVVVLSPHPRFRVRPFLHRSLLCSLRTHRSQARLPDLPQPTVDPGRTCEPRCPPVSLHGKRKEIYNDEATLDSVRDELDCGGRVRRVRLALGKLPRREYKNKVHLRRSLMRESPDVNRRERALRPLHIATTKAHVDP

SEQ ID NO: 1012951 - protein, 119 aa, Homo sapiens
MDDDENDGEHEDYDTVMRKDDELIDEDDTGLGDEGEDSNARELVLSDGNDVVMTADDAEGGDGTDLRYANRQEEYVVEVKVITELVSSQNSGEWKYRCVASIFFELEEVSREQEPIISI

SEQ ID NO: 1012952 - protein, 227 aa, Homo sapiens
RVLYAPEYRDALCAQEGTSFLPVDSLECPVVCGSALITRRSQEPPLQATTFLLKGHRVCGPTPSTAPPWPQEPWELALASCRTAMDLLWMPLLLVAACVSAVHSSPEVNAGVSSIHITKPVHILEERSLLVLTPAGLTQMLNQTRFLMVLFHNPSSKQSRNLAEELGKAVEIMGKGKNGIGFGKVDITIEKELQQEFGITKAPELKLFLRATGQSPSAAKEWLNLLP

SEQ ID NO: 1012953 - protein, 108 aa, Homo sapiens
MTLRSLYGRNRDWIYIIFHSIIPTGLSLHHLLWDSVNSSQAPPLVGFLDSQPLSSVCIWALEQLLILVRLSSLGSSTTNFNFTNNSPSGVFTFGANSSTPAASAQPSG

SEQ ID NO: 1012954 - protein, 145 aa, Homo sapiens
MGLTGLLLSVCTHTGPLETHGLRQSAAWVDPGARGAVGGPGLTVPQMAVFLTAGLTLCPRANLEGRPICLLPCRTPGSGAFVPEDVAVTASGLVVVSDPIHGAVHALQHTARDPGGHWVTVGTFLSPRGLAVDALNRLLVTDYLP

SEQ ID NO: 1012955 - protein, 118 aa, Homo sapiens
SAVRSIRDCRRSSPGVGGQPGGAGVRWIPGQSDHLPPVFPLRSELLITMSTLYVSLTQMPSPAPSPHSRRYGEAGEGPDGEEPPIVQAERSKWWAEGRPAPVWGQVVTGGGPADGEAK

SEQ ID NO: 1012956 - protein, 146 aa, Homo sapiens
MVTRPPEYRDRLPTRPRAVTGCRLIRLLWSAAGCVSARTSRPRKIGTAGEGVNIQRNRWGWGGGLRARKTGGAVNQETYVALDNAWTSGRIVSQTGEVYTNGPDSRVKPHLMDTHQQPGNTGSLDGTDEAWAGQNGCQRCRVAVDA

SEQ ID NO: 1012957 - protein, 102 aa, Homo sapiens
MGGLRAPPASRAPRGPVHAPDGCGLQHLGARLVGVLGVQWLQVGAGLMRLVPGELMCLRCGGLVTALASPEQCPCGQQRECRPDDARQKIYYPVTVATTVIG

SEQ ID NO: 1012958 - protein, 191 aa, Homo sapiens
QAWYAPEFIGSLGGVRRLLSGCGSGIFVPGRCSDGVLAHRVREAAVACLVQNVTMDDGVTPLIPDSLAIPDLPEPGPGLTCCAAGAGVPPMAGRVSGTSSCGVEQFITDTYQVDPRSAHENPADHVHGYGRRYQRTVIDKGAPCGWRCKKTAGNTQTRVHEPSDFVPYPGTKISQSHASQREDGEVMKGNR

SEQ ID NO: 1012959 - protein, 175 aa, Homo sapiens
  misc_feature (9)..(9): Xaa can be any naturally occurring amino acid
RLVLPPGLXDRAVRGRRSGRRLRRGFLGRMSRWTSGVTPLLPDKPGLPDLPEPGPGDVLACGAGVPPMAGRVDGTSSCGGSSSTRYYQVDPRQCPDTQRPCPGTRSNSGCMTRCPDVEVQTAAGNTQTRSCTIRNLPFRITESRPAPRTAMMTIWSNEPDTFYAMMHKTEDNAGH

SEQ ID NO: 1012960 - protein, 143 aa, Homo sapiens
SADWVEEGWVWDGEGAELDFALWQTLAEGARGSDVSSPQQCQCELCVLHLLLFLLLTPQGGHSCQCAGCWPWELVLANGEGPVLGCLVGPPVCDQWKCGDHCESWLCCPEDMPCGGASHTGALPEEEEDVSQAILLPANRCQL

SEQ ID NO: 1012961 - protein, 188 aa, Homo sapiens
MAEFGLLLGVKSLKRILLLFTLCLIIFYLETSSFGVFFFGAISLVWLLDLISDLHFGSQPFFWLDSEGFRDWRFLSWLLDGAIPPCNSQLSRGKTTGRGWGNCYTGHAWETPTGKLPVWSWLNWQENTGGRQKQPGTTINQQRGHLWVREHTTGDSLDQEKRVATSAPEKSPGHEQREQFMDRFFSRE

SEQ ID NO: 1012962 - protein, 146 aa, Homo sapiens
MTGYTPDEKLRLQQLRELRSAMAEGPVAEPSVSRMLTPQKMGAYGEVLEEILENKSALEENGSMGYTKRVYLCKHYMYYVTLSGLFIINMKYHVSDKNHMAYVRSRSPEYIPGDYNSGRLGRQVSHNQLKEFSCIERSFKGLCRTS

SEQ ID NO: 1012963 - protein, 40 aa, Homo sapiens
MRNRSKDGQLRDNIFHPPLRTGQRSTKHMTRQTSTKASHT

SEQ ID NO: 1012964 - protein, 215 aa, Homo sapiens
SGVAGLRDVHAPHERRPAARLLSAPWAVSCSCPSPLPPLRTLRPWSRLLAALPRGCCWGDRSVGVPMWPGEGSVGGGGGGGLAARALSAVKSRKRLAGVNAWGSSRRSGCTAAVVLVLPRARYPGVPGKDGHHTNPESGWPQGFAPTRQAPRGGSGRMPPARGMDMWRTFQPTNERYNSKSRGQTPWPGMARVGLPFSHKVNGLESDLRTLQEGG

SEQ ID NO: 1012965 - protein, 150 aa, Homo sapiens
  misc_feature (5)..(5): Xaa can be any naturally occurring amino acid
  misc_feature (10)..(10): Xaa can be any naturally occurring amino acid
MVTTXKNPVXLKTVSPDSDRCAHYSDAVIAASASAQRGESRAAPSPAALPPHSAGPSGIFQRRNHDLQPPPGLGWPWVQSPEGHPSCPESRPWPILGPIPSPAQIPGPGRVSGPGPILSPGRMRSPGSLPGLGPILGPGYGPGSSSVPVS

SEQ ID NO: 1012966 - protein, 223 aa, Homo sapiens
ILRALGVLPPRSRTPTRGRAVGCAAMPQPQAAHGPRRGGRDMGPLSLRGRREAASRRSAPPPGRARARVPAAGEGGGAELRAGAAARGISDLFASLKSICRRGSHTMGVKTFTHSSSSHSQEMLGKLKYAAEMMAHHCDITIRVQDKIFRAHQVVLPACSDFFPPHLYGQAEDENKNVSDLHHVTVNWLHYLPQNMLTPSHSINSTPETYHSLSSSQPAYMTT

SEQ ID NO: 1012967 - protein, 109 aa, Homo sapiens
MHHLLQSVHSQILGRIMITLITEQLLKQTLDELKCTRFSISLPLPDHADISNCGNSFQLVSEGASWRGLPHCSCAEFQDSLNFSYHPSGLSLHLRPPSRGNSPKEQAFS

SEQ ID NO: 1012968 - protein, 313 aa, Homo sapiens
AVTGLEFWDAQPGFLSRGVSRDGGYGALGGCKLLRRAPCVMPGCREMGLPWEGRVYWHVEGAGPLFAVPRVPVQDVVLQDAVISVGVGAGGCGAVYIGSSVVSPLGAASPLPLRRDERAMTGLGKAPLPRQGLKSKAGRIRRGLGPSSSSFLFSGLPWRRHGKFPNWTDPARVTGPAGPSLLPQAWPLGSSVPAGGGCAPLGAGFLLHVPSARDLCPRVGTRTRRGKGKGPGLLLGQGFKVPAMGKAPTHSSLRKPGLLKRAQVGAPVELRETRFYKPIGSPALEEEPTLDIGEPALNAEAFGNNLRDEKLIN

SEQ ID NO: 1012969 - protein, 151 aa, Homo sapiens
PGTAPEFLGSQSGARLTDRLRGVRSCRVLCSVSEAFHIIHDPYSPVAVSCQQRMRMLACFHVVLLCHPEVSPEPGWGTPGTFGLTFDSIGEVTKRTCCSNLREPVKSCGVTGPKLWACLQVGCPYVGCGESFADHSTIHAHGKKAQLDREP

SEQ ID NO: 1012970 - protein, 66 aa, Homo sapiens
VDRPSDDGNFSLLIRAVEETDAGAVHLQPAPSLTATSTRCLACPPGGHLTACECFPSVTKYRITLH

SEQ ID NO: 1012971 - protein, 191 aa, Homo sapiens
MKGDVEQTGSSVHLLKLIRLLRLTSTFRDLGPKAQRRNSCKLPVREGETKGVVHCYTTSRGDRNRTCSTVHPWVRTHAIVSICLGAQQATKLNLINLVLDLWGAIVMWNQEWPSRARCDFMSGALLVGVYLDEGTKIVLQVVRSKQGVAETGLLEHFMFRKWGAFVVKGWTLSSKGNLPCIIKNCELSLGL

SEQ ID NO: 1012972 - protein, 141 aa, Homo sapiens
GSCRGGERSSLDRPSDPWMLQEGVQKATDAMAVVEHTDELPDNILLELLQRTCPPVHLLTELAVWSVRALAGPHRYSGPSGNDISACDEGFITEELENQSVVRPGTMLLAYLAETCSTELVPDTDPMCAERGVSSFWRPGM

SEQ ID NO: 1012973 - protein, 288 aa, Homo sapiens
RPSCSSGAAIPAEGPPSSESGWLRIKRGPFLRTAYGVWGMKDGSMPCITSCVVDLSGTLHIDKMQTGARLRRKLLQGYVVLAVIIRFVSNTTKESKRDLLERLRNLEFDISEDDICHQSRDCSQKFTERKQVRPMLLVDDRALADFAGIQTSDPNAVVMGLAQNHFHYQILNQAFRLLLDGAPLIAIHKARYYTRKDGLALGPGTMCDCLRDATDSKATVVGKPEKTFLHWKHCGVTGVNLRSAVMIGDDCRMMSVGLKDGRHGWASLHTSGEISSIQEDKSSTSLLN

SEQ ID NO: 1012974 - protein, 134 aa, Homo sapiens
  misc_feature (102)..(102): Xaa can be any naturally occurring amino acid
MGKEEEGKGKRKRGRYISGSVASELCRTTGSARSPAVFASFPDGLRRGPSCLDPYGAACWVVARTPSGHAELSHVQLLSSGGWQGVPGPYKIGCLPANNLWXCHRNLVDDRHYTPRIAVLVTDLNVQALQSQLR

SEQ ID NO: 1012975 - protein, 149 aa, Homo sapiens
MAQIRANGFKLETRDPRMVRCPPDQATLSVEREYVLASQTCDGPEAHRCHGRQVHLACATNMGRLSAETTTQSSTLALSPPGATRVQTGLGYAIPLAFHWHVPIKRLEIPLDALIAHGATSALRLSRYRLHHEHLSMDGPNVALRSSLQ

SEQ ID NO: 1012976 - protein, 254 aa, Homo sapiens
GDQAPWGRGDAGGPQRGLGPGGPVCDQWMTRTLSPAFPRLSGTCTALLQARFDDGQVPGAFAPCPRLPAWAPVWPLVLLLSRLTPGGVCLSNCSWSAVFGARPQAPWPPIAMPASPASLGQRVLLHCPALRSPPAALRLSQLAYGARGRSPWREPLSAHGVCSAPSASLCGIRTLLDPILQQTCAVNLAPHAIGKRSLPPKTLEEPRPLQELYLMLIDRAAHTVPHGNPKARPGVMTGTDDLNITKCDRHQALA

SEQ ID NO: 1012977 - protein, 291 aa, Homo sapiens
MWLGAAGGGCGGVSVQDGSSQRGVRECGGSGGPATRLDTSEGARLTRRPSPPDSYACAFDLDLELFSLLHFGATDLRHQLEVVFSPAPLRLSVAGVWRRLCWCPALPSLQPSSSWWSWSADISCCAPGVFTGFTDDFLFLHMVFLSRMSPVLWGRSVVRVLNRRNPFPWEVLRVGHGELGHEPVLRFASIYRRYSSQEGKRLLGTFRHGVYPPPVKAGDVDPNMGALLKECRNKRGGGGGALFGGDRVGPPPPAAAEWGGVFKSRQGGGERGYLFHMGVRPPQFFFARIFS

SEQ ID NO: 1012978 - protein, 398 aa, Homo sapiens
RRLGVGDDAVGPQRGLGPGGPVWITETRYPPPAFPRLSWHRTALLQARFDDGQVPGAFAPCPRLPCEGPGVAPVLLLRARPPRVCLSNLQRSAVFERVLSAVAAYAMPGLLPASLGQAPSYYTALELRQVPPCGNSGLSQACDTVLVADHLGGEPFGRLTGGGAVTPRLPRLCRESARLLDLYPAGKLRGWTLAPGGLREKRGSFPKPVEGRQRPLWKELITPSSIIDRRRRPTCPPGQSVGPELGVLGKRAWCGNTDQGPGTGLANDPPEALDPNLVWVDLRESSPLLVAGFDAFAKQCASYWRFLRPAYVHEGHPPGATWVIGRPLYGNTAVVYTAGSGLSPWIGSHFVGLQALVIRYGVFPLGKRRNEVVGTHCQFRGRQHVWGWTTEASHFTVD

SEQ ID NO: 1012979 - protein, 224 aa, Homo sapiens
SDFYIRLQTGEGHVPGATELPARTASVIVPRELVPDELMHPARPSRSSPPLDPRSRQSIPLLWFPNPNGPDGSLLGARGDLPVALYSASTLLYLPESPGTGAAFYVGFTVNTALSWSISTMGCRKKLRCLADQRARALVRGGGLLCLGGRRPTSDGWTPLGAHALLIRTWQDCDRGWGDLCVGTVGLSHGEARDGEAVPGASPLAELTGKEAIWGVGACSRLGS

SEQ ID NO: 1012980 - protein, 171 aa, Homo sapiens
MKGGPKQSHQREINPRDEINPKGNQHHRLISDMRQIEKLERSRNWSETTQLDDRTRWTRGICKNSLPQASFPISDQDIRAIRYRIKSNKKAPEITGQKQPRAFTSTQGVNKYLVVYSSANFGKTCKLPTTCSCRRSNPYNLIPKQGNREQEACDHIKIPLIQTSRSGQSEE

SEQ ID NO: 1012981 - protein, 155 aa, Homo sapiens
LCADQRKTKEDEKRLTRPIRALDERGYCLVENLCVRALTLGRSSKSKMTFSNVLKKINELTGIKESRHWPWPHQHSGTLAADTAAHSRVNSLYRLPRVYKRIINAAIREDPRITLSQAVNSQLCHSFCCVAPYVIQVVILLTLTRRDDEWAWIRK

SEQ ID NO: 1012982 - protein, 76 aa, Homo sapiens
PGAVARMQEDRDGSCSTVGGVGYGDSNGCILEPLSLPESPGGSITLEGSPSVPCYFLWKNICLWLNKTRRSEAHDY

SEQ ID NO: 1012983 - protein, 213 aa, Homo sapiens
PQQRYWQHGLWAGGVPVLAFALSYLEELSRYRGGPGDPGLYLALLGRVYDVSSGRRHYEPGSHYSGFAGRDASRAFVTGDCSEAGLVDDVSDLQPLQMLHSFYQWAFHSYEQAMMCVLGGCTGTVSHGSRHGLAQAAALTPGRSCDQREASEAKQTSSCKRSRHCPSVQLRRWSISQGQPDLVHPRTSGGVSRDWIGVPRKLYKPGAHGAPDG

SEQ ID NO: 1012984 - protein, 81 aa, Homo sapiens
PRTRKTKAQWRVLLCMQVRVCECNVAQGIKASVLVQRAVLADGAGGCLCELALVAREVLCLLQAVLPLAYGTGTPVITSGD

SEQ ID NO: 1012985 - protein, 192 aa, Homo sapiens
VRNEDMRRSKEQPPASSRLKLLNSSQTGQQFQSPRRGLDVEKYLGRGCFEHRRGIGGAGSPLASLLREDEDRRWMNRVGERIDYLITCGTIQHSKAGPEESASSGVIRLNTLTGLRITWWCQERTVTSIVGCSRKVVRCNVFERMKGSIEGHICRCKCTLSRFYSTSLITLHLWCRESDLGPLEVLSSQPQT

SEQ ID NO: 1012986 - protein, 110 aa, Homo sapiens
PGRMGSARCTGRWADPTGSAAPPPQTCLLPRNCDTPIFDFRVFFQELVEFRARQRRELPTTIPIYLVTSGRTCQLGGPRRRAWSMVKLEPWLCQRCTLEGTQTMRDVSIH

SEQ ID NO: 1012987 - protein, 233 aa, Homo sapiens
MKAPRRPQETKEQGNEEAMEQYGTEEKGKIKRNDMEQNTGAESRNHTHTRDTERTKSNGTETGPKKRTEGSTRTKSTQRKAWGRRTKKNRKQDREDNKKTEEESARQKANHPENGGGQQMAQNDENRDDRPEKIRRTARKHKRDRHRDTWHGAQNEEGQKEESDPKRKTYEQQEDGDNPIARRKGKKREEETKPQSGPEAKDSNQQQKEIKTKQKKKEEKGDQEDEPERSKNT

SEQ ID NO: 1012988 - protein, 225 aa, Homo sapiens
ARVLLAVEELGSASLCMARPSRALACVSVAELLVSGNVPICAVLGGICPRGVYGSVSCSDIRAPGAASRYQPALPHECACMDCPADAQGRRRHGHRGTDRRKVCAVASFSADALRTGRSRVGTNGQIWCLELSHAGVNGAGVSLGGVILNPLEALLGSGSLLVRGRVCREPCINSSTGGASYGYSSSARHAWVHALRTMETIPAADPGHALRTRRPSLQQPGPML

SEQ ID NO: 1012989 - protein, 121 aa, Homo sapiens
MERATMPRDLVTVCTVQVDRSTRRCDGPLVAQNRMKIGPSRLLRVSLHLWITFALIDPGPSQLRQGTVLGWPLSRWTALSIDLWPCRTDWVTDELHTVTSLTLTHRLEDYGRRGMGCNLAT

SEQ ID NO: 1012990 - protein, 306 aa, Homo sapiens
ADHGEKENPMRGTSASANSVFNICVAGECEHRLTRAAKVLDAAHRADPCVFQELDTLVRILLDIPAAICKRLLSTAQFEGPRLEEILEKGLKVRELSVKTHKLTSQILETLVLGSMEHTRLWCTQDSSPNALAIYGLDFYVVLGRPGYSIEYKKRIDMAALGPNIRIMQYVGGHAAGFQQKYEWDSSFLANKLPVSIQRDAIHKFSVINTPYNITESGVRRPYMYSSSGGTNVLALYPQLFCRSPMVGLPSCGSTATIVPCPTTRHLTALCPACFSRAHLRLPLVAMRYSVPWPSACLPLDSDALP

SEQ ID NO: 1012991 - protein, 235 aa, Homo sapiens
MEIRRMKSTHSHGPLDLLQVEPPGMGPGFCIFSKSQWNPVVFKSPPTNPMCGNAWDLPWVALPVQRWGEMAPTELAELRACYCSWATPPAGPRVCLPAFPALGALSRMTISEVLNVVLHLGVSTTGIFQKPRGFGPQIPGMLTLGLGCVMATQVLRCVASGASFNLSDVAVISHPAWDFRLEPVPGPLAVWASVEVMGGKGWAGSLGALVHALQMPRWRGVRGEQWMLIDAHSPW

SEQ ID NO: 1012992 - protein, 370 aa, Homo sapiens
GAQEEVRRCGTLEDRIPSPIVGYAGYSNSSSLKSNRLLSYLYVMSTRRSDDRAPKSRPGLRRGLFFGPSKCWHAAIAAAEESAVPALTDHTCVPQSSLSQLQEKPEPGLEEAHKDVKARSSLVSSKCHAIRVLQVANVGWFHERPSGVSAVACGPCKGHPRVVVSTEGAISCESSVQFSKLESVSYDRALLLTSALRPPESVGKVETTVPIVDGDYCTRVEDSASDVHMESLQSGREEDGHVHVGVSPVDSKGTGAWRPHSVDPPRGGDPRTGTPLVTIPRAPGKQRKRPQTHKGRLGTGDCHGNAMGERQCNRRKDAQPLKDASKTYRNGHGHLPNTLIINTGTRRDQETSSEEGNRTRHHKQWGRREY

SEQ ID NO: 1012993 - protein, 120 aa, Homo sapiens
LLESKVRGGAEMIRAAPTALFLLLLLLVLLSWASRGDGSPRAGRDPALSPGCAEVTDRSLYLAQLLRSYLMRLRSLKRPPLAGLWSSLEGIRTNQPLWCFGIKWGDPGAAKLHLDEATLR

SEQ ID NO: 1012994 - protein, 349 aa, Homo sapiens
QKEPPAGMLHVRWPFSAGGDLLGYGGIPRSKIIAARPLGICTDRTSDPKCATQLGRKGHHRYLKGPAPPPLLSSRSRATPLSTPVLSTSVPVPMFPLGSQGPSPWGLRGVPCAVPRMKPESPASWDLRPGTQPTCNSRFSSQHGLALTLQRESLDGEWDTGLVASSLSLSHVSHPWLSVPCLPMPRTLRLWPHERGALDTKHDGTWQCPAPAHRAALPQPGHPARLASPRPATGPRSTQSTHRCTTGTVLSKQPDAQDSTIAQRRPTDHAPRPHSPDPPDPAPPHAYAPSPAAPRVNSRLARCRPLAGAGCPCPRLRLAPVWPRAPSGPWHRRGPHASRGPPPPYTFAV

SEQ ID NO: 1012995 - protein, 261 aa, Homo sapiens
GVAGVGGFDGQVGTLLTDSVLCECGADGRPTLSNIISAAQSEVDLRSGARCGVGKTHLQLQMPGRCSSPGVRESVLIISHMTQLHNDLSMLFDQTVLDMGVLAKVKGYDDLFVYGDVTPGWAWRSCSERVRSGRRTTMLSMGKKMMPEADEAPLPGIDEAMSYAEVMRLVKGMNFSVVVFDTAPTGHTLRLLNFPTIVERGLGRLMQIKNQISPFISQMCNMLGLGDMNADQLASKLEETLPYIRQVSEQFKDLKQTNSSA

SEQ ID NO: 1012996 - protein, 209 aa, Homo sapiens
MAVKKIGVLLCAYCAQTRAHSLLAQAGASRLRSDSAGAETPPVSACLVVGPGPGSIVGEVWMMFCRQPMLHKTVAVQDAVFVLLGTRNDLSPATSVVSRAPGTLLCLDLTGYGVDLVVGCTSAFLLWDPTTVCPHDLEACDWVDYDRGCTRWCVKSGLKYVAGDAGITWEYQPLTGAYYRGPWDGRRALDMVISVYDLGHIMLRCVSDR

SEQ ID NO: 1012997 - protein, 226 aa, Homo sapiens
VLFSSMVCLKLPGGSWYGSADSDIDGAELPHWLWMGTPKHVSWSRLSVSVISSNGTERVWNHESDTSITKRSTRATTVTWGSTRRLTELGRSDAEYWNSQKDLLDAEAAEVDTYCRYNLRGCGELHMLSCGESKPKCELCSPSNDAQRTLQMDHEPSMVVLCEVVIYPRQQLNVRLVPGTGQEEKAGVVSTRPDPEWRLDSSQTLVMLETVPRSGEVTPAKWSIQA

SEQ ID NO: 1012998 - protein, 176 aa, Homo sapiens
GTRGTRFSDRSVPAEYWKRRKLKHLNDLGVTDVLCEACDQLGWTKPTKIQIEAIPLAVKGRDIDWACEKLALGKTRRRLLLPDSKIALHGRIPSSQFCLAPSFCTAALGELAFSDLRVSLKPWGPLLECRVLMIVGGIDSMSQSLALAKWTTVYIIGKHPWSTGLTILENTNRFQR

SEQ ID NO: 1012999 - protein, 107 aa, Homo sapiens
LRLRSHGFTAAAERENTSRLQPLPVATAPSERQRPGPTLGCMRAYQCALPIEPLPWLLALAPAPPRLSSMDEEQPGARLLLEPTCVGSLQVRLELCLVASWAVGFRS

SEQ ID NO: 1013000 - protein, 113 aa, Homo sapiens
LSCRLNPGCLVGFSTYVSDDSGGPKYQRDYKTAPFDSRFPNHVNQIYNTAGRTYLDLTSLLITKAMTRKGGDISVCRHGTSDVVPVPLPHILGHSTGMSNRRLEGHRYPGERV

SEQ ID NO: 1013001 - protein, 239 aa, Homo sapiens
MIRTLHAVPLWLAGVSQLVGTPTYPPYVALGWLAVNKRGPKAGHLCKVSACRYSVHMCYVAYHTCEQVSSCYANRSLASCSVCPLHQLLSGPYRVGLGRHKLYVADSGSLAVSVSKIVGAQGLEIVQCKSHKGERRLPCINTGYTPISLTRQDPCWPASLLPALILPNIYPMHTARRCWGRLQSNGAVPDVLHVGPVAGCGLCQLFQLCLVGQRIRDKAYVMICAGRVMRVISMLPRRL

SEQ ID NO: 1013002 - protein, 96 aa, Homo sapiens
QQTDSTMWACKYSQIYTIIRVFYVETTCIRVLRSPKNYLTQEPAFHTYINKTNQECHKKDTNYEPKNMKVILHSSRGLITCIAAHMRHPFLVSYPL

SEQ ID NO: 1013003 - protein, 224 aa, Homo sapiens
RAARELRGPLQAGQAPAMRAARAAPLLRACCSCWGRGWRLRALRSLRCPPWSLPSWPCNAEHSLAHYLGALERLDYPRCQDGPLVCQDHKCGSMTTEMLQDLAGGRVWLMTMLLWSVRPEGEPRVLPQMTRVPKSLDQWKRPPGNLLEREAGSPHRLPGPVRADYILVLRTHDNHSDQRIRLCGILIGCTGLSSGWPQCLDSQTYYFQTSGRGDQPPRGYYRSH

SEQ ID NO: 1013004 - protein, 264 aa, Homo sapiens
MKPHFRNTVERMYRDTFSYNFHNRPILSRRNTGLACATEGVTHKGFPKGPVLDAKDLSRPGVFPDLSTTHETVLPRLGFMWSTQLPALQGDFQDHLGVVFHGRPWPGTVCATAGPNFLSESPQVSTLNHLRTPRLYYVLGTRDLTEGRSAGMSHRRGPCEDSWDDERICILLCTNLVYSEGQPFMPVVQNSDDNYAIPATASLTGDAQKPDGGNVIHTYSTSTLKTVRKAYGRNESWLCFTMEVVSTITYLLEEGRLPNQVDPE

SEQ ID NO: 1013005 - protein, 411 aa, Homo sapiens
MRHPIGRAHHTICIMWRQHHYDLNETPLWAHYAKALNHPLLGRVWPAPRMYIHPQVIRPRKDFYPECQPDYGAGDTQHTKTRQRVTLIPTDLPPDFVYVDSAKGDPYAQPKKDRHYPRYLGARTKKKNPAAQTPGIVVITPTPQAGGRLRWAQQQRIARSIFRTLLDAGSTYIHSKLVLAVTLLGGPPRFSMIPSAGEVLVTMEDHQRYYTTGENNYYGRLNNQERPKVAAYGRLFCGGTAYQKKHILSRKEQQHDIGEEHPHSLLLGGEHPKPPTTARRKHKGFISPERLFIKETPRRENDPTLHIEHPPVFLGVQGEDTPHSRESPPQSTRGGQTKTAYATRWRPPPHDFIGAAQDEHGAAQKNRGGVTPRSTADCYLLYYLPDRCLLQFGTGLATHGERLFMSCASPQ

SEQ ID NO: 1013006 - protein, 119 aa, Homo sapiens
MRSMDESKQVHGLVQHLVDVFMTWNSPLGQRDAMVMGDLSGLWRYSILFQERLELEESGRIVVVSDCGGGTEERGSMGHKSNPGGPQLALTAHQGWCSPLWRLVDKRLTVVPKSLTEDR

SEQ ID NO: 1013007 - protein, 103 aa, Homo sapiens
MPQKERRSSRARPASRFPPVNMPCTWSRAKATFLPFARTLCDWPETSAHFLTRINPPTGGKQRKHNPAKATSGNTAHTTTQRKPKQHEPPNLRKKAYRPCTSQ

SEQ ID NO: 1013008 - protein, 141 aa, Homo sapiens
GRAAPGRALQAATRLGKALSGVIVRFLMFLSYEYGQHELGEVAGGRSVVGARRPIPDERPLPSRLPCFCPWPRVPRPCAPTSPGTQCCSRPLLWGRCLPAPGGRCMLSSSPVTGSECLCALWSADPAVAMELVAVLFVLLI

SEQ ID NO: 1013009 - protein, 286 aa, Homo sapiens
KEQVAGPVSFLLMFSWDGPPSQPTPWVLSGGFVEEAAPSVGLRGGGALWSACPRAWFLPEDCGSVRRARSPVIVGRQRSVPCVARVPVAGEPVAAAAGNTVAGAVLVARVGGCCLCVRTASTVYGDPIVSWAAFLGTPFLSGAEGHAGALWRASTSDPFYNLYTLDLRLGAAGAGGAVRGSRLVLSHLPALSPCPRTPGTGTRCVITGWGSVREGRLQWRRELLNAAVRLLSERNRAGASTQCEISSRMLCCRLPAGWRVHVLGVTLGDPVSCGEPSGRMSAKGGP

SEQ ID NO: 1013010 - protein, 132 aa, Homo sapiens
MLTVVCHSTVVGTSRSWDERGRTLSLCAVGIVRQAYRMLCRSMMALRHSPKGQIKMKIVLDSMSRGWTRQVKLPFFVDKHAFSREEVTWTEIGTEMRMQSIKALLIIGGFKVYLGLLELYSRPGEHEEFCVP

SEQ ID NO: 1013011 - protein, 241 aa, Homo sapiens
LAGEAAALVDVQLFEISLSHGRVVYSPGEPLAGDRALCAWGHRCRSRSHPVCLCIGSCGVSNKANDTAWVVEEGYFKQFPVAGDNKVEPALLESNELPTSMVPCFLPRDTHDPIEGPFGKIAAPGEGRINTPKGFPRITSAGLVFYILSPLNLNRQSQTVEQPNVAPEQPRSSPTSVVNDGQRVSSQSSTDLLRLCGGAGTAELHADVENQSGKDNQPCGWPVCCKKVSYKAKRWIHDVRD

SEQ ID NO: 1013012 - protein, 194 aa, Homo sapiens
VAPASYSSRSLPARFCLPDRLWPAPSPSPGAHLSSRGAEQHRPEHSAGPARSGRMNDFWNQEYGPGSPCWLTVTEGQLKRQPALDTFDGSLFAVFPSLNERANHCNGSANQACDSQFLMTSARTCATCPIVNRLLQTRHVTDAQALTQATFSWLHAQELAAPWRIPTRTPGCAREQQVCQLAFLWANQCSFTLC

SEQ ID NO: 1013013 - protein, 78 aa, Homo sapiens
MAHWKVVHRCDRWCAVLGAAVGSERRNCLLLDCRSFFAFTAPAYIAGSCQSCASCTTRAAAGRRCAMGLEHIVPNAEL

SEQ ID NO: 1013014 - protein, 323 aa, Homo sapiens
RSGSCHRHESPGRGKDRKEEEEAPVAMGLDGGAAELDVRGAGHSCCGIRVDGVNCTAAAGLACPFLCLLPVRHCAAACAAMCLWNALACGRPARRLGSSCPALYLGPLRIALRTDPSGCLRGLLLRVPGCVGMLVLLVCRGGVALGDRKGGPGCPSRVGLVKPSRVRADLRPRGLSLLLALGAGSLACQRKNLLALVGAPYLALLVPFACCGVEGKMLWVACARLVALRVALRDPWKFRDEAAPWGLYIPPVSLLEIRGLALSVYTLRLFPPFLGQSGGNRGLFYPESEGDIFPPKEGDPIRHEVRPVTSSFGLAVPFWHVGS

SEQ ID NO: 1013015 - protein, 75 aa, Homo sapiens
LVRPRSYGIDLSGAGTDAKGVWVLPSPPGPGRGRGALDVSEVGAAAEVVAVNQLGYPGRMNHKRQEDASRVGQAE

SEQ ID NO: 1013016 - protein, 242 aa, Homo sapiens
AGTAPPCPLSLLSEGQSRLLGLGPPLPLGATPSVLGHWELPEVVSPELGPQGWGAGSTAGRGAAPVKIERSGKPLRLGRVGVARQGESPCATCFLPRDSRLQQSAVSGMVGEAGALGLTSTRLPGLSVCHGHDESTAAGDSEAGAGRVDECSKRGLGLRACDPWERSFLGEPPLRWCLYVLVTRVRALLHNLGQGNVERGSSANETTRLSRGCGSGLGWLQTGGRAPSDSDRCRDLRIGTRP

SEQ ID NO: 1013017 - protein, 161 aa, Homo sapiens
MSSTVCPRYVHRRRARASMARTRVDPTCSLHRRGVPIQGARVLGSDQLAPFGLLVERSALVVPAFASKTAARVPCTALSFAEVDLHSFWLLFLAGLLTECRDVLLELVEHHLTPKSHGRIRHVFDHFSDPGLLTALYGPDFTQHLGKICDGLRKLLDEGKL

SEQ ID NO: 1013018 - protein, 68 aa, Homo sapiens
LTEAAGVCCYAPELAMPLKDEQNHKDAVIDRSKENEHSTQCQTNPGEHRLEQEKKWSNWRNVRDKLIT

SEQ ID NO: 1013019 - protein, 279 aa, Homo sapiens
MIRDAWRTSTDGASLIEDEYTGVELLEIAGIAVFFIDTRWGGNPGRMWARKLHHGQRCHFIFLTDLVIEPGRLSLGIPEFRPTKAIKAKERQVPSFTPKDWIVGESPGPSDHVKQGNANVGTNRTFTNNGDPIGKGVTVFATSDYLIGGLPPMGDYNPIKGWIGNLNEAKGGKGPNGEGCLGFGLKESYDQPVKYGEGALTGMVPTPLGEDRPNIGFPTAQQELTPVSGKERPIRILAVETRGIRLTNRIGRVKWETFLEAPVSISILHFRPLGVDLFP

SEQ ID NO: 1013020 - protein, 124 aa, Homo sapiens
EAASLRARQLGVRPWGSPGLAGSTGRWRPVQLPLVLTCCCGPAACGPVSWLTVLGARVPVACLPAGDPWHRVLAAWLLASLPACSTVLWQLWGHLSCDSEYPGIPVAVDSRPGLWTWAWWLAAY

SEQ ID NO: 1013021 - protein, 116 aa, Homo sapiens
  misc_feature (7)..(7): Xaa can be any naturally occurring amino acid
  misc_feature (9)..(10): Xaa can be any naturally occurring amino acid
  misc_feature (27)..(27): Xaa can be any naturally occurring amino acid
MWRSLEXPXXRIACHCNQQVCVSEVAXGTLQGEVKVPLVGNFGKVGGLGPNIKGPKISKGFGLAWELVAKVLNNFSQGTEKNNGCLGIFRILPGGVNFQSIGRSNTQNYQNRSRKL

SEQ ID NO: 1013022 - protein, 120 aa, Homo sapiens
MAAVAEGAAGKQRRRLGRFRNIQTSVAALDAVELKRFHILLLSPHPGRCGSWCSLLLARDPAQMGTDCVLAESESGGPVEDMPPTVTLLDERLVPGPCLNDHPGKEGLLLVELEKMWDER

SEQ ID NO: 1013023 - protein, 89 aa, Homo sapiens
  misc_feature (4)..(4): Xaa can be any naturally occurring amino acid
AHGXRGQSVGMSSLEQLEQKLGSNRGRAPGAGLSWMPLIKPGIGVAHECPNYFLLGPIDGLRHAARSFCWYTLYLVSTAPLHRVWALEG

SEQ ID NO: 1013024 - protein, 170 aa, Homo sapiens
RGLLEPGPVACCLSPASGPAGCCPAERYPLCCLRHLAVCDPACKAPVLELAPCVRPELAPNFGRSLPAPLPAPTRRCRGPRTGSWPRGCAFPGYPWRALRCCCCCRCSRRCWERVRRPELAGPRAACLDGQCDRGEPAGRTATRTASDSSCAKARRTLVSFTADFKKSRV

SEQ ID NO: 1013025 - protein, 285 aa, Homo sapiens
QDEMIDVIGVTKGKGYIHGVTSRWYHQDSCPVKTHRGLRKVCLLLGHGILLVSLLLLARRLGKKVTYHALLRCLTKKDVYRLGQGAYAYLEGRASLYQEARSVLPTVELNVARNFLDHTEAVHIRVLASCDFTLHHPNWDAKVGPDVAAFLVALALQIGALVLEWRKREKQRRCLAPAHLRDNKVSCGRGVVKGSSNSVGPVGVLSAGKGIWEHPCLDGFPYFVAIASFFHQYGYFVTQLGSRTVYPIGATTEGHERRYKVKNGQYSSNLGENLTFENGDQRIPW

SEQ ID NO: 1013026 - protein, 223 aa, Homo sapiens
MPRDPPVAPCPRRTLCWRAVPPVHLPGCSCTPGVPGMGGPAPVDRKAKASAMPDSPAEVKTAEAGNSRKKRRKREGREEEEGKKRRKEEKKERRMSRKERREGEKKEKRKRRRGEEGGRRRRRRREEGKGKRRGEGTERGRDRSEERNDEEKGEQGKERRKEKRKKRKRRREERREEGRGQKREEKETGRKREEERRRKEEERREEREGEREKRGRERRGEEI

SEQ ID NO: 1013027 - protein, 358 aa, Homo sapiens
  misc_feature (151)..(151): Xaa can be any naturally occurring amino acid
MTLLYTRTALTQLHTYYLRALSLGSRPHTQTHTGPPLSHQRTGMAPARACVQRKLSPAQPKLRGTAHRQPASSRDTALAPPHSAPPPPCARHSGQGTSARRPVTPQSPAPQATYPSAPRGHPGRHYAPAPPAPRRASALTTNGRQPTRDRXDNPAPPPHRPHYPTGQGMHNHTYDSTHTHGSTTRQAAQPSAHTSATPNTSTHSTPHRPTKPHPDEQPRTPIEAQPPNGPTRQHRVETTTAHESVQAPSHPPHDHRAPHLSGKPQEQLRRQVGPPPLGVVQRILLYFPKRHNSARLSISNRIRGHAHPLPSINSWRRCSKSCGAPYITIAHSIFPTPYYALAAHVTSAQHGMQHILAC

SEQ ID NO: 1013028 - protein, 157 aa, Homo sapiens
WVTWCWPHSQIRDPKPGCSPVSPCPQSLRSPQLVTIPTSLPQTVWALVRTHMKRLLVPVGKSGSSRMTMPSTGWPPMSSSRPVSCPEGLWLVGVRSGRQDSCLDGQLTLPRPCAMSLTDRGVDELREALCLSCLGGWTWVSWRAWAVGSGPSGLCGT

SEQ ID NO: 1013029 - protein, 210 aa, Homo sapiens
MKRDGGRLSEADFRGFVAAVVNGMRAVARRSGAYAVMADPTFGALALEETSGADPWSWLSRDRSWSGQMALLPASLWSYAFHRAVWVHKVRPGPRDLALGGNVACKVPIDQRDVVLGQHKDGHLWHKPASLIPGIQMSFQMAQKHDCTVHGLAAKCGASVYRMRSRSDAGLRPLQDRKSLYLPGHRDLCTSTTRAQDLPTSTSQGLTLKS

SEQ ID NO: 1013030 - protein, 142 aa, Homo sapiens
HALFHAWDQKCREPLFSAPSRQTLVPTMVVAGGVWTTAGSMRCLVPLVLKPSFAWIQLLSVVIHAGWTRASFRGPLASMLEAALDELQRRIYRLGSMEALSARSSYAAAGLGRVCACGALSSLSALIKAALVVPREPDERTL

SEQ ID NO: 1013031 - protein, 340 aa, Homo sapiens
  misc_feature (103)..(103): Xaa can be any naturally occurring amino acid
KRPSERRSLSFCHGPVDAPPDACWLLLCASGEPDRQLAVFVHTTLTLLSGSHPGWTRLSYRSVCGRNARLSFYTPERLRPGAAMSDLHGWRHGWQLVRRSPWXARASHAALCAPWTEDPARKLVADCRNNIASYQALSLPSYHALEDTNYQTEKLLDPVSAKTPLIHRHSPSMSTQREEQWEINMPHLKPRGKRHRTIYSQNEQIQIDDSQAGNNTIDGKLQAARTAINHIHDLSQEVGAEHNFPWAQPIQENRVHTENRGSPPKIRHGYPGSCIKHSRKAAQRLVTTIRYKQVTERDRPTHRPNTPYILPHLLSNQRDPTTHTLKVHRRKQHIDTVNEE

SEQ ID NO: 1013032 - protein, 366 aa, Homo sapiens
RSEADSGEPGETPPPSPCVAAGLIPVLRARGDGRDALGLSVTRARPFLASLDYSTAVSQPLAVILLSPSDGDGKMCCTGAGMDELAQQALRRARARLRGNASRVGLGLSCAPELVPRPGRWMPKLVPRLGDPGWALGAARGLLLPARTAMGHTGHGTGGTHNDGREDTSTHKREERPQNHRKDRDREGRPAQVAQGPAGPPQERTAGDQMARTAHRHREGRTGNDRTGIDGEQPGNTQHEPGARRQRTRDRQKMPRQHWGPPRNEAPQETRLRSAMLTAARRRGRGVERPGETPPPPAPRTGGDHNPTGHASAARRRQTAKEKGTLVGGPGRDDPRPAPRPHQRDQRTDAARTPAPHQRAHPGANG

SEQ ID NO: 1013033 - protein, 105 aa, Homo sapiens
MPLLSAYGQRLWGVSNFPPSVFKFRVGALEKHGRWFALCGLFFGSSVVRGREKLAIFLHPQRFPVEFIAPTKEFPLGRANANPERPKGLGHSLGAQRERVLGRSI

SEQ ID NO: 1013034 - protein, 281 aa, Homo sapiens
GATGRLTPVSTRSPGDERAGAGRCSALTCCRDLGPCPLLRRCPRLVRARASQGASVSELCRGRRPRGALDECLCPVVAWERLGRCVPGGDCLVQREVAVSSAVPDSFTLDPWPCSNQSLRLGRCSLHARIRANQSTFETNTGPVARTGAALTSTEGVNSDEKRKRHLGHKLARFDSITGCPKSSDAKYALRFGQRNLFQNLTEHGNSHVEDLHGPTDHGKNPCRGYGSGQIGKRTQLARDIGPGSDYIGIYNPKGEGLSKTNDPNIYPISKRIIEGQKQLG

SEQ ID NO: 1013035 - protein, 391 aa, Homo sapiens
MEGPRGWLVLCVLGHIAGLYGDRGLVPSTRRDERGGMEDLVETWVRTGLKGRAKGILGCPLCIRTVHPKALKGDLVGIPGPSWKPPWLMVVHTRMGPKVVPQSVRPSGISWDIMDGYQRVQRQVEHSEENQSRVLMAILRDPNFSAGRPRAQHGAGAPVDGLKSFRIPGTPSTQYLGELRPCYTLNSDRTGTRNLGFMAKLVNPRDLPNRTIIKPLSPRVDLGTPKDGGQYTFLDPWVPKSGIIPSPSTQAGHNGLPRNGTITPLGGQYPEARHNVNRRITQPGAGPPYSADGIGDWITDYRANFRIGAYTDRIRHNPNEGRLYHTRGYRRGRLRNDQLGTAPGNTRTGCSTTYCVPRGDLSLMWPGSRRGSCTVLGLSTYAYLIHQVDGH

SEQ ID NO: 1013036 - protein, 126 aa, Homo sapiens
LGRCCVLADRGLPRLRPDAGPVLASCCLPGPCLSLAPAKSEALRQLEAELERRIVSAPCAVDAGCPPTLGAECAACSSMLGALRELPRRQCGCRRLLLINNAGKHPVAGADSPCERPRSYHRLGES

SEQ ID NO: 1013037 - protein, 137 aa, Homo sapiens
MASLILAVVNLTSRYWSLPRVFLLTRWTGGLDDQVRPLSISFVMRSFSLVSCEIQKWQHCVHGYAALDDTVETVVMSPITPYANSACVWHDTQRGEIKGTTQSQINGANGGSNGRWKLANGEDLMPIKCNSARWLYG

SEQ ID NO: 1013038 - protein, 74 aa, Homo sapiens
RGVGEWRVLTCGATRMACLDPRTCMPGSDSDLRACMLRVFPCNSVAVFGLLMRRLPLVLTTKQHNHTQTPIHRR

SEQ ID NO: 1013039 - protein, 282 aa, Homo sapiens
MDKPGGGDWDQMGATAHTTHNPMATEEISKMPSIQTSHDCVSYSRPKNMDDTSKRMHEKHGRPSYRPGIQYAHKGSSVTPYSTMCMYDTLREREVSQCIGHTVETRTNEIPERNSTPYTMHNTSEKTNNNDDMHNQNAHVMVETDRRHGDRPKRRYEEHELLNPRETQPRDRRITTPNWKAGGAGTSTTSPMHQKKNKDAMRQGTAEDNRGAERQVKNTNIDHIRPEGERSEHSTPHEPTKRELHLVEKQRSKRTSKWTRANGSGHGSDKQNNTIREDDNHN

SEQ ID NO: 1013040 - protein, 285 aa, Homo sapiens
AGVERIRAILLPPRCAICGSRSGGPESGAVPAGMWCVPVCGGCGALSGVPRHTLLCDAAAPALDESDVPCAAPLLEWQGAVTSALRRPLPALHAALYVCAAGQLGTAGGRLLRPALRYPVPQWLCPVRATRSAQWATSYVVFYPGPLPSLFLLELEALRHGARLCLQAVKYLIVRPSTCSFWLGRPVAVLGVRQFWLAYNTGGRFATLSSFLSQSLSDANLSHHQPGAFMSLAIGFVGCLGLPSTAEQRCLLVTYIPACMHSWCSCMGWHSIRPSLLLRPTRDKT

SEQ ID NO: 1013041 - protein, 197 aa, Homo sapiens
GSAGGERWRELAAYELETMLLSLVLHTYSMRYLLPCVVLLGSEPSYVLAWGVLRFGLRLPVRPFLPCARTIVSCTCVYQSMVLFFFYNSPCSSVSRLRSSPGLWCSILSSRGRGRFSVSPAAGEGHPAGLGGSSSDEARAASPTFLSACFLPFCRDRSLGSCGCVVLRLRVGPAAPFPGPRLGLMLLSKVGADARFK

SEQ ID NO: 1013042 - protein, 176 aa, Homo sapiens
ENKETGGDGSLSLALTLLLLCRLSRCSGEGLAGAPRSRPFRTDTQLLSAGQLSTEEPFIQWLEISLKMQEQGSRTWLSMLTSVENNSRVTRGQDVGRYQDVLEAWSTERRPLQAPDECYDFFDEEIRTGSSGRLIGSNEDISIIPPLFTVSVGPIGALGTGPWVSTRGAGCGDRRL

SEQ ID NO: 1013043 - protein, 221 aa, Homo sapiens
GSHAASPCPRVTLVPWCACMPALCLLWRWRSGRGGERPEGWMTLNGASYGQRVTPPAGATSPGGASSVPPSKRKAPEWSSGIRSLECVGPGYCHSGSRSDQRCPEGRRLARCLEEFTAAPGRGWLDRAPASPPTAGPGPIPGGCMRQGVETERTRRKPEREGLAAEGLGDLLVDRVAPLGVPSLALTRHLPGPSERSGRLYSKRTCACPYSQSSQELPGLA

SEQ ID NO: 1013044 - protein, 271 aa, Homo sapiens
  misc_feature (235)..(235): Xaa can be any naturally occurring amino acid
ERVGISRDNWHKRRKYRGLGDSPTTKKRKYEIGAPSANSKIGPSALVHTDPLCGVEGNHEQYLCRLRLDVGNFVLGLMSVSTRINKEQSDVVYTCDRRETDAGSVARDPWVNEVALSARSRTSKHRIPDRVVRTSPASAAASLGQQEWEAIGVTPGRKTEDFYHHTHKRIRIEDNFYARETTGLHKANNTNMPYNCHASSCRRMEPRFPAHGAYAFFGGGYQRILEAWRADSSAXRSRIPLVVLETEQRKYGTFLLVKRKRFKRRANKGNN

SEQ ID NO: 1013045 - protein, 189 aa, Homo sapiens
CLHTCLTASYLFAYLCLRVVFLWRRSLSLGLSLSVLSLAHCFSLSLSCCLSLSLALVFHFPILPAIPHPTSHTRRRPLCDQPPSPSTPPACPPCSCAVGSRWHLPDAGWDAEASATGAPSRIRLSRVDARITQWTLDGGAPWHVTGVARGTCGPSYPMPGPTARLPGRCHGPLSVTDYKNKAGVKPGRA

SEQ ID NO: 1013046 - protein, 462 aa, Homo sapiens
  misc_feature (133)..(133): Xaa can be any naturally occurring amino acid
  misc_feature (408)..(408): Xaa can be any naturally occurring amino acid
DKFATGCTRCPCDCDRHVGDEIVTSYRGALVAQHAVSVHLYCERESRYAVRLSTMIYELGLSQWSVRPLPDDGHAAKTTALISIVAIEQSGVTSCWCTVRASRRVHHWRGQEPGHLVATESLGQVHRRGEAWXCRELLEQTLLGDTLVGEQPMGIGDGSRPYVPPRSSNLGDSRTHGRLRRAYARYCGLHALLPSLLWRTVPTLSQYSLVVKGPNGVSAPIGLCLLGSRRQFVQRRSKGAMSRINEAWVTIGDSRLVGRPVREVPARARIATPRGFWEAFVSIGGDWLGGGPSGCEPFLWRQYEGEGAGPFIPVGGLGGTLWCFGLVSTVGSSRLGIRSLRVLRDGIGLRRLAGFQLFTCSYPPFFRFTSWAKKLGGAPQEDKGFPMPHPSCGEGAFGERVHEPFECXILGGVRAFFGGVKANTHYHCAGEPDRIFEQEYRGSRERQQWWFGGSKLSSAERK

SEQ ID NO: 1013047 - protein, 92 aa, Homo sapiens
ERGTLCAMRAKWRKKRSAQAEAQKKKDEAEVQVNRYLSQRGGAQEQKALEMPDAGDAGSKLWDVQWLLSRVLVSNGIVEPFIDPSDSPYHHL

SEQ ID NO: 1013048 - protein, 263 aa, Homo sapiens
QPLRARLLHDGFAWGHLNWQSQRVRELRDANRGGWPQRGWCGEVHPRMCTVGIWGGEAGDDEPWTPTDIVPWTEVACRVTSRFSLPYRSGRHVDCGIPESIENGKVEDPESTLFGAVVRLHIVRSPYYYTGKSGRSVADVVTCAGNGSWVNEVLGTLELVRNVFTRLVESRLENPLTWKKRWRMTCEDPNADYSGTLAAGQALLSYKRHGDWVEPPHELSYLGCMNGCLRKLEGNTREPNECYDGVHLSCRTLNGGTRDPKMP

SEQ ID NO: 1013049 - protein, 46 aa, Homo sapiens
NAITVRAARALADGNWTLERQRHETPPPSCCCFSYSCSRATGLVPE

SEQ ID NO: 1013050 - protein, 156 aa, Homo sapiens
  misc_feature (144)..(144): Xaa can be any naturally occurring amino acid
QSWCTALSLRSESDQQLSPQDQKPELIPWSSAGPWPAGGLLGLMSADALSTDSGELWVPPTSYSGLWQQGMGTSYQATSSDSDFSIWLSGARVVSFLVLSASPLTVPPRPRPACLNHRSLCCSHLHGGGHGGVHHASGGDHASXTPMIPDASSFLC

SEQ ID NO: 1013051 - protein, 67 aa, Homo sapiens
APAMTVTLRPYLSAVRAMQVCPRALENFSSQVVERHNRCRKWKSVLAQLNLRNQSHITDEKIEIPTG

SEQ ID NO: 1013052 - protein, 194 aa, Homo sapiens
RPRVTWTLRPYLSDVRATLQAALCLENFSSQVVELTQEAGSGSQEVAKSSCYNAVTISRNDEGTRLRIEGSIRALSGSAEHVKQADEIEKIKCHKFMRFSDDAAENFFILRRKPVAGYDISFLITNFHTEQMYKHRVGGLCDPRFMEEMDKEISEMKLHVNARARIVAEEYLKNYGITNLDWISMGLHPHQTDP

SEQ ID NO: 1013053 - protein, 332 aa, Homo sapiens
AGTGNPASCGLLGTRPGGYVVGRSVGTRGPGGCAGSEADSHFGNWLNDAGLMSWSPMAVAHSRTEFRRLARVGSLQAHWSLEGAQGQLLGAFAEDAHRLSSHGGTRSARRPRASRQVGLERVMQSSRVRSVAAARSRRLMPRRLVDGPIPPRLAAARLPYDICQQGFKGPWHCAHGRLARLLQLGSTLSSLNAGSVMTRAWDLFATETGMHRPVTQKLVPARSHSKQSWHTRERCGETPAVGEPSSGRIPGLPPRNGGWDERGHTAMEAERVDARECLEGEGIPRDNPVAWGWTRLTVISSDNLDRRATAALGGPKQAPEEPWALTLRRGRP

SEQ ID NO: 1013054 - protein, 311 aa, Homo sapiens
MEGMRVSLRLSEDNFWQGSLPGLLEEREGAQCSSGTEVRHNGIRLHLQGHLSKPFEPIVDYLEKYDKFGSRRLCREARFLSTFCKNLLQDILPEDGVKGDLLIDIGVWTPQSIQSPLWLVESFKEIVVADYSEPEDLQELEQVAEERARGLGLVPQLVTYVCDLEGNRVEGPAEGGEVETGGSSQRAEVCTVTSGASLLGCRTPYPLGLTAVLQQTLCLDADWPMTSPNYCRGAQEPRQTTEARGAYLVIMDVRSKSSYYSDRGAEVLQTSPLGREAVRGCCERGWYHNRMVEVISQRLFFRHWAQRKDFF

SEQ ID NO: 1013055 - protein, 444 aa, Homo sapiens
MRTNVRTPGGFVRVATGPGVGSTAFAEAVTSGLGKRMSTRLLFPGSPELLSPTSSSSLSAFRYPRQASSTSGYSAFCEKSQVHGLLLFVAADVPARTSMASDPEGRAYLGGVRAWIVSLEDEAGKEARSAYRHRDVWRREVSMTTPKRRRPRSKEIWTLAHSVYPGRYDQELRVGARNPLWDGVRRAPHVALRVASIDPIGHPGMGAIVIVLAPPFKFRLNRGHNGRTDGVNVCEGDSQTEHASLLSPVDVNSKEQGVNRNDSETFKDKNRCATRVYKGHGEMEAQSSVGERDMLLEAEEGHNAAFHGERQLGGRSLLVHHRRKEDKEEPNLEHSNLKEPFPIKCKQQIALSHSQSFTVRTHWEWKHIKRGTPPLKNHSFKVSLHHVSVYTCGQLRGNVTGNGYLGDDQKDTLVPFGMAHSERIRTWSRETPTAAGAPISCGDV

SEQ ID NO: 1013056 - protein, 231 aa, Homo sapiens
STDVLPGMKPDPSRIARPAVRLLPCCYCACPPSSCFVANAAVRCLLLRRLRGRGAAHWCSPACLLPPGAVVAVLLPRGGNGLQLVLGCTCCCALAPCLGISLQLVAVDEGIGGYLGRGVWLAVLVPCAARWELPLTVVAYEDLFGGWTMDAVALQCTAGSGRSRSCCTFCGVLRRQGAGGRGAPSWEPRNIVQVTTADDMAETVLHELPTGLTRGWLARVRGPGLSRRGGR

SEQ ID NO: 1013057 - protein, 227 aa, Homo sapiens
MEVASTGSTIEETSLLDKVLEAHRAWRRVAPRRCVPPSGGLQGNHVYLQGEKKGNSTYIQDIERQGGGVRARSEQTKASPPRGWHRERAEGRGDLTRVSKGGKAEVMGPAGTRDVTVRETPKYKWHKPDNRGHSRRTFYHPGKGLLGQPSWGRHQQTGAQTPGGGKPFAGEEQRDNPPLNVQHGGAGVGDTNNTEVGGKHNRMYPPLTTEGRHSNKGVLLRGGRHII

SEQ ID NO: 1013058 - protein, 164 aa, Homo sapiens
MNVMEVTNYLSSYTKRNLRCDCGNSNVKTHILECKSYVSVTKQEVHILAIQYNDNFSDCTAFDKRPYPDPEDEIPDEMIQMRVCEDWFHGRHLGAIPPESGDFQEMVCQACMKRSLLCGLMLHNGQYTKISTEDDGLVRNIDGNEVIRHVIQTCTNATSINDST

SEQ ID NO: 1013059 - protein, 222 aa, Homo sapiens
ASMKAQLPAESPEPSKLFRGGRINGHVVFLDLLTDYLADIDEALAALTVTLQFPLQEFILAMGFFLVLVMEQITLDLQGAVRAVTSGGNKGSAGNSEMVGRSIGMMGQGSHRTSGATSKPTQHLRACVLVYSLDPHSSDSTRGMAVEAADETGTRAMELCLAYSMHPQGASWHVKPVPAACCRATIRGTGGGWTCGILLSSCMTPLGIGLGCRSWQEIGRDL

SEQ ID NO: 1013060 - protein, 104 aa, Homo sapiens
MSKLVAYYCYSKLINNENCNQTEYSSSALVSFSRYAISMFSRNRGLVGACSNTEAGEYRRLLNKAAIYYISQQDLRSQCSKHGLLYVLCTFDKARCSCAPRVCN

SEQ ID NO: 1013061 - protein, 116 aa, Homo sapiens
MAILQAADGGAACLGSQHYEDCQPLASSETEDAGTLAGVTTELPHEMGREAGQERHQLSQGSPGNLHMLLGDSFPNHGSFAPSSFYWERWGPMTEARTDGLVGRVYTILSQALVFP

SEQ ID NO: 1013062 - protein, 146 aa, Homo sapiens
MVDYKEEGGAVDGMYYEKEINEGPMPSSCRYIGLSLQRCTMDSCSRPLARCRATVNNECPRQGGHRTTLIDAIQMSCATPCDQHPRTTTRPDLRHRAIVPKKQGVGNELEGGNVLRLLRERLDAGSDFCRTSTGGRSCHVRRSRIE

SEQ ID NO: 1013063 - protein, 158 aa, Homo sapiens
IETAVDASALQCLSAEEATEARGREEPAVALENYAPIPGRWCTRISLMLHGCSARLGRSCRAGGRPPPGTCAAGPVLADFARYRSTSARGDPGLSPAPRGRCWRLTARDWASLARQPLLAWPECTDCRSWSIRGWARWPLTAFDGDSIAGWGSEDGCT

SEQ ID NO: 1013064 - protein, 402 aa, Homo sapiens
RASQRSAGRESQYERSQHLAGWMRRKPDMHAPGFVRGPEGRPAKESAHPWQRSAEFMRNVSEGPRCPDDGFKLVMALLCTYIFVALEEEIERNSGRAPVFAPVYFRQESSCNRYGLHHGMQGPWSILVAGTQRGREVITAYIDLVAMVQIDLVMDSVPPSRGGRRGIEARRSLAGWGTHDRITSCTLGVNPVPGGAEALLSHHNGISHPMKTPRWDPLLTKASGRRPGARELLIVLHAYSHTSIFASGCSNRRVPTSPSASLARRTPGSPEKYFPPGDSELEGTSGHGTVSRDQVGWPFEDLDAGLWGTLARFPLGASGFNVPKDYSFTEVTEQFVHRCEDLGPLKPPKLETHPRECGSQRKGPRLFRTRWSSPHIVGHFPVAKCRGGPTRRTAKKRVCPTA

SEQ ID NO: 1013065 - protein, 343 aa, Homo sapiens
MRAAGGAGLAPGLAMFRSLVASAQHACMPPAGPAGVCQRPGWRMYTCPICLEVYHRPCGHLAAAGHTVLAWDVSPALPAVCHPLLCPLCLPALLTPEKGGQGHPQWMKHALILQMRPVEAATKNGDPGKKMRVHISSCLNGPVRHDGQLTQVRPRGAHITAFPSNIPNRSTFACPYCGARKLDQQELVKHLCGKPPRDPKRVVCPICSANALGVTPGTKSANFLQQLVQRNKYSYDTYGWDYQYMTRRADYQGEDLDHELSLRNCTGSRDSRQKTESKGKVPENHGEPTHENQEQEKPTSTGDNTQQRQKHGTKSKKGETGTRTNETQKREQNARRKERAADP

SEQ ID NO: 1013066 - protein, 109 aa, Homo sapiens
MGGHGAPGKSRALTWGSSGEGGRGTRLWSPQKRAGGRERVRGHMSIGCPRGATLPARCLEQEGKIPYNFKKTEKQKKKGYGTAGITREQVLGNTQVCPQDARGGPPEGP

SEQ ID NO: 1013067 - protein, 34 aa, Homo sapiens
PVVVLRLSGTRHEGGSIAVGLIAGSVFLLLLPGP

SEQ ID NO: 1013068 - protein, 81 aa, Homo sapiens
AVNMPGCVDHVARRAMLPPKCHETADIIDEEGSYVLGDRNGIWTASRTAAPKLWSGAHKRVCLVVHGHSLCKQHAQQAVSC

SEQ ID NO: 1013069 - protein, 152 aa, Homo sapiens
MSFRFTAIEERMRMSVWLCVRRRVGINMLVVRSSASGPGGKARERATAATGPAAGGRESAPRDAPLRARRSHAEGGARRHGGAPAAADRPATKLPAVGSRRPPAPQSPEHLHPRPGLFHARSGHLSPSCPLERRPPHTAPRSLQGPLRRAGG

SEQ ID NO: 1013070 - protein, 257 aa, Homo sapiens
FQGPQVHLRLPSPPPSSLHRAQKHAPRGLHEEASKQPAGAHSRACAFLPASSHWDSQQSPPASPGPTPLGSREAPARGCLGVRHPGSGRASEMMHDALPLSCMLQEPLCPLPCALEGPQRLQGDCLRQHHCCRESEDCPPRKTCNCGALHDTDEGPTDPPCASAGTRRVTSWGPKGAHVARHACCSWHKIVESLHPSAASSASHHAAKRLSLEMSPVASFERDPTDGDLRKADPHGAQTLAFHCSYTPELSETQGPP

SEQ ID NO: 1013071 - protein, 230 aa, Homo sapiens
PRLAHRPVLIYKNTVAEAGESLQPGRRRLQCSRDGAIALQPGQKERNSCLKKKKTMAETRKLRDGCHGPLFLPALCPGRFPFLKGSPGSRKRRRWRVDVPGAGSSEALWAASCISRQSQGLALDLRPPRKGPPRRRRRRAVRNRRKTLGAQGTVHPREERLSTEAAYSTAQEPRSWVMQAPESSWRGKLTACKSELYGPDRAARRAARALQSLPAPDAVKSDTRFAQTQV

SEQ ID NO: 1013072 - protein, 178 aa, Homo sapiens
RLSSGHMTHVTLPYYWRWFTFHYPAPLSLYPITYQCSRGTLGPTYMVSVVLVVRGPRRTQDVCLLLTNKIDTKKNTHTYREKRTKKKTIKKGGEVGQKSKIHRKCEDLCSQPVSMSYMQQASRTPAESKADISLGNQVPRTRDIYKQEHCREGRWRRRGQLSSDVTHEDIWKTVYPEG

SEQ ID NO: 1013073 - protein, 77 aa, Homo sapiens
MRYMVPGPHWNPHNDRFVLSKGYAAPIRLRGHGLKAVFPVPEAELLNLRKISSDLDGLPVPKQAFTDVCHWLPGPGP

SEQ ID NO: 1013074 - protein, 227 aa, Homo sapiens
MPHAPRNACGFLVLPTEESGSQTSGGTGCKEDPSEQYSAYCLGSLQPKSVDCKSLLMLRGLPSASNILVWVYQGTLQFPWGCWFRGLRGLAEHHLLPLAVSRALDGPLTNFWSSRLSNSWEPELSASSSTQFIGFGATMADLWHSHALILLERDLVGLTGNLGPLTPVMGPARNGSHGNEDSTLGAFSMHINYCPNFTLYFLNNSLVSHQTCYTTHVSHHCHKLRIN

SEQ ID NO: 1013075 - protein, 114 aa, Homo sapiens
LYQKKWRYFSDLALLYLQAGSPEDPRTYNAHLHNSDTGSVAPQRRYAFSSSILEHTIGCQSLRDAGNIGSACERGMARGRVIFEEALLDASTEASDLTHGGCIRVCSYRHIPGT

SEQ ID NO: 1013076 - protein, 186 aa, Homo sapiens
ADPNEAPCEPDAEQRPCRAKQETGIMDSFNSSAGRGQAPCGLPDCNGARHFNVPLSISRLTPGGKRGAGRSGRGLTGVLSIYGENAGSLTLHLKLQNKIRACGVSLSAWCLYAGTQPCSETKPAEGLRSPPQDSSVGNTFAAHAVYPQSMTGPSLWVRPRSRYSCPAGEWTGRSDRWSQIASKQAA

SEQ ID NO: 1013077 - protein, 335 aa, Homo sapiens
  misc_feature (297)..(297): Xaa can be any naturally occurring amino acid
SSLSCVPGSYTAFEVTGPGQTVAQINAHVASLEGIAPEDQCRCSWQARPWRMRPRLVPVRGLERSLTTPGNSMPAVRWQRKVRWCSLARCLENSEEVQTSQRWLKQEEPRHGSKTGQRAKAVAMSDTNPCGIWTTPIVASQHVYGARGHERGTPESVLDFSESLWLIHSACAYVVHDSEKQKARHSKDLKVQSPRYREQTLEHRDTQEQTKARRQARLAKERVCTHAHSEGERPFCVTTPGDIPAARGRSLVCSANQNGGRAPTLLDYDEARSSACILRYERINPRQNLLTFHTHLXGPLIADPCHWKGAREADPCTAVLHTPRCAAKHATLVGV

SEQ ID NO: 1013078 - protein, 57 aa, Homo sapiens
YFYPKCELSTVGLGESVRDTTLDRAADTSRSAALSSVESVRDTTLDRAADTSRSAKT

SEQ ID NO: 1013079 - protein, 402 aa, Homo sapiens
TGPASVGHEPLTSAPLVCARRLSWDCGVYAMPRRTRASPANPDLPHPPSASVRAVHHGMGDWGLECCTPAAHPSTMQPSYRLLWSPVVISLASCWTSLDFTLLLPLLPVLFETSHWPVPTEPHLLAPGKGRGGHGYARLPSEDASVTTGPHNVYPWTERVSIWDIATFHHDSMTDIQVMSATSTWRCQYSCTLTYPRQDTTHDMLAADLKWPYGPKLHNCQVLGHHAHRLVTILPEPLLPVSTSPGALGLSCGPHYHHEWGERITARTIPQCATSCLAGNPWGHTTHRLGPQTEKWHLEEEQNGQVRNKKATLDLIQPNVSHHLEKRKPKPMKPTGDKPVEANWSRKSAERTLDERAARNNMNKKNDTEQENKAHKKNGDPQEAETGRQTQKKRTYDDTQKK

SEQ ID NO: 1013080 - protein, 81 aa, Homo sapiens
MNTRCWRNVPWTYSERLLPRRLLYRDLLTPSNYILARCRGPSAPLPARIHDVIRTPYTRGHLFARNCDTNISHAHCSSAAN

SEQ ID NO: 1013081 - protein, 176 aa, Homo sapiens
EEPRPVCGVWCWLVAVMATGLVLADLPWARKVAQCPESRVCLLLQLRPAPWPPPPPPREQFLMKLHEIFLLCLHEDLQVVCPELLLLGDGCGDLKKMKKFDHVAFLIEQCNMWTQDETAGKRWTDVMLRYCTPVFPENPMMSNASENYREGTLLNSISGGEKHTFDSHTVEAGRRT

SEQ ID NO: 1013082 - protein, 104 aa, Homo sapiens
MLCVSYNSILALFPRSVLMSTGGSKILHSLEQLLEGLQQSIFVLALIKRIEPSKPPVLIAIRSLDTLHTQSSGYLCGEHFAAVNEKGTRPTGEGYDPQAKETEN

SEQ ID NO: 1013083 - protein, 217 aa, Homo sapiens
DGDYSSPGQVVSKEGGPETGGWQDGSGCSGREMETSTGHETSYLRCENVCMSYQYSTKAWRALHSHWTARRQARSGPSRSGNEVLHMDASSYQRVCVGEARAICAAKEHEWINTYPCKNSAVTHAERVGAAESVICSRAVYLLELIILLVEGIARRRDYRIQALPWMPAYVDTAYQRRLSEQEYHVSTVPIQRSAMTAKVLNGTFRVSKVKSTPEEA

SEQ ID NO: 1013084 - protein, 234 aa, Homo sapiens
DALGHTAPIAAASGAAWPGLALQRAVLPPGLRSAVTRPSSLWLLLSTLVHRLLSMVILGDLCPIPYHSGDPSSSRVTLPLYLPRMTSKLRDVTTSVIMEVQVFLPGPHRLMPFSPASVYNQLQMPSLAAWEPRLQPHTLSARTCVLHLSGSCGTKQGNAVTLGDYYQAGGLPSPEMLDLTFDQTAWGDKWCVLLLRGLSPGPPGETMRPTQSSSSLCIAVGKSSQLRCTQTFMT

SEQ ID NO: 1013085 - protein, 86 aa, Homo sapiens
MPRQGSELGGTIDKVGPRGDLVDPLCGHTQNDKICGPTRHLVSNGTVNNQSKTYGGRRYKHWAHNGYQKRRNVIAIGIRELPAFRH

SEQ ID NO: 1013086 - protein, 400 aa, Homo sapiens
  misc_feature (379)..(379): Xaa can be any naturally occurring amino acid
GRREPGRGWLVQLKERAGWSGPAPSSVPPSRVTFRGPGWLGACAPAAVRRDVRGMEEKIFAGQWCCCVCTNLRGPTGAEVVLGMEAYLMDIPRCDVSLRWTALASMHLSVSLREASDMSPQYSYNAQSLIITSHLLVSQDDGLPAAACPSDHYLCIVSQHFQLTHRHATIFTLQYTKTMSLALHSNPGFTTMHCALNVLFPFSGLCRTTRISSPGSLLQQRYRWASNCRPCCFPRTEVYRALERGPTLMPFGWCVPTSLVRLVAFSAASLFLYSSDVRDPLGAPPCAVVSPSGRALYQSPCLDGEGYPFLPPTAKSCLDLAAFLAGWYHRNIKPFSADLAFRFVSSCFSRRGRLGPLWPPGDMASLRLYGGYLWYYCPXKCYIWSGGFGGNMPFGYFVVP

SEQ ID NO: 1013087 - protein, 185 aa, Homo sapiens
AGLRRAGWPRVPVLGAGIHSYCRNPDRGPASGPWCYVSGEAGVPDENGLCECTWRCPETTSQCPVHAFTYRKSSEVVLKGLGANGMSVHAVFDILTIARDPRRKGGRQADAAQVIWRSAERVAVINSIGENGTWELWATMLGVIIDGDRSSAIGSLASSSGYSYKQGAMESDNAPTSLHSRNTYL

SEQ ID NO: 1013088 - protein, 170 aa, Homo sapiens
MAMSPPHGAAQAGAMVYRSRSSSIVTRQTSDHYVPITRVKDVLLAFSDVFSIVIPFSLIVSRTTSFSHSTLCGWRRDVTQRTVDSLFGSMRHDEMMDDLNEAKDLCTIPLNALEQGIRIVVEYAIVVPVVMATCIAPEVKTCDYEDNILVRAKADANLQIENLAATDSTR

SEQ ID NO: 1013089 - protein, 279 aa, Homo sapiens
IWKEQLDFFVRQCYEVVAPDLAGHGGPCSAPQVAAAYTFYDCWLEDMQMTIFQVAMPTKRTCAHWPFLADPAPGIPEAQSYVRAGRRWLMLECPETVKHAAPRIPALGSPSPRPRLYRSHCRRLQKTRSSRWAGGASLGEHSRSRRRPEPAPGLQRSTILGVACSLRVGGGQVRETPPGCLARGCVHPREPIGHSALRFPSRRGTIGVIGAEAGDLRKDDLVQKLSHKLSRHNARSKGRGAPMPVIFREQPELRPGTHRTPPGKPRGPQTGKTETQTKP

SEQ ID NO: 1013090 - protein, 299 aa, Homo sapiens
RRGQAGFCQALSPREQGSTWGLVTPADSPLLAPTARGLQTLPGSLALQGLPGYRQAAAGACFRLLTLQVAVVPLGRPGQAGRKGGGRAANARACGLPRLGFPSASPRGTGLARSPLCKQEPGARRAAREGGRKAAAPLVAKPPTNPEGLRQGTRVRRIPSTQKRVTCGQSAAHPREPPAGPPRSPPFRTQQAGDIGSIREHPQRPPEEHGTKLKISMKALCAREPQKTPNPHTANKPPRTTKRLPRAPPQYETDTTEGTQIRNPPTMLTSHPGETPGDGVRRTRPLCKRGHIQERHHKE

SEQ ID NO: 1013091 - protein, 171 aa, Homo sapiens
MYQVGTGSTTIPPLSHGYTNTSAGLDIVTRPQLKLFDRGQRRGHTTIAEEDTPPKRIVITGRGIHISPQRRGVAPGDLLTKRSTKQFPPKNALPRPQIGITTTLPVRTAHFPNSHCPPGSYFGSTGHTTPMFDHHVVTNVCGRQTLSTLDAICACTMSLVSPLPNVVYGPL

SEQ ID NO: 1013092 - protein, 233 aa, Homo sapiens
IERRERGFRYGHLMKVTHESKPDLPEEGEGGNALESGVTRDVFLVVPAWGSNVSHGARVALLLDELCKIMSLRNIKPTGARKAHVCRRLDEAKVDPYVLSSPLRHEAMMSTASCMCAQIGGEHSSFKYNSRANPVGNHHRRRQSTAWLEEGHINKGYETVSRETVCEESLPKHEFRANEGGISTMGRKKNTYDKCPNVCPGSTAYEARRHQGSRTTSDEPVKGLNHRDRGVEQ

SEQ ID NO: 1013093 - protein, 96 aa, Homo sapiens
MHGKGKRLDRLGGYPQASGSRGTKNSMTDPAVRHPPNQKGGTPITGRWWLSRVFYALRDWCIASDRFSPIASTWIGVDRLSDLGVTLAVDMEQKDS

SEQ ID NO: 1013094 - protein, 212 aa, Homo sapiens
TASTRLLPVYRESTQLPRPFTSTAAAGMAASVEQREVHHPWCRAMALFFQMMALSLAVGHGSQFYCICLLQWYSASPPHDLARTWVHCTVLCPCAGYLGCGHLTCQVWGTPMDRRTPLPLKGSWPLCSFLAAVVDALDAGPPGCDQSITDVAMYSLPFLTVPGLPAPVALCQCAPHLHCLSQLLPTIASVKSLSSDCLLARTMDPMGSLTWR

SEQ ID NO: 1013095 - protein, 137 aa, Homo sapiens
TEFLGSSVKAPWDRDIDVIGEHMLLSCEGEQVNSTRASLRDSPSMGQSQRGPEDRGPLRRWRGRAPVGSLTPDWSWAWEGVLSPSAPRWVAQELTAHLWFLSSLQRIANGFMNHGKQRMLFYFSATDLSKEISRCLI

SEQ ID NO: 1013096 - protein, 103 aa, Homo sapiens
MTGGVDTCTDDHDTEDTERREVSSRSPRCCGTVRDYTQHSTLSLYNHSRLLHPNRERMSQTNDQTMKTSERNAKEREHKGMEAMRSKRETNEEERKRIKDNRR

SEQ ID NO: 1013097 - protein, 253 aa, Homo sapiens
RGDGRFGEAGPTALDSGADSGVRDTLAVHEPGSCLRYYSDAEVLRSRAHPTPLIRPTSGSTLLVSDGDPSSVLMPGDAGGPGAPRTGRMKEFGFRGTDGPCCVLLQDFGVHVQVAEGGAPADFYLQVDRFSLLPSAAAPATWCLVATNDLRCSAQKLYELPCRSTVCTQLHLVAMPGLITVPAFLDANAARDQERSGGTRCAWLKRLLHTGACPLHMHPPVDPLGLAHRMQASGRRCVRCPPAQCCGSLSMTS

SEQ ID NO: 1013098 - protein, 155 aa, Homo sapiens
RGPKQLQPVRVLPRCLAVADAAPARGRARVPSPAPLRCGAAWNLCLGPGRYSRLLTLLGGLCCLSLISILGCRCGHLRSCPVPPVPRGPGAVVSPGPGGSACAYKGAEAGWWPGEHCSLNRQAVVQHQLNPARVSPGVPHGNDTHQTEGNTTCNG

SEQ ID NO: 1013099 - protein, 161 aa, Homo sapiens
MRYIGILVEIVASSVPVTQIVNIGPVYDKALDFPGFLDYDGTVRTQADAVHRSPTARLRAPDPEASLDTTHLKAWQALSPQSMLHVPILQAVKTTDINDPEQQQAKADTRTCIIQASIFRGVRNLAPFPLLEPGDATPYCVPLAAIDRLGPGAYLVYWYEP

SEQ ID NO: 1013100 - protein, 145 aa, Homo sapiens
MQVLGFGRDPTSSGGVVATGGRFISVVLWCLLHCETGVFVCLSCVGTSRRRRGRRAPPCELLSGQKHYDLTVVRDCFACPLYQGITMFWAGPVYLPASRDARSSRSLLGSPSLGPAVTGRCDACDLTYLAAVRGEQWTPIEPKTP

SEQ ID NO: 1013101 - protein, 31 aa, Homo sapiens
LRALRPVPLPLPPSTSSTRTGRALAAKLYDK

SEQ ID NO: 1013102 - protein, 149 aa, Homo sapiens
MRSGIRGLVFEPMPIGVLLHPNKKSTTLKIVDLQEKEETQENKRESTYIDNYRWEWSRETSGEYTALLEGRQQRLPGLSTNPGLVSQTRRIARLHEQMGDHVKITDNEQAPIWQSPAYLTMHHLAGPHVAEKTCANDLVAKPCNERRPS

SEQ ID NO: 1013103 - protein, 102 aa, Homo sapiens
GAVLPARSLLPLQPRAPRRGLGRLRLQLPAPCLFGVSRGLKARPASLPACSLTCVADVLACCVGCPVLAAAAVLLLSSGGPVPGPVACTTAVVPALGIHAAC

SEQ ID NO: 1013104 - protein, 223 aa, Homo sapiens
PRAHVPRPGWRTGPASLSCRMTPAPWGPDSELSWAWPISASADLLWIHSVWHAQQSQCRATHLQTYIRQREMKWCGDDLALGENHVPGWYKNGKDACAWKGIPSALTRPDAGPCCVGPMCARRTDLAPISELAECPWRPTVDGDHWAVDLHLSIPSALRCYVSPQWPQGSTGAPAGAQWPTPCIDLDAGLLPGPVCPVDCLCCSMHTCPQEDGLHAMPWVQKS

SEQ ID NO: 1013105 - protein, 132 aa, Homo sapiens
PADACCCPAGGGGWSLARSLVLADSPERSVAVGGRSVARAGSVEGGEAMSRVAARDVCLAGPGVTWTVACRSFFPRIQCCALSWSAAGCLPFLIIDRALRLRRMPDPRTAGTSKPERGADQEPDQTLDTAAS

SEQ ID NO: 1013106 - protein, 92 aa, Homo sapiens
MYWFLQLLPSCSLQGCAPCGGKLLTVRLASLQGSKARLYQYQCDFGSLPSFQDFTLQQALDVIRGVFKPSSTLLTSMAGIYVLQAHNEDVHC

SEQ ID NO: 1013107 - protein, 286 aa, Homo sapiens
MDGGGDSQGGRVTRSTYDYETVRNGGLIFAGTGLHSVCVLHLSFFSVKKSSDVMSVAHYRSAVLNLHDRCRPLTCLGHRACATTLHWRPGWEATVMALPSGVRPLLPWAFRPLIPVSASAWADWKLQDSIVIPLGWHSRNCLARATLQCLYINAWRQEHRRAVPQTERDTRRPLDRIHRGGALKVEESPGGALMLAVPGEFIFEPGLGCPLVCVCSYWRRVESSAGSALYLPGVLVRVDTTGALLACPLLARGWQLLAAVGEPHLVSWVGPNSLDGDFQAGYGRVP

SEQ ID NO: 1013108 - protein, 220 aa, Homo sapiens
ETQNVLEIALRLEMWAELCPSAKWRHHPLQPGSVECPTGAALVVPSPTPACSENNKDFILVIPLASAISCNREEQLWPCSVDGSCGLECSSVRYTSLQQWEQHGELETLVACVPKNVTKPAEMLGICTLTCIPKVDRWSFGIHCQIENNVEVQGCLELTNSKLKTRAELGTARVNEKQAVGVDMEDLGYSRAPHPFITTDPHNSSNLDGGANRGSLGSTP

SEQ ID NO: 1013109 - protein, 179 aa, Homo sapiens
ALCVGPVDPERLMVHSTRLGELVCGEHGLGLRVLLSAAPASGCWLCWPACGPCAAQGRTFSVLLARLMCDMPRSSPEVQQSRPMHDCPRGSLLNVYLLHQRGPDVGSTWGRLWDTGPKTSFSYEDGGGCPLQDRRNPWATIDFYRDPSDKPDLSRMQPAQQLSDNLAPYTMPSAITGGQ

SEQ ID NO: 1013110 - protein, 282 aa, Homo sapiens
ALHCAPCASRHPSPESLITGSRGPREDGREAEENQDHLCGGWAWLMGMAASCEKIVQEVWLHPPLHRVDLLRVLSVKLTARATGARMLSEITGERGHAGSTGGQCLDMLRVMPWLAKCQVLPQVLPDMMATRGQVHAKDEQEFDATDCTATLLLYVERTCPVRPVTQWLVETLERPAGVWTDNEETIKKRVENYYKATEPVHRLRMRNCGTCCAIVNDWRAPWTGVFSQVCTQLGRPKVATLEPISAGQAGILPRLIRGPPGLRRKRGTTTDLLSTDEGSRI

SEQ ID NO: 1013111 - protein, 166 aa, Homo sapiens
VYKGQGFSLSVCSLLRNLASLVSYGLHEFLTVSSQGPSGLSRGLDDSLCAVAKSFDALASVKGLPGGRSCRPLVSEGAMPLVPWARPPGPSWLELRAPCSSSRERKSLWNTFNNHSGRFPEQFLRHGPPSCSKPAVQLGAELMEATQVRGSPSLSAEWDFRMTLDS

SEQ ID NO: 1013112 - protein, 185 aa, Homo sapiens
MALVPFEETCYGQSALVGNGTMASFLQTVLEIGSERMRAVIAGPALIFTLTLAREAETAGMYGDQQRDHGYVLTSLADVNRIFTPKGRFISWSHRKPFNSRQTIVRIQLTHRETTQRTVLGDCGYGTRVADQVTAQEKPTGTAAVGTTKHNAAGTVEGYPMGLGISRSLALCGGTGPENNVCKRP

SEQ ID NO: 1013113 - protein, 309 aa, Homo sapiens
MTHVIHNALRLGDTLQSPEHPRSLQCSRWEQTDLTSNPPGPPRLHPEDCAHGFMMDKKWQRWRVLSYQLHRLANNGNTARLLSSSLGRIIPAIWFRYYLSPITVKYTERRQPLYMIFISHDLCHSLDGTFSRRRASWNSLHLHRPLMAWNERSSWAQMLFDCLLPSLMADGPWASPALAIQCPCLLWPSIWSRNLASVPKGVWEVGGTVAGWLDVLQLPLFPVFLFRQITLPEVAVPLSLGSPKNRVRQGVGSPGILGTPPRRGCSLFPQGNIPGMHNRSALSQASTISQPHQVDTLMIWVSPPGQRTA

SEQ ID NO: 1013114 - protein, 377 aa, Homo sapiens
WDHRSLSSESMADVLSMSGRRTRARAPGRTLGHTWSGGGEARVRHSAVSCGNGKLLQWLIDQIDMRQVPLVLVWEELRHSRRIFLHPLVNAPLVKQDYNREEDAALFKGIVVHLFTRNSSDEGHRTHAWTTSHRGKDRGPAGIAPIETRTQLTFEEKPGLSRGRPTSLVTIRSRPPVTPQVLPRAVANPLRGHAQQTQVKSRMRKPFDHVARETQPDIVSQWKATTRIDYRRVQAQTPPFSPVYTDSRPRMPKVEGIPNDNRLEDRIGANARTSGTREEVLGQRVKLSGEPRGDYKARTRPTAENNSHPVTPRVDIPPKLETSLMGTPPPAEARSSTLGDHYGYAKALYGLKKTIVYLGTTGRRHPAETHHHCHNMP

SEQ ID NO: 1013115 - protein, 67 aa, Homo sapiens
MQRRPSIRGTVKPNAAGKSNAVSIGCPQRMRLWSDHPFSRKEAAREADAVAPGYAQGANLVKIGERP

SEQ ID NO: 1013116 - protein, 147 aa, Homo sapiens
MAIALAAVGALTGALALAWRCFALGRVRGPSRHWVNKPVELGQKNVNSLVIKRHVGALEENTVLADDKILEEYANCYEGPSDPGKFTSGSKVTISGTFKLVAPGNLGTTLDRRDSVTIRELRVEAPFQNFLPKGQDILQRDVVFMRQ

SEQ ID NO: 1013117 - protein, 78 aa, Homo sapiens
  misc_feature (10)..(10): Xaa can be any naturally occurring amino acid
TTPTGIYGTXNEHRWFKKQLSVRIRMWARSHSHVSPASPARERLGGVPAAREPGGPSESTEGRRRVSPAGGESLPGAG

SEQ ID NO: 1013118 - protein, 179 aa, Homo sapiens
RLRLTSLEVSAELWKRASSCLAFSISHQSHNSTVPPVLIVPYSSSLLPRPYRTESGAPSPLCTGRGSEVTRGRLLLASCIVCLRFYLAAFCRGSLLAVTRTCCALVSPMWEVIPSDRPARGVAFASPGPPPSRSPLETVSFQVAKSSVPVKCILFSDIRSTKYKSLTSYPSGIITITVC

SEQ ID NO: 1013119 - protein, 77 aa, Homo sapiens
LSYVQILIYSKALGIVLKFASGTDNVAFDYGRGSPRTQGCYRRSALGDLDRGELPWARASSNFGDLTIFAQDGELTP

SEQ ID NO: 1013120 - protein, 282 aa, Homo sapiens
GGVSVAVLSAIRSVWHWRPGARKAGAMLAPGAARALEGFVGPETLGRMSGAVLLQRKSEPPPLDRVYEIPVTVMPITFCCGKMHILCPCAWRWPIFPDLGPAGYNGPKCSTCSHPVFTDASCCTKTEACIYLSPPVACLLEGVKQALWLTKTNVNMNVPSLRKCLALLMIQGTTIENQDECVLSVIVSRPYSGRPLRKSPKRESYCPVIVDNLIHAVYISDSQASYIWPGGSVSKNSSFLGNLDTDEVPSTYRVRRNMVEPGVQPHGATAHHGSSEDRKRKD

SEQ ID NO: 1013121 - protein, 274 aa, Homo sapiens
QKGKKGFVSPIRRLVYPKAGRRADCRSSVETGPRDTRVPLYPPEYLIDPQILLCDYLGERGSSSWSHLILVMSFAHVKPIHGRDELHAAGIDTGRQPEQEHERVKNHGGRRSSILSTVMPRKPCCIHLGQRQTKERIQMTDGYPHTDTENQAGTAIRVTLGKRTERRLRHGGIRCRHRHPDHWSCENPRWPGTATMSNDAKHPEPVDNLRELSQKIRQETLDTRTKKETNTPETTRRDNDADTTNHSATSTETDTNKTNNDAEDTWRNKDTRKE

SEQ ID NO: 1013122 - protein, 151 aa, Homo sapiens
MAIPYNVRQQNRRFHWAQEGGPPIGEKLVHAGAALPNRTVSIPGKPGRQIEATVLIKLAITTWAFRQQGTRQHSLDAPYTPRRPTPPSEKRRPANQGESSARKPDKDGLTSGDDPHSAGNDVPPPDGATPAQRTQHQLKHRPRARQATGDA

SEQ ID NO: 1013123 - protein, 276 aa, Homo sapiens
GAGAPSTARRGPGCHCLKAPRKPPQDSPSQVHQSPRAPPLTPAVIRHYVIVQRLTYPYQTSMTWPPIHDVFPVDQMAMPQWGSPPPGPRCAYPDSPDATCSSIASGFIRSWLERLVVRPYRLQLSRGFCDDQWTLMTNQQARKRHTHTQQALTPMMRITEQLTHNQSHPQPLQRGTRPSATRPTGHCGNAMRQPHSNAHSREETRARHQTQHNRGITQDPRANTGSRNMQTTETPLTVTPIRENGRNQHTGRADTQDTQAPGGKRSENHTARQYQQ

SEQ ID NO: 1013124 - protein, 112 aa, Homo sapiens
  misc_feature (88)..(88): Xaa can be any naturally occurring amino acid
TSVVKMAYQMLWGGVPAESDRLKQTLYTIVAVILTHRLLGASLELITCLFELYIAIREIILYTDFETMEINSPHFSCVGPVGSDSRIXTVSLDYSRYTVRKCYRERLCLSRI

SEQ ID NO: 1013125 - protein, 374 aa, Homo sapiens
  misc_feature (100)..(100): Xaa can be any naturally occurring amino acid
QRVFTSNLKQTPVVHLTPEEKSAVTALWSKVNVVKNVGGRVPWVEADWMSLPLRTQSVHCRCPFGESVHTSVMLVIGQSRKGDRLTGKESASGAYIADGXGFKPGHTSTCTLLLTREMKLVIVDQRCERWISMSKLSRHPCGTCCMDLVLLGPVHFGNINSPTTSVQACAITKVGGLVLANAHGPINVSHLTLDFALHVQNYRIRRIPFGSLRSNLLNMGDISDRALKRIVEIPALNTKHNSTSSIAKTNEAQHIKHREGGGSDSKTLFHKKRAPKGIYRRRNTTSVHKGDRTKRRRVTRGYEEAGGHYEYGRRREGATREPQYVYERTTGRQSNVRRYSGLNAERERPSGKAKPTSSWRVRPTNGGQKESALY

SEQ ID NO: 1013126 - protein, 149 aa, Homo sapiens
MDSSPASDAGTVLDSSKEHEHVLTSSETISMIQKSGNGFDPWFDYAMSYFNMSFQDIKPSERSNRQSERRYEKVATNRVVGNKVDLEPEREVMSSEGRALAQEWGCPFMETSAKSKSMVDELFAEIVRQMNYSSLPEKQDQCCTTCVVQ

SEQ ID NO: 1013127 - protein, 56 aa, Homo sapiens
MQSGAPSRVLEPDEYLTAEITCINWILEITRRITCLEPQGMTGAYFQPRRAYIISE

SEQ ID NO: 1013128 - protein, 475 aa, Homo sapiens
PGFAVLSPRRLEAGGQDRSQRPGLRVCFPRGVSSRRSCCALYPCFLVSISEVVLCLVVCIYAACGLRVPFLSPSFSKRVIHVNNQFKIKVEVLSTNENIQKRHNTQENKIKNQTKKHQRGGAEDLDASRHHLRRVRPTKLSAYEKATINGPLSDRSPKKGVVATTPGGATGRSMKRHQRQTQGRATGMLDREKPTVGHTGRDDPFERGTSMRESSSIVREPGGGNPPMNNGWDERGADRTTHIYGRVDRDELGHPRSRAAEKRLYFSLNDPSGETPESTLDINSTFSTDQQDCPINRHDARPHKEPPIMPWGTHLGARLSTPSVQTQQPILVEGPPERETPSIGALLCETEDLLSPRKDLVSSGTLYEFIPHQKPVSQRKTTRSPAVKRITTIEPLAEKYFHNRAIEEHSKSPLERSLHREVLSTFTTNLSIHNYAARKSKLSTTDISSVDTQRVQPWNQICRFISIRTLERARG

SEQ ID NO: 1013129 - protein, 85 aa, Homo sapiens
CEKTLSQASVTSTSSVQRNSLQKKTGDLEKRAVIYSILYSDATGQKKAMDNTRLASNAIYSGMNAFLAGMQWSTRSLQKQGYYAS

SEQ ID NO: 1013130 - protein, 249 aa, Homo sapiens
RSCHLRWRLDATGFHRLDGWRSWQHVDDREKWHKCTDWTDTFLSSGLGRTGSPASEGGGRGELARRDGAVMAERLERLPEGWAGHRSRMLDPVVQADTKSGKHNKKRSRSRSRSRDKERVRKRSRLSGKYTGTGGGSRGPVSRSSNTGVSRRERDRERASSPPERIDIFGRTVSKRRQRWNERASNARRRRRRKRSSSGSERFDMPETRRKNSSREETALKSRRIGSKKGWRKKLEKRKADIEREVLRR

SEQ ID NO: 1013131 - protein, 287 aa, Homo sapiens
AALPLTTTNMAAAEGPAERCRWRKGCVGHDSCLRDSMTSLRMAGRGSWLGSGAETERSGLLVSILLWTMQSLLTAPQPWGELCHSSSYVKRGSTTRGNYVFGVPWGLILYCVVTSPMLAGGVWRVFFGACYNSSICAPWESKSWCSFWPRGEPSASVCSGWRLSPSPSSWLAGAGSAGFWVLGATLVVIGSRAAFHQIEGCGRGGAADGSLCEGVFWDLAASRGQVPQPCPCLSCTARAARAHRRRPITSPGRDPAFETKLEWDVIQENTKKKKKKRSLENNPEGRQ

SEQ ID NO: 1013132 - protein, 153 aa, Homo sapiens
  misc_feature (102)..(102): Xaa can be any naturally occurring amino acid
ACPRLSPPPSASEAARAQSGAHCSSAESSPVAMRSCGRVELPTSTYLMADGTCQDAGIVGYKDSSSVWAGVPGKRFVKNYASGGGCPGWQRPVHVFSVNVRXTLGGARNCSGVIRDSLAAWIGADFSPGSSYPRAPLGPPYLFQVTAHQRLDI

SEQ ID NO: 1013133 - protein, 75 aa, Homo sapiens
GLYASVYGMRLPELLPTSPWPRASIFPMSLGILGIRPGRGSRVHNHRTVRWCTPSEKNKNANSSPVASTTPDRLS

SEQ ID NO: 1013134 - protein, 120 aa, Homo sapiens
AGDAGRRSQHLDEGCTAKCGQHDLWEMPCVSWSLDTCLGVEEMSVACWFPGPWPCPSPVLCDAHAACLCAMCHALDTVMLVPDAAMSPVLSCAVMLKIACDVPCLCDLLALVALPAVACL

SEQ ID NO: 1013135 - protein, 90 aa, Homo sapiens
MTPLALSPPTEYPRSPISDSSPFRDQQSDGSAETLVGPIRLSTVAASTVQTEHGPNARGPYSGGGTNVCKQLPGAYIWVPYSVIGGVCQQ

SEQ ID NO: 1013136 - protein, 135 aa, Homo sapiens
MAGYLKLAVCVLVRRQGFHTVGSRCKNRTGAEHLWLTRHLRDPFVKAAKVERYRMSKRLQAPEVNERHQILRPGLRVLDCGADSGGLEIRLAVQKVNAAGTDPRSPGWRSMLWGTIFIDDIPRWEGANVCCALLT

SEQ ID NO: 1013137 - protein, 173 aa, Homo sapiens
MVKNRKHGTGGKSWWLSSCSSMLVSRQCRYPRAVQELIVGTVVPASLPRGPHVLLLVIQAVGVSLLRTQWPSGMVKRGLWRQCAMRHVVILLQAIKEDLVGPGPGIDYVAIRRTICSLKDLVRECERRYCAFKNWGSVEEQRQQQAELLAVIERLGREREGSFHSNDLFLECP

SEQ ID NO: 1013138 - protein, 248 aa, Homo sapiens
QHSKPAGIKVYQSAAWLRKVGIVDPATPPLWRPVKGPRKEIVYQPCVDRRHSALMAPELCWTNWWMMTPSLLQIWPGHSTGLTHAPILEGRAASLRTGTPAKQLLSCDSTNVVAPSWCCPVIISSDIYVVDVGSEPRAPKLHNGIEPKDIHAKCELAFLHTSHCLVIVGSDDQRPLGDVKGNGKGGWELLDGETFEVKVDMGETWGCCTVWAMTSGTEARHNVMISTEWADPNVLRDGFNPADVEAGL

SEQ ID NO: 1013139 - protein, 115 aa, Homo sapiens
MSTNDSEILNDTFRIDKFHIIVCGLDSIIARRWTKVGMLIVVFYIMKMVSLDPSSIVPSTRWAGQKVVTGNARVILPWNDCLYECTLELDPAQVNFPMCTIASMPRRTRSTVLEY

SEQ ID NO: 1013140 - protein, 307 aa, Homo sapiens
QESSEKGHSSMGLGAHRSPDGETEAVDVCLSESLELGLVPEFDRSRILYYISRAPEVAELADPGQVNPEGMQEHQGADAGADGDGRARPAAQLCTECHSQGLKAHPNGDSYTRRHREGPAAPSRLHRMPDGDCLECRRAGVIVPRGRPGGCQEPDGSGRESKDEWQRCIRGRTVRWMNGHRWRQCDIEPYVAECTGTTGGHSNRRARLVAGNASPVRERRVDKYNAYAPPLATQHGIGPKQRLGQMTLARGVAPLAAVADGHRTGAIGRRSQGSGHHRGGHRLVTDIRGTERREGRPPITRKPQRGR

SEQ ID NO: 1013141 - protein, 366 aa, Homo sapiens
  misc_feature (204)..(204): Xaa can be any naturally occurring amino acid
PLRRRCCWPGPCLRALRPGGLPRLRRPQAVGGDAHLRPALVTRATPSMTTGAGAPDLVAWISWRRLCPYPCPSNWVNAVRLSLVCGPWACRAHPRDVLSRKGEDGLMIAIKLRLARSPSPAPGMEFRRWAIVSETCVARLLQSPSLVACEVQCDATCWVVLICTFLDYDSAKSLRVTSMAHSLGGLCIAGGPSIEPKAGSELLXALVPPRVDILRANNQAFWCYLSNRNNKRPKITQGRVRTFRSELLNAVEELDALVGPPQFRPGIETTGWPPMKEKVRHNNKLSPAPCERQQFRQKQCRWYQLGGQTGGARREGSTMGEEDKQPEESNKDWCQKTVRPRRCTAWAVYKPVAKGKARRMACGGCN

SEQ ID NO: 1013142 - protein, 305 aa, Homo sapiens
RVPAEGLEEVLTHRRDDCVSQATRRRSAPCRFHPLSSQLCVALVPPMTSAVRSLGPSGVELIGREACEELTEGPRIVLARGPGVRDGQQLGTVCKDGRCAASTGPGVALQPLLRKAQGPKGRTRETRIDLGYVMSQHVLLVVWSLIMRPHNPPLARPICEAPELVRIMKLEATVAVLDALANGEGAGSVAPVNSSVCPVYVAIDTWPRCVLTRGRRGDHPMVNSMYDACVPDVHHSQFLRVQSAFTFALNSHIGASVLLCVTTECDVREVDADAGALRLREASAWSLWAFRVPRSPEGVLPGMTV

SEQ ID NO: 1013143 - protein, 218 aa, Homo sapiens
MAELQEVQIQEVEADVLAERQTALEARDDVTSDGRASIASLVVHFISWSYESTSPDISNAHAISYPYHECGTQAIIVLQFQHTVSEYRGRCKDRSFEDTYDAGIQLFGMHPVRHIGTRSARPLMMIPHMARIIIRDPIVVAPRLARTMDPLSILTRYSKSISLSINLRRRCWTLVAYSPGRDMLLCTRTLSKVLYLIRTIGVPKCLRGLDRASGARAT

SEQ ID NO: 1013144 - protein, 233 aa, Homo sapiens
  misc_feature (150)..(150): Xaa can be any naturally occurring amino acid
  misc_feature (179)..(179): Xaa can be any naturally occurring amino acid
SIRNQTAASPEENAVNRSSHVSGSQLYREKNTRLPFWLKASLSSIQARTAVTWLTGARERRTDIDWQPVEINLRIKARQQDNVRVGRRETLIPLLIALMGRKCPGNMIGRDLSDAFSPVKDLVEEHEGVHQLRDSPILYANGQFPVVLAXPMCFNSAEVKPLDAATVETYIARIGPVTXSREWVSPGNSVIAKSETSSTVLHDESPGCPSTGRSSGPVRRLEVLLLTLAASAP

SEQ ID NO: 1013145 - protein, 241 aa, Homo sapiens
MGSPGLLTGWGLLDYKTENVCDDQELGWVGALQEALLLGMGIRRSYVGSGGLSVAENKATQAAGPWNRQFSYHHQDFKRRFRVTSDQGTRWKPAVGDVGLTFSECHRHVTRPVPLVLTSLGSTDGLCPEGGREGTRADSRVLESMASRVVGSRRGPQQDLCRSGSMDAQVAEWTYVPSEGPLLGPRAQELSQAVHRNTTVTFRQVQASSKVRCLVSTLESPPYSVDATGVYEATNSAAYVS

SEQ ID NO: 1013146 - protein, 237 aa, Homo sapiens
GSERSRVQRTGDQCRGQQLRAQTPSRVQSPPARRVVLGDGDAAPGRSDYSTTPGSVRSSAPPREVPGSSSDLEIPDGVSGNSPVTKITPTRDSVPSIPGVIHALPVMSPPVKPAYEPPASSSPEDKRGVPGDRVTSLRCTFRQHAAIGVGAHTKGPLRAFLGGGPILAQCLMKVSHTGQAVGVGSGHLHGLSPSTSRAPCSPSLFVIDSMQIPPCALHLIATELADAQGGRDRRAST

SEQ ID NO: 1013147 - protein, 127 aa, Homo sapiens
MASGVTVNDEVLKVSNDTESTGNLATQEEITQRDRKQLLFCLSDDNRQILVEEAKQILVGDIGDTVEDPYTSLVTVATSEMIADMLQYDATYETKESKKEDLVYIYWAPESATLKSKMIYASYYRCH

SEQ ID NO: 1013148 - protein, 283 aa, Homo sapiens
  misc_feature (137)..(137): Xaa can be any naturally occurring amino acid
TVMAEAAISLEQQPQHQEQERAAETCVHACLPSSPDPHMSSCLLFPCVVAVAVMCVCCAVHADLCHAVLGEPWARTHPRARPVDKRYSLYLPLARGYSGYTRTTRKHPEPCYRDLTHHAPCCNAHFDSIDSLLHTTXLTFNALGITPWLARQPLTTLSKGPSAQRLYTVHNILVNVWRHRQPTCVSLALTGNFTFAYPNLTRRITTAQLLVILLNGANTVHRPITIDFKPTANLSYNEPFKPHDRSRFQLSPSRFSAPYFGAFYPLLPTNCVYLTFFHISRDT

SEQ ID NO: 1013149 - protein, 134 aa, Homo sapiens
MCVPCGESAPELAGFTLLMPAAIIGNVGQLATESELFSTLNMSKIGYFYTDCLVPNGWKSNPYATTEGHIQAEAYHKMLKYNIKAIAVKKLLSWVNEQWLCQSHGSFKQSFIISVVICSFVGTPFRYLLTPSMQ

SEQ ID NO: 1013150 - protein, 106 aa, Homo sapiens
MPHGCSISCAQNVHMHALVLWMTESVLQRIALKWDELRQFPSDDDQSNVRRCTLPGGAIESHGNHLLVWQWTPMEGPCWHMLRVFAHECVNTCSLVAMLTWTALHA

SEQ ID NO: 1013151 - protein, 176 aa, Homo sapiens
MFRCGGLAAGCFECMNAGALGADRVLSECPEAEEPGSHGNLFQRWHVPLELHDDNDKWLALVHQWWQTSDNSCVSPYCGLINSRMLGAYAYKTMKKDDKTDTMKEFHGLRADTMNMKHDKQACVICFRKEQDTFLNDKGCQCHCTFPCLNLVGRHMLLFAAGRIHPGARGSWVPGY

SEQ ID NO: 1013152 - protein, 246 aa, Homo sapiens
PPFPSLGSGGDIAPGPRGVAVATPRGLPSWRAPPICLSWSVPSPTFPPDHAMAGCVCLTGCDFRLRSVPWSFCAFSTHTLCGLVLHPVFCCSSILVSAMVAFFLGLVSLLLASVVWFILCPCDLTCVRCPVRLMILFSSLDISLCRSHMSTSPIRTRQCSILPICANYPTHAFTAHGQHAAGSAIALSECTRKHHPISILPRLAYVSWSLLRVIIMWCLLCYQSSGCCTLAQCVVVDPWSTQPITS

SEQ ID NO: 1013153 - protein, 220 aa, Homo sapiens
  misc_feature (162)..(162): Xaa can be any naturally occurring amino acid
KIRRGCVITISGRMSFIETTKSMEIEVWVDADPVVDSIEKRYRAASAFFTYVSMSQEGGSLAVPQVVPESRGRRRSALSEGIGRVPADEGEADEGSTLESVSALDSRILPAHWCLEVAMVIQGPVVLMSRHYEVRPALGHKPLIAALEQLCVCHEGFRYRQXLTVERLILPRPTHQKLEFHDRCPSINATTVLSRAPGGRRAEKPRECFLSYAVGYGKKP

SEQ ID NO: 1013154 - protein, 196 aa, Homo sapiens
MGLLLAYSLWPWLLGALLMILGLVPSLGSCVRTLCGLLLAAEGGARLAAGALERTGLFIIRVNVFSRVGNAQVARQVGDAGSGPGVVHGVFFSGRVRGTHCGPLPCAMTAGGPHGLVALDTSWTLVAGLDFLALGPVCLEQRLPWRLEQPMDVGHKKPKLNAFQATGPLKTSMARKHFKKTDWLEEPPSGNLTGNK

SEQ ID NO: 1013155 - protein, 269 aa, Homo sapiens
APRAGSPREAQPPLLPMVQTAWQGYNLQRVSGAHPPLVCATLILRTPWPTLAWCLGRLSSVTTRVTWPEPLGLLSIRPRTWVSFFEIFGPADPVSQEWDSHREFGEGLTVVGLLSSLELRETVQDEVDKTRTIPGHQSVGRQMGIEQDFCKDKLVLITARVTTERTAREPAYILVLYQESYPPDQPPISCSEEGAGNATLSPRMGEECVSVLEPLKALLLTKLTHLRRSLALCGSRLLGLGLLPCFSSVAFSACVTAMCVPTAPGVRLV

SEQ ID NO: 1013156 - protein, 150 aa, Homo sapiens
MVSREVLPASSVASSSIRWERRPRGMCLSDHGASCPALGKTETKSSSGWAIAERALVSAVPTCPAFQATLILTSRSCGFQGQGLVYTLLCDGTDDEGAVGTAYASYTCSRHGHDVHDMLQSHTSQLLGVAWNGPELQRWNQPGELTSIDA

SEQ ID NO: 1013157 - protein, 207 aa, Homo sapiens
MIDVRGLTRAHWDSWLLCCRTRKFVALICEASGGGALPGCCPWCKTGRVDKNAPYGLWPRQAPVLDIPGARHNDNGHCQWRPRTGISHGVGDPGWGPDAGPCGSPSSPMEGQTKRVGIGAWHSTAQERAAQLQGCDNVDHGCGTWATGAAMLTLGPEVQPDDDLRVWTGAEMGGPHLVPPAVSKTRAQSSSPQRPGVAEKSGPTRDP

SEQ ID NO: 1013158 - protein, 165 aa, Homo sapiens
MYVSKAYRYSHTDIGTPINSALGNATPDDHTLPLGLPGPSPAKDLETTVVPFDKERRIAPVARWLYMTRMCTREGCPAHTCLTCRWLDAAARYCKGKRAWLVYTCSCRGTSARLHVHRHACHIWSHHISATSTAWTLGHDGQAKVTRLHHSSSKHLRYRRSVIPR

SEQ ID NO: 1013159 - protein, 272 aa, Homo sapiens
RRSHDFSNMAAAALRSGWCRCPRRCLGEWNPISFQPQSYPMGRPIRCAVPGVEQLPLSKTHSSLVEDETTGVFVIAALRSTNCRKQRELSQKETHSNMRTQEVEQEEFRDEALKAQYRIETMLLGRPAEEIQTIDVKKPCGTSEVLRKKLGELTGTVKESLHECQYNSDLGRKIKEGVEEAAKTAKQRPESVSKGGEKLGRTAAFRALSQGVESVTTEIDDSVLGQTGPYRRPQRLRNENGVCGRQVQGGRQVFEPHEEALGVVLHKDSKWY

SEQ ID NO: 1013160 - protein, 104 aa, Homo sapiens
MSTSGTVVTRSQAGTEDQPSATRRDNSLGPRATSNFGDLDLFLRMGSSLRETGEINIAVTKEWFMIASLGLLSALTLCYMIIRATASLNANEVEWFDRRKNLLC

SEQ ID NO: 1013161 - protein, 226 aa, Homo sapiens
GQLQLTGWHRDFWTGNCTIRSSPSQGGSRDCPPRKSGGRGDLDSALVMSQAQEEMSLWLGAPVAEHSSVTSAVELVEARRTGCIGMPRPREASSCILERGSQECPTLLGVLQGWGWRLQSPQTLVTRAEPPSVTQQRSVHKSGRRTGGSPQNAGERAMQMCVGTRASGRSTYRGSELLKGCKGFFRRSVNQEERTTSGTVRGKLPHGRPTMRRKVPGGVGFANAVR

SEQ ID NO: 1013162 - protein, 114 aa, Homo sapiens
MEPGGVDASLTLHGLQNRSHGKIKLRLENLLALYFNTQENSARRRGASSLEKNYCICSLFYQKRLQNIKLALLAADKILVSSMDITGEFSVNVFSITIGLSDVIELLVEPLRNM

SEQ ID NO: 1013163 - protein, 149 aa, Homo sapiens
MCALHKVHGYDSALMCAPTIPRRMSGDTFPNVHLRDRAVDGWLTRAINRRAGTRAPSSTSDALGVPEGHHKKRMESDERELPRLCYQRIRQVYAFKDIPWPGVSPAGVLPQRASSSPFCCTNGSSRYPPRNYNRGPPLLAVTIESSARY

SEQ ID NO: 1013164 - protein, 131 aa, Homo sapiens
MLARLVLNSCASGDPTFLASQSAGITGRRAHRARARSNMEPNFMTTRPIIHMCNRIWTAPSVATVNRHHYDYIVSLQTPPTLTQNRHPSGPYQTANPYFVDPSNPLLQRDKKATRIYANRLVDEEYWWKNE

SEQ ID NO: 1013165 - protein, 168 aa, Homo sapiens
GAATQASLEFGPTDHAAGGRMQPLQARAGELWLPHGTVATPVFMPVGTQATMKGITTEQLDALGCRISVSTLVYAWGSARGAQRSVEHERLMRHSPSQSTSCIERPQGPGLVLGVKEQQGLKLARSVSQEGPPGRGHPKPDTFFHNPGPELIQKANGLHGFMNWLIIC

SEQ ID NO: 1013166 - protein, 179 aa, Homo sapiens
MVGLEGHTSTTLMAGRDACQDAGHSVGLQRTLPVRSGARSDLARREAFVHTIIASCRWVSWFGKDRSRIFYCVMGLDTVVSAIEDDAEVMSEDIDCACSRCERTLSIAASNSVTHRRTPELGTHAPFNSHLLTQELTYARRSPDCIGLRHGVHRMGYGQPSRCYDTWAVLLAFWALPSN

SEQ ID NO: 1013167 - protein, 356 aa, Homo sapiens
  misc_feature (245)..(245): Xaa can be any naturally occurring amino acid
SSRHLGWGLARGLAISQRWQQQDKADIKELTFRAILLTRQPACREHLDEGPRKPVSAKEPPLLCALKASTPARPHVLFRCFTWLRCRCSVLTLRDAAILRVPSRNWAGPCVANQAQGLIFGHLETSCTDSIPIAFGSVNLSKSTESGRVSTHLLGIVIVVSDSCGLGRQSALRGSEAWYTRRSLNDRIAMVSVGCGQICPFRACLCHTIHRGKNGELDKREREGSCVGWGDKATLQGERERAGTXTPALGKYLRLIGGKGTKTDTVGVPYTGAQGPPRGPWVPPREHCLGVCGTRALGYHTGLAVCPNDISARSLGTPISLAQYARKLGVNPKPKCVPFRWDPPFFNVVLVEGNFP

SEQ ID NO: 1013168 - protein, 68 aa, Homo sapiens
MEENQRVARRRRFPFVRERSDSTGSSSVYFTASSGATFTDAESEGGYTTANAESDKMSGTLTKESEDG

SEQ ID NO: 1013169 - protein, 164 aa, Homo sapiens
TDTMVHLTPEEKSAVTALWGKVNVDEFGGDGPGQVVGVLSLGSHGGSLSSLGRSDQLLMLLWAESLMGEWLHCVNESARLPLWMAWPWSHAGTIPQGGTVCARLEWRLATVNQACHVESCSNFPRSWATRAGSVVLVRSTSGRKNSPHQLSAAVLMTSGWLVCA

SEQ ID NO: 1013170 - protein, 239 aa, Homo sapiens
MAIHHLDILDRALYELVSHKSSRHVLSAEDHLEFLDMLTDGAWGTMGLLGAMCARHFDPRRVHCTNNLPLSFCVWCASFAWHSETNIEAPKEITSGVGHGRKLDARIHLRHLQPEVVLVSQWTPRVNSGSGSLVVYSKELAQGNFPKMWKLTRERGHGRHDNCCPPREPVKTPTPGTTHNSWRNPTSRYPSNQTRGYQKVTMERPPLGDSLTYFIALLPSHVGGEQPFDTSWSHVPFPQ

SEQ ID NO: 1013171 - protein, 145 aa, Homo sapiens
GVFAGGVGKPSRTGYRMITDVHARHLRPNMLGVSLFLSCTVLYHYVAVNNPKKQEGEVALVSAARVPGHSLRQDGGYEEAFSTSLHPFYRIYKHTEAITPGLSKQLLVVRRESCLNPYGTKEAVPSWNRGPDIGGLLLTYSASPH

SEQ ID NO: 1013172 - protein, 323 aa, Homo sapiens
MWPRSVGESQNLCDPRRRAFEKSRIDQELKLIGEYGAREQTEALWRVKFTNWLQLIREGVGRELLTLDETGPDGGSVRRLTNLCCSGWVLHRGAGMMVQRLNAWNERYPGDREKIRRECSVRPKTSLRESQGFVSKARGTFALKGRIANLNDYGDGMDFAGTTCLDIQRGSLQIPTVAMRAVPRIRYILIHVLGNVHQEMHKSEALLIMADSPLNGGLSQTTEAGGWKQGKKLPNGRGPHGLTRAWGEPGEERNRRDRDADLKVPTTWFPYPGRLARGQFGHTDIKPMAQTSKSTGLTGSLLTSQNNYEDEQEPQQTQIAAKG

SEQ ID NO: 1013173 - protein, 224 aa, Homo sapiens
MLEGPVCHPYSAIQGLKGRPEGKRGAASGNTSVQGWSYPGSHRLPIGARGIPGINRHQGQPSENIKDQPRPDLLRHSAEPPKGGNVVIFDTVITNQEEPYQNHSGRFVCTVPGYVLLHLPGAVPVGKSACPSSPPQGGQVRRSLGFCDTPTRGSSRWCQGAWCFSLQQGDQVWVDKEPNKGHHLAGPEAESVFSGYPHRSHLPEPGKDPRPQRRRLASMLRLVT

SEQ ID NO: 1013174 - protein, 244 aa, Homo sapiens
KRLLRTRKAHPPEAEDVSRRAKSQDHQEAATAGHIQMSFAMFDQSQIQEYKEAYNMIDQNRDGFIDKEDLHDMLAQRGEEPHRAEYLEGMMSEDPGAHQLQPCYLTMFGEKLNGTDPRGCDSATPIACFDEEASGFIHGGPPPWSCVTHQWVTASQMRKWRKNSTGRHPIDPKGKFEYVEFTRDPQSMVAKDDDDRPGEELKNAEDHNDTEYTWNQTARRIDVHVTTCTRGTMREDEPAQLLNP

SEQ ID NO: 1013175 - protein, 183 aa, Homo sapiens
QIGGYCGSTVKKMDMDVCKQNMKMRKSEQIQTGWGVPRSGLDVLEVLPNVWILMQPLAPPQTNARRTQRKQKPQNGKTLLLLQIRLEARNRPLDRPLAPFDREPFTLGKKPTYLAELEPSEFHAGNGLRRGSNLPKIQKPSSTTEHGRDMKGAGPLSEGNEATVCHIGMEWWTRTDEEKLMTE

SEQ ID NO: 1013176 - protein, 217 aa, Homo sapiens
MLSSSSAKRKNVHCLKDGHTACLSRVRLYPQRHSFAPGLQHQSTPGQTGAFCARLICSHPSVIQSSLLQVDQSVTMDLGCHDVRHRREFIHGPWRVTWSNCAELAVPKPRRVTPSFSFLLHFYTVPIPKTGTLSCTVALRPKTGSQDQEVHRTVFMRLNIISPDLSGCTSKGLVLPAVLGITFGAFLIGALLTAALWYIYSHTRSPSKREPVVAVAA

SEQ ID NO: 1013177 - protein, 110 aa, Homo sapiens
RPQGTGERVDQLFNFDVHDDVLVAQMTPHVEKDESQCRQGGAELSWYEKNNAKHLSRTVRVGTRTSREKKWDERTSSPRDVTPGVLQRAPVSSAPSVCPVGSHRELQSNH

SEQ ID NO: 1013178 - protein, 444 aa, Homo sapiens
PPSTTSTCPHAHVAPSDAQQCGLPSRNAMCLCHGAVPEMRLDCLLGAGLELGGMPMWYVVCHTDGPGGVVWTPGGAAGVFPRMDRTGTTFIQTEFPMWRSREGPVNLPWCHVASFSEVYLTAHVFPSCILSIITSHYYYLTLRLQVLQLIVAVRHGPWAHPWGVASEGVRGLAIAAKELDWPVGMYGQGTTRDTSWTKTLLYPIKARHQLPLFFGNFLGNDSDPTSSLGKYNFGGLLHQQVGQGLWHGYPQWQARPCSAFNSGPCLAAKGAHHFDYEHTSTTVFLTYPAQIRTLNIVHTLKQIVGPFASGLGMEAPQDKVPPSYKPPLPVTIGREHWLTRASFDVGGAPVGWSKHSDPCLRAPKNEPRGSYVRATRAQVREPFRTLATNMGHCDRLRCHFSPLRIGDTSHACSTIQVGKNNPYGPFYGTILQMPQETIKTIPRS

SEQ ID NO: 1013179 - protein, 56 aa, Homo sapiens
MFELAKRYSTHQRKIISSSLITATKGIPLLGTSKQAAELMRPELDKLRRVTTEEAT

SEQ ID NO: 1013180 - protein, 410 aa, Homo sapiens
MPTERKADLNVPVPTTACSARVTVADYANSDPAVVRSGPESRKAEPTLFSEGSKISYVALEGLSVFLQRKLFLGLGEPCDIIDSSDEIGCPVRKCIHEENLSPENNTRQSKKDTKKNLDVGWTDERRIPWILKGYCLALLIFRSLRTIVPFYPEYVKTCLGLATCTGCLMWEPGLYLQCAPNKAVGMLTLGVMPSCDQGMSNGRNAWGMSLPAPSQVESRIFLYHSGMTPNMHGYESFSPEENSRALLRQNIGDHSKCTIFQTGNFAHEVCRTLSSLVLARTRAIGWGETRTLAYTHNVGTQFTTYSKGYSGEARARTPPTRVLHTRVSKVVYTGVRQCRRPTQGFTANPLAKWLSIAATSQSKYSGTRLGVASWRFTATRLTYIYFNTGIVGLGQVVTHSHSSRYRNPY

SEQ ID NO: 1013181 - protein, 35 aa, Homo sapiens
MRHDPRQQRPEPQPHAAEHDQRCAQGGVHTRKRQA

SEQ ID NO: 1013182 - protein, 73 aa, Homo sapiens
AGTGLGVLGIRLGTVAPDAVALGGSPRARVSLPCHFMQPCSLSNVSSGAGRGFNYSALPGPDVRRPYAGWCLH

SEQ ID NO: 1013183 - protein, 148 aa, Homo sapiens
GDKMCCPSGDGRSLSDRDVLRGPAVWWLVAGAVGLSRDRGRRPRAGTRRCRARVFDALVSVAGCELVAANDVQLPGSCSMLEDGWRSSWQLAVSEPAQLCVLQLTLTESGSAACWPRGSEEEGLVRAPHLAYVGKQQRREQTSPQDGE

SEQ ID NO: 1013184 - protein, 59 aa, Homo sapiens
GTVGGLSPGELQDARCRVPAQRIAGRAGGAALTPALSPQAAGCAWRHLMLAEGYRWCRG

SEQ ID NO: 1013185 - protein, 357 aa, Homo sapiens
MTSSKDRRQLCDLGPSIALVSCKLCLWGVPSGADDNHEPSANASSCNSVSLNSRLLSEVLPLNFARHTDFMTIRRQCRLRQDACAGPISRVRGYRMNRRLSCHGLARTDNWLLRCIVNKATKFDRRGASLSPVDLVTRRTSCQRCVSAPGRGAAEAPGMCSCKSRGRYGDSASKRVGTPVGKQLDQGAWPADRYGRSTLLPRGESQLLVFTYVGRTMKQPIKCLARPRLQGRTLSERRPPSGVAPRTVMCHRHCLSDHALLSGETQPLTDTHRDTTTKFPSGKPTTRNGEAPPRDTHREPQTPRGNFLNHVEHRTTRAEYLKVPLPASDSKRKTTEQGVLLRNEGHPPSVRSDGDRY

SEQ ID NO: 1013186 - protein, 156 aa, Homo sapiens
LHAGTMVMAEGTALLMRNRPGTNAHDSYNWPDESLDEMDSTLAVQQYIQQNIGAHCSNIDKMLEPPEGQDERVRKHEHLRQVCLELNGLAVKLESECHPDTCTHMTATEQWIFLCAAHTTPKECPAIDYTIHTLDGAACLLNSNRYFLSMGMIKES

SEQ ID NO: 1013187 - protein, 143 aa, Homo sapiens
RRVARQGRLTVLYWLTPDKMVTAMVASIGWACSVVTLCCGTWLPEPSLNWLVCRVRYEFKPEEKERIGQFVFARDAKAASGWSSDDKEISCREIEYPLESYSFAKNCKRKTSSCNRTHRILTLNFNFNIVSSRQSMQCLLAEA

SEQ ID NO: 1013188 - protein, 361 aa, Homo sapiens
MKKKKEKKRKDKRKRYQRTQKKSTQQKKTEESDTKEQSGHAVDHDQSTTEKRTTQNKTKTIDTNAREITQNRDTKDEHEQNTNQPRREKKKKNNTKKRRTKKRTETEKKESEPKAKEQRERQREKDNKQKAHQRRENTRATKQKNNTDRRYTKRDKKQRNEHRHQNRTREQERQDNKKTTPKTNERRSKRKRAPKTKHQKKNRNHRRRQRQTRQKRRNTQPQKRERRNKIDKPMDPTKTSNTTPTNTKANRIRQENRHKKHKRHTPKDGRTNQQQDGSDQTEEPKHNRDEQIQRAEATALQGARHSRQARRKHQANKHETQTKEQNKPQPTNREEQTNTRRPSERKQNAPKAERQHPQTEE

SEQ ID NO: 1013189 - protein, 111 aa, Homo sapiens
MLSHFFLDSSLPSLLALVVICPGSLYPAVMAWLCFWAIQPYPYPVRLCGWSTWVARSDPECGFGPGCGCGLLHDDCGLPHPEVGIEMSGRCGRGQGTETEVLGGDSPARPG

SEQ ID NO: 1013190 - protein, 344 aa, Homo sapiens
FRECGEWEDEPRRDDSSIVLAVFEPSGQCSMRQSSKVGQVDTLLRNFLPCYLWACWQRLVLAGMISLTSQGPHGCLTWNAMLLLQCNIQLAPDVLLMHPDGPLDLHMLSCGHRSSPCVVQARLFLMVRWRWGDCACPLWMLGSHALTKCRCAHYFDTPPVWRAHLWPFWRLQTNAHFEQLRINYLPSPWHLFPQCPDGDYSFLDQYFLADLPSTLASLRIIPVLAGIEPELSFPGGTLKGPFGTLPPRMFPNIIWGGDTHLSVIGATAFWASCEMPPSLLTPPPLGRPFGVLRPVWAWARYIRPHPFIPLWSRGTITPFRLRLFPFLLGQLASSAPLVGNLRPP

SEQ ID NO: 1013191 - protein, 141 aa, Homo sapiens
SQLYVGLPGLVGSLNLLPGRGGIGSGLGFITWTLSLKDKGMPSPQALAQTGTDLVLLQCWTPNLHIRTVMDHGAMKCEDWSTHHPRWVPNGLSSLLREYHQSTTGSHFVSPGWSISALITCLSANLKAPMLKQASCLQLPK

SEQ ID NO: 1013192 - protein, 230 aa, Homo sapiens
GYTDGAQTHTMTPHQAAATAAAAASSAARLSAQEASCAVPMLRARGARGLSRGCVEDEDGGSPAEGCADAYVCLSEGGAGVRVVFEAPNCASSVLQCHPAQRTDEAPFRALLLGRGRFLPVRAPAVADENPIGRRKPPMQVAASCLHVMYTPQQIQQSEVQALLPGSPIPILRVSTGLLRWASCRMTTLVALRACELTPDLEVYRWALTLYVSIVSIEVSSVKRQCRSRL

SEQ ID NO: 1013193 - protein, 249 aa, Homo sapiens
  misc_feature (95)..(95): Xaa can be any naturally occurring amino acid
  misc_feature (128)..(128): Xaa can be any naturally occurring amino acid
  misc_feature (176)..(176): Xaa can be any naturally occurring amino acid
  misc_feature (218)..(218): Xaa can be any naturally occurring amino acid
  misc_feature (233)..(233): Xaa can be any naturally occurring amino acid
MAVGPVTEVEAMACASGSGVRARRRHAGQLGQGCVPWSPRAARRCSPIPLFYMHEMRSHLIAGTDPVVLLDDENFYRCEEHQQYEQWYYIASHSXHVTRSAVCTRTIHVQVVERKRTSTILSFDLLLXRIGPGEIGMGCGHAAGSYPTRCLNHLRDSITFINGMGIPAFKMAMLLXLMECVQRSSNRDSEREYSSLQGEVELAVYDPIVGPKVLSRVXLLNSGTLGGGPELGXLTEANSALGAKTTMAR

SEQ ID NO: 1013194 - protein, 141 aa, Homo sapiens
GWYRSGVFGIARFSLVVIWPSGPGLAAAAFPRLVCGHCVAVLRRPPPFDLRAPSSSKPYMRRKIGRRGQALMLVSGRRRLLTVLLSWLMKLATFNASSDSETMCSSGAPHLVGASLGPGDREVVDGVINLNAFDAPHSRRR

SEQ ID NO: 1013195 - protein, 273 aa, Homo sapiens
LVRPDTGLLSARPRYWAYGAAWWRLHGGLCFDLDLETEEVHRGRGASQSSSPACLWDTMKSVELTDTSVERWPRAHLGPTAYELAAVCWARVGYGKVFQDAKGGKCTNLGKIYAMKVLRKGNHCAQCQGHMQQYTGCSRNIHSSQVKRPFICGTWAYAFQTGGKVYLILECLSLLSCPERQWLGLFILSPASASTVAMQPSEASVDVSCIELNPHGRLCEAGCRALHASWSEKGILPLERYGLLLPCADESRWPLGPSPTPSVIIYPGTTRPE

SEQ ID NO: 1013196 - protein, 135 aa, Homo sapiens
MRAMELLECEMECGDVPCLMQEVLGCSMYLGIPTCCACGVPTVTHGPHSRMRCMVPAAPVILPNYLRHNTYHAVSSMTLGGPMHDCMQATGSSSHGGMALTFVGPMIGIWPVVIGVTWTAPEGSTKPCSCGGASM

SEQ ID NO: 1013197 - protein, 289 aa, Homo sapiens
SRLVLAGILDASASLVSQSCEHGSWVETDARKRVSRHERCDWWCSGSLTGLLRTAAGWLLPAQCHGPGERSDQAPSPGHLQRRSIADRMQSEARSGATARDPRPDRLVPPWMCTKMEQATSTSERLIHSYGIRPGPLGWPLVYDDLQTRVKPVPGGQTMCLSPYREVVKMLPGGLLRDPWPNDVEQGRCWAVPWLTFIPLRSQGGFWEQRQGRPVIHTKAFRAILYRETTMWEKRPHWQFWVPRLYARANNVEAQFEFTSVSRNRARYEALRPVGNPWVPVLLTARRRV

SEQ ID NO: 1013198 - protein, 59 aa, Homo sapiens
MVVWERNLRESSTCFFRVAVKIITAPAISDKKLQEDGTICKRETYRVLQNGARGGGGGG

SEQ ID NO: 1013199 - protein, 318 aa, Homo sapiens
MQLYWPRISGHCWWTLRNFALGALKKYGLGTRTVRGAAVLRGGELVCYDEFQATIASAWPGERNVAWCCGDVPCTGKTCGHWKGAPVMTPVRLLGNVLYPVLSVLVFGNRYRYVGTLEFLRLLNRLQLTTFMQSFSSTHGAECDDGQLATNLIHWVLSSTYAKSRVHQILTLQIGSYRSGDRLSWNEVARKHPVFKDHLVAKSSTCKRKDLKRHKRGTYDGERNPKPIGGSKKPHDTSNTKKWTTNRGQWNAHTKMGARGGIRRGAPGKYTAKKSQTRTKQIGRREAMRGSPNRHAKTKHSNTAQNGQELHGKDKARK

SEQ ID NO: 1013200 - protein, 106 aa, Homo sapiens
MAAHLTIPICALFLTYSIWPQGNLEGPVDYTKAVTFNHLSGMQTPSGALESATDVDSGMSDVFDCGKRKPEDKNLPAGPVTIDSMSHSQHSQDWGTLNTVRTNGRD

SEQ ID NO: 1013201 - protein, 136 aa, Homo sapiens
  misc_feature (56)..(56): Xaa can be any naturally occurring amino acid
PRRRVDAGGKVHNTLGLNPFQKAFKKGPQERGESPPNLPVPANPVLVSRNFGQGYXPDLPCIPRKAMYNDGKYSSARKSSPKGVFWQNKKGTTPPSKTGHGTTGFSFRPKALVLTKENPSFWGGVEQKERGGYPGG

SEQ ID NO: 1013202 - protein, 109 aa, Homo sapiens
TRPGLWCLPVLDLNKQAPYMGPIPIQVGTSQASRPPPGGAKEPGSGGVAIPRSRGGKPLKPQGAPSRQTEPWETIDHQTQEPPGLTFSPQLGKHGKKPQIPMGGVPYPL

SEQ ID NO: 1013203 - protein, 195 aa, Homo sapiens
MEAYTPKLTQVLSSSAVMVLLACTTLREAGLTRMYKAPEIQQHLRQLADRKPNSRTTKNLKREDKRSTQDTGKSTDKRQSTLDNTAPTEDDPRQRQTYTNKTHRTASQHRTKRRRHRATTKKRTKRTHHDDRRAKTKQNHKKKQRGNKEEASTAENKANQRNNKREPTTTNHHSDTKKSKRRNVNEEKTQQKTDK

SEQ ID NO: 1013204 - protein, 123 aa, Homo sapiens
MASDKLRIPTLGLRIPENATTSLLHQIITNYGVHTGTVHAPKTNGQQAPQQEKPTTWLRTQSRAPHLKKDIHRKKDITDDPQRSPSKDTASHDNAGSYTGTAGKQQTASIDYAHTGKGKDIHA

SEQ ID NO: 1013205 - protein, 119 aa, Homo sapiens
VHLPEEGLGDNFDLVDHSDLHISDFNPSLKTLCKLAVIHYNLIQSCLPHDIRWRRLKCHVLTNSQIVTSSSSRLLPWVVRKFARPPPSLLSLRVYLSAWPSAPILSSRPVFLCTSSDLR

SEQ ID NO: 1013206 - protein, 226 aa, Homo sapiens
VSWNINEIRIPLRGVANHEPNYCAAVAVGRILDELDADIVCLQEDQELTRVCTDESPVAIGGGLSSSYFSFSRNRSGYSGVATLLKDEATPVAAEKGLSWPCFATQNGDVGFYCETVDELDATEETPGLCASDGQGPPHHSIRSAHGKVQEKTLTLSQRVLAPMRTLGGLSGYVFQMRFYRQLQIRCSEALLSGRLAHVIHSGGPEYSPTPIDHCDAVNLECFEED

SEQ ID NO: 1013207 - protein, 348 aa, Homo sapiens
NPPVSLTQAKLEQWVSRSPYSLDQLGQIAVGELMEDEQLGLTIIASRSPVKSIQADPGAGTRTSESLRKVPCRPLLGLLCGSFRAACPMDPLERSWLTVSVAVDVQNIEPRGSLLRYLVRIDRRRTLGRAFIRQPDRFGGLTVHRVVGRCPVDYLEIVLPGGVNPAEAYVVLGTWKGSNSRGNLTLCKGTHWGPLHTEFVTKGDLKLNRIVVKGQGLTRAIQEGSPGVSIHATELEPTELQKHTLVHVVVRAGTTSLSTPYFPKENRRNLWRTSGHRVWRGPCPEGPYTKKGPRGPTADACNLCNLVVSPGKRGNPGELTGASDVCFGPHHVRVGDTAPQDRQRHNKH

SEQ ID NO: 1013208 - protein, 215 aa, Homo sapiens
  misc_feature (128)..(128): Xaa can be any naturally occurring amino acid
ALIIICLYLLPKSVYALSPEQLHNQKLTNTNILETLEEIETSLERDPAHCSIISESLHQRFTRSATHPFDNNSDEVQSIPSALRINIELAYLDGTWNLTSDYLSYEAGLNLATSLHNFRPIDCLRQPXCGIVADVLWLCDKSDVGTSRISESPTMCVITYINDSRQTVLAPPIEPVSARFSAFTQDSDSQLHQGRIQTENRLLQPANERIARRVN

SEQ ID NO: 1013209 - protein, 104 aa, Homo sapiens
MLIATTPVCDNEVGSTMLNNIFRERERWLTNGDAKTVNQNSIAPMCALWAHSGFASQDQSCLPREKRVKVGFLVVWSQKKTAPLIGIVYVHQTLNMFRCWKPLK

SEQ ID NO: 1013210 - protein, 238 aa, Homo sapiens
RCLKKYNVVKNWVEVEIAPDIREENSLMLTSLSFKVLKHPDNKFRVRLRALEGQPSLAQYSSQDPHYVLSLTRSIEPMLAGERGNDVPWRRRWVKGDSHNVGVPDRSLHCTRYWWMNQDIHVHGTYLYTSRCISLPLRCSAHPWDKIYPLPLQAHGLVQECLTFLGPKLATEQRVNMSVCDRLADSISGHKEPVRIAYNAQSTRDPEGLNSQSPDIKGEGQSFCSGASVRDPFSIHHW

SEQ ID NO: 1013211 - protein, 223 aa, Homo sapiens
THASGGIPSSALCGGGELQRDLGYWTKTSDLLFRNLKETMCISERYPIMSRVLRPDARLSDKNAVQRSVATQFKMSLLAAGGTILQSKEPAYIRMHRKPNDAKAGPGRFDEVLIRHQVKYLGLLGKTCACRRVRLVPIRRKVRSFPAKVQVTVPRDVGHVGRTAGGWEWLCLVRNLGYTAKNEYKMGRIKIFIRFPKTLFATEDARGGRRQSLGTKDPKLTVR

SEQ ID NO: 1013212 - protein, 105 aa, Homo sapiens
ILKFILISLCLFFWFFERESPALSLKLECRGAISAHCNLRLPGPSNSLALSSQVAGIIGTHHHAWLIGVSFPRVETLNILFSSLSQMAMNGIKGLQIVKSIIGEF

SEQ ID NO: 1013213 - protein, 178 aa, Homo sapiens
RHALGRDPVLGDTRYTSHGVLRLQLRAQCPPPMARNDVVPRITCEHVVILYSCSFHASRSLRYNSMVAHLNSALGPPGGHSLLWFEQLDRVHRVKSQIPRTCSGIRGRPVAHVAADDVALYLESTRHSSSMPGLAVAAAGPKAGGTVSAARSGLRVGSRRRAPCPGFPFGWTPGSGAP

SEQ ID NO: 1013214 - protein, 244 aa, Homo sapiens
CLPAQEPQERRQSWLPSRNGMVLKPHFHKDWQRRVATWFKQTGPKIRRRKARNAKAAPDRSARRVGPIRAIVRCPTVRYHTKVRADSAVSPGGLRVAGFTMNGGPDIVISDGSEGWRNKVHGVPAGQLCSGPEGRYLVLNSSSSPGSPRSPKDRRDSVLREENVKAGLAPILNRTQVDSPVLVTFYDERKKRLEIMHVSEEMKQFSNSRSSKSTVIGRCANGPGSFWHYGQRKMRKEGPQNEDR

SEQ ID NO: 1013215 - protein, 346 aa, Homo sapiens
MKRTTTNEVGVRSPKRSAPSGTSSAAAVEWEEELLYHVEEIVMEVHLEGNRSPSSYRAVSMVPKEMHGIFVLEDSYSSRELPEVLRDDKRLCTQHHEIILTVSYGHFQVHREVTSPFNEAMAIEMDYWVGDSVQLLQDSVQRWRLVRTEAFSDDELWGELHVGAHSLQRRDTPHDLYGWNMTVLLWMIYRRGSRDSDMVAQSEEQVNFKCAAESCIVYLNVVTWVWAAPRYRGALQPFLVRKRGGYPHYFSPVIYLTSQVYKRARWEAQPQKDRVGLGGPTGQGKKARTIWTKEGAADRQENGSINQGKRTKPSKRHEDRIIITAGLQHRTNDDPTNETLGDHVFL

SEQ ID NO: 1013216 - protein, 91 aa, Homo sapiens
PWITALAASSDGVTSGEMERVLRSKCEYSPDADGLEIAQTTGLPVWDAFHALMKPRLLRIACTRVGWYTQSRRERYIIDVLSEMHDRSIDN

SEQ ID NO: 1013217 - protein, 70 aa, Homo sapiens
RLIHGLPRTRGRLDRMAGGAGGIFQAYARHLAEGACMQDGPLELAVLSGMLVRRFIAVALLIVVGHIVAS

SEQ ID NO: 1013218 - protein, 106 aa, Homo sapiens
MCNLGTFPSEHTNFGVKLSPERRGPFPNPKILPGKTRGFPRASRHIPLIIFPIEKKGCPPKKIIIYSLNTVAHSEHRPRFPVYLERYVTSTPLILESESCPPWCAG

SEQ ID NO: 1013219 - protein, 101 aa, Homo sapiens
KGEEIETEWTTMGRRGKPRCTGGLWVKAEASTGVRSDLLAVGLTIFGAVLSVYYRSIVRITCVLTAAIKKTVPRRRNVQVVTETTTSTDVWCMPRYHSASK

SEQ ID NO: 1013220 - protein, 102 aa, Homo sapiens
MCPQLLDTAYEYRPETTAIETRRENRYPGGLLGTATAYNLRCVTHYSGRHMYQRKFNNVLYADQHVKDVSKAVSLTGHNNPTARPIMWPGPPLELRPVAFTP

SEQ ID NO: 1013221 - protein, 96 aa, Homo sapiens
GTNSSSMTCTWIAICHRRGIRSLRDLTPDALAAAQEHPPPGAGGHPVERYRMKGDQSAMYTCTILPSYYAPAMCTSAARGLRGPRSQAVERAQLLV

SEQ ID NO: 1013222 - protein, 218 aa, Homo sapiens
MIGAVLACVGHDCVWCVHFSVLRLSECAEKSCYLLDDMDNEYLLESDEISGIQPVHADALFIYQNSLVLLVADVTECLSWCTAEIALAIVSWFDLAMEIRPRRDKEEHEIAALDKASGASSDECLTLFPSTISSTYLSRLGVSIYMIRGHTLSPHTVSHGVIATFPMSGNKFDLVNGLIVVEPSGSNTTYELREILTTPLLQAPAPLSKFSRHKVRGK

SEQ ID NO: 1013223 - protein, 107 aa, Homo sapiens
WVGFLLLLSGSLGFFLVLALFLPNLAKWEFRQGTHTTRPAPKSGAADAETAEYTALEDIAEPDLQEDWQTGFSTVAPAHIFERQDEVSPPTFDKTVQTEAGRVPSMP

SEQ ID NO: 1013224 - protein, 316 aa, Homo sapiens
MASDDFNGTPWRICPSPVDSPFRVVVQERCCWACYNRDSNFAPRPDLPFGLRSYRNCTLGEPTGPLVPRANWPTCIADTPASALPSKAPANWPITPYQDSATQPAPFSDSALGHRAILRKGHVTSKLPPVGRAPHLRPRIVQSPAGSTHTTPHLPMGTTELGPIAPLLPLARTSLHAYMATPEGLGLTPPGTSLTQSPLWLSATGWPLPALLASPPALRATRAQHGTSWLCHTLGVAPHHPKPQPPSSGAAHRPAPPPLNAPRHFTPGPFPGDPYGPTATPHARPPTDPGPTARTPRGPSHRPTRTHPLINPPPPT

SEQ ID NO: 1013225 - protein, 116 aa, Homo sapiens
MSSIRHSYSLRGRDHATRVAAGGYAAPGRPSTGTSAGAPPPTRPLRRCSTRSCTSTKRTRITCWPRSAARARTASCRLPLLRGSRAGRWRWQCATTAVGNLRPILRTLREVPVRGA

SEQ ID NO: 1013226 - protein, 135 aa, Homo sapiens
AGAGIGRRPCGVRQAPLGPPPPPLLRGEPLHVGRGGGLCGRGVGVLIGVRDLPPVAGMELLMPGLRLGRGAPWWRTYARRRRSGDRGTGSTGPGCADAPSCVVVGDEGAVGKTCAVRQLSLCPTDCLSPEGVAVP

SEQ ID NO: 1013227 - protein, 115 aa, Homo sapiens
  misc_feature (70)..(70): Xaa can be any naturally occurring amino acid
HTLLLERSYETINATKGSTKVQLLEKVSSASHVLLSESTSEKPALPVVAIRTYPLIVIPRGTIRFQPKHXNDVWGVIRWKRWFNEMRDVGLESLPCISDGVRHLVLSTSVDALLF

SEQ ID NO: 1013228 - protein, 150 aa, Homo sapiens
FTDAIIPLEIEVLVDADPACGRLSDIATGPPVAFFTYVSLSHERQVMPDSPSCLPEIRRDEQRNRVFAAKAYKVLVSLTSMNSAVSRSSATAYASVPRTPSSCQLVDFSHVSRWITRAPTMSQVQLSRISPLLDTYNIQIANIEKLDVVM

SEQ ID NO: 1013229 - protein, 183 aa, Homo sapiens
MACREKVALSDGPYWHGVHAGERAHPEGRTPWSCNLICRIACATNHPIQWRRSLCYPAAKAIRRLVPAQPKLEEGNQYRVTHVGSRASCSAQMLRGDAINGQATERRDSGVPVVLPVVDCAALSARPVVKGACVGPEDDVTPLTALSGRVSPGWCPWGRFSNWALERSICFVALVVGRALGAP

SEQ ID NO: 1013230 - protein, 76 aa, Homo sapiens
DAWVDQRRRTTHAVESPYKVPDLAVVKNVTLWQAQEPKDDFGNLDQERSVSNLYRNYKCSLIVNPCLGSYLESFKS

SEQ ID NO: 1013231 - protein, 189 aa, Homo sapiens
MSSEEVKQVESGTLRFQFSLGSEEHLDAPTEPVSVPQSGAAAFQETTHCPHYWALLSSLVPQSSLLPLHQLTCRDQGCQFPSWLDSPGVPDSALLGQAYFTAAHGSQASPAQAQEFPLEAGISHLEADLSQTSLDPGNIHCRTVTGAAVHAFACPYCCGNPEQELCRAASRASKDAPAVLRLPEILDAI

SEQ ID NO: 1013232 - protein, 97 aa, Homo sapiens
SDVLTVLACSVPGFEPGCDVNALYHHKELGCDYIKKRASIGFHRVCPQFCHEGQKTRVADFTVMYVKSVWYRCATRKCETCTHYVVNVPLMSVILIP

SEQ ID NO: 1013233 - protein, 34 aa, Homo sapiens
PLHNVSVLALEAAAVAVGHLFPPARPLAALPGGG

SEQ ID NO: 1013234 - protein, 154 aa, Homo sapiens
MHRCVALPPRTPRVVVPSILYVGGATQSLSKFNNTRRITLKVCEKYTAAVVPIKPHSITYMALTSFSEVDGFRGVPKISQEHIHRNLCTRAYSSVRSSLPVSLGHGTYLTLINIALDRMKPVGSTSKWNTTRFAFSGPPGAGEGKGKESPPNFP

SEQ ID NO: 1013235 - protein, 126 aa, Homo sapiens
MSCCCCGALPPACAPAPDAGATSPCQTLARARADLTQPWQGEILAPLEHGAPSPKDMNAIGELGALKAINSQLTCGDRRCPHHCAGLRATHCKMSVRQTNTCTSMFCQGGHPHVAGGTFSTPDFQD

SEQ ID NO: 1013236 - protein, 163 aa, Homo sapiens
SHPYGTLYITDEVNESLPYHQINWPPMVLNLRVHRLRRDYSLQLLHYLPRIIPSNQATCDSLTLTIEYYSRLNARHCVLTNYDHNDVLHLMQAVPYIRLNNIRCKFPRASKPIPLSSATRPGVPTTAKCSESLWSKPQILMPIVLELKLPLHTSLSETTGPVF

SEQ ID NO: 1013237 - protein, 45 aa, Homo sapiens
THAVWRDKEKKKEKEKKAEDLDFWLSPPKLPAEVKRWKTIYNYET

SEQ ID NO: 1013238 - protein, 281 aa, Homo sapiens
MALQALGLLVPAFPACVPGRSCALTHEAWRLLLLWGLLLLVPELTARPLSRAAPVSRALAARAPGRLHWRLAGLRAGWAVMASTEPALCGALGEPSCLDRLLLTACPYLHGLAVPAVKCSCATREFCLPVSLFTWSCPSVNLSSSGSANGNGSAPGSIDDPKRTGTLMRQEGKYALRVPWGADTQKTSYATEVTYPEDSTRNRPMRHSPGPFGPNTLRTPYPKGNIYLKTNVTMGVHNTQTGEKTAGHNPYKSNKPHTIMESGSKQRVTTDTWESRSNTIQ

SEQ ID NO: 1013239 - protein, 107 aa, Homo sapiens
  misc_feature (92)..(92): Xaa can be any naturally occurring amino acid
MSVVILGGPRARHEDVVRMRKSVAVTSSTIFSSLSRLTRLSVMNEDIVYTGPFSQANQSCIEPFTRVRLLRTTERTLRELTLCSGASSLSRXSSLFGTWIWMSTVVY

SEQ ID NO: 1013240 - protein, 98 aa, Homo sapiens
LVVAGDIAKRTKKVWDRREIRGPCYVVPPSEKMVKKIEIMQHANVHLLLICVQNQDEETSCGDLDTVVPAMKTVAGFVPGQYNTTITLSQVKSCHQND

SEQ ID NO: 1013241 - protein, 169 aa, Homo sapiens
TLKEHSQILYGIQTHSLSTLIMTLWSFDGARPTCAYEVERLEQLGTWVLMDQPTGLCYATRRKNLSLLAVCTAADAELRCLDLVPSLQLDPARDLQGHCGCIFTGSPCFVLGGVVPGEVACVPSVRTHNVRHAHRSLPAIYDYDPLYRGGAANCWRDARGRNDLRVIEP

SEQ ID NO: 1013242 - protein, 165 aa, Homo sapiens
FAEKGNLALPKVLRMGGERKGPRYCDRGRTVGRNSAGTGSHGFLVRPVTDSVRQLSSCALQAPWFVGEQPAALFRACVGLGRKVQADNALRWSQQPLVEFGRDVGVVKEKKQKGSSLALKRWQKQCIHAPTEETERVYEDLRVSIAKSLVGQDHGPLKECKIFRC

SEQ ID NO: 1013243 - protein, 154 aa, Homo sapiens
KKNQKKPENDDDVEIKKQLSKYESQLSTNEEKVDTDDRTEGYLRADSQEPSHFDSQQPAVLEEEEVMKLMLIHRKSTMNMYPEGARINAIHISTIHSASQTISFTTIMTTIIFSIITTTKTPSSQSPAQGLIPAEGDVKRVRGCRHLVARGSVL

SEQ ID NO: 1013244 - protein, 237 aa, Homo sapiens
MAESSDKLYRVEYSQELGAPLARNAARASPKDIAPEWPSWCSRPCCDGKVPHWYHFSLLLEGGPLHPDTLTVAGGLEFIMRLTDGMTQPESQEERRERMEECQDKGQDGNWIARQQKTLGDFARSSMPSPTESTCKGVYWTTQIRNRARCRRGPKGTHGWKHGEKTTGIGPLMGHSWDNTIQGHGIGQKETRRRSQALHGPEDNTRRDPVKGQQGSLATEGQTQPLKKREPQEHRVK

SEQ ID NO: 1013245 - protein, 86 aa, Homo sapiens
MAQFCRDARVVTVNNNEDVFPNNKMSCLRSHESMRCSHPHRGALEHEGVNYGIVFTEIDSDASYIYPCAITHAGRVISSVNGAKAN

SEQ ID NO: 1013246 - protein, 174 aa, Homo sapiens
RPLPYCWGSADRSVLRLATATPATHVSTDVLVNSHVCVPHGSAFLPWARAPDTHPRGHVCAGSAPGTVGAEHGVSRQSSRGSEHPLVQDPPSRPQAVVRAAVTIPRPTQHLSTPAARTAFGWAQQKGAAGQTLTTLADADRARLPAPALGQHLGGEGAYRIRSQQRRFQPSGLL

SEQ ID NO: 1013247 - protein, 141 aa, Homo sapiens
NSPWKPKRGGSGEGARVGPPPSPAWVGPCVGFFPFSPVKQTPQTRCGETPPPPYRLDGGAALLHKHPSFLDGGEREKQTRRKRGREEDTPRPPSPKADNSGERGLTAPHKEHITPLTRRRDYLLPENQFCVKQPQPMKKNY

SEQ ID NO: 1013248 - protein, 134 aa, Homo sapiens
MVEGRGKARIANDGGTILTLSGCCPSCEQRRWVDIAKSQDAEVGDGTSSVTLLVCRVSEAGETLVWTEGCTARRSSYERFRTATQLAELTRSTEIAVTAKQGRSKVEQTEAAGKVCQDRSELQKLISQQKSFLC

SEQ ID NO: 1013249 - protein, 190 aa, Homo sapiens
GRGPPLPKAHPRPPLPPRPLTSQHFSWGKWPVGMTGRCSVLQMAQDAERGGSLPLLGLVRSERSSQAPWQLLPRPGYCPRTMCRLPSASSPTPSFRESILGRPGTQAGSVPCLGRRGATRACSEAGLSAWLRAIGSARYEDGPGCITWPRGQSWQFPSVTLTEERLARTRHGGARDPCSLSASIRGTDLE

SEQ ID NO: 1013250 - protein, 141 aa, Homo sapiens
MRLFLEKRFYRRRTLGKVGSGVSRLPTSHVVYLAGPGHPGMKGLNGTLEGMGPEVPAVRAYSGRSLDSPIRHKARGLGCASFGHKSVELTLGITFHLGASKAPWLAKQFAGLVLEWATTRTYPKWIGHARPERQEGFTVGT

SEQ ID NO: 1013251 - protein, 224 aa, Homo sapiens
GNIITLLIGSQAFKIFIHRGGYIKQGEVQPSGKVVDERLILAKTVGTGVGSRVSSAGACRENSGDVQWPRVSGHKIVYGRGTVHGVKLRRLVVNYFTNGRETLKRYSQVTTSHNRKTKTKTETKQTQKTPTQANDHTRPLNNTPPPTHKTNDTNRTKKHTHHRSTTNATHRTTEQTRVLRPDADTTNTPDDPDKQQGTTAEHRNTHLAPPGAPDTQQERGGNQK

SEQ ID NO: 1013252 - protein, 136 aa, Homo sapiens
GSHATRPTTTPDVDSRLPFGSKSNMATLRDQLSYKSVKKEEQDAPRNKDYRWYGVWLRVGIGTVPFSILNERTWHDELCVLSSVTRDDKLKGETMSGVSRLVASLFPVERAEQTCLVGKRLISVHRAITRNDWYII

SEQ ID NO: 1013253 - protein, 319 aa, Homo sapiens
MGLPSKRTTWDAPTSRRTCRLDTGRLSAARPFWPTALPIPYSRRLWGPKVPSVRLGLPHQGHAPGDPLLSPSTTYRVLTEQAALAHYRATEKAATLHQWDTAHPHCCVLHQQGATHGDLHRRRKHTRPGRTRRPPLGAPLRTLIPWPKRQRHALSRHHLPTRPPHQTDLRIPANTPPPMAHEKVTHAAIRHIKHKPPQTNQRATSDHAMDRRHQDPEAQPHTPGHYPPTPPSSPGHPTYRANTPYEPKRHLATHPQRTRTTHSAPHTTRRQRHTEHTFRGTHHPVYPRPPALTRRTATHTEHRHHLSTTAAHTTNHPRA

SEQ ID NO: 1013254 - protein, 391 aa, Homo sapiens
MRFLYECPWRRLQELRDLIPKIPFRIQLRGANDVGYTNYPRQTVRLPSSRELAPNEQWPWMYYRSVPTPLELTCPTMLLRHGKRDGSARRPSVEKCCQSRIHLGRTVGPEPHSRDLMYIHHASERNTAALGPGKEAWVTGRHWQSVGLVACGHSTGIIGPGRRDVERSATGDPLQNTMAMGLIQHPHSGEKPRPCSPPVIRHTYLGSIHKGTHNMNHRSQRGGQGAAGLDPMTWRAAWPQKGLGHPLDMFAAVDMVGANACEHYPQMVPEGEDLTYTHHEPQTIVGGVVPIETVWPLGIAEHRGTTCAPLGIANPTQGVEHRLGNVRGLGTMTPYPGGKHTGRTRGGLPAGTPCYVPGGAIWNRGATGDHAKRDMDRGATTQRGGLHSYTT

SEQ ID NO: 1013255 - protein, 218 aa, Homo sapiens
QFRKINGFPNACWGWGGEDDDLWNRVQNAGYSVSRPEGDTGKYKSIPHHHRGEVQFLGRYALLRKSKEGKGWHGLNNLNYFANITYNALYNKHNCQPDTRAGSGERVLRGRECTFAFTHRHQEQQSDETPPQAGGQRVYTRTAEQNLLCLTDRTHRRSRGKHADSTTHQTPSLDQPLELSGVSSADFLRQQLAFCLHKTRRLSRCSLTISYPTSCLSR

SEQ ID NO: 1013256 - protein, 148 aa, Homo sapiens
PTRPLKSFSSPSLCSSGNMRPTKSRLRDLFCMGAAVPGPQRTDSHRTEVFLQTLPLQLEHYAISEPRRSSHHASSHRANLASSVRSCGISETRPGSLHQGYSPHSPTPLGKESAVRLGWLAQGEIQSYVPCVPTLMRAHAAGAREALR

SEQ ID NO: 1013257 - protein, 116 aa, Homo sapiens
  misc_feature (19)..(19): Xaa can be any naturally occurring amino acid
MNIEHIVCGALESNSRCHXSTSIGEYGVLADRVSPRTGEKVGARYFDKNVSEFAIRGKPGWHYGLLIFNLLQSAIPNYATKDESLGGSLLATLVHAFVLPRSCPRGVVQQVFLEGL

SEQ ID NO: 1013258 - protein, 251 aa, Homo sapiens
  misc_feature (149)..(149): Xaa can be any naturally occurring amino acid
VDGDHCGHLRRQAKGQVTVHRCALPDGSDGGCVIVVRDMRTGDFRHLSIDWPAQAWAYFPSVLVCAVVASTVPNHAPFPDGDLASGLGDQSSSWCTSHPRSAFVQHAWAPARLATHYDTPRGLGREGEGTLGCLPWKRRAHPWGSELVXSSCAVGNRCIRWRVESGNPYLDTSDFIHHFSNTYSTKRGLRVLPKWQTVFPAYWPPLQGAIEVWRARGRKRNETFEQKQILSRPSTGRNPRLSEFIGNHPKG

SEQ ID NO: 1013259 - protein, 338 aa, Homo sapiens
  misc_feature (87)..(87): Xaa can be any naturally occurring amino acid
MLVVRNNQVGEWDAQKANGSYPRMQSEGSLLCTAVGPLLAALHNCTLMGSHCAVVPDPNGRTAGRKEKSMNNLRPCRDLQLLGVLEXLETVPHTIGLTCQRDATIEGTIPSDVNHEYCYIDAFVPVHGCLRKSSRSQVDFPCEQLLIESSRNTTVIDLVLGPGLLALVTREIDLLKILRDWTRGEIANTPLREPQHDYSPKEFPEAAPYMSTIPNQDWFAVGPLRTHKSGGSGGRAKLLAFHWTDRKMPMSRFRTPESTPSKAYRHGPRQGGYSQGNILILAHYAERCHRGGPPRCEKANPGDDRGQGCSYTVGSAKNKHWPLIVWYNYPRRNFCFQK

SEQ ID NO: 1013260 - protein, 183 aa, Homo sapiens
MLQLGYAYAYESINLTRTTTTCHTTLVFQVPIRCRSLLIPFARYVSTPLYVPPTTSTWHIKRRQPVTCNRIRRTKGKQPGESHRNPLQPVKHNTPTPKRTHNPTHHNDWHPNPDTTPRVPATRSFSSPHSSLCGEPSHLLCQLETINLPTLGSHGIIISSLSLRHNDSLPLSDIIRIPTRTDQ

SEQ ID NO: 1013261 - protein, 138 aa, Homo sapiens
  misc_feature (75)..(76): Xaa can be any naturally occurring amino acid
MKILYAEKKAESRSYASLHTPQTTYTLVKDAGADSIERTIDESLEESDYHELCVVGWFKLRWEAEELLSSLYDLXXGSANRARRIGRRSVEDLQNKGISCMCLQDARSTNRSQTYDELEEAHMAWCCAKGVVRSLESW

SEQ ID NO: 1013262 - protein, 238 aa, Homo sapiens
MTHAFAIHASAERVSRPMRTRPSACDLGGTLIISFTSDPIYMLLLRQQQCLMRKQARIAHTFIQDAVGISEHEIDTNIGLVLSIIEHTRDAQGDIVRLVTLVCGGAPEEPPAFRTYCVVCCVVNYEGCSCDIGRMPLMPRVLSRLVDARHTEYASLEASYERGVAHVTEVGPYEMWQDLVLGVAYSPQGGGDVGTTDIPYPRLNKEDCGLVRGAPSHEETVRHPVDKVEQLKERREYI

SEQ ID NO: 1013263 - protein, 138 aa, Homo sapiens
MASLPTARLRAIYRAAETVSATRSVRLSPSRVVRPPARELESSTVGLRVPWTLSGGGSRLVRPLTSRMSSSCSERILRAVAFSQLDSGTAWRGGSRGGWLLERVLPVTCCELRQVGPMVRALEAETCVVESYSGPAQN

SEQ ID NO: 1013264 - protein, 273 aa, Homo sapiens
MPHPPPTGESPRRGSNETSKTGKNTPRTQQQTQKHTQDTPAQKRQRTHTDDHSATPHTPAQTATTATQPPHPTDTQTRSHTAHHQTKPHPERLDVTKTAPARDAHLRAQHAPQRGPLSPLLPCHPPPPTPPHAHQWRDEGTGTVKLGGDVWWDRNIAQYCPPRPRSCWVWTLRRGFRRGSRGCQGGPRTLAHACRDISPAAPAVHAGATDRSSATAGGRGGLDMTGSFAMVGGQGRTHRSRARSPWRRSDGDQAANDWGARAHSGRAVGGRES

SEQ ID NO: 1013265 - protein, 35 aa, Homo sapiens
GAVAWWVRLVPGGVGGLPPVLRATHADAVAGFAGA

SEQ ID NO: 1013266 - protein, 86 aa, Homo sapiens
RVRAVSSMEAKGFGYWLQVGELSCDIRVAIKRNGPYRIPRVKNMLYVYNSKELLEDLSMITIVKVFETSRLPVEANEQTMWALLRN

SEQ ID NO: 1013267 - protein, 72 aa, Homo sapiens
MVKAYSKYAVTHTTTSSGTCTLDGKRYTTWVDSTRQKGRSSVVDGEHAKGLGSRRLIQGEQGGADRKARAPG

SEQ ID NO: 1013268 - protein, 279 aa, Homo sapiens
MSVVLHQWAGQLAYALCAVASLAAWHPVCAHNDNMPGSPEMNLPTVVRCSVKMGVNLTRSNKETVKHSDVLYLGCEATYHPLHPGMRSGARQCKPDTSVVSMCLLVSPISTVEKNADGNTSQDPKKMIQLHDQTQLIGTVHRKCANKCTPRGIPLTLDGTDGTGVHEKPHSWMPGTRVRHGTLRVGKKENLQQNAINTSVLNVARRTLQKIQQMGIQDSAKGARTSTPSHTNRGVGPPRARCNTDKPGHHAANREDRQAPSKTSGEPQHKQPSKPTGTK

SEQ ID NO: 1013269 - protein, 239 aa, Homo sapiens
VVCLGADGEAEPTMPDGPELGFVATSLCDPAETLYVEDLVSTEESEARSASMGLREQYVEVCAGVIIYPGLSILVMVARELLTLDENGPTASVRRQRPTCGGWSALAVLDEGKMTAGLHPGPEDRGFLRETPAMTQVFNAGLGQRPSTTLACWVLPSCQYRGSAEQVVNDPSFIVRGWIPEKHIDFSLRSPYGGGRPGRVERKNANERAMAGAGGCGTTEEEEFTVQLSLPGAAWIGTP

SEQ ID NO: 1013270 - protein, 167 aa, Homo sapiens
HSYSSLYPFVESQGDSYCLAERRILGYTTTYAKARNFGMAPTGADYNTFADACKSRIQRHRSPVNNPASYFEASHLSYITGTRTVRLVDLSLFRTSESPFFIRAFALVLVLRPRSPVPLIPEAKPQSASSGEVIQTAHPDSRECQLSRNIHNISAHLESRVGSILEF

SEQ ID NO: 1013271 - protein, 124 aa, Homo sapiens
CRQNTGVVRITTPKSLGNGNMEEWQLTSRNICTLNWEHGSIRDKSTSISVDRSDLLNCGWHSTIMKPVDTKFDQRSAVCKHGTYGLLSELCPGVSGTNQLEIRLSREPMDTHAIDYSPSGREKY

SEQ ID NO: 1013272 - protein, 290 aa, Homo sapiens
GPGGSPTVPGCGEAAPAQSVAAATPGAAPEPTARRACRLPVWTAALKRSRSVGASRISCRLTRDEEEEEDEGMEQGLAGGRMRWIPGSREQLDEVIHQLHWIDIYSSSGETESLRECSVSIGSLLWFWVVQQPDEHLAWTWVNEELAKACWTDSQASTAEGTDGLAQASAQAWKLIEQPLQVFPEGATEGASAAGLRETRFSPWSDAAGLLCMDEPSGPVLKSGLARTMLEVTATQKGSLQTADADPKTQGAEPGCIKGDAQPRVPMADHGPGTADRLDQRTTHESPSKK

SEQ ID NO: 1013273 - protein, 497 aa, Homo sapiens
MLFHYHACWLFELISTSQTHHCSDAPSNSTYPDRTTTCTHGCARPLAATAAICALRYKRQCCPLSTLTCALYTCDLYTCALLLKQRAHLRAPVRLTPVHNYTHTHAHNPARKPWHAPTTNLDPPSTPSHRTPSPTLPNPYQQVAPRPLKRHDAHTLHCNAPRHPPPDPQPGNGEDTPPPQAPKRGKNNTGSHTTAPRTTHLTRTGGNPSHNTRTPNPNTSKTQRQHDLDPPNRQHEEHTAPRHPMHSGARTTHAGHTPPHGTKHTRTHNETTSKARQNTTRPRKAPKQRTVGPLGRDHKHTSSQTAYSWEQTHKQATPNHLGTQNQPPRGSTHTQCTLTHAADDGHKTQNTQSHNTLAYTTPAQGTSKIQPQIQSTQPRLSGAAHKKTTHHPQTCDITRHESAPPSECATPHQPEHPTDRLAPLLRAPTTTRPRQNATHPITNTQVPLHPKPQQRDSTTKNQARASETPPNLNTPHTVRDKKQADQPPHRLDTTPRS

SEQ ID NO: 1013274 - protein, 75 aa, Homo sapiens
MNLLLVKLIRNFRDLSIETIAITEYYSVITLSHCRIGRKDFCTYALVRVTTSSDERVPVTMNILLKSTAYSAQYS

SEQ ID NO: 1013275 - protein, 136 aa, Homo sapiens
RVFQADQAGFLQEQQATAAVAAFVRNGHGGAVFQLSQAFDFLRVTTERLDVHADHGDQVGALAFIEAIQVRLGLEVVGVQVFLGHLGVGVYVVGEDLDFQVHAFFGQVGLISIEDLGMGDRRCRHDQFLAGLGQTC

SEQ ID NO: 1013276 - protein, 305 aa, Homo sapiens
MYCDSLRLSSQEGSVSCAINHDSVLTITMCLEQLHMHHNHRLYQTGTRLEAKRATDHLSLCAVWLKTGKQMKRRLFQRDSQSSLRVSPLKHFMDQCDRVSCTILLILYKTTTHDIQRAGRRIHLHLTSARPRETSNSKTEQGTTCTQEQLWRIQQPRCHTTSAAPTAHTRRDNSTNGPPPPLQSSNATTSSRWALHHLGATPHSVLPPHHPWPPLSAGPSISQLSNTEQQIGDKLVHCLAQSDSRRLRTPLHSQTLTDTTRHRISSTAAHIAVPHAINQGGRLAPPAPAAPGPAATPHTRHPHDD

SEQ ID NO: 1013277 - protein, 144 aa, Homo sapiens
MIAITYIRPDRRDHIVETDELSTAACVSVENGTSGSEQEQASLDMPGTMTVCVLSEEMPCEFSDTKACHINTSALALGLENTTSLGEERSSGKGVQGLTRCIPYIRSCLSHVPSVTLKTQDLALAHGVENVKPHGRPLRFTKGF

SEQ ID NO: 1013278 - protein, 167 aa, Homo sapiens
MNLILCDCDEFRKIKPKNSEQAERAMQKRVLVWCMTCDGENLVSMTSQQGPPSHKTTVLLLRGSDFGGDCLWVPDVGIGQGCPGSRNSQSGNVPCPQGVLAGLCWAQVACVRFEMVSFPTRVNDTLQAEERYVGAQDRLDPCFQQCKLICRDSKAQYAELGPWGVIP

SEQ ID NO: 1013279 - protein, 149 aa, Homo sapiens
  misc_feature (51)..(51): Xaa can be any naturally occurring amino acid
  misc_feature (83)..(83): Xaa can be any naturally occurring amino acid
  misc_feature (119)..(119): Xaa can be any naturally occurring amino acid
  misc_feature (131)..(131): Xaa can be any naturally occurring amino acid
IFNLKRQGLTPCHPGGSAGVLSQLTAASNFVGLKVIPPWPQASVRRRGHHXAVLAQLSPKLTSFLVFIFCAQKFSTRVVGRGXESVTGGQQSLVGLHETSLLHPSAGSPRQNSSRGLTXLSVKIFCGNITXGAHTHTAPTDIIFVWIFL

SEQ ID NO: 1013280 - protein, 69 aa, Homo sapiens
MAERLADKYEEAKRKTGGYHEQDEKTTSQFSLVSSQFSTDSERDMKKRITADDLINFDILGKCHRNRLL

SEQ ID NO: 1013281 - protein, 160 aa, Homo sapiens
MVIARQKPEQGSPYSVDEAVHKSIPMAQVVDTLQWAIASYDPESLMHCMTRVPTDVCDTERRKAPMLEFPRRSSAPLCQFGPRMSDDYTGRWAISLSVVESHFVTQGRYNSRARASIAALNATLWGMPAQADPLSNLLWPRLYTMAGTDNTKSLQPATFE

SEQ ID NO: 1013282 - protein, 132 aa, Homo sapiens
  misc_feature (81)..(81): Xaa can be any naturally occurring amino acid
SYCHRLTALHESTVGSRYQPAIWESRDLIQHAQSIRVIIHFRYCMGLPSRHMRSSFRKMKMVLTMVASLLAVQQAANCMWXGLEWTLMILLICQRKTVYAAGPITPLSEMENRPAVACRSSTDIAHHVINQQ

SEQ ID NO: 1013283 - protein, 176 aa, Homo sapiens
PELADKSVPNFMSMKGHARSLKSLGYVKEQLGWKHFYWYLTDEGIHYLRDIPSSSPRMIVACQPYAASSVLGDWTVPRSRRSGRVSDLSETQKEGKLTEIPTDGAAVPTWCRPETADGWWLVLMHAELPVLRGGILVRGRGHGTSVSTWTRIRDAVDTRNLYKGNGDTLKGQQVGE

SEQ ID NO: 1013284 - protein, 73 aa, Homo sapiens
ALAQGHVAIDAGELGGAATDDLCSSPCQVLLLHPPSGSPNCFCRHCLYYQRISDYIDAASGNTDRATGCIFYN

SEQ ID NO: 1013285 - protein, 263 aa, Homo sapiens
RTFRTERAYQKQPTIFQNNEEGPVVWRKLARDEAPDGTTRSIVWASRHHKVGAAEPQQDKKGNLAVPATCAHDELPCLHLSGILGAAGNWKIAYPEATPLALLRNQPVPRLTPLVFPSFQAIEGTYIDKKVPLHWKVCPFEGGSISGVVTKMKMRRTMVIRRDYLHYIRKYKPLREAPQEHVCTTCPRLLQGTVTDSVTSVTVGLSAVALSKTVRFNVLKVTKGCRNKNAGRRKFWGLDHRVALPNNETKVNYSHSQNKLIQQ

SEQ ID NO: 1013286 - protein, 215 aa, Homo sapiens
MVFSILMLVLETKITFHTSTTYTLVLTAFGIALPAEEENKLEDVVQTLLQDQLAPQVCRCCKAIVIDLRQEVLMHRDRELNGAQDRCIIVDQFVVCFPGSYVSKVCCGYSVSETVHFAAPSGQLWALETGNGNDSVSHIANAILHWRSYSTRLHKQKQKKKTVPLSATSLQPSVDELREYRATVSASSCSRLSSTPPDAMADHDGSSTGGRTGNE

SEQ ID NO: 1013287 - protein, 205 aa, Homo sapiens
MLRDLGCQDLLYSSFQAPCASDDCTESCQRMIRVGIFGPRRTRWRLVQHEDCTYAMIPLDLQSILRTIACALDGLLRHGMQTTRVHMMLHPWVLTTSHIGQCFKLGSLSVRPGPGDPGLMGFNVYDSDCLQLVVFHPCTDNAAVPWMCWVLSKAGSSGSQYILDLPAEALQAAHCPFDFVLRQRSVALELCVTAFEAQKPDPKSA

SEQ ID NO: 1013288 - protein, 88 aa, Homo sapiens
MQSTPESEQRTCSSEDGSRAYRQYSGTRSHDRKRHRQLADHSDRPIDERTQLEHEEAEGRVEGREHAQTTRTEKTTSTDEKTGEKHKP

SEQ ID NO: 1013289 - protein, 328 aa, Homo sapiens
GRVGRPTRPVDSRCSPCLLTRLSGLSDCLSKHIQKQDRTIPQCNSALWLEIISWYTAPQKGEQLVGKNQRTGVYKGDCNSEMAPAVVYCCLQMAHDTLFTNSEKPDKCRPRIVAGITDRWFSPHLIIVVFEPPLAYGSSRFRTTVEPEVVDGPFLLFIDSKKKHGHTETTPKIERTPHHSTEEAERPVSPCTRKGSSHHAKGRESPKGRTLSVDAHTYILPKCVNKWSECHTRSGRGCSTDSTISTHVKYMVFTVATARSPYEHTRVPKSLYRLSGEHTCGRCIRRCVAVKLSFVVKTRHKSGPILWPFTEMEGPDVQCEMCSKMIAQ

SEQ ID NO: 1013290 - protein, 327 aa, Homo sapiens
HKEGLKKSKRNSVKSYPACLPKTSPLASPVLDGTAVPSDTDVVTARGTRNRAQRVALITVLPLTSGDLLVTVASTQGSACRLYFIDQLKLDAARRSRRSMHHSTSTQQDPVWSLHTCISTAKPRTYTKPDSVPNTTQTLPFNTNNEPGGDHRQPETQPIRSRHHAKDYQTQSQNAATTSVTSNFDPQMNLGTKRHTRSYPHNGDYHAAIYPYFLERPTTHTTTRLIYQNASDLLSDSTDQIPELACNLCLAHHGFRDAPTDLNNAPYTVEFLKASKQPGQLTSQGRDSPILNVSTLAFPGTENGSHGDTYGALTFSRKAAFSPPKMI

SEQ ID NO: 1013291 - protein, 93 aa, Homo sapiens
PTPHCTHSNRDGIPNAYRQRNNSRLYTTTTKAPTLEAPTGYYNPSADANRRLFIQESPIRDSDHHLPITLYYHRPYLSVSAIAASTSEPRLAQ

SEQ ID NO: 1013292 - protein, 253 aa, Homo sapiens
QSEIMEYIVCCCLEHSSRGRKCRRGEAEKRLLLVDFMQPSPVPATRIPGQVLGEKVLGIVVQNTIKLANLTESLWLLTFQRSACYSRQYCDVCYMCVLVLKTPTLSIPGALDPVLGVQDRQEQKSQYILLLQPLDLLCSADGLLGGVWTAVHKHYLSLLSYVGCVDSALALPCLPFAAVSLAPVRKPLGLHPFVVALDPCCWAVLPCLEHELPCSGDAGGPCTGLLRAWLPSPWPSSLALSPLVHLPFPGIGP

SEQ ID NO: 1013293 - protein, 164 aa, Homo sapiens
MSALAEPSQASETHVTDRIIILSQGLQTLPPTNSFILIDFYASLRYTSVLTHSTINLTGKTTAVLVTTYLLIKYHSPTSQGRRIILDHQTLSISRTTILYAQSTMGSHSYHALVETNIKRLYVTRENTLMLHTTLNPPQFSLTYSRHNPPAKFDLNPGVCTPSF

SEQ ID NO: 1013294 - protein, 243 aa, Homo sapiens
NRRSLTGPASSDLAVDQGKRGKEPAGTGRGHLHNIPFIHRTKQTTHRVTMAVKMWAAGEGGGPGGEGGCGKKNTGSPTMGVPGGNWVCFSPRGFQKIKKQLGKAKTVKGWQGEGKSRGWGVCWATGVKGWPSPCGDPPSPSGLGRKGAACNPQGQVWGCQMLQAGGQKGAHKGCALQGDDGMAPTVLGQGAGVLDLPEEVGWHSRLDTRFSYLLRGRPWEPALNSCGSKGRQNSGAQKNNPQI

SEQ ID NO: 1013295 - protein, 231 aa, Homo sapiens
  misc_feature (81)..(81): Xaa can be any naturally occurring amino acid
QTWWNGDSEKSKPKGKSMSLAAKLRVNGRNLPFQLDLLTQNNQKTRRTIYDDHRKISTIVNLAYDTIWAPELSGLPSQGIXLMACQLSPYCHSSTGQSLPRQSETQDNPHQSGGTVSISVTATSGERIRVSRLFAVLVRTWAVHTIIVDIGPMVSSSFIASGKYIILNYDDVRTALSAQSSAWPRVWLRAATNCEDHPIALAATGNIYKPPRKANAFAVIERTTSDGKGCF

SEQ ID NO: 1013296 - protein, 191 aa, Homo sapiens
TEPSASTVISCPPQRIAFLNEHHGQVDIARTPIGRQHWIPGRVDTSGLQSDRCTDENSPYCCEEADNAWLTLLCYQVALPSDTSPGLGSKLYNTRELSRTLTQRTLVGETYLNRTELQKKLANRLGAALLEPPPTVTPRASNGGWDTTQPDDENFQTEITTYTFSKRRLRLPLQVGRTRPLINSPEPNIPS

SEQ ID NO: 1013297 - protein, 201 aa, Homo sapiens
ERLGQHDQRERLDDLCTRLQMTSTKEQVDEVTDLLVSFTSLSLQMQSMEKRQQDEAPMTSCHFTHTKPHCMSQYQEKAQHLGLGDCTMSGEDLALTRRMQWGRGCSSLTRNSETTVPDHSIQRSLCDKGPQSPSFFTVLAETDQTSAAALQIRRTALSQQTSHCHHGLHWQRSRPQTLLCVPSMAMGLLQYSRVWALGGHT

SEQ ID NO: 1013298 - protein, 193 aa, Homo sapiens
MTSNRPWYLNKRERRKKKTRRETGALREEPPHRGTQDKHEIPQALTVGTQTGEAPIREASTTNKQTHKAKMTRPCYYARDQSNVRQTNEHDPRRNTSERNAKTRKRSQWSVTPHKVLATKESSPESNKQIDNSTKQRQQTEQHAQKTALTSGRQTTNKGQQNESKRWEDKVARQAGTTRPREQTEYNRGQRQN

SEQ ID NO: 1013299 - protein, 258 aa, Homo sapiens
MFNKYTGKSCKAARIGCNSGAKSLHTPYATGPESGRNLTSRHEWDTEDYRNNSQRSTKHDHHKHSGNDHEGASKGPGGGTHLEHEEAPETAQNNLNYRGPINPVCDTDEHHTRGRQSMSTTSRNPYKIPPTTEERTSYSGNQRESTDEVATGTKRDIKPAYITRKKNPKVKNTEENLADDQRKGDPNAKDSFTHRQKFWRNEVRGETTIAQKVARATTPEEEQIAHQKEGTPKGDNGWVQPPAEQHTRQTKKVESTPN

SEQ ID NO: 1013300 - protein, 62 aa, Homo sapiens
MESVFATHIYHLLEHQQKHARRTCNVATNECYNRRGRLAWVVQTCSEQQCVVVKQRVRISQN

SEQ ID NO: 1013301 - protein, 314 aa, Homo sapiens
PIFVPACVDYFWVKDAICLRELPYGTKGSEDLLLRVLAITSSSIPKNIQSLRCRRCVGRGERATRLTEQLSWRACHQAQYDGWVNQTGDKAPGGLAHEGDVGVQDHRVRQLSYALECRRQRSGAPKGGKSNPRTQNTTALESVCKGQGEKTNVGEKSESVEAEYTNAGVAEQGHTMGKDRALPHVPLSGGIGSTARLTTQTSRGTPYQAAQAEPLGSKQGTPRPNTWPARARRERPNKDQPERNFKHRDDANTKGAARLGHRSTARTPSHPLVMQTKGANREAPRPDEAYTTEEQPVPQPDERQEPNNHAETQV

SEQ ID NO: 1013302 - protein, 168 aa, Homo sapiens
QSKRQHVYPDKPQLPGSWGPHHWIPDPLTPRHWIPVLVFGLLFRFNLDTGSQTPSADMPDPCISSTMPSRPRHWIPDSQVLHPPDSGSIKQVRWVPYCAQQCGILANLQTAGVPDSGIPKSRLPSPSIVETVISRRQILIFQGTESQALNPRISDLKSSRRRVPNVQA

SEQ ID NO: 1013303 - protein, 195 aa, Homo sapiens
YPTRSAQRVRFATKVHPEEGIQEWATSSTMDYIGPCKYIPPCLDSELTEVPPWRSAGLAQERPWSPVYERDEDNNLLSEKQKLRVKKIHENEKRLEAGDQPVELLARDFEKNYNMYIFPVHWQFDQLDQDPIDGYLSQNELDSTCVLPRHHAMEHWTTRLKRDTVTWTNDKYIDLDEGPDDFGIKQKDIDKDLVI

SEQ ID NO: 1013304 - protein, 194 aa, Homo sapiens
MIASAGGGPLSHEHAKSDRKIARRQWDAWRQYSHTSDMHRWVCTTSPIKSRSSSIGCRHYDSLLAGPVAEYLTSVNEIGGDVQKHAEMVHTGLKLERALLDTASQCQQPAENKLSEYVGTISEQIKRSDNLSGRRTEDSKLYNHLSAVRETYPGPGLGWLWLPRTGPYVKDMNDGSHVLYKPEVLKEVQKMWIR

SEQ ID NO: 1013305 - protein, 148 aa, Homo sapiens
MERPVNLGFGIQLDKKIMTDYAPLSYPQTDVYLMCFPIGESCSHLKSVQCKVVILRCRTPVSPTLRIDPRWRTKLDLRDDKDTIEKLKEKKLTPITLIRRALAMAKEIRCCTNTWKCSRATTQRGLKESDMTQDDPSKSSDHELPVQE

SEQ ID NO: 1013306 - protein, 76 aa, Homo sapiens
KRLVRRFDANASTSESDAKETGLPFMNSFLREGGHVWPKEGCHMPKHPGSLADKNVPNLHVMKAMQSLNVPEGFTV

SEQ ID NO: 1013307 - protein, 76 aa, Homo sapiens
KNPPFGGFFYKQAVRSESDCDHRRGRVGDQLATTDSREEFEDAAFGIGMNSQNFCLLAFTIDMLIHLHFMHKMYGL

SEQ ID NO: 1013308 - protein, 154 aa, Homo sapiens
KRRYGRNTGISVWTRQEPAQEGSGVIATPGAEPAHCTTPAPFFPSQERPREKGFPDPGWSVPSMAGLEVLFASAAPAITCRQDALVCFLHWEVVTHGYCGLGVGDQAGSPMITESPMGKKKAPFFVGGPRFLGGPPQKRGAPFGGGGGWGGKPK

SEQ ID NO: 1013309 - protein, 519 aa, Homo sapiens
  misc_feature (2)..(2): Xaa can be any naturally occurring amino acid
SXRRTHGALHTQRDREDYCMWGGGMVQFYDLLNIYELNGLPSETNTLYIFNGDFVDRGSFSVEDDPSPINRDFKAALYPVITFTILRGNHRDRQHEPESTGIQRVQVKAKYNSPEWYETSYETRMITRVASRIWNQMHSQRHNDCLNQRHREDLDLPLNRDRHCHTMSNDKSQAKTHTTRRQQSTRHDPPRGTTHSGAPQPDDSTTVHKHGTTEHIRRPANTRKTTDGRHTELRRDTSRDPTPPSSTRQQRQRTANDTRRHNKTEAKARPVDQQAHPQERTTPHHTRQQTRQTCKRHTSHTAYRREQQQERESENNDSTQRQTATEHETTTTRERDRRSEEATRRRTANEQRAENESQASADQQRNESDTRTRANKVSREDRGEQEHVTKGDAHDNRAKTQKQPRNEQHQRTPTTTPHTIAHNARRHERSRQAMNNTPTPQSNRRHNQHEPEHAPTNHDNARSTGHTQTTDEDEQSTQANQTIKTHDKPENGEQHLNHHTPTHSNTQEHAQTRRHAHDQ

SEQ ID NO: 1013310 - protein, 169 aa, Homo sapiens
YGRRDRASVLAARVDPFGVLASSIVLPVALGRSHGVASGLGAGGCGRARCRGPAARASPELPEGPPFPALAGCWTLAIFTRVCLAGTDLCPLLSPGLWLQVMPQNPETRCLLSSPCASPQRRLPPNAARFRCSDAEGMPIVPLTEPRTGARAGTKPRRTSRTRTCPLPR

SEQ ID NO: 1013311 - protein, 195 aa, Homo sapiens
MADGENSGHINDVRHANIWRYSHFTLQLLKGYTEVLKLLSTGRRMMLSIKDYDELDTVFMLQIIGVKKKHVEFELDNLCDMEMVNKVGQTALDVADEDITGYLEELQKKLKICSIVNEPGQEISTNCINKQILGQVIRQQEGPVKKTERDARLMGPREHKRSRRNGNHRETRNTGKMKRRRRAQQGLSLGGASER

SEQ ID NO: 1013312 - protein, 259 aa, Homo sapiens
MFRLKYRNVNLSKEIIQGRKFSETYYTRILPTLGETNALGSLGYVVVQTVKEILLVFGRIVANSLGKEKEVNVTKMKSGMQKIGHTVVSQYSCRKKAVHSTRWTSAPVEASSWSKVTSEKIQPTLRGIVERASQLQAASVGMAWPGNRPRNEVIGHPLEAEHSGHGGVRRMRQRKPAVNLSNAMEGSGADMGPSWQMKTRGNIRARNVSYEATETRTLTHTGQQKGARKRQAQTSGEQDPTSISEKEQHGADKETREDK

SEQ ID NO: 1013313 - protein, 245 aa, Homo sapiens
MSQHLHPAQHRGGGATVHNLNSVKESPHERMHRHIELAWAFIHASSARVLIPELRWVLLTCMGQDSLPHQEAAQARPRRHQTKPHTTDGGKQPTVQRARRAIPPTRGPRGKTCHTSDTSESSRVNGLAAFAPLQSSKSAPPEDRSYTIPRQTRGVETKYSTGPEQGTQGRPSTRRHRARKVLGPASHQGTPTHSRPNHGRGEPTHPRETAPRASTHYTGHKRPPTGSARREHPIATHDRTSPYHA

SEQ ID NO: 1013314 - protein, 284 aa, Homo sapiens
SYHAHSIKAAKVVSTTAQVPYILSHRENSFQARSPCSCTWIVLRLPQLVNSKPITIASNPGLPLPVHVRRKATWQALLIINALCYHGQADGAGDVEPPLPVTGGPTNKISTASQVSQGTGFPMFLKFMEVVYVPSTVKRGGFVVLHLCHLFAPIGESSPEKVRKALKILVEQDGLGAFTTSDHQIRNLVKPLTCPQAGAASQSPLPQYVTVKGGHMIAVSPHKQVSNSWTKGMAQSSTGSARPRIARGTSRVCFTFNYVKAGCGIQWLAEILRSPGQPSSVSKA

SEQ ID NO: 1013315 - protein, 99 aa, Homo sapiens
FTMVGGTLYTYLKTGGAYKGSHRCSVQQGLYCPACSPLPPHFHLVANQTVPLNYSANFLPARSQRFEGEIDGFCVSESNAIAYYVSYEETAEVKYSRVQ

SEQ ID NO: 1013316 - protein, 66 aa, Homo sapiens
EDNRVLLAMVKPIVYFEIAVDRRALGAVSFELFADKVPIDRQTIFVLWALERKDLGYKGSMRCYRN

SEQ ID NO: 1013317 - protein, 147 aa, Homo sapiens
  misc_feature (137)..(137): Xaa can be any naturally occurring amino acid
MLTERKILGYIQLAQRPQRVYGPYGLLTTLRVTAIKNSCTKEPRRNPPHLAISRLHHRPDLSYSTMRSLYYEALYLQYSKAAVVSNFTSLMALRYIMMSEAAMLVHEPRTSCITVRYLSSGHVGNAACSRRNGAREXRAYTCQDTKQ

SEQ ID NO: 1013318 - protein, 179 aa, Homo sapiens
GNGVWPGPQAGVQGRESRFTTTSCLPGCEAILRGLGLPRVTGLYRPGATTPSIILVFLVETGFNHVGPGWVSISGPRDPARLGLPNFWGLQGVSHRTQPPFNLSKVWVPVLNLFLSNLILRVLTWKKLFITRVLLELKIRLSRDSLKRGSHKSGLNGPFSLSRGLPRISSLTSLYTVDI

SEQ ID NO: 1013319 - protein, 354 aa, Homo sapiens
  misc_feature (267)..(267): Xaa can be any naturally occurring amino acid
MVSATDNESRALSRYSVLKRQCLKHETEWQCNSKITSSKSKRRCPSRSTNYLAGPDGTPLSCPMMRNTLYCFCALEDSPRCYVTWRPCQLYECFVGLDADNNSSLDLLRVLALFNRQPMFTRRSTDSNSPCVRTALGGEEARMAHVARRGACHRSTDDASVTAVVDSLRRPRSPLRSVSLTLRSTLVNACAPRHAAAPPSSPTTGALPTIPARVGTYGGYARARHSVRPGTSSCRLSSLPKAPPHMLPPLMACFSKHGPRKHTSPAXCYLQTLTPNKRSQLWHQPPRSTIPPLGYHSPSSYQARRNAWITLIASRLVPLNGCLRSHIGAQRRTLLGSNGRFPGLRGRASGGDDA

SEQ ID NO: 1013320 - protein, 105 aa, Homo sapiens
MLPYQVYTKSAWHDTYSTSASLSPNGPSSVPMCTYPLAVGHVCVAHARQKLETCIVVLHGLDHDPGHHSQACLENVGKNNRLVLTSRFAGGPSYLAKIDRSTKSG

SEQ ID NO: 1013321 - protein, 217 aa, Homo sapiens
MSTRIHPCAHNETMGIRLGLCGAPNWGRTNDTQSSACIESLQRIIVVPTEPPYGSHRRPLARPPDGSLAPGPSGPGLSFGFGPACVWDVYGPHRCLGARTRGPAQLLAPTWWCALASPFTRPPLASLGRYLDGPLVTPWVPPPTILRSPPAYLGRAAACPRPAPMPLGCYFAFAHCGSRPLPAFRRPHFHSWLTPLPPACPTTPSRFTQHLASVALP

SEQ ID NO: 1013322 - protein, 108 aa, Homo sapiens
TRPGPCGNNSQTCGGFVRSHSAGYQREAEQSSVGPSERGGQSGAERGMIGRSSCTRRLLGEWRRSDPGRYWLRSEGKGEVAHSRELSGSQHMRDLPKHAHEKRLHTPW

SEQ ID NO: 1013323 - protein, 152 aa, Homo sapiens
MTASVHAGGGPWGALVALGWGTAGGFRGGFGSGILGSGSRLWTAVAWWPSASGARGGKAEDNGVYARHQVGPALVKDMKDKSLEEIYLFSLPLRNQRSIDFYLRGHLSRIEVLKDPCHVHKADPCRAKRTKVQRQYCMTIRGTTNMSKRSES

SEQ ID NO: 1013324 - protein, 291 aa, Homo sapiens
HAVRPRVCPDLTGAQGVSSLPVPSSPTEEEEEEEEEEEEEAEEEEEEEEFLRLHGGMHVQGGPTCHCHPLQARASPAEERQNACPTTSMTQGLHRCCPGWPRNNGSRTARPRAGLAVNEHMRGHPINDTVAPNEHSLPRTSLAPRPRETVCFTMLHQPMCLPHAPPANRHLPSTPPSAPFQSFVLRQDPPTHSARASSPTRRLAPLRRLPWDLAPPGPITETHTPSPTLAPNCKRLTCNAPTCQPGPIGPGAQHRHQRPGAQASQHETRIAPPLPLDIPRDAHPDSIHTEP

SEQ ID NO: 1013325 - protein, 290 aa, Homo sapiens
MGMCAVRRAPMCAGSSGRVMVGGPVMGVILSVGLGSLLMSPTVVSRLKTSSGGRESVQHRGRRERQSLRRSGLLNMCTTPEGRICTRLSARQRRGLCERGISPRSWAGIVVTSDYNIRIGLVSSECVEMLDRPSSHVYPGVFAHLQTGSRSRHQPGGRRAMRDQCRFKHGIRFTRRRGTGVRRAREGIATSLVARGKASAIIECDRRGHREIPGGRAPNVGNTGNYWVPWVLRVRVGYRVKLTTLLRVSVKKLRALSREEHKSVCKATWYVGPFVKCSGPAETAILACQV

SEQ ID NO: 1013326 - protein, 376 aa, Homo sapiens
MSQTREQCPYHGLYHFVGCETGVVVSSVNQISGYPHEGLPYSEADTRISRKIVEEKSVTDIKKNRHTNTSTSRYASIVPNYSGSGIAWLSECVDAQCAVTLPWDSLAMEKIAPGKDWPKPGGTYDVRYDGCPWILCSFLAHPKSRSKPGPTAPFGAHAILPRMCLYPKDWVRNKRSVIPWLGATWMRLDVASNMPWFMGALSHLGRPKFILFNTLEHVHQLVIDKLVPDCKAVYEVESSVSLRAPTCWGFQWSEQTGGSGQTDRLRTVSHNFAWETADMNEPAPKWKRSLGVPHASDRELAAMMHIPGATLTAAGKRPRSWNTRERNTTRGCQGWDDAGQRKDLEWTGTWQRDWEERRRTIHVRLIQPDEAHARDS

SEQ ID NO: 1013327 - protein, 222 aa, Homo sapiens
EIDWMALNGINLALAWSGQEAIWQRVYLALGLTQAEINEFFTGPAFLAWWGMGNLHTWDGPLPPHPWHIKQLYLQHRVLDQMRSIRHDPSAACIRWGMFPEAVTRVFPQVNVTKMGSWGHFNCFLLPGSFFLGFGKEPKYAANTLGEPSFRDESVIMRVRHKSTIYGGQTLFNEMPAPSSEPSYLAAATTAVYEALTAVATEAVWLVPRAGLFQRPKPSKAT

SEQ ID NO: 1013328 - protein, 264 aa, Homo sapiens
  misc_feature (29)..(29): Xaa can be any naturally occurring amino acid
MRQTEPESLQSCCAQYRWWSRIEMREPVXYGKDGVLAVAGTAGWNSTRLSVHPLGGPITMYRVSASSPPQLGPHTCLRGVFCSRCLGSYNERTPGGLNLRATLERDREYPYDGVQDESYNAIVMKPFPLFMFTVRLARGTVTHPQKCIGTLSGGASRLHRHWPTLRRWSGGVPPKGKPQLNPWEELGSFDVSPNSKVANPKMAQVRVPLNLSVERLSAFVAVDRFTYPVELKAWEGPLPYFFNRVVGTRLGSRLRGEFTPAQTG

SEQ ID NO: 1013329 - protein, 297 aa, Homo sapiens
ARFIINDWVKTHTRKVSSAYLLGKGAVDQLSTAGAGECPLASSGQWKTPFPDSSTLPPPLPANQTAAHVSVPMMAQTNEFNYTEFSTPDGHYYDILELPVPRWITRQHVHCCPVMKQEVPLSARHQAFWVPSSSAHWKGNMTMAAPVSWFCPMFSLGDCKIDLRKPLENLGNDQTCTDSSKADFTSLSDQEPLHVAQAPRRTRDDRTVNASGTVASSSTAVIALSPSMAPEEINHGQSPSLFAGPATTPNRERALFTGATSLGTLAPDGNDAPHLGTPPAHASRPDTHPHAHESKRP

SEQ ID NO: 1013330 - protein, 263 aa, Homo sapiens
MTLISGPNKARGGITHPKEATKQKPNNTQIPKKTNNTYHTHKAPETRTEHNNKNAKRNKHKGTINKRKTTATITHGRQPQHRNNTTETTQRKLGNPSHPNPSADPPLIPEDNHPTVTTDSDTLQANYNQYTKAHPHNFGSTRNDTDTTNAHLTTERTQQSTRTHSAYTTHFPYTKQRQTGNPNRCNTSSHSIHTTRTQDATPDTTALTTSTRDRAQSCDTSALHTPIRQLSHNTTHTSTTLSPKDHPTRAHDRAQERPYSTSA

SEQ ID NO: 1013331 - protein, 189 aa, Homo sapiens
MTECDRMELFTGHIVRSGHLEEDSAPPIPFQIDEEHTPTIIVEERPLTTALASVLSGGDCTGVTLSLVALGRFIVFRVGLPFASTGGLRFRMALGSPKAVLHFGDTLVLRVLASVPGTASWTFQRVVPIGGWPLSLKESPTHALKGHFPCGLVSPQAIFHMSKLGDTVVQLMATLRLSWLTQGIPSNSA

SEQ ID NO: 1013332 - protein, 286 aa, Homo sapiens
DHNNETDLKTIAEFYFQNTSYALYGSLRSDPLTYCVNFHTSRIPLEGGRTQVFPVHCLHKKINDTNVAFCISTSNYKYAVILDDCIADDTNPEETPERPDPELTIQERTPGNHTPNSIKTLSGQHLQRYVEDGKNQLTPGLAEVHRHGRCSCAETRSSARPWWPPKCTFSEQLLAALGYRTTTMASTRRAAADASRNVAGAGGGTGVLLHCQSLLSPATVKEERTMLEDHLGDAVRAGHMSPSPFKQLDEKLCWPKTQRLLPTLRAARQALKGHLLPRAANHFLQS

SEQ ID NO: 1013333 - protein, 37 aa, Homo sapiens
MEGEHKGPTEGNHLGGEEPKHLVGGGNDKGEENHPTK

SEQ ID NO: 1013334 - protein, 136 aa, Homo sapiens
  misc_feature (124)..(124): Xaa can be any naturally occurring amino acid
MASLRDRKCRSIQITLVRVVLHVNALQPTSLRYDSHAKGSGLISYSMSFVQGSMAPKGIINELLTASLEPSLNSSERPFGLLSLEEDSCECLAWAGCEKKIRMYSQRNTKPSAVKPLRTAYFAXHKTYTWATSAVL

SEQ ID NO: 1013335 - protein, 228 aa, Homo sapiens
MGHAYAYRSSVEIVCRSSFPYFRDHSLQYSAVLADIAKHESLGSKLRYREGDYRILCLVLQEVWHYHKDACETEVTHLTGKFQVISSWRQLPTLQLWFFRPEKKREQWEEKIGCCCMVLRKRLSVPRKHLSEPAPWANEQPFFSMSWLVGSPLPDSASFQKAGVVSLFHQAEVLGDEKPEREYRSGLSYRSCSTCTLAVGIQGTGGIDPGEVHTVSGLNARANAIACR

SEQ ID NO: 1013336 - protein, 216 aa, Homo sapiens
MNRLFTSEMEQSLTWEQDPGEQNSGSLCKPSHSATLPKFPIPTTRSESTKPHILTQELPVLCEMGMLLRTSDVIQYNERTYMTRIADLTEQNSAIKAHMTNLIEPRGEQGDGLRELNKQESASDMTSTFPVAQSLTPGSMEERIAELNRQSMEARGKLLQLIEQQKLVALNLSPPNVTCSVTSQSMDLKEQEDNSRYLFQAAGSPRKGSKLYVLVF

SEQ ID NO: 1013337 - protein, 419 aa, Homo sapiens
  misc_feature (176)..(176): Xaa can be any naturally occurring amino acid
MRHNTASQMFNRRGALSHDGHPELHHTYVNNLLPEMTCTTEGWYKQSPEHPRGQVYFLSRTIAFNTNSTLRLRVYRYLYFSKYRRAETMIGIISRGIGPIYMSEHIARVSCKKTTYDHVKPGKHRTEVKTTEPASRIGLANKYERNMKSWQHRNPTKHWTHGLPQEEVTQGKAIAXNTAANHTHKGTAECTKTPTTVRTMQNTQTKTSTMKPTHNQAIEDNRPEPREYQQNTHTANTTPMRHSADDTTQQRRDTNDGAKLTSKPAANDTRTKTDNPDIDTSSALTPTNAENEKQRDYPPPPRPTPAHSTTHKANANMNQRVRTRGRSDDRRTQRQPGTHRDQRRKNERSEDHDHDTPASAHTNTAAPRRHVAPCRTDITPEHRHRPAQPPTQAYTTSTRPAHDAPDPDPHRTTPTSDTP

SEQ ID NO: 1013338 - protein, 221 aa, Homo sapiens
KELSPSGGGAAPRWTTGVSGASTHWPEIVRSSRLSAVLTRSSLRNGSLAQCTPTSYVHRTLRDRYETVRRDASLCVSNRVSTHLKSIGVRRCCPICEACGSETGLRALKSGPEEQHSGHKHSPVPALAFSPCTHSRGFSAGHDMELYCVAHPQLTGFHLSSLNAQGGGVRAGQITGESVTFPAIYSWLPLAIRSQLLYTLVRQHLSHAPDSRPWRRYQAHG

SEQ ID NO: 1013339 - protein, 102 aa, Homo sapiens
MQWGFPYILVLRTEMPLRNREQIVAVVTEDFNVKILEWERPIRGMVHIVKILCSPSRVRARYRHDPPWRECRSNSVYTAFKPNVGCRILDNVDPFSVNILPF

SEQ ID NO: 1013340 - protein, 96 aa, Homo sapiens
MGRNILRIEDILNGDSPHRKDGGWNVKGRKNKDEEEETRKRRTRGYNRRIEDKSYHVAFKPIKKRKEEKSPGLIQNQIGAVTKVTFDVPPRRKQSH

SEQ ID NO: 1013341 - protein, 66 aa, Homo sapiens
IWQNVTLPAVFYVPIRPNIVNLITPNLRQETTDSPMLSVNQLVISRVLSLGGTGMTSSALEVPSMF

SEQ ID NO: 1013342 - protein, 200 aa, Homo sapiens
MADSERALGVLAGGRAMRPTSRALQKVESSVFAEIIIMPGDPSSGVQCRRTHRHTPPCSVIEMILAAIFFVVYMCDLVNTKIPFSQLVPWSDFFRTLIAAILYLITSSCMSLLREETDVQNRRRGTGPNRYVSSLAMMPMSSFARSAGNDIQPAPTDPADGPVEANFPSVSLVQSANNSSIEDNSSHTANQAIFPADRIP

SEQ ID NO: 1013343 - protein, 127 aa, Homo sapiens
  misc_feature (44)..(44): Xaa can be any naturally occurring amino acid
LRVRSRPSRTRQELQLSPVKGLRLGRRGEHAAGPESGPRVLCQXMTAEGSDLLSEPYGSANNRTLAVPGVEDEPLAERRTPAALSSSPSRYHEYRGRCIQQGRGFRFGAVRGRLDPLQGPFSDVGIP

SEQ ID NO: 1013344 - protein, 158 aa, Homo sapiens
WTFLYRRMTQNPNYYNLLVLNGLGEVDHMLQLVEHAWVTYTLSDHMMRMDVGLNYMIAAYYYINYTETIELFSMSLNAKTKVRGLIEIISNAAEYENIPIRHHEDNLLRQVVLQKVPHKLNNPEVAMIRTSRPNLLLQAHLSRMQLSAELQSDTEEIL

SEQ ID NO: 1013345 - protein, 339 aa, Homo sapiens
  misc_feature (88)..(88): Xaa can be any naturally occurring amino acid
PFAPVNVRRACTICRSMHQEVYEMETLPEYNALRLQLITDVLSCPGNVCSCVVKQIGVGLSEAGDSVTPTHTGEQSCEFECVKRCYSXMHTECPEPNSEKTARDIMRARVHFGTLGHNSGSTICQWQRVLPRGVQEPQRLAVGTDAMGEGRKGVGNRPATPITPFRYGERVMACEMPSARRCSGPMVVSFNGGEKGPATWLCCFVLKGNLLFHESLKFANSPCIWRRIPGAVSCGPVDIYGCRNIILQGCIPENHGILARGLGGEAPKFSTKVPGFRGTPKTGILDGLLGHYGGKRPFGGPQRGGLPSPEKMDSIGPPPSGHNTGRSKLDKQRAIREDV

SEQ ID NO: 1013346 - protein, 140 aa, Homo sapiens
TRRRVVVGFCFKQCLDGTRRSFPTPVGRPKPALRHLFTAPSDCPKAPDPPARERRRRDRPGTTSPPPSSVSSALTHWTDSVDHNPLRPMGCRPMEIHNTTKGTVTRRDTGRIPKSGPHEFQSPLLRPQAYPINPGPPFYR

SEQ ID NO: 1013347 - protein, 333 aa, Homo sapiens
  misc_feature (202)..(202): Xaa can be any naturally occurring amino acid
  misc_feature (231)..(231): Xaa can be any naturally occurring amino acid
  misc_feature (237)..(237): Xaa can be any naturally occurring amino acid
  misc_feature (244)..(245): Xaa can be any naturally occurring amino acid
  misc_feature (271)..(271): Xaa can be any naturally occurring amino acid
FLRGRLGRNRDIMGQHLGEPWMVRVALGLTGLVLSLYALHVKAARARDRDYRDASATAGHRPSMLFDAIFIRRRVAAGGYRARWTLVCWDRDESSLINPNRQYYRLCIVHNYQRSEAYLLGLCLAVTTAEEPSWSRDERSMSIRCVSCVCLGVLSYAGSWGSHVSFSGVVMALSYGFCCGNRSTHHSLSRRVRRVDCRARMXSRGDRVPKRTPRMRPIGREARRTVAAIQXSRGAVXCILRILXXWRVGTVLECLWPYKGRAHTPGVSPGXGPLKKWWRSFRHECYTAAFRTVAQITPATIEPIEDPEDVAQDRISVRLFYNAKMPSDLMVRQ

SEQ ID NO: 1013348 - protein, 129 aa, Homo sapiens
PRVRKIIEDLRAQNLPNTVVQLPVIVLQIDNARSCCMMDFAVKYDDDERGTMLNQVLWRTTSHVASANGSFDDTNYHYRRASLETEDSDGSQGGSCLFIEEEPANEERIKGLANAPRFAPALRFEPLDA

SEQ ID NO: 1013349 - protein, 211 aa, Homo sapiens
MIVGAATGGILLLLDVVSLAYESKHLLEGAKSESAEELKKRAQELEGKLNFLTKIHEMLQPGQGPMTPEQCSHQAEMPGTGQDKMADFFFFFFLEMESSLYRPGVELQGPQLSAQFANLRPPGFHTISRASVSRDSVGLRAPCHHAGLKFLGISTGDGVLTVLATRVSISVTSLICPPRPPKGAGITGVSHRAVPKCRHNNKGDKEGKGKA

SEQ ID NO: 1013350 - protein, 132 aa, Homo sapiens
  misc_feature (73)..(73): Xaa can be any naturally occurring amino acid
LLGPCCPHSRFCWGSKFWKVCAQRVLMGLACSSQHWVGGRWLVQNGDVGQPPLPSDERRHPCDGDSSPWCKAXRLDPWLLTGWTDGNDPKGLGRWPWGLRGNPQLRHSLGLVSHTGCHGTHLLCIVPVFPIA

SEQ ID NO: 1013351 - protein, 270 aa, Homo sapiens
RAGVAVPGAAVPGALAWQEDCERWAAVPGERGGLWTHRAWPLLLLGQLHHLHLCALEPLSCGKLQPRVTEELWQAALSTAQPQPRRTAVPSTLNYATVACPSPCKWVMAGHKQATSGRPLHHCGLVAVTVPCRPGAHRCIVMVCEQPEVLCFRLCPGPVRFPRVHPPVRCLSAAYGGRRRSPVEVERLVGQDNGAGGGCPRSRCVQANATDVRAGSRASIVGQQPLEMRVRERKKRIYEEGLRRRLGKGAWGDQSQGIHRGNEGSEEEKE

SEQ ID NO: 1013352 - protein, 45 aa, Homo sapiens
MAEANNPSEQELESEPRSWSLTRAAGPGRGRPGGPGVQQQLELER

SEQ ID NO: 1013353 - protein, 103 aa, Homo sapiens
MQFRWAETSVEEQDATDMCCGRTAADPAHGACNCARVWPKKPPYSLVKKISRSCSVNNKVSENNHRKPAATVRSFLRSKFEETKGQVTAEALDVTESSLIPIV

SEQ ID NO: 1013354 - protein, 155 aa, Homo sapiens
MRLAKPKAGISRSSSQRKAYEEQAARTGRQRQKWGYDYSTWTQASVDSDRSLDDKPYKCTECDKSLHVSSSTLFSNTSKDPITVNTEDPIMCADVWEEVSSQSSNLIQASTDPYGGKALQTVMSVEKSFKAELKSHSATREFILEKEAYQCDECG

SEQ ID NO: 1013355 - protein, 179 aa, Homo sapiens
MALPIKEEDADAECSTRRTPWIGAEQAEAALRRRRQDRSKQLEDELVSLQKKLKGTEVMNWTIYSEALKDALGEAGSCAVVRMATDAEAERSFSEQTHPAGSGGRRWICAQERLANEAFAEAGGELRRQSDESERGVNSHGESEPNEDEEKMEDSGESNLKSRQSEIAEFAERKYEEVG

SEQ ID NO: 1013356 - protein, 211 aa, Homo sapiens
MWCCGLCLAAALLLLLLLVQLSRAAEFYCQWSALVLALLCFTGVLPWPRSSCLLLPLAGRTCGEPLSIHRPGFAANASEYVLLALRLPTVPGDPGRRAAMDVPVPLVVDLSTNPTERQSVAHCMRPSLRGSVPCSCLPVQRNRPKPWRLAHSLAALCGPQSIVRSRVLSFVQSHLCMRFLASAHCHVHGPTLWLTLPLVQVEYISISVLDS

SEQ ID NO: 1013357 - protein, 84 aa, Homo sapiens
NAGSTAIISPNIGCLEVQSCHHHLLIHPFPQAPDAPPPGVSPWQIHAYPPGRAPHPDATSTAIQACHPLGPYRSSHTQRLTPGI

SEQ ID NO: 1013358 - protein, 30 aa, Homo sapiens
CTGLEVFGWARERCQLGAAEPREAEGAVAA

SEQ ID NO: 1013359 - protein, 166 aa, Homo sapiens
GVTLHRAPRGVACHRYADSPDGAPHPIGLSGKVQNPACHLNSHGELRVIFGVYFHQRFGTGPSRFTRTLWLGTRFAVIILDRREVFRFAYYKLLKKADEGLASLSEDGRSPISIRQMAYAFLTAAIILLHTFWGVVYFDACEQETVLGLGPGWIGSHLLTSGTDIP

SEQ ID NO: 1013360 - protein, 291 aa, Homo sapiens
RGGAYGPSVPAAEEATEARGLRGAWRGPGKTAPILDAGAAHPPAAVLSCAAVASCRLEDVTWGLLEWAHGFWSPCPAPVAVGCVLGGRAWRSELGSLCWLHESDGAGISGHRCPHLHDEMAPHALSPLPDDSLFVASLSSPRAGVGLSQRSPAGVMECVLPTYQSSPLVSGDTSWGAFQVVGAVCRAWEPGGRGLRGPHMPAAGHVPVTCCSRPDYRLLRGYRSTVARVLTQGLLSPPRREGAGVWQSELVRVFAGSPLLARALCSTLAGAGADPLVHCVPASFMSTLSLR

SEQ ID NO: 1013361 - protein, 118 aa, Homo sapiens
LYTDIINIFLYRFSVIDLIARIELRYSWLCPSQVVLDVLDAVHGKAVIDCNFPCLLITRNQACGKEDCLHLQASPCYVHMLGYVSRVWNRVLVPQGIGAHLVPSPILLSRCGARQTGQ

SEQ ID NO: 1013362 - protein, 155 aa, Homo sapiens
MSGGARNGQGQLQKVECAVPLHDGSQEWASREGEWPGGARHVQVAGDPVLTDRDTSQEHFAPAWDEDSPTEHRNAGTRRPHSHHGMHFIRYVNSAELTVGTRGPKAKIGSFWTQELPGAYFGNGASYVRAYILVQTGEDTQGPRMLMCTTLRNSG

SEQ ID NO: 1013363 - protein, 241 aa, Homo sapiens
PAGAQCGVARLGCAKMQRREWCLCCCPAAWGNACREPGMSLAQWPPTACQPTWTEPHASRRVSLTSVSAYLCFRPDAACYLTTFVLPSLVLASGGRWARWSECTLCDGCLMCQSGVQRVLDIAQQLGQMELAKKHKKIRLRCQNGHPCFSAWACAWQYLSGGKVKYMQNPGKFDELGHVPWGPQVAGRALSVTCTVHVPFHEMFVSRGGHGSAVTYFLCADRPTRWYLCLTRCYLARPSAP

SEQ ID NO: 1013364 - protein, 238 aa, Homo sapiens
MEAEPLLYPMAGAAGPQGDEDLLGVPDGPEAPLDELVGAYPNYNDGSEEERLLLPACKRLGVLKNVLAASAVGHAHLRSSTWVGAARGTLGSCPPCLSSSGPRETENRGPAVSRPLSLPLRCPRSCRHGPLAAVGWGWGVDCRRKVMPGSQTHEPSAWVSRTGRSEASPRQTCPSVCDWECQAVTMGRPGAVWGFAWPTGVSLVRVHSGRWRQCREHAGLSWSAAPVRRASALPVSEG

SEQ ID NO: 1013365 - protein, 33 aa, Homo sapiens
MVGCCCISPATEARDGSRTGRRRGRGPELVSQR

SEQ ID NO: 1013366 - protein, 217 aa, Homo sapiens
MVRQPNSSGHKSMDAEDEQSSPVIAGHTATYGKVHARVNRLSAPQRSQGSWRVVCAPADSLSTAALAVVVVELGGHLEQRAQTPLNRLSWPGLGSQSGPEYIARGLAVYLEVKKVYFTDEAHIQELSQSDGKIEASTTVDGLTSGLAEEDSCVWRRGQWKAAMWADGEGSLSTWHGILEGVSGSELYDEKGCNVCRLPGLSSVSFIDPSYCKTVDYL

SEQ ID NO: 1013367 - protein, 42 aa, Homo sapiens
MARQVGVLPELLESLPAACAVLLGECGGRRRRGSHARSVQPP

SEQ ID NO: 1013368 - protein, 119 aa, Homo sapiens
GGGGHLWYLLGWGASRKGRLLGPPHPSLSPGTHDSAALRLNMSARHVSAVGHPDACHRDVRDSRRDAEHTIGCVCMCVCVRAAMYIQMCMDVWALGTTITGTRDIYQYRVEEEGGCMTL

SEQ ID NO: 1013369 - protein, 157 aa, Homo sapiens
QPLRPGGSGAYDAAAKAAAACRTCPLRAGDSPSVSYVCPCPGSLAAPCCHLAPLHVIAHGCMPPRLMPLWCLLTLVTQLLLLPPRGPRPRGFAERSHDVACATTATDLVLPILCGTINTTRCDMLLRGRVVSWSTLSRALTSARFLVLLRKRHLRPS

SEQ ID NO: 1013370 - protein, 88 aa, Homo sapiens
MLGALQNRERRPSRFFLLYHRIHFPFLEKIFKFTFGFQKHSEHRCFMVWEFQHPEFCCLWLRLSLASLSSLSTVPGHASLFGHGSDFQ

SEQ ID NO: 1013371 - protein, 39 aa, Homo sapiens
TVGLKYRGIDVASGATASTPDAHGIPRAPPALAALATAP

SEQ ID NO: 1013372 - protein, 297 aa, Homo sapiens
GLCPSSDTPMPWCSCRASQRSSGQRAMETERHPDERSAGWGRRGECVGREAGMGWLLEAWMLCPVLLPCCPDGVAVSAREAVLACTCWWPSAGWAWVWLGVVLLACLPPAWVCVAWPLAPLFSRAPPLPAHSPAVCAGGGWWRRRLLPARGSRGSAAWGREGGGGSTAMPPRVGGDVAKLRVAYEYTEAEDKSIRLGLFLIISGVVSLFIFGFLLAESRACRICKPRRPIARMLSVQQIGEVSECTFTFGADLQGQLRGTPCVQVYVKQVLSPSLGRWCTGKSTRFLDEPEGAPIFL

SEQ ID NO: 1013373 - protein, 237 aa, Homo sapiens
AAWRCCARSAWVMLPHRGVRVRPWAASCLCDGNGRALLPGFTLTAAAAAITLGNVNRVHLTAGPCQWLSLREARDGCGCPHFHCAHDLELLECLKELVVQQETRSRQLVTPSGAGGRIPNSGRAGRVLPNIQAQVGPGTGHSTGLTPMSAKLAPPKKGDHQGVYGGVCSDATRNPRATTKIGAKANRLSTTNLDPYQTNIEQTSTHEPQNIKETPKLDKTFTRCKIHSIESWNIMEK

SEQ ID NO: 1013374 - protein, 95 aa, Homo sapiens
GRHPGCFTSQPDPPLTASANMSWACRCVQFLSAAVSAAADQRAAPAGGALRADADVQGRSCRRYILPRSRYGAFSCSKQVHHAKAVIPTGVDEPG

SEQ ID NO: 1013375 - protein, 205 aa, Homo sapiens
  misc_feature (81)..(81): Xaa can be any naturally occurring amino acid
MIAGALCGWGGVAKVCERSSIDWYSPSVMSLDSRTMRQCGSARHASGFGIVPSNGLPEKGHWRTPWSVCTWSADQQKAAWXWSDYAGQQSEVLQFNCSGWVPPRWVGWLKWELGLKCLVAGGTWGLWMSLVQQCDPRERNAFSEIDWYGERHPGVQHSIEGAPKGGIYGRPEGGSYGFGTREGSPKEPILNPSHCGAPSIRRKLP

SEQ ID NO: 1013376 - protein, 173 aa, Homo sapiens
MIDSDLCLLADFPRHDVPFYSCWRTGLLLLVLAVGSERILADRRQTCDLVGEKGKESEERVGYYVKSAEYHCLIISYESTVCARAPDTYIYIFRVCREAGNHTSGAWPGLQGSGTKSWEGGQMEGRLNEHSHLQRKLLDHAASIKGVMNMYSHCGNGAASCKVVMISCNRHNP

SEQ ID NO: 1013377 - protein, 204 aa, Homo sapiens
MAACLTVVPFTTASALLLPSVSHAMRTSGPRALRPMSLRSGVIAAPLLTYVVPAPCMRVPCLVTLWPDVLWPTDSRSTLPCHCFTQCSKLSWQHELTHTPGEACCSAAWIAEDSQRASATSIAAKIAAPWSYGEMPTAEKLYQHQPNSRDSETYDLINPDPKGLEKAPYTQLACTGKDVCHGRCLEIEGQSSEQPAEPFDKDQE

SEQ ID NO: 1013378 - protein, 78 aa, Homo sapiens
EHNSIIQRMVLGVMTCLNGRLDMLGLSESGRIAFTGFLCRILSASRKYVACDMVYTLYGNQGFYNGVSIRFMSPSTMR

SEQ ID NO: 1013379 - protein, 201 aa, Homo sapiens
AVVPERLEPRCQPVADKKGGGGGGGAVWTGSWAGGSSPCTLCSPGQARARIWRLRRREGVSMADDPADRHRWCRKLQRGAGEGRGVAAGGAAPRSRRGHGPERAEAWADAGPPPPGQSEARLAWWPAPSSCCTPAMEAPASECARLPAAAALLGGTPAVPRVQRVAPSWLLRLPERRRGQQRAAGSTILIISMANERIEAS

SEQ ID NO: 1013380 - protein, 244 aa, Homo sapiens
MKIGMPDTIRFSTQDDLMSYKTLMNHDGYTDIMYRQRIKMGNEMQSSNESQRREQDPNCSGTSMHEGVSPSAAVESREPEWMWTSRPFIGNPLFPCISVRSIEEMVNKSSTGALNGTDCLPGVDCRTVETISVKKRQRERKGKPLSFMVNDPREPDQVSMVEQQIPEFWPLFDRSLEPGDRRFNGTSCKRLSSTSDYISVCLDTTTQWKHVTTSCPTCDEPCEGRSTSTEWQVPKHDIQKWPNH

SEQ ID NO: 1013381 - protein, 141 aa, Homo sapiens
GVCDAAGVGLVGQGAEIACGRCLERRSASCPERGLPQSQGHIQPLWLTAAARSGVCGVSVLLCDPCRVCRPCRQGPLPVLGWLCKVPWGKWLRVASAGGPKHGPHFFAAEPGLARWWVERWFIKARMGPHKFLNPGAKSRL

SEQ ID NO: 1013382 - protein, 228 aa, Homo sapiens
GRYETWGSAQKNFVERTRDLGPGWDSGRQSVQGQREPAGDALYPMPNMGHHAPESVDPVDHLAELTPVYPLMFIKPTMDLASPEAALLPPTALSSFSSFLDGLHRRRLSTFLYQSARNSPAMLLSLLLGLLRILVLRHLPCLWLLQVRGLPGVRLLPRAPERPSGMRPCPPSGSDVLWQAPARRPSPSTPQLRSAARSLSLGWLLRPLLAQPDLRRPAGLDRASAQSL

SEQ ID NO: 1013383 - protein, 42 aa, Homo sapiens
MCGGRSWAAEAEVPGGRGAEWAGGLRRGCSPPAPAVLPPGWA

SEQ ID NO: 1013384 - protein, 167 aa, Homo sapiens
GEHAGAAAAGLGGGGSGLGPDAWVTSCARYRVVSNKLKKRFLRNAERGGSAGEQFGQLGRELRAQGVSALRWPCASWLVARCQAGALPLGPGSALCLTEAARLFLRQERDARQRPGLPLPPTVGGLLLGPAGQAPLGESRGERSDTLQKAMETKRTRARKRTKPNNI

SEQ ID NO: 1013385 - protein, 216 aa, Homo sapiens
REQSRQPCQLRRDAGGHDWLSWMCMFLRKDDLLCVLLWGGHAVSAWEKRQLRPWPGVVGATSHPGQDEALREDNCHLGSNNSRMPPGVDCPMEFWTKEENQSVVVDFLLPTGVYLNFPVSRNANLSTIKQLLWHRAQYEPLFHMLSGPEAYVFTCINQTAEQQELEDEQRRLCDVQPFLPVLRLVAREGDRVKKLINSQISLLSSWDYRLCTTVPS

SEQ ID NO: 1013386 - protein, 114 aa, Homo sapiens
APQSRTDLLRKGGSQNTKGVPPGACLFLSEQIRPRLWSGIPAPVQDGGVHQGVSWVGCFSCVAAPVCHGFFSGLRLCPVPADPPRSRPPDTPRAAPDHCPSAFLLLLLRDRALR

SEQ ID NO: 1013387 - protein, 271 aa, Homo sapiens
ADEEEPCTEEDWERLLSALQGYAHFTDYGCDGDELTTGSEVCPPVYVMSWQGCLARVSVSTQDGLPGTANTCSAPCARDSVVDRVAPCPTALVPCGSYHLVIVLLFSTWEIWTKRLHVCDQCGPGVVAGLGPAACRRLIQGPSKAGSVVLLLLRKQAWGSPTAGPSVWRAECAGPVTQDQLWSLQPTLRTVPLLSMHSAPAASARVEARALQVSGAAVGAEDLALERQQHPLKVLCLQLVALHPDTLPRPRQNTPYPLNLQKPTTQVIATD

SEQ ID NO: 1013388 - protein, 100 aa, Homo sapiens
MLHAGAQHINTGGNYKGIVHRRGFHLVFGPTCIESQNSLVKLPVDAVPPHQLGSPQKIAVGCVTTVVLNYQLITPVAVSSPWLLDCNIDQEAPRNQELTI

SEQ ID NO: 1013389 - protein, 221 aa, Homo sapiens
LSAGSNSAPRSWTGTWGRRTGTRAAIAASPTQAPPPRSPPPPPDSLQALHRLRQASGAAPGSWVTGSAAAWLDCWPTPAPLSAIVPGPGLERVHWGRPCAPAPRKMPAQALQQMLDRSCWVCFATDEDDRTAEWVKPCRCTGSTTMGSPGLFYNGWVRLQKQRGTQYQPRVAMSVQCNADIPNRYSKHGSSGYVLDLADRLISTCLSHLLQPGIMSRIYLL

SEQ ID NO: 1013390 - protein, 259 aa, Homo sapiens
MEDDHALGVVRCEPVETARRCPLSGYRTLTVALFTPDLLSKDRMRRYSRYTVRAKKLAVEPKRVPRGQLQTPPVSHALKMVVVWETVSSIRFVRGQNRLSGNITWSRKHRPMTGSSNATSTVLRGSRSRSDISNVSVYQPPREVILRLQSHVWWLWASPFTIECRVPTVEPLESLSLFLFRGNETLDSETFGKAAPGSAGRAQGTFNSTAETERMGTGGFPAWHVLDLIVSLVRTSFKKHSDPKDVGRSMSCVGEPDGH

SEQ ID NO: 1013391 - protein, 55 aa, Homo sapiens
MCAVAWGGTPQDLLGFLLSPECFLLYSGCILPVPGGPWCGVAQGAAWGARGRVRQ

SEQ ID NO: 1013392 - protein, 193 aa, Homo sapiens
VLLTLIGLLLSGDPRVKPPVIMSDQCTCVLVSHPTVLCCHVAFPAVSACLSSAGGLGSVMCCWWRGGSCWNWGEGGVPVWWDYVAVRVGDVMPGLLCRDGCLCGRACCVCSLEPWPAPSPVALLSHPRYTRERHLLEVVQRPSRYICLVPSVFFLHTESELRVQDAHLISQAIALGRGHLGGNPDRISFQRLI

SEQ ID NO: 1013393 - protein, 65 aa, Homo sapiens
MHWAETNSGDFTRGDPKVGHRRGTRGDFRNGYLSDETFVTRYEPVLDCTGRTFRARLRVNMDRCL

SEQ ID NO: 1013394 - protein, 299 aa, Homo sapiens
GIIIRVPFDAKYRERNRQLWYDVGTAVINSKSVYRSHAVTQLSRLTLLVDTVGPRLSGSKNLEKAIQHYVPKPAARWAGESSTWSHVRIPHWEQGRRISCDAGAKNSNDSHPGLYGSSIGTSIQKALQKEVLVVTSLRGTAEKGLRSQEGKISRYINANLTINLTQRTDANSPQTHGRAAEDKLTKSMADYETLSYNSHPVDLPLLQYYRSVNDSRYIPRQYPGDCAIAPRGTSANQARGATREGNKMASKHGLNEANMGHILQWGSTHTHPAPTARRNTTTTANEPLPTRITRRYRSK

SEQ ID NO: 1013395 - protein, 52 aa, Homo sapiens
MTSRPQRVWDTRGSRAGRNPASGSATPPPAVAPPPWRRPVPAAPSRTQCNPR

SEQ ID NO: 1013396 - protein, 153 aa, Homo sapiens
MRPVRPPHVAVLACLLPSPAPVPWQWPESAAASCPVVLVAKGSLRSRSWGRARLLLREAAIRWQALKGEPGGRVHSVRRDAAFLTAAVGSAPLWDLLPTLDCGVQDQRDCWPCAPWFLVKEQEGAPRIAGSAAETLCRGSRDATEQACGRTAC

SEQ ID NO: 1013397 - protein, 237 aa, Homo sapiens
LRRQEIGARPCGARPIPIPVPAEQIPGPRYGLQQSLVTPPSVLRAGRGTCDIFREPGQPRNLTGGTVTLDDAWLETLYSHEDPEPDKTTYSHIVTQLNAMLLELALPKGPVPLTGERTGLACSFCDKWGVWTASPWNMPETWSRYAKELLAWTEEESQLLSWTFAKEAPLKDRLKLGKVVQFKQHEPTIASCEYIYTLYLEHDLSLGTLGHGDQWPSRREDYYQSHRRSNSVTENCR

SEQ ID NO: 1013398 - protein, 299 aa, Homo sapiens
GWHLRRWRARSGLRPVRPWTAPRPVSLRSPFRSRAPCFLRPAEEVLALWWPQMPKCESLPARGQRASPVHPGPSCAQMGRVGEIHTDRPGKELSPIVIQSSTIVVGRLRSTARQAGVRLFERVTCTRNEARSISVDQTDQSYKVKMSNHHVITWITTSSQSSPPSRLNPDPGTTPLPSTPPPEIASSPITLDTTHNHISCSRRLPTLQTAPFSPPRYPLIPATHGVTEQTYARTRQRNLASIHSRIVERQHGRGRWIYECRRLCSCQLVPDRELDRSTKVLVVAVGAMRILIISSIADS

SEQ ID NO: 1013399 - protein, 319 aa, Homo sapiens
AASLRAFCAPGIPGACLVFCAAPAQAGARRRCAPGRSQASGCSRPEAPSARSSVPELPDLQPWISLRQRWPGTECVCGCTALRGLGRGAGPGAQPRVCIPWYREDPVFLGKDGCCRALSGQFDAIYFHPMYPFTAARMSAGAGLQLGGRCAHLELCNTMGFATVEASREPVARGSVLPTGFLRCINKLWPFMQLDLCQARQQLGYNEWIPSVVELGAVATHCLQCGSQGIHFGRNGSPSVPFNFYIPFGNPVVNLMPVGRAYPMATKFPRLPTGTFKGSSHATEQSMGGEGATHVAHLPGINSYMYKSPLSPLVHAKRV

SEQ ID NO: 1013400 - protein, 356 aa, Homo sapiens
MESQRDLSLVPERLQMTLNKNWQLEVEMCGNKSWQNQEVEKENMPLFLSATFALVMRAGLWKMLLELLLEVVSDAAGGGWPLWLQGAAETNQLTQFLYTYACLRTLLGSGTMKVLLAGGCRAGPLCPDAVLPGGMHTPMKAYYAYQRTLWGNVMLAFVLPKGRTAGSLAFTPWARLKEQYNGNSPGLAQMNGRKGRPFRPPRLGSCRLTPNPGKSPKVFGTTAEAKPHVCNLMAADEVHIVDRKLGRQTCNRVRTSGIIGKEFPQKYSPLARLKPENGAPICHCKGHRATLAGIPQVDPKPLHGLSTWRQVNLAQLNLGPFHRGRKGPLPQTQHPGINKQVTRKKTNHEYTIKCSE

SEQ ID NO: 1013401 - protein, 105 aa, Homo sapiens
MALGEETGRMLEASEDTKAQSYVDECELHVDAGSWTSQWPMMWGCMPHSLEAEWSVLISPVWGAERDTCPYLAGLGLTHVAGPSRDHTQPQASDANMRGPVAERS

SEQ ID NO: 1013402 - protein, 184 aa, Homo sapiens
FSCAVSLQCCRQPWLPSRNGMVLKPHFHNGLAACCCGHVVQPAWPCKILQTVSALCKPMAAPASAPAPLLSGPILAHLCACPTGSGNHTEGAAAGLRASAMEEAQWWPVHSRRRLALDHLRIFLWIRTEAVNKVQLESPCRTNCCMLVTGKYPASKDSFPSIPHGNAHRGPPNAQGEEPEFHMA

SEQ ID NO: 1013403 - protein, 217 aa, Homo sapiens
MASELVFTWEPGVCGSVGLVVTAAQLSGYLCHAPPWPGPPTLHDLIRQLGDEVCVDDDLCTGRKPCPWLCNNECVKMHVAWKCASRTCPAAPLMLAPVCVGAHVCQKNMPWHLSVSCPECPCETQQLDGDRFGQGPLQSSSISPHCTEDSKCSSARHVAQSGMLNGHNIPLVSEPWEQVAPNFWPKVPQKWGHTNSEVALLALGVRFANPYRTHHRV

SEQ ID NO: 1013404 - protein, 128 aa, Homo sapiens
GPELLAPCWGACECLNDVLELGRIKMHIVMSFLWMSELQVLLGFAGRNKSGGSTELLAKALHLLKSSCAPSVQMKIKELYLDDAFPWKTLGPSDLSLLSLPPWHLSCRTTPGPLDSHSPNCCMALAPC

SEQ ID NO: 1013405 - protein, 295 aa, Homo sapiens
AAGLAVADWTWWVPGLGAGAAAMENLFCAARMQSLLSRSSDKAILQLKQQRDNAECSTRKRICPAAGAASCALALACLLAVTGREWNWAKLLLNEGMRYQEQLLDMDWRTRSAGLEAMVQSIDVTQDLNMKVMEGLAGFGNELSVNNGCNQCDCPIARGGRVDPVHRGLPGMALLAVPCRPIDELLAWKLHSRSDGNDAILEEPDAQSHSRKPKSEAARRGSLPEPPFLTDRSPEKRYPCQRAQGRRGSAGSLDGMDFAITWCQSTYAGDLHVGNAPCGLDGPNKRSFAVNEAGP

SEQ ID NO: 1013406 - protein, 88 aa, Homo sapiens
MLEMAQGDQTVGTSKRRLREEPGPNGLRCHHQSPLEACRGTTRWVRVRCRAEGVLREAEHVSPSGLRTISIEFMNAGGCLKGIRATSR

SEQ ID NO: 1013407 - protein, 192 aa, Homo sapiens
MCEDVSACVACGTQGLALAQCEHARPWMATSSAGLHSGCGRAGGSVRALCGDGSLELLAWCPCPHPAAWLAHGDVHPCDRGPMVLHWCEELLRGCIEAFGEWLWEWHTEPEPSPESEPWVPASQAHVQGTALTRTQTLLLQSAVSLNESLLRNAWAERCTPFRHDDGLPFSRPSPDRAVRMGGAVSRNSEHV

SEQ ID NO: 1013408 - protein, 85 aa, Homo sapiens
MGEHSDIKGVRRHRKQSPEDNTIEIQAHSERVHNTEIPLGPGLYTETTGKTITARGENNVTGTTTHKKANKHTQKRGKSKKTPQQ

SEQ ID NO: 1013409 - protein, 590 aa, Homo sapiens
MERASASPTDLATTDPRTRRGRRRGKQWLDRSPPLHAELLIKGSNPPRGTPTQPRGAADPARRPRPHNSSTVSASNPRETVPRNRQHSTILMIRAGEHRQSSRPLQSRGARALNTHTPLPPPPHQPRARITLNAQQPRRYPPPPARRGPETHRHPTPHHAPPAQDRPTRPPYDATDTQKRRRRTEEKTEPTNRARHHRPSTTQSHTAECMIGQTDRHCLATCRPTASKRDGRQALTPPPPPCPDAHMRTCDQSPSQEEGQRHRPAHDCHNRQAHTTTTPTVRGGSALPQTRRPAHTHTTAALIKAVAQDRRREGTVRERARRGLGRADARARRTTGGGGRARGAGALVVRRRASRAVVGARQGGGGRARSARRGGAGRLERRTAGGRVGSLLRPRIQCTTNCTLGATHSRLVAPPTRTCAARTRAPSARRRERGERIDEKRVALEESGRLINMREQAEEGRQLDAREWTLNITKLSEHEHHQQSVTEEDDSGRQAQVQHDVAQSLARATSTENRGPRAHTPQQPSLGPTESHATDRDSGRRAQQNACSANTNCARTPHITDDEHTRRPKHVKLHVQLERTHTSQTAPECM

SEQ ID NO: 1013410 - protein, 198 aa, Homo sapiens
LEAEMWFLRVCGRLSVNSAVSSRTGGWSAGLTCAMQSAAGSAGPPEGSGRFRLDACMACALPELCAPAGLVPLDCGWWLHVAAALAILPVAGLRLCFNGHHPRRASLCGSHDRRFSRHVNLRAGTAGGHLCRDIPETVPLSTVNRQCTYGATRQMASIDRVGVHVPGYDRGNPGNITFALDGEGERPEICLIPMGDNL

SEQ ID NO: 1013411 - protein, 242 aa, Homo sapiens
SGHPGLEERASYGRAVCTRSVGSKNLRDYEGLMASVRVPGSKFWKRSNSNAPGAASRHVYGAQHPHLMIHCYMALCSGPRAKMPTTPVKAKRVSTFQEFESNTSDAWDAGEDDDELPGHGWRESLNYRGGHGDVQTCELRNHKTSWKGAAHAAVRGQGIQEKPRHEGRASLHATQMCDLRLVERRSVRDHTYCSCRTVPGDAGPLKKVPDHYPNVEQRTRLGWNIFSPKHISEDQVLSRERG

SEQ ID NO: 1013412 - protein, 153 aa, Homo sapiens
DAEEWVQQLKFILQDMGSDVIPEDEDEKGDLYDDVDHPVPVSSPQRSQPIDDEIYEELPEEEEDTASVKMDEQGKGSRDSVQHPSGDKSTDYANFYQACGTALDLFLMSVSFKRGDVIYILSKEYNRYGWWVGEMQGAIGLVPKAYLMEMYDI

SEQ ID NO: 1013413 - protein, 253 aa, Homo sapiens
RLQESKDTRKQRCPEQHCGPLLLLLLLSWASRDEAAPDQDEIDCLPGLAKQPSFRQYSGYLKASDSKHFHYWFVESQNDPKNSPVVLWLNGGPGCSSLDGLLTEHGPFLIQPDGVTLEYNPYSWNLIANMLYIESPAGVGFSYSDDKMYVTNDTEVAENNYQALKDFYHLFPEYKDNKLFLTGESYAGIYIPTLAVLVMQDPSMNLQGLAVGNGLSSYEQNDNSLVYFAYYHGLLGNRLLDFTPEPTAVLRTV

SEQ ID NO: 1013414 - protein, 197 aa, Homo sapiens
CRCHRTPSWSGVAARLLFGAAGLLLLSPAPSPSFLPLLDTVRALRAGLLSVPAPVGLPAGRDPEDACGCVPLCAPVGEGEPCGGDRRVPGRGVYVPRRGSGECVERCRYRGRIGGKQPWAKQARQSPGRKAGVSGVAKSRNHGCAGEDGTATDRNHAEGGTAENADCRARPTRAPEKPTAGGKGPIKPGSRERGTHG

SEQ ID NO: 1013415 - protein, 154 aa, Homo sapiens
MGGVRRDACFSLASGTPSPRPRSGREAPPRVSRPARLSLPRSPCVPSAGSPVFSAPVRAPHIFSAPVRAPPVGDVSPSETIRALFIPAPSPAHTGVCKDCLFCLFVLVSTRAFQKTSLFNRLIFPYSERSLLSEKFLEETIGNDPVSSRDHLPA

SEQ ID NO: 1013416 - protein, 118 aa, Homo sapiens
APATLPADMRRLLPYMVLDRKELVSCCGEMLHIRYRLLRQALAECLGTLILVMFGMEGSVSPVLCSAENTHGWYNLTINLDLMAEHDTLRHPHRMDRSLEAHLKPCREPMHIDAFLAS

SEQ ID NO: 1013417 - protein, 294 aa, Homo sapiens
LTVACCELSAGVAAAGMAKSNGGEWACCAPCVPGESLSGNPGEPGPVAPDCLQPPMNSALSGLTRSANGFAERRIDKFGFIVVLQGAEGALEEVPLEGCLRQRESKWLDIAQTTGTNGWPRSTKRFVLRMPKGASRTSLQGPVALAGTLSCEAQVNVTAEPCEQFDEAGTCPLGDPKVAWTCLAGVTMHRQYHNSNEMYVSHGWGCQRAKHWTPNSSECLKALTRLDTGARTYCGIVGTEPKCTPELPGVVVASNWHTDPGLETRGPIWDDLDTTHLVEERTLTLYFTTKGKNA

SEQ ID NO: 1013418 - protein, 110 aa, Homo sapiens
MELRSPAGPDGVPVRRSRPLRFRLRSWRPCGGWCRAREGYLTAIARLCKSEFNVYSQEVINVLGEIEFMLENLPEWLLVNQLRRTGSTCLEEGYIQPQPLGVVLIIGAWN

SEQ ID NO: 1013419 - protein, 300 aa, Homo sapiens
LSPAEPASIGDKNMMTMITHMKEQRAMERRDLDDLQKEVAMTEHKMSVEEVIAVKYNYQTVCSGFDPQQMPMEILGPGYGPNCTHCHRLPPLELGQRFCLADSSGGFSILLWIGAIRCFLAYWYPWLGTEDEPSGDNLYLGIVAGWPVVIITGCFSYYQEAKSSKIMESFKNMVAPAKPWCSGNGENDAMVNAEEVGGRGTWWRSRVETECQLTLLESSQTTAASVDKSSLTGESERPDSLSRLHSTRTPWRLENITLSITNNLCGKARDRGRGGVHGATRNVMGLNGHPWHQDWRWARA

SEQ ID NO: 1013420 - protein, 85 aa, Homo sapiens
MSLLISCSLTGEPHAGLRSLRVSGIREAIPGRGRAVHGEDDASESALKPENIIVGLGKPGEGPRAEQVGAVEHSWVGRTVTVFRC

SEQ ID NO: 1013421 - protein, 105 aa, Homo sapiens
MVNRANWKAGVDPLVPAAKAWSLSLSGGGPVSDCCGSDPDAEELRDRFPYLSESYLITHRCLPGSISHSYTWMVEYVLISWNRLQLQAHTTPDGSESGCVRLVAI

SEQ ID NO: 1013422 - protein, 80 aa, Homo sapiens
MTLRGRPYRPWPTRTLLGNEQLGCKGENDGGNWGLQGCQYGARIQVGEVLKRKIRKRRATGHGSEHIVNLRGENGDKEFP

SEQ ID NO: 1013423 - protein, 329 aa, Homo sapiens
MFFARGRDIGTLYEGRYVDECDLRLRRPDSSTHWDWMEDVLEVLYFCHLNRLQGEGRLFWLESTCIRKWWADRKDLNVCEIGTRGSECGTVGGSNCSIFSKFRGHIQTSVGPSRHAAPPNLVEAQGKNGPRWVNLSVVPSTLEWATTSPVSGAMAQKKRRASLAMGTRITKSEKRLGAGMLSGPQNSCLHADNALNHSKMWRTTLARAGGELHPFSAEYLAGGLKNFPAAAQNFPARNVDAVAHFFYNVLYPFPPSHNTVRSVGRRDNPLLKQGVNVRASRGTKSARGQNAYVGAGCTVANKSFLGKPVTSSVPTFLRALCGVVPPPWL

SEQ ID NO: 1013424 - protein, 261 aa, Homo sapiens
MSVDLLVSRREREILSACETCLGGPSCGSRHMLLASPWGPVGPNPWAPESLPHCFSVNVDHSPVRELVAIFGSNLGNCNRTDVGLRGPVGALPVVANSWVPQMPKIKLSMGCSNFQANSHLARVPLTFRRRFGRHVSSPIWLGRRDRAKRSPTLRYHPLLSRALRTPQQTGGEEPPPPCGGERQRLTFITPLIAGGRGPSVATVGGVRNNRGSVPVTSVCAPQGKARSFGSPALCNSFVPPNNWGAGTTYETHPYPVGNCE

SEQ ID NO: 1013425 - protein, 304 aa, Homo sapiens
DGSVLKSGQVLQRDKMKLVAAGGDVCGFRAHGDHGRLKQKQWIKTSLSDSWHCLPHNGMSVCWLVLADDAKHQECQSMCGMVVTDLSKHPLNCSDHERFELVTALLQQQHTVEPLDENWKQPPVLAAAHEGALRFCDPYSTVTPVFHISFFATSRFHRQVIIHVSLRLPLENRTELGYWQRDHVARQYFRVYSLTHTSYVTKVTFMERHAGEQLRRRLSNLFPYPHIPKPPHSSDMAPRLNHVLPVLASCDPYHARDMVKVADRMTPITARRQCSTLTLWLHFPCGGPPALILCRTPALPYKMT

SEQ ID NO: 1013426 - protein, 246 aa, Homo sapiens
MPATCCLLSALGTVAGCRRCCSMDYVTVWGFPSKATIPGKTVIVTGANTGIWEADRLGTWPGDGGNIILACLRHGECVEAGMQNGHPRWETLKFTMSNCPATWTLGFPSRSIPETFCKQISFDPRQDATWHHFLIQHTLRFVHAVLTPHLDPPVLTGFRDCTFAPYNPTLWGSPINFYDQNLCWLEPKPGNEPLQPPRYQRGKSTPNPPRIPPCVPNWYAQRPTLQNMWNRTVWYTLAKTDSKRYL

SEQ ID NO: 1013427 - protein, 277 aa, Homo sapiens
MPWPGSRLGGVVIDHRTPASVLNRDGGPRPRKIGARIEGFGLREGSPGPEYTPGPLSWALGNTGVGPGIKRQGPRATREKERPQAGKYEGHPGHGHTLFGQIYTRQEPKFKGRKIRAPGSRSISPQEGHGSPAKKGCDAMSRNDMGERQHMRQKDRPRPYKKDIPREGGTQERSRPGDSTRRVVFVGPNKGVDPPKRWTVRDIFTDRSEPGDRLVGINKTVASQVLLTTAVNSGGSNQLVVKEHDTTIYSVRRRHHQIVGTEHHHPLSNTEYTVSAD

SEQ ID NO: 1013428 - protein, 73 aa, Homo sapiens
ESRQQNMLAEAEAETVDSWRQGDDVQRLLCAGASPWDSRVQEDPVPGPGAGIPVAKCVEERLKEMDVREMGLF

SEQ ID NO: 1013429 - protein, 124 aa, Homo sapiens
CAGSHWLKCPGDPRGGGNCWLSCLALCCRWCPAPRLPAPCPAPVSRLSCSLVFNVHAADCVVAHCPKGADLVELLLCPCDVCEASCEPVLPGELRSSVLHYNYHLARLRWVLAATSLGAWPAAA

SEQ ID NO: 1013430 - protein, 263 aa, Homo sapiens
NNPSEQELEMEPRSCSLLEQLGLAWGRPAAPGVQQQLELERDACCGWEIRKELKLKEGAENLRRATTDLGSSLGPVELLLRGSSRRLDLLLHAAAVSCTPDVVLPDPAGHPTMAPSPLVRVDATCSASQPGADSGGPGEAVGHLMLKVKQGGLENIDPGATCNGEHQGPEAACVTASADVAGTSKTKIGIIRMQLRAGACKAVPAGEPGKPRMTTKGSPDPGALWSLRIDSLRATNFRSGSTAVGRRVPTKATEPCTAAAKAP

SEQ ID NO: 1013431 - protein, 75 aa, Homo sapiens
LQPTSAIQRIMLALAMGRLQSRKVMCRQAPDNGSTGSVSIMCFVNAVRIVRETRIRNEFRPFPRLTMAQSKHGSV

SEQ ID NO: 1013432 - protein, 209 aa, Homo sapiens
REYCDAAWSRPCRGEWCMGDLRLGAVLSAGARPALSGACPSLQGHIQRAVADSSLLRAGESAVVCGSTHLRWCDQLQGPLPVLVRAARCLGRVVRVQGWGAPQKGPPFFAPVLDLPAVDKCLQDEAHGYYLCRKLKQRQSWECARDVYQKPVSSGALGAYGSVCACLLDTKQRGITVWHLETKASPRTHFQVHSFHAQKEPYAENLRVT

SEQ ID NO: 1013433 - protein, 141 aa, Homo sapiens
MLQKTKRRRYLEVRLGRRQRDTYIDASRHKKDKERQRNNKQETKKKSKHQEKNRIERRNKRRKEPKEQKTHKKPKAQKDKNHETTEDDNKKKGKEEKNKKIPKERTGTKTQRKETNKTEQRRPKQTDDKQPEAKHSGKSKT

SEQ ID NO: 1013434 - protein, 143 aa, Homo sapiens
GDIAPRPSWGREHAMRTPQLARYYHVAVLVRAPARFPPDQPWGLRLFNRASTFVCVRPGLRAFLASLWLGTRFALSSWSQGHFSAQVSLLLASVVWFILVHVTDRSDARLQYGLLILRCCMSLVLLQEVVPLCLLTSCLSKAA

SEQ ID NO: 1013435 - protein, 78 aa, Homo sapiens
RCSCRCARSSCDVSCAPVGPVRLLRERASDGPALSPFSIGASGASWPAASRSGKCKAELKILKRPSASRFLEKHQRSN

SEQ ID NO: 1013436 - protein, 265 aa, Homo sapiens
MLRHLCSFTPNSTTLSTVLTLSSHHALLTRPERRDTGLQRNPRARGTTAKQDSLNLFSQHHSDLINQLAEVDTAPNYLSSKPAKGAQPSPDTSVPPYSAPPTTGHLTKHAISPSPMHNLAHTNLLRSPHTHTTPNSHPAPKTLSPLLTPPFNPDPPQQAHHTPPAQNATPLHTRRTLRRHWHSISGQQRWPQNEDRRRATATPTTMRHHVAEVNDPDRMENPRHAPKHRQKALGRPPSTVQQTQHPPCAKDTSTTRATPPPPRTK

SEQ ID NO: 1013437 - protein, 289 aa, Homo sapiens
GVGAVGAKGDGARNSAVSAQLRTLPPTPSRKKTQPELSAAAPEGPTLHLCWGAVSHGSQELLQNRGKLGSLQASHGEAPEAPGPHPPGLTTLPWGPPPEARDAGGRETTLLAPQRGVGLAAEGQGPDAQVPGLGPWQPARVATTGTQRRSSTHPSAGSRPWQPCTSLFLKSPQGHGMAVAAGRGGGPVAGGRPEEVSKRPRGYANPVWTALSDYGAQLRHGGAGPEARVTVLEVAVPRTPPISGRRRLSPGATARAPVRIFPSNYVSQRVAARPPCEVAASWHCQLATV

SEQ ID NO: 1013438 - protein, 130 aa, Homo sapiens
LAPVLHDAMLPMPTPEADASSVCDHVKKSSAQAALDWPERAGVQAGWRRRSSCTPPCGKMIILQHDACSMLAREDEGCSMRSGPNCHAHPRAPEPPVPAATPGTTGTLQQHKQVGSKGSGAPGPGNRSSR

SEQ ID NO: 1013439 - protein, 238 aa, Homo sapiens
SPRSPRALPADSLVHTVHKGWSPEMRCAQGRCEPGRAALLNLSLKPQKRALRPVPTLPPGPACACLVLEGAAGHFGCALVLCAGGSGWEQQVLECRAVLAGPAGAPRGAMRAEQRESWLIGEAHNTAVENTRYGTCPCQLNHIVELSIASQVGNQRLMRAKCWNSHNPEGLRHVVAKGRNTQSIPEWRLTEPNATHGPLDTKVRGPEDKPLARTGTSRAGGIERDDRLQGTDDQMLGT

SEQ ID NO: 1013440 - protein, 97 aa, Homo sapiens
MTQFDPNGRHFADTRRDQGATNGGTHPILKPGAPQTLRQSETKTRGPPTRDIVRATPAPQHTTDTHMNTASCTPRQRLLQHTTATAVIHSPPNRPTT

SEQ ID NO: 1013441 - protein, 78 aa, Homo sapiens
LNTVGAPATPVTHCRQICKILNAHMDSLQWIDQNSALLQRKVEEVTKVCEGREQGAGAQLPGSPLTERQQPWGPQVPR

SEQ ID NO: 1013442 - protein, 166 aa, Homo sapiens
GELGVGNIAWASEAPAAAPASGCCARCAAWGPGCQGRTFSVLLARLMVTAQCPPQRCMQSPHCTTCPLWEPPVNITCSTSRVPCVWIYLRQTRGHMPKTSYYYEDGVVPTRTDGFLGPQSDFSVIPKTNLTITMHRLQAVRTHGTQQHDRPSPECQTVYEDSSATP

SEQ ID NO: 1013443 - protein, 92 aa, Homo sapiens
RLTCLACEEVLAPGFGEVPAEAPAHCAPLCPLPVLSGPDLVSALGLAVRREWLGMRVLTPRLWRGVLRAGTTVSLLCNLLLAHHNAHPSMSG

SEQ ID NO: 1013444 - protein, 127 aa, Homo sapiens
GGIRKKPFWEPERFCSAARRGRLEDLVHGLPWSCARALEVVVAWMRTAIARRSSVRTVSCFMRARLCADMLVAAQVFICLATRMMGTYGTEVLHLWGPTSRGMYSSESGLVHREAHENDCRGVRVGR

SEQ ID NO: 1013445 - protein, 307 aa, Homo sapiens
GEQLVYAATPASAAGIPPWMWLFGEACPTGAQRLLCVAWDSWTWPPDLAHDGRSLWLNIRGTEAAALSMFHVSTATASDDRWFPDAASWAWCLPLVPMGFPSLTLVAGWLLEAMAIGPCKGPPQLALLGLQLLQGRACACGADVLGPYLLKRETHRYPGLCKWILGPGCLTWEWAPVPKPYGALSLRVGRFHHMRHGPCALHFTLARMGQLECLTLALDWCKVPIRSTMGWRIGNMSGTNGWWKPLRTTPPRNNLDHSCELAHVSTPGRVCHLKKVITFETGVPNEPLRRYRKAFLLIPKRCVPLSM

SEQ ID NO: 1013446 - protein, 33 aa, Homo sapiens
MKGSPPNLQLSPGSRTEHRPAALKKTSKSKKKQ

SEQ ID NO: 1013447 - protein, 111 aa, Homo sapiens
MYAFGYGISGNPCRWAGALESDRVLSDTGGALLLGTVGGALKCRVIQTGWCGALGRAAGRAVCPGWAARLGLTPASGCRGEDEERSFLCGPRGAGERPEEGFRAGVFPGAA

SEQ ID NO: 1013448 - protein, 238 aa, Homo sapiens
GASAILSRMRFVVALVPPERRSGGSRAALGHRKRRIKKKLEYGASAGTRLHPPQLEPTAWRLYQVASGAARLQKTALASRVRSAQDPRRQAPTSRVRRLRPRMTAPNKLGVSGERTDPKRGSHQQVEVRRRSTTKRQQLLRSHPELTELQRDKHWRNRVRRRKPQKTGPTGRGAEGKDTKKTGLAKLRSGGADRQNDVPKKGRVRTGRPRKDGSSESGAEDQTPRKTSLTSRVRRSRV

SEQ ID NO: 1013449 - protein, 51 aa, Homo sapiens
NALMAKEGEVCPHKDTCIQLKSVRKGTKGKSVVHIRGTHRKRKRYWSAVQR

SEQ ID NO: 1013450 - protein, 194 aa, Homo sapiens
STPLPSHAGGFLDGTTPVQRLLPAQPSIPGLWPGYGFLFATGLFPELPVGSRKALAPACDNILPGCLRVVLLHCFLASMFLIRNLVGTLWRILCSGYVALFFFFFRQGLTLLPRPECSGRIMAHCSLDIKWTPCLPSSWDYRHQPTLSSCTMYYILLYGEKSGNFPSCVGPGRGGPPPLNGAKRVHNRGITNNR

SEQ ID NO: 1013451 - protein, 236 aa, Homo sapiens
ASLCLAWPAGVNMAGRSEGVLLVGGAGVMFRVPGSLCVLHRAAPWKMAALGGFPVCGSKLAVLPGALSAVVLGCCASFALCALCAVNSWWPPCANVARAPGVNGALYLLPLMPREAVPYPDDAGNVCQCSLNDTSGTFHVGPPLANGGGTPSVLTWTGPVREMDQSRKRPAPQQIQQGPAAGGPNIETTNAKAKQKMADKILPQRIRELVPGIPGLYGISVAFERKLDQTIMKDNG

SEQ ID NO: 1013452 - protein, 242 aa, Homo sapiens
MALSNQQKAVLDERRGCWAPSTPSTIQEYMHLVLYCFASSQLSTVLSLLYRARYLMLLVFWGRPPRDGAAGQQTSGWCLHGVMEYELSAALPGELRLGVMHASTYGPNGPQWWSSVHHLVCPSLREQTLSSGRPCSTRMEGYTILSRPHAGARTHDDLTSGTAPSYRHSSPDTMHRLWPMHAAHIERRVLPGNGIHAANIRRAFKGSPVTPGTGPVSTLGSESGTCHQTRALLLHFFSGKQH

SEQ ID NO: 1013453 - protein, 261 aa, Homo sapiens
RGVSAGSAEVSGGQQSVAPRARRTQGRMYTLLSGLYNVMFQKDEYCILILGRDNAGKTSFLGAVENPIEQELQGDESTPRSHHHRGPRDIGTVACGQRLGSVFWDLGGQEELQLYCWAQGTYAECHRRSLYSSLTSTDEAEAGMSSKAGALDRLGEPATAHDAAGPRSLDAWPYRAGLWRPCPLKSRDIKHGLQTTATSQDRHGEIAMSHGLRRPVTGKGVREGIEWMVNVCRCGNVHRPAAAQGTSRRRTRAVCPGRLDI

SEQ ID NO: 1013454 - protein, 137 aa, Homo sapiens
MQLAGCPPRILRPVSSIPLALSPGEPEQLKRVHLTPQPQCGPLCTSGPSFEDADTEETSETCLQMTVYHPGQLQCGHISVNKFNREKLPSSEVVKFGRNSNICHYTFQDKQVSRVQFTLQLLKNSTAQFSPFDNKKI

SEQ ID NO: 1013455 - protein, 123 aa, Homo sapiens
EQTRPGAACGITMGDAFHHSQIKRCYLYDFWSVTVLLAWPFGVVLLFWLYCDEGIKVGKAKLLYQVLVNLPTSISRDIAETDGDSEAQIHSLLENPPPGGIMCHFGQSLIHVIQVVIWILHHA

SEQ ID NO: 1013456 - protein, 228 aa, Homo sapiens
SSCGDHGKMMQLPMAPRLASAPGSVLAVLPPIKLHTTSGKMIIRSRLQQQLAREDEGAQAAPGAQLPCAPPVPRTTPYVPAATPGHHVPPSVMHAQSRLARQAAWLHTVSLEPAMYSLPCLPAALASLDCECHVCHVSTSSAVWRILPASRCHRCDVVDGRDSGSRTASGTAPVGFHYACHGTRWLGDAALAHPFPGTRTLPTHLSLHANPATCEHWTPSRRGSLPAC

SEQ ID NO: 1013457 - protein, 30 aa, Homo sapiens
MDPVPRPSTRRAVVTQRMYLLNDMRTGVNQ

SEQ ID NO: 1013458 - protein, 216 aa, Homo sapiens
ARLVRSRFFDRSSRPALTRSSRPALTRSSRPALHSEQPAGPALGAAGRPCTRSSRPALHSEQPAGPALGAAGRPCRTRALRGLATRGQRLWRVYWVPQQCQAHRRCARISRRASSCLPVVQGSGPCCSAYCLEPPHFPLVGLLVRSEPSIEERLIPCSTAPKSQSINPKGLRSCGRTAAELAGSSICNPDCGIPLEVKPTGAPEFWLRDLLEETYY

SEQ ID NO: 1013459 - protein, 209 aa, Homo sapiens
MAGTVGVVWIDSSEAELLGLLGAGLSLGTSVIKYCAPGSHLVCSWPSADLRVDDDLPGALQVEAISCSAFLAFLSEVVGGGQFILFWGAGICPGEDQTSSIFLPAPWSSVTIFLPRRSSGFLVLEGLVPRISTSLGGEARYEVGKLCVTGEGCQLHGVLVRVLDPSLCLLKPLLGQGHDLVCLKQDLGAAPVPCGMQQTRLAEDLAAGN

SEQ ID NO: 1013460 - protein, 276 aa, Homo sapiens
MSAACMTLSAVADDDAAVTQLGLCGLPPGPVLLLALEEVVLNGLSGVRTFALCVMERAMIVCQVHSCAWCDALALPGLKNGGGLLELGDLGLVAGERAKHVDAQDDPAQAGWVKPNPSDGNQLTSCAQLVVETPETERARCKEASAVQCPKEEPCMTPATRKGAQGARGQRTGSGLTTRKGAVGGLEQTENIDASAEVTDQVGQPGNKAEKGFRDTAWTSYNQWNQKGDPKGTISGRTEQFGRQRREVQKQRAQARSEAQLEPNTYTALEQIKKYT

SEQ ID NO: 1013461 - protein, 144 aa, Homo sapiens
AVLVRSLMIGSPVGVWSSLWAPRSQTAAPGAGRRWCLAASWPATRRTSEPSATAGCRRAAGPAGPGARSCPPGRGGADQNNVQHQPPGEPEGVHQQSASPGGLHDQRKRPWPELSVTLGYFFRIKEIKSPEMAEDWNTFLLRFT

SEQ ID NO: 1013462 - protein, 252 aa, Homo sapiens
YWSDSRCIGGGAALYPIAGLRGPQVDEDLLGVPDGPEAPWTSWLARTPTTTQEEEERRYYLRKRLGVLKNCAWLCQRRGQCSPTASTVGLLQMQADPAATTRTLPAEVERIGQHWGLAPNNPTSKNCLMAHQRDSHRRPALHTCAHQVFLERSGLMFLAVGIYALLCHATKYWERYYTACCPRLVGPWALAIVPLLGFHWATTSPGWRQKYHEYSHYKEQDGRGMNQRPPTGLPALRYLRGLPRPSSTASSI

SEQ ID NO: 1013463 - protein, 180 aa, Homo sapiens
LVPVRKFLDRQCSPKPRSPPSTAWPCVPAPPRLRCWRSCASLLAAPPVAPAEAPHLVHVDAARLLWPLLGASWRSTGFLPPGVTQHARLDQYVLRLGTSELKPLPNVGRLSLTCSIKQGGPLDGGLSYQLHPTWDGYLDPSQGATSSSQVELWGILATFPQGHGPCETTTFAPLNNNTHL

SEQ ID NO: 1013464 - protein, 297 aa, Homo sapiens
MLWSSLGSSRIAVDDVFLGHRACLSRSGAQCVLCCAPVFAGREEGLGRPVPVPIVNPNVCCRLILSALADEDAAVTACWPGGAPALDLLPGEGSERLRASTCTGEKGKLGQYIRLVEPGSPAEKGGACWRGDRLVEVKGENVEKETHADRVVSRIRAETQRRATCWWSSPETGRAADRSSASRSEEELLRAPGKRRGRAEADRAGRRGCTRGLATGTIEPRQKADEEATSAAERGFGSRDLDQWTEWDRKMAYGPTTLHKRTRPKPRASTIGAERPQKPREEGFRAPGPRSSIEDGE

SEQ ID NO: 1013465 - protein, 366 aa, Homo sapiens
RRAPKNKMRPLQCLLHSLWHHRTPRSGVDGSASDEESGGTLPPPDYSSLHHCRTQPSSCTPSLDPLPGTRGPGPWCGLSALVHHLTKAHPRPTTEPQAPQPASTFLGEVDQMGMTRSCIECKTEWHKTDRDEDGLMTTLLRPDNATRRILHRAHQRSRHDTHKREKEHIGPNKTRRAHIQDITTTHNTAIHDAKNQIPRDKNQWRRGERAHRTAKTRRAQDRRRQAQRDIESTKGTEAHRTDQRQRQSHTSRTKTEAHDNKTETASHVGKQEKTAKETQTLGELHTKEHNHTEKDTHQGNNTPGEAKQSEKRHEHRRQHTRNSHKQTHSTTRKHRQVRQKTHKAQTPTNTTSTPASQEGTRPTEPQ

SEQ ID NO: 1013466 - protein, 55 aa, Homo sapiens
MWHICGCLMFLVELYGTQPPFDSSLRAGGGQGLYLVLGAIIGDWVDKNARLKSGP

SEQ ID NO: 1013467 - protein, 201 aa, Homo sapiens
MVPRELAHARARTCRGLFEARGDWCGAEAGAARSGGEEPEPVDCCLPAKGEEHVCNSSQESEDGHQIMPLSATNRFLLHCTIMSLMVYIFISRKLLNANTQRNHHLLQRNRKQDNLTSMLTCLMKRLTCLQIALEEINRHKLSIKDLFSEYLYSKIVRETSVRITSSKFSNRYMDSQEQFLTAINKGHRLYHLAMIVIACA

SEQ ID NO: 1013468 - protein, 294 aa, Homo sapiens
  misc_feature (1)..(1): Xaa can be any naturally occurring amino acid
XGCYWSGILRIGSPSHGACTIERVALPWSLAGWDLVPNPGWTQVPVCPVCRCRGPGGAGALLGPSLGRCHGVAGPRGFLPSLLAQSPFGRAELIVRLNDDDGPDPSRPVTYRDNRMESPRRLLCCLPTPLKQELPGSTETPAHLSFPQLTGPPGRYLTTDLAPCIWNRLARYLVSEGSGLGAIEVMGTQDPGNMGTGVPASEQISCAKEDPQEFIALKRLAAPRMCRLQTCKSPEDSRPQEETDCCNPEDSGQLIGNLLGVKLLGYQVPPFDLAHYVWLMSLKEKRKPFNATTF

SEQ ID NO: 1013469 - protein, 369 aa, Homo sapiens
AGLPSDVSGIGAAVAELRFAQMTPAGGCVLAVSPDESRAVPGRAGSCPLCPVVRPRRVDPARNDSLLATLDPAVPPYVKLWLTVVYTVFYALLFVFIYVQLWLCCVTATSGQLPERLLFLLPLLGLPCGTVLFSFYFQRLRGRHFASALLVFWLLYCFPFCACRFFTLKAEMNYVLTRRVDLSNGEVQSISSSTYVQLPVRPFYPGTSPLHQALVIALLGASLPLCCHAWLTSDVGQIFGRNRTGYIGHPLFANFGPLTVPGGPFGRPVVSAGLLLSPDPVSTSRTTPLQNVSLWLTALIPLAELPQLGLLPRDVSRAHFAICTSPSVYCPYRTPFGACLTTVSIASLIVRHHETSPSLGTDARHTLLP

SEQ ID NO: 1013470 - protein, 48 aa, Homo sapiens
MDHVVHGQCATSCSLTYRIDSATFSHYKLAICSSQMTHEMNKQHTTIN

SEQ ID NO: 1013471 - protein, 52 aa, Homo sapiens
MSNRNAEDWGPNVLGRTSEGSCDKDLTHRALTEEKPITTTRDSEGRTQFTSE

SEQ ID NO: 1013472 - protein, 205 aa, Homo sapiens
MPCETSAELRKCMVGSWRYERAAWRGAGDDPGNGNDCRSGSPYLLASSGTVKTAIAMGMAQALGPDYAITAISLADEIFSLEMSNDRGRCLQAFRRSIGVRIKEDEEIIEGEVVEIQIDRAARGTGSNGGLILTLIEHRDGDQSTIWAPMMIESLTKVLGPGRGRDHHLTRLTVQDLQAGPFLHTAPADYDCQWDSQDQVRCKLA

SEQ ID NO: 1013473 - protein, 219 aa, Homo sapiens
  misc_feature (7)..(7): Xaa can be any naturally occurring amino acid
WYWPEFXDGVMTAADSGAGQETKETPPPKHGPTVTEACDRPQTQPTATSPLTSYRWHTWRRWGEGWLVGFQLGCRFAGWGMGPGATHVSPWFSTQPCPSLDIPSGPICASQGVTDQIAFDSPRPSGGGIMNPPPEPDPEPEQEAQSWSRMPELGAPYPTDSIRPPIPNVALSWDHSEGYHAVLDARTLGSIAIGRNEDREVLEEAPEVGKVIRSDEAHP

SEQ ID NO: 1013474 - protein, 48 aa, Homo sapiens
GWYWSRSPLDREPLAEAILAEVCTALSTRRPGGRRIAALRCRPSMTYS

SEQ ID NO: 1013475 - protein, 254 aa, Homo sapiens
GIWRRRSVDMCWWCRSYSPGCGGVAIRGLPEVLSPGCGDCTFPGVEAAGRRTGRHVHVQAGVTVDVTIMMMVGRSCVHAGHVLRIVLERACAWMCARVQGVRMPMFINEAAACHPAWRGVSREEICRGSVNILREILAPPYIITLHDIFENKLDVVLILELVLAGMLFDFLVGEVMSADWMDDGHPVSSSMILGRLFTTLHLYSRHRITLDLNAGSTIMLAGPRTVPKPTELKLTRPSGTRAPKDRGCVNRGFI

SEQ ID NO: 1013476 - protein, 328 aa, Homo sapiens
  misc_feature (125)..(125): Xaa can be any naturally occurring amino acid
  misc_feature (167)..(167): Xaa can be any naturally occurring amino acid
  misc_feature (179)..(179): Xaa can be any naturally occurring amino acid
  misc_feature (293)..(293): Xaa can be any naturally occurring amino acid
  misc_feature (301)..(302): Xaa can be any naturally occurring amino acid
MPAAPGRGPRWPGPVEAPPSPLSWLLSPGVLGPFEPARVGACSPVRRGRRSGVTAVRVPGPCGGRRAGRAGQSPWATVEPVVVGARVSVCVLPLRDSSSFFLSFVLPLVRPCGRSSCDVRPPEFXVRDRYARDVSLGAAMRGRVQIRRVLGGSSYLSGPPLSRFGRXPTHIVFLLADIXPIFSFKRERPIEVARGTLGLALRGPTCALACNGTLRSEKPEVCYAPLSEYPASTLRNLFAPGMLQSFLSRVEIKRRVLYKRATTIVRHALGSYSFVIPLNIYARGLQLSSNGGXIVVRRVRXXFSPRKCSLTRYSQLVIFGIRSALSPP

SEQ ID NO: 1013477 - protein, 292 aa, Homo sapiens
KQAGTSGGKERCFVSSSRALCKSFVSGNRKVLLAKLSATGVVQALFQHTRPSLKPQNSARFLCFRAPGYSVTQSSPRTSCTTAVQVSATNEPDAPARLLIGVCIASPAGVHDTVTTPRDHHETNVTRKKEGRRPDSRDIPGATQNDLVHKTQAQKPYTPSHTREHTREGHKPTPIEHGTIEDSMGPLKVPIPMEKQESNTRRQRGAQCNTTNTAEKRGKTRATHTLETTPYPHGKQDDDKRPQRRMKTQTTNHHQYKGPAHTAHRGNPRKTQYPRSQTVAQHREAHTRTTSQ

SEQ ID NO: 1013478 - protein, 293 aa, Homo sapiens
  misc_feature (18)..(18): Xaa can be any naturally occurring amino acid
MSGWYWSWSYGYSLAFMXDMYLLNGYYFEPCWARNEIFNVKAIYLCASSCRPTPDPSTGASAPVPADPQHPPQKWLVSISEAPVPCLHLSLSDAHALMDGVMCTGVSSTPPVTHCCPRVMPDTGAWQFPPQVKLQCCSHVGAQSPLLGDPVMPGLQQGTGSPDIGPTGTAEWELYMIPNRGQRDLTVPPPVWLAENFTLQEGSEWLCQAPMYLRVATHRLDPETCHGPWKVNTTKDVRRVNADGGMTASLTSCRNQQPPKNARPIDALLGPTTPGPPVSLLTLAPGGSCPPAS

SEQ ID NO: 1013479 - protein, 206 aa, Homo sapiens
MAGGSADLDRQIERAAVADELIDWRAKSRPCALSAREILVEESNVQRCGLAQSQCAANIHGQFYDLKELVQKIGGDVPETNYLFMGDFVDRGFYSVETVPPCCWHLRFAILIASHMIRGNHESRQNHAGLLASYDECLRKYGLGDCVAATCTEIFDYHQACQGISRWQESSCVHGGPSTRLQSRTLVSEYGRIEAEGKQVPQMMRP

SEQ ID NO: 1013480 - protein, 87 aa, Homo sapiens
AVRSGILGYGTSAQWQRGRRPVMCPWCVQILLWLSTAQVWGLTRLMLDRTGGRCWDCGWLPVGVYRLRLVGMELCWHGVGRTGEQMA

SEQ ID NO: 1013481 - protein, 190 aa, Homo sapiens
MHGRVQRFVVGDLYALLIHSRRAACTMIINSAFGMWLTEEDEGELCAAVLSRLLAEDFGQALEQLMIVHSQAVDPPRYPQCTDMMWVDCQEVKKEIPGYHSVSPLEHPEATEPGTETLMPSDAMGSLCNGKSLLSNAVATDCILTFLNVKGPELINMYVVQIEDNVREVYCQARLQLHALSNFDELDSLA

SEQ ID NO: 1013482 - protein, 96 aa, Homo sapiens
  misc_feature (76)..(76): Xaa can be any naturally occurring amino acid
DKPERFDSQPCVLGWESFASGKHYWEVEVENVMVWTVGAADTVSERKGEVLLIPQNGFWSPGDVWKPIRGPCPTHXRGFSLLKESLCPGRAVFLGL

SEQ ID NO: 1013483 - protein, 109 aa, Homo sapiens
MPDERRIPLTRSCSFADSTIGRIHFELPQSWPFPVHATMSCGKGRRPYLEKNTLGAKYPFPLQFTHAHGIFRLKVHRIADTYPPTGPGGKASRLARTYRYVGVPAYLSR

SEQ ID NO: 1013484 - protein, 374 aa, Homo sapiens
MVGILGISEKLPWTARRRRAFLLVIIREQPVSCEAEDARTPDLHPSITVSQVSRGQKAALVLLSACLVTLWGLESHQSTLSRYLVLHLASLQLGLLLNGVCSLAEEHAPHPLQCTGAATWRTVLGLPGHDPIRPLGPCCMHVPSSFYILTIPKCGQAPPLHVWECIASSLGPRARQLNNTSLGRSDGDLATKHEIRLADVVKKGEFIHAWAHMDAGAAWGPVYKHSGNNSVPSLDSLAPEAIQDATANFQTHISPISTTHFSTHNCACPYTTRDCQAMNCPKRRTEWTTLAIPVDFTPQVLSDTDGRAADWPPIKQSRRMDDLTVRLVRAPHEPTLSGPCTCGKFINIVAPKRKETQLLEPGVTVWTLTKGHIT

SEQ ID NO: 1013485 - protein, 305 aa, Homo sapiens
  misc_feature (104)..(104): Xaa can be any naturally occurring amino acid
  misc_feature (164)..(164): Xaa can be any naturally occurring amino acid
SSLRGHRRASSGDRLKDSGSVQRLSTYDRCARCLVPCLPVLVPMPVRHVVCRGPGLASFQLQLSQAGGAHIMLMLLLRRCTPPRRHQSRHAKFALTRPDPCALXAQGPSPRLRPSHARADEHRPNDLTWYAEAPTKRLRRTCRGWQSVPDAEQAYAPGRCRRRXSPRLVETLLRPAVLNGLNQVVCVDVDASSGRDVLVHAKAGSVRYRGATCAKGSRDEREVSEPGENIRIVPGSCHERILVTHAEHMMQNDDQWLRRHKRLAEKVLTPGSLGSDSREHGWKPMPVLQDGAQNLGREVLSLRTP

SEQ ID NO: 1013486 - protein, 244 aa, Homo sapiens
MADRGCPLEAAPVACLMVRESLLSCSLELSEGDITQKGYQTEKGKAACTLYTALFKGIDPSLQADEYEFLGPHKPLALQPNAAEVSGPPAPRDERFRSDCPHLKPVRSSLCAKYKGEEDAMPFQGDGSCPCALRLWKPTPLQNTSSASEDEGSLRRTRATHLHVRYQSQFQRRALGRPGHSEGRVAHFSSLLDIYSLNITPGERKNQTACSQIDEANHRSQPTPLDSGATEKAHQNDLRYRHTE

SEQ ID NO: 1013487 - protein, 164 aa, Homo sapiens
YRDGWVHDQVPFDGMWIDMNEPANFIRALRTACPNNELENPPYVAWGGYGGTLQAATICASSHQFLSTHYKLHNPLRPDLNAIASHRALVNVLVGDTPIFVISRSTFAGHGLIRLATGLGDVWSSWEQLASSVPEILQFNLLGVPLVVGRRLACYLECNTLRVS

SEQ ID NO: 1013488 - protein, 84 aa, Homo sapiens
MSLPNLGVGLTYGKDLSALINGSLRDTKEPQRQRVRGKAEQLRGCKIRHNAPMAWPPTAFVPPPVRTPQDFGHLAPQLRASGSL

SEQ ID NO: 1013489 - protein, 292 aa, Homo sapiens
YGIGLLTCSCPCCDCDLDPDSLWLSPVRPSALAWCVRDGRIELAGWWKEEPLSRSCATGALKVSVWSTGAAERRVAWEDKDEFSDVIYWFRQIIAVVLGVIMGSYAIYEGSLGIAGKRLEVSYISHGIISFEIDGFSFLFPDKAIRCNWTLAAVRSSIDSTGTKREYPNTTRVPYTGDLSWHNVRLQDSYHWTLPWTTTATDTGQSLDSRPPPPGPETAHTTMTDAPDSPCHAPRQQTHQTDTRNAASPRPYPATRHALTSGPPHRRSPANPTLKEERVSTDRGGQTGPEDT

SEQ ID NO: 1013490 - protein, 118 aa, Homo sapiens
SGIAAVGGPHLPSGAAQWFLREGLLLHLPCAASTFSLLFTAVVERFATMVRPCGLRAGATKTSRVYGFIGLCWLLFRACMEDRMTFDWLLELPCAAFDLKIQTICPSNPSAYILLLPG

SEQ ID NO: 1013491 - protein, 419 aa, Homo sapiens
GYGIAEGVRAGSQGGVNLLDHEPVGFIAGRPAGLCSGAGASRLAGILSAHKIIASSPEMNLPTVSCAQEDGCEPDTQSNKETVKHSDVLFLASEATYHPRSSLDEIGADCAKAKTHRRISVMPAGVDQSALDGEKNACWTLPDQDPKCLIRLQCTNKHLMVDARKAANKSLPAQGATPKCHLRKATGTGAQPHLGHKASHRAQQAKRPNLSTRSARAQNSNEPVGNGRETRGTSSRTQPQGTPGNQEDRYPDEATGGRRQLSAQKRQGGSSQDIGTPTATGRPHAPNTDTSGGEHEGPRRDSEQHTGTKDKPHTKRQQRETERTTRRERRAKRGGHTGMSEDNSSQEEGGKTQSETPNAHDGSRRPSEDSRRAWNNRGNTGTQTRETDEGKAHRRRPANRTGTSRSERQEQSPTDSWTE

SEQ ID NO: 1013492 - protein, 44 aa, Homo sapiens
MGSVGDNLPNGACALENDISESDRNAVLHTHNTLLCVAYTITAI

SEQ ID NO: 1013493 - protein, 302 aa, Homo sapiens
MSPPRKSSRWRHYVRQKDQGGLKPVVEMDGDEMTLYFLAVHHARSIIHAYVDIQLACILDLSAPKPGPERDDAGSPLHSCYWPPRKYQCGLYDVCHPMTRLDSRRMLLGSSFNACRHDGGHSSRKLGRLYHAETIQWTAWTTDRSPAADHDLCRCITCITSLHVHVCSPYDLGSQAGPAKLAPIMGTVNIAAALGTKAYAHSHGPPREGFSSQRPIEPLFNSELDSFFTTQLRIISIVPVKTRCVLRGGLRATVQGTSPPDTIACPDAYAHATTTSGARSHAATIGATVIQEREPRPLLVAT

SEQ ID NO: 1013494 - protein, 102 aa, Homo sapiens
TSPMIDVKMMERVVEQMCITQIWRGNLLGRITREDRAMVLFSSPPDDPPDLFPHLPDSGMRKVFLFVHHLSNLLTKLEGGGIHLQSLYSGGVSHLVFSLGPG

SEQ ID NO: 1013495 - protein, 266 aa, Homo sapiens
RDPFTYSDARIQCGPGLESCCQLALLGFCSGASSLPARGPDRGFFPGLICAARLGAQKEHGWLLWVLQLRAGVTAVAAVMLLSWQRVAWDLLVPASMHRLSSSDHCRLNEWTYLVVLLISHPPSDFLFNEMPGPGAERDRGSMPDDRCLEASPHDYTMVGPHTTIGNIHHGDPHKYPSERTHVSTHQLQRGHQNPKTFQCPKAHNGLLGHMGTYNPPLSTSPWYPFPWRAPITGTFPLEDHRDPAFTQPGRHIHTQELHTDTKAYA

SEQ ID NO: 1013496 - protein, 184 aa, Homo sapiens
RLVRLEYGMSGPAMSREGAHPGSCSSGAGLSPAPAPLTVQPLTGDPILRGSALAPPEAGDLTDIWSPGWMLQACKMKGFPFCPPSHQKTWMPYDTGSIPTAKRTQYYARISAVMGEEPKRTQINMGTFTISSKPPDATTRSVRRSIYDRRETDLHRGRIQRMPLQPSRVDFVSHASIRPTTVQA

SEQ ID NO: 1013497 - protein, 483 aa, Homo sapiens
MPPLLSKHSIPARFPWLAARAFSTFAFSRWGPQSNTRATLGSLYHLGSAALTHLYGLRDFAPPGSHRTTPNFLTHYGTHTTTLRAIPESGPHSWRPGTPPIRSNVSGWQSHIGNVPPVLRSYSLVNQRKRGPQTPFPQPTAGGHTSLCAHPFLHTRFETELPGLGFYIPPIGIRPKRTVCAILRRFRRHQQNSISWIDKVEIVNTAFPAILAWHLPPKTGLYQTLVPLCDADLSLPRGLAHNAAAWARERKLSGPPVVPAHWPLYAHGHKFPRYRSFHTPTANSQRTLALRVKSQVVHFRPRLWSAPLALAARPPLLVVRVSKPPGSLAIAWCAAPGPIVCALRAWVQPLWAATPLCPCPSFALSPYAVVQTSDNALNAPESSGSYPALRDHSRLGLDHPFSPYSDFRYPPPDSVNSAPVQSEVAHFVTPGSPPVFFPPLTVARLVGVPTLWVPPFVSPAFLRTFVDAHVQCRRVPCAFASAP

SEQ ID NO: 1013498 - protein, 128 aa, Homo sapiens
LQVRSGLPGLTHAVGFYYGELNGQRGLVPSNFLEGPGPESGSLEFWDISSRESENEEEKSPVLDGASERHDPRITIQGPPVPPGWHCALSSGSSSRTKLGESQSIAEKKQGLLAKAKELLKRLGSRKD

SEQ ID NO: 1013499 - protein, 124 aa, Homo sapiens
RGGCSSGAARQSTLPCARDGWGAAAPLTCWMLNEEACLSLLPTCPKACCCPAGKESEAVDSSETPLSEALRRPVPPRDNVWLGRHGRCLTTVSVVNDGQAAASTFPSHDPVHRQLTTVLASEGT

SEQ ID NO: 1013500 - protein, 150 aa, Homo sapiens
SCRLGLRDGTAAKWGSACSTWLLGLQGPAQLILSLPSPPPCSVSLRWCGRLCAYVRRLLQCPVRPGVDWREGARQVSARWRVWPDDPTPADPRALIPSPDPWLRTRVLNPELCIRLEFATWPLLIPPVLPVGPWPALFAACCLVEQGFTF

SEQ ID NO: 1013501 - protein, 393 aa, Homo sapiens
RNTCTWPCYCFASSQLSTALSLLYLLPCYLMLPGVLGKTTPQHARLLLPTTPVLRAAPRVHWTSDLLPAPSLHDLLLCQSPPHLYHRAPTAPLLALAPPAHPPPLAPDAPPHHPHPPSTFPALVPPALPRTPPTALTPHSSPPTPLPCCHPPHLTKTPPPPPPPSSPPPSPPPTPPPPPPLPPPPPPPPPPLLPPPPPPPRRPPPSPAPPPPLSPRPPPPPCSPSPSLAPPASPPSPLPPPSSPPPPPPLPPPPPPHHPSLPTPLPPPPPPPPPPPPPPPPFPPAPPPPPPPPLPSPPPPPPPPPPPSPSLPPPPPPLSPPPSYPPHPHPPLSPTPPPSLPLPPSSPPPLPSLPPPCPPAPSPPPVPSSHPRPSRPLSPPPPPPPPPPSRPSP

SEQ ID NO: 1013502 - protein, 239 aa, Homo sapiens
LYGSELRDGGGTAVQPEAPQSPSTRCMRSLLLPLPLLSGAPVPRSCACAPGGPGRGPDLVHVDAARCAVAPAALLEEHRLLPPAATQPELTSTSSAGTMQLNLAYVGAVPHRRHQGRSGPTGCWSLSATRGSTGRGLSYKFTQLDGYLDLLTEEASSSQGMRLMGSARANSTDFEEKQQVYEWKDLVSNLDRTIHRWYGLRACYQVELSRRGMRPDPHDSRQTYSNNHAKGFLNLLTMP

SEQ ID NO: 1013503 - protein, 132 aa, Homo sapiens
MTPETRLRGMDFTSLVPTLTSGMALTVDVDREQQPMRAIRYHRGKGINQHAAIMGGLKGGRRAGQKHKGPLDTPGALEDPNSVGHSSGGTRADGHCVHCQRDHRAQDPAETPSPLRAAWWTRTQATVIQGDT

SEQ ID NO: 1013504 - protein, 303 aa, Homo sapiens
  misc_feature (145)..(145): Xaa can be any naturally occurring amino acid
PGTAPDYRESPPGCPEPAAGPSDPPVIGDEDDDEELLRWSLRITEANLTGHEEKVSVENFDAAQGAGALVSLQARCSLVRNGGRCTTLGKLYCHEGAAQWRLLVHAAARDSNEHTAAPMRLGCWTARAPVSPSVVTAAATSFQTXCQCCSLILDYCERRGDVHPPRSSCHVLQGWLRCACSGGEIVLALELPAQKLGIIYRDLKLENVLLDSEGHIVLTDFGLSKEFPDGGSKEPDLLLLVAPSRYHGPEIIRSKTGALARLWTWLDALAILPLRACWRRASPFTLEGERNTQAEVYSEDPEV

SEQ ID NO: 1013505 - protein, 408 aa, Homo sapiens
RLVPAPGVTGICAAVLGALPELGGRWQPMSKLREPMLELPRRSLAWRPPGPEDEAKSAVPAPVLLPYAASPGLSTTLTSTTLWQCPPGEETNWTQWQGTLCSALHPPGTLLSMHGAPAHEQHTMPCMQHYMEEAGGPGGHGNIEIHSVETAGPGEVMGLGGVQTAVPCQANVILRQPSGDNINGHVTDVGEGSEGPRKNGHMKGGTDRMHNKKGMVEDPRRKHLARHRKTTGTNKEGTTKKGKKKETEPKKQDEEHKYRPNTDARKHTQRDTKRETRKERQNTRGDTQTNHTKTRTRRNTRREKEAQHRNERENTTTHKNEGTEKRKKKKNRSKNRQKKRKSQTKRKQQKARIKRKDTETTRKRENDENRRETQEKQHTKQNKKTQQTPNKHERKKKEHKHQHSKHKR

SEQ ID NO: 1013506 - protein, 283 aa, Homo sapiens
QLYAPDYGIWLPGGRSRTVVDGWCGRGPRLCSAGPFLLCRPCGTSTTVEARELGPICCLPMLGKEEAAAKDLIGGYRTECDLHVAVACEPLFPCAFWEVIYGSHLQGNLSLLSPNHSLLPPHLLLNASHWRLPAPRAQRVTIVGLYLGLCVSEGSWGTALSCTSSSGTPNMKTDTNIYIVKPWPLCGTLVHADAALPGHGHSFLGLLGSLRNALCKTVHCHMTTTNMFTKNLTRYLANDVVGFEECKPFLAAPSRLRSKGSGRSEEKGPRLGKSVPFLGLALM

SEQ ID NO: 1013507 - protein, 207 aa, Homo sapiens
ELPGYPRPGGYHQLHQVVVLGRCCYPPPPACPHRADNVATYAGQFNQDYLSGMAATCLGHLEEPTCPTCTPGAPGAGYPPVPPGGFGQPPTAQQPVPPYGMYPPPGGKPPPGCPHIDIPRSPVPGQPCHTPRTAAPGPTWAATVSYPWSASSDTPWAAAGSANYPGYPGSGTVNPEVTPTKIWKARNITDAHGLTHGEMPRTGKGKE

SEQ ID NO: 1013508 - protein, 268 aa, Homo sapiens
MNKPYPKSRFCRGVPGEVVEDAPALVGSADSAVVCDSPRCITYPILLDAKIRIFDLGRNKGEKWMSFRFVATWCQMNMMQLSSEGKAGFFVRSPPSSSFACLPVNTATHIATALELGVDESMMPYKIQSTLVSPELEIVSGECFSIIFSHICCFAISAYLALEAVRILCPLSTLVNTRCGKEWLPYPGVGSHPFHVIRIKQDVVLLLGLTGSKHGMEVPFGKPQGTVARFHIGQVIMSIRTKLAEQGGMLIEGLTHGQVQVSWAQKGM

SEQ ID NO: 1013509 - protein, 275 aa, Homo sapiens
NWMRASLVSSGRNCYPSPHPSARRERAFFHLERHCGLCSLKSCFTIKKLYNKERKQKQKRKNQKKKKRARRARRPQRRHPRGAQNNQDTPGFCCEPKGRHQIEEETPTIITTTGKQSHQQFTQTMNQIQAKTQATTTMREHLRTKGTPKNQQESRRHKKKGTNTRPHTQEKISNNTPSYLGGANNTYCTREVRGQERGEYIRQYGGGYTPRTAPADQDLLTTLRQEAQQRERSSIERQHNTPESGTVTNEGQPTEPTSTKKTQAPRVRTSFAEDR

SEQ ID NO: 1013510 - protein, 195 aa, Homo sapiens
MKAGLEVFLLVSLLLLAWGYVALVAHPVMPHASCHLMPSPLRLCYFRSESLSCAFPEDVIGTMLAIQTSHNVPLCVAEALKNPILPGCHDPGCHDAVMAPMTLGCLDANELDASSYPQARSADGPTTSPHRLPRLGTIWRGFTPCRQHCEKRCACSLCRRDAEISSGSHLIMAPRGMAQRRLTLPEAARHSTMAH

SEQ ID NO: 1013511 - protein, 125 aa, Homo sapiens
MPAEKQMQTLNSSASPFNHSYLYLSFSVHYAYCFEKHGYPDEILHVARKLHTYESSQDIIISDRYWEHKMAYQSKMAFLSFWIELKPSLIPGKVDDPGLDNQDIEPAWSYKCTGDGNNANVGPTL

SEQ ID NO: 1013512 - protein, 121 aa, Homo sapiens
  misc_feature (67)..(67): Xaa can be any naturally occurring amino acid
VDEVPDIELARARNLISPRMEKALSQLALRSAAPSSPGGPSQGPSNLAWGYTPNQANPGLGMAFVPXVLLRGQICDDHRDRDDNTGRQTWVTGYCRVDVFEQLLVSAVDGMCLYTGNELCS

SEQ ID NO: 1013513 - protein, 63 aa, Homo sapiens
MYPGFRRCLGLVFGFVAPVPWTVAVSLRACPMPGRSSRRCLGPSGPIPSGPRPAVGLRSGLPV

SEQ ID NO: 1013514 - protein, 138 aa, Homo sapiens
  misc_feature (82)..(83): Xaa can be any naturally occurring amino acid
  misc_feature (99)..(99): Xaa can be any naturally occurring amino acid
FKTVHSHSNHRSNNRNGWSGAPGPCSVFTRIRLGDLLKGVSRSYWRDCKILVKDQLGSEQEVKRDRVSMQGQSTKKPARFTXXTYGGISLNNVTAWNMXFVTLGACCDTLTHNSGNMTLGGHRFNVDQCDALGPTQRV

SEQ ID NO: 1013515 - protein, 214 aa, Homo sapiens
MHCPTHGPIDARRRLERQASSVCSQWHSELRRSMCHSSNLSVTSAVCSETVLWNATSIGWVGWSQDPSRWHLLCKNMMPSSEDERRSVMTSCAVQPLAGGNDGWLLSDKAPAIAGPASSRASFAGVTHDEPHGGRGLVIDRVLRFIGCDLLRFPQGAWDTPYFYISWGPERGPKTTKSLQQVHPAFTLINQKWYYGRHERGPGQGLVSCSVALV

SEQ ID NO: 1013516 - protein, 147 aa, Homo sapiens
MDVLHIDRTCKFSMASLGNSPEALAQMPEASTEDLHCLAVQECTCECLDPLTSKRGDPSPAAIPLHPWAWFLLPRVYSVVPGWLFLQRVKWAVPLISLGYCPKGRDCSLTNSGWSLFLVSIPVIGCSSLVPLIFLGDYRNPVPVLGP

SEQ ID NO: 1013517 - protein, 328 aa, Homo sapiens
PGGGLGSGAEAVKRAGSARRSDLASSRAASSPSACDERLRPSVARRRPPSSPRHRAHPPQRLRLSSVAGASTAACVNLAGILRCSAAREACERARPTMTCWCPVGTDLLLAARVADEWTGPSPFKSGSCAATVHAVPAYVSLRGAPLDVHERVVGRSQGLCVLREVQVRPINHRPGTLRFRVRQPDRPFCPSFHTKYGHDWAEAQKTAAIEGTFCDPSSRDTQYILQTDNQDQSYEKHNPLANYQFPGGPAFLLGTGSRDGPSQDQFYLARREFRVSYTRLRAEGTAHMEESYREQNKGAYLREMRIRDLWPSQRTFSARMKNDLQVT

SEQ ID NO: 1013518 - protein, 70 aa, Homo sapiens
MAIEQIRQDGRECTCTHPSQETCRNIGTLERVPGSNAGKNSEKGAYKTKIAQKPMYSQERGKNTKPRKKN

SEQ ID NO: 1013519 - protein, 102 aa, Homo sapiens
MRNLCTPPRHGAPALITQGFGDSGRLFHPTYPNYLNLFQPTAPSRLGVAEPEDRRNNPPKVSQEFSSQRGRLQTGNPCEDNSVGDGPFLREVPWFLTHWTGT

SEQ ID NO: 1013520 - protein, 103 aa, Homo sapiens
MGSAAAAPALRETSRKVREGGCWGDSPPTIPTAMGPSLHTPSVRLTIGGARRHLQIPVAPLARQPQRETETQAHSRDNTLGAARTWLGGRGPKTQTMKRIAQR

SEQ ID NO: 1013521 - protein, 208 aa, Homo sapiens
MAAEKQVLMAAAAVAAVAAAVAVVAAVAEVEADAEDDRPYGRFVGNQRIGDSVGFVHSSDYSGNPGQLGGKQHETVCHDGYWGANVEPAMTAARSYDRSYSQLSTSSVQIDVDLRTFPHARETKHVNSCTDAFVVPRFHVLRTLCPSLSCCHAWDVFDEYTPGERCAAHVLLLTPTGCVQASDPPVMAVGFSTCLVFGPTCFSSVQRV

SEQ ID NO: 1013522 - protein, 108 aa, Homo sapiens
MSNVIFFFSRKANGWRGSTTRFHSSNLCLALFLYLATRDQHAVMCAEGGIGKSETANPSDCPSLLLHRPPAFPFCLLSPCFSPLPLSLARCLDFDDHGYNNYEFWRCH

SEQ ID NO: 1013523 - protein, 207 aa, Homo sapiens
MALVALVAGARLGRRLMLGLGLVARALDGGHGCSRSRREAAEAEAEVPVVQYVGELRMPSCLIAVFVWGFSFSRGAWAVPSFVVPSSWALGPRAWLPQNGPALIQPVPYRLELEQTDFICCLRLMEFNTAVLIRLRMLRKSGWMGRQGKILRNMEYKQEPGKIKKMWLRVCVGRASTGLPLTLERTSGGERVMRVSMRAEETNNIGC

SEQ ID NO: 1013524 - protein, 170 aa, Homo sapiens
MHLQHLATLLYPMINGTCLALTCRTTPSRSLYFWLVLTALRAFGVRTANGFGRYGSLPASLHLAPALCGRASQLVLLFLLRAARLAQTSRALGRPIQRPVIPARSRFGVRQRSRLRRCILGHADPTPTHFLPPFLPVYARRLPGQAPPALGQGGRSLSAESIRLPSPRVS

SEQ ID NO: 1013525 - protein, 280 aa, Homo sapiens
MQMPISTEEFFGPLCWCPLAPNLSGFAEMLPLIRTPRLQDARLPGPARPPCSCPQPHSLRARGRANRVRVPGVRRNRCRVPRSPKSGPQAFITGEPGVIATFEGSFPTARFFPEALRETPSGGNIGDRSPEPQTSLKDAQVRLELVRVCPGAVLPHLWSPPCVALPRRLSLFTIRCAPSLTSVHVCACWAHTRVVLCGWAPWVVFPPESSVPCDDWLVVYASHEFDVVDSNIRKVVHTSVRCLFPANTSILAHVWVVTYVGCPPVPPGRWCAPAPTENIL

SEQ ID NO: 1013526 - protein, 207 aa, Homo sapiens
DGPSRLGDGGAISDRPSPGGPHPHPGVPVVTQTCTNTRLSDGTLERPRAGGKTIRLCRTCSGVKRGRAAARGRCCRGERVTHGRGGRRSAKRRENGSHAPISAIRENVTRAPSAHTSGDRYEKRECRLQDGRDTTRYDWDYEDKIHTPKGARITTREKTPGEHGPRHPQHEDQITQTMRRHRSNHCEDWIRPSTEAEQGNRHLPPRV

SEQ ID NO: 1013527 - protein, 475 aa, Homo sapiens
  misc_feature (49)..(49): Xaa can be any naturally occurring amino acid
TEPRYLLRDMLLSSGCIMDLWWPPNMSVTCLCSSRDIFLSIVRPVSRGXDSHRLIGDNVSATKKGLDVTTPVYHDDHSSPITTGQNHRIVRTITWLPRYDVLFTTSRCDLSTSIARETHRKPRCRVRLHPINKEFSESSASWSLRKYLTLDNAVGTCTTMASGKLPQCWVTSMCPHTCSFALQLYSHSSWRVLPCVATQQTHSISLSVGYQWPIPSNRCPQDFTRAYHSFRMVLMEKPCGVVPFPARKSGVPLAGPPGSAWVGFIQGMSPTLVLTLVLRWANPGGILENLLPTFVYAFHVVPLGMESYMSKCMKGRMGPLVPFATMGTRGSDSRECTSFPAKRGVKIPGFPPNSPKFFHLWIRQKTHFGGLVPLCSKGGHARLNPPILAASGSLSRMGGSLDDSWATPLGSFPNAYSLVCDVSWGSYATTHLRLVFGGASAQTWHSFLDVGTHWCSSGARTPLTTAPPLCTVAAL

SEQ ID NO: 1013528 - protein, 266 aa, Homo sapiens
RRGRVRIFGVIFHSQCWDAGMSWAPWDLGVGPRPWQCCGLPWALGTLPCEAVPGLGVPVPGLVERVPTASGPVARCLESVPGGMCGPQWAWGGTGLECPVACVACPPPTGALRSCLCLCRGSVCDGFSLRLEKICGPGFFSEGQYKGSGTDHVRWPSQWLLEAMNEAPPVNRRATHYWEVHADETRLRGTPNILRFIGSRVCNQGHACIALTEYMNRVWTIGTQLAQAIHLKPQCTMARVQELHHGHLRTFAPRALTSYLERSKEG

SEQ ID NO: 1013529 - protein, 261 aa, Homo sapiens
GVPGLRTRSGPGYRVGERLSVAAAMRRDVRILLLWRGPGGEDVADPVPCVGEEYPEEVPPRAEEITIPGGRTPRRRCLAHIVDYSEAEQTDEELRGGDPKGKRGVLWVYDVSERGQTLRRIRKEGGIEKWMKWGEHKTVDKRMADRYLDGEKKDEEHSWIRGEMQWEGAGGVRHKISEDAREQPGRDIAADDHEAIEEVVIEGQQEKHRRKGTRDHRGKAGKSNQNTTHKDEDKENMQNKPEKGHNTDEEGTHRRNQRQEK

SEQ ID NO: 1013530 - protein, 129 aa, Homo sapiens
MGCRTNQTDTQSKHEGRTDRSNTATHAGRRTPTTNTARTEHRGNTDGHTQQTGAKHKTGAAVTSKAKTAKSRRPETESRMETKKGKGTGTKTAEREQQGAPGGHPPKQATAPREDHTREKKAKTKTDQE

SEQ ID NO: 1013531 - protein, 281 aa, Homo sapiens
KDGGTEGRTPPAHADAQSSARPPSHTHWHRHKQGHTQTHAHSRAHPPASLPACSPAPGARSGRVDDLKLPSRPSFISPACFIAEKASCPGRWHPSPSRHRWGMNYEESQDVREENHAADDSEGGALDMCCSERLPGLPQPIVMEALDEAEGLQDSQREIAAHPPPYAEPQIQLRSHQLEALGSHSLTVKEQACACSLPHSVLRCLWGALVQADMATSGSTELPTNSISIFCLTLLKQLETPKHWLNSGDVDMYPGTDAGSYLVPCALVLGTTLVLTLLVGH

SEQ ID NO: 1013532 - protein, 188 aa, Homo sapiens
MQKKSGRERRRPPPDLHRPPGGHLESPDPEEAMATSAHSWPQGAVLPLPEPAVSMSITDVGGGPTWGSGCDPSLAWGQKVSEDGLGPILLLTSQTCAALIAENMPYPVTFIQEQGCDDCNGLVATWSTDGQAQEDRKLLVSGHTHWTPDSARHRKHTWNRDWRAKRQLTDTGDSYRQLGIDPTKDTPG

SEQ ID NO: 1013533 - protein, 251 aa, Homo sapiens
MALAGLAVRAVDPLPRSGLRVPAAPPALACVCPVARLRACGATALCVAAGLRSMACGVTRGSGSSRAVKINDRVKPKTFPLTLVAEQDEWDATALCEPGPVRRFSVTKIVEKSLCPFYVEKTFTVNVPRELIVTCPSTFSIDDVFRRDSIIGEDVAIHEVSDLQKYHKQVHLVQLQHVDADSVKCSGKVHLELRLSEVIIMTLGSYCHKARQRIVECQGLPIVNGQCDPYASCDCLQEPFRSEAKKTKVTM

SEQ ID NO: 1013534 - protein, 293 aa, Homo sapiens
MFLSFEALSTKHSAPSLPHTLHVLNLLTPPSTRSAIPHFDPIHPHISHQHWLQHHSRSSSPCSSRVNWGTSATTNFDWFNASHRNVCRDQAFATPTLLLPLKHGPRSLPNTCPRIIRHSRPDHSKQPTTRPAQITTRIAARLSGVLPHPRARTDQRKIPLPHPRTPTPPTQHTSRAPVQHNETPNPHTPIARATSDTKRPANQPPLRTRALHGEERNPKAHPPRETQRRPDRDSPGPTSQDPPEATPARNLHDENAPNPNPASHAGTRHTPREQRGRAPSHASQTPRARPPAR

SEQ ID NO: 1013535 - protein, 74 aa, Homo sapiens
SEKKIFIGLIPHDQVNFVNGILAVSLTTSQRGPASEPVSMAQMFLEHAARTRWSGVKSEDDLCIVHGFHLVTLV

SEQ ID NO: 1013536 - protein, 286 aa, Homo sapiens
GLRDAPSGLKAVVGEKILSRSYSEGQEGWGVEGAYHGSPKTCASCLPADKMSDILAEGITIVEDINKAAGTHSQSVRPFICWDPTEKSVQALIKDVPGDPDISPYKADHIFFTEHTAPSPVTDDARPDFSPGKRMVNDRRKGDSTPWTKPTPKKDPRDDLHASKRSPKKSIHNTTHHNRAPIPEGQKGTHATGSDNSGRDGTRPIDKKLANRPRCPPHTTFARARYPQGPKSGVHQATGDPHDTEPQAATARHTRPGPVDTRQRDSTLHRARSKPPEHANDRTQGA

SEQ ID NO: 1013537 - protein, 135 aa, Homo sapiens
EGVKPPGAIGVVTHDLSYWLHWSLISAPLPLESRPEIHVYLTTRVTVGVVAVLVTVRNAHDGVHSGFPELQAITPRGRMCTDRVEYHRWRYKWVRAWARLRPVLSARAAPSSPPHIGRRASSTWRTLYGVPPRTR

SEQ ID NO: 1013538 - protein, 243 aa, Homo sapiens
SEPYCGGGETEGVLASPHLPAPVRILEYAPCLGSWAVPSWESLTGLKTKELENQKLGSQGGGNVIPGLRDGSYVTSSTRPLEAPCSSCSCVSCGALSFSLWLLSCCLTVPPDAWLGAWTSPPGPLFLRYGVDVWMWPCGQLPCGLPYHMWRQRISTSPISGDYCGRLCGHSSNGLLTSGPWTHNSVAIYRGKLRSGIAALPDGPVMQRSRYSPFAPLLAAAVTCLYMLRLQGHTTWVTAPWKF

SEQ ID NO: 1013539 - protein, 331 aa, Homo sapiens
RKGGHKGRARQYTSPEEIDAQLQAEKQKARKKRSKKKVEMGLQVDPKKEKKSLDSDESEDEEDDYQQKRKGVEGLIDIENPNRVAQTTKKVTNWIWTGQRSFRGENETEIEKQKAKERYMKMHLAGKTEQAKADLARLAHHPEHSGTDGCPERHGTSDNGTRNNDDCHTRHGKRHCTSLSLTTYPATRGTRRCPGTAAALPRTSACVSPTLCPWRRCTRPSMARSPPMACGRPPLTSRHKKLDRSELTRAHHAHTARNRHTPTTTNNCHTPTPIPEHPPNTPHAATHTTRPPTLRDGQRTTPTHTEHHHPDNNSHHTTTTTPRAHGQHDPR

SEQ ID NO: 1013540 - protein, 95 aa, Homo sapiens
MCTPLGVLINAATILGLLFSRREKYPPRIIVLTERQILPKEDYSTTKSSFLVKTRSPVGAQMFSNQDDGRQTTGRGPSHTAGGELCGNLFLWWEP

SEQ ID NO: 1013541 - protein, 313 aa, Homo sapiens
SSCNARIRDKRALPLGRGKQSLCPSLSACLSLGMDLPAWKLHCPWSGLPAPGEHRQQHIGSEAVAGRQQSDAPVPLACRLAAGPGWCCWHHVTQCSPWVPHVYRIFFTELQWEFQASNSENSWFPSILTAVLPDGRAPVQHPVGRFGCRVTVMLGGVWQPGHCDSPSYPQPQQIYFTAGFHHMLRGMCFSSSQASAGAGLLTLSRGRVCPRRCLDGRLPGNSASGRVPPIASGINLGVKGTSLVLRRDLLTAGSAGHTNGLWHQFARTTTQLDPGPFEYTALVLADECGHPGQLDSRSGANTVLRVDLGVISP

SEQ ID NO: 1013542 - protein, 135 aa, Homo sapiens
MLSGACALEWHGLGVSPVPASKAQDGGLLCPRWSQEPDFPRTQLGEVSHLVERQIPRSKTGGNRARAKYPRFPSTLTWAGVWGCWGGEDCPSHPDRHLDCPQSEILRQGRKHLGPLQFPQSSSVPKPLPVCEFLL

SEQ ID NO: 1013543 - protein, 107 aa, Homo sapiens
MSLSRDVIPPSAVWVHLTTERAFSPTQPSAAYDSEEWHFPFLVVVSARVETLLFSVSLLVEVSCVWESPWVWREWQVHVRRLVVSTLQAARSFALFSQWASRVTTKM

SEQ ID NO: 1013544 - protein, 183 aa, Homo sapiens
KQACTASWSFLVIDCRALPVALSLMPLTGRVWLDGSVLLNCGPVLSRSCPAVVSPRLSSPLPCLAVACGNGCGVLDPCALTSPVPALPAFLLLLGAWPGWGPRDLLADSRSAVCLRGGFVDFAGAVPPLTLLEQCLLGVFALVRLALVPPGTVALAPSFSGGAGVIGELGPGQCFPGPFVGPP

SEQ ID NO: 1013545 - protein, 246 aa, Homo sapiens
PACPSHAERSRSPNALSPRGDRAEPSSLLTPRAYPRRPQPLSALLSAPRPASLALCPMKLAAMIKKMCPSDSELEYPGQELLRMVILGSSKVGKTAIVSRFLTGRVRRTPYTPYLVEDVPERVERSTSIRGEVYQLGHPRTTSVLTIPFPAMRGLSILTGDVFILVFSLDNRRLLRGECTRSQAADPRHQCLASYNKTKENVDVPLVIWVNKGDRDFYREVDQREIEQLVGDDPQRCALLRDLGQE

SEQ ID NO: 1013546 - protein, 391 aa, Homo sapiens
KWLPGCGRTTRRRSRVLQMPGAGTPVASAWPCIMAPTHGTLPHRLPAGGWPALACARINPPLLVLVLLWLVARCSSCSSQSGAYDSYLCTEPENVTNGTVGGTEEPGHEEVELDERLAQLPGPGRDAKIKAYTVGSITRYRCHTHLTPWDNRHGTKYRAPEEAQCKTGTEPCLRGNMLALIAYGASKTNGYYYDANNLIRPGSELAKGGDEKYRPIQLNKTNATNNVNERNQYGIPRINMPLERIRGSKRRNLQTKGHTNKTRENTKDTNNIECIEEDNRSNRDESHQRQTKGATRDMENPREQMRKKYTHRTRNETIEKHGSTTLEEKQPKETTGKKTEKGEKNRKEKNEEQKRKHDKDNKTENRKKQREKKQTNKQRRRKQREKKREQP

SEQ ID NO: 1013547 - protein, 243 aa, Homo sapiens
NLGMAVPRIAPSMTFRVCGWWGTVPRLGAGVGLRPLWSRRFWRRESIETTNPRNKELDWASINGVLRAAQRGLCSGPPTRTPRECVAPQDRSPHRSGRRSSALTGAGNMHEELRQRFHGRSVASSDILNELIKVVSPKYLGSRTSEKCDRTRSWSSSTAGQWDLPDEVENLQRPYQDAKRRQGIVKVRAQLPDDDKPFPFRPPRTKNVIFEDEEKSKMLARLLKEAPNAEEPPGSRIGSIKEM

SEQ ID NO: 1013548 - protein, 207 aa, Homo sapiens
MTYDTTKYNTMNHEHTHTPRKEQQGTKKEDTREKKRQPARAQTTRKRRQEGNKKTATQTGGKQGKNKKEKKKTKRTTKQKKTTKTKPQRKETNKKATPDNKKRHNQEENQRGKHRRKKKHKEKKERKEKTRKANKRVKKRERTTGEKKTKQKNEKNKTKRPHQREKPRTKQSTHATDNMIDTKQTENKEKTRHKSDEKTQKQREEDQ

SEQ ID NO: 1013549 - protein, 271 aa, Homo sapiens
MAKGDGGQEQAVSCPICGRSLQPLRKKTQPELSALPREGPTLHLAGWPEPVLPVTAPEPREARVPPMLADGDGCRSAPVAPPLPCAMTTLPWVPSSRSPRCGGPWRQHSWLPRDGVGLGADGPVALDAQVPGTSGLGSHAGGGDHWAPREGPPHIPVAGLPDMEPLKSLFLKSPLGVMGMAVAAWEWWGRWRMAGLRGSPSGSGLMPTTGVDNLFDYEPSGQDELGLGTGDRVRGAVPGTAAISGDEGWWAGSGWLATVGPLPVQTMCLGV

SEQ ID NO: 1013550 - protein, 116 aa, Homo sapiens
RDVDSERTTMVLSPADKTNCRGGWGMVVAHAGEYGAEALERMFLSFPITKTYFPQLRPEPRLLPRLRAYGPEWWPDRAVPYACGQHAGLTCPTRCPTLSDLLAHKLRGGPGQSSSS

SEQ ID NO: 1013551 - protein, 232 aa, Homo sapiens
MPYANQGTVRITELTDENVKFIIENTVPGRWPTSIRRVFIAEASHNSHVTGLQIDARFLSPFSERIHMLTVLVIEIPLYSVMSIVDNACSTRRGLRHVTEFLRPELPLVEVHASLCRLQLNDHDAELLSTVRRCTLILAGQVRLGIDIACVLFPVKPQINLMRPIERTCVTLTAWTFLQLGPMSDATGAIGMAGGTFPQAPIVPVNGAYLRPSVRHLSQRIVEWPRNVVKRR

SEQ ID NO: 1013552 - protein, 234 aa, Homo sapiens
  misc_feature (64)..(64): Xaa can be any naturally occurring amino acid
MDSPSLRRGPWVLGAVRADHWNLVISNDESCQDRSRRSEEDSSRISLAFSSVRPFLPTLLPGIXMRRAPSCPMPCLTFVTLVLCGPCLPGARAELLSGQQSACPGASSYALWVAMCCRAWRLPQPAWLCEEGCANCPVVAWARSEKGPSWMSPAAFGRVLVVLRCISCSLRYHWATISTLGARAGTARNLAPFPIRLLGGRPGAILVGAAGPIWRPTRFGILSFPLPNKRALDP

SEQ ID NO: 1013553 - protein, 284 aa, Homo sapiens
RVTGICPVCRYPPLSLPLRVLPPSDWSVLGGHVQARRGQLRARLCQSPTVARSGACALSVLMCWSATGLSARDPRGGGNCWRPSALCVAGPPPRLPAPSPCPPERRPSHSVQGSATAGGALTRAQDHWVRAAHGDTGLTGEPGAGRAEVIVTDITNYNTSIAPGVQRYKRHKGCRGHCDSTERTDEMDALVEIMRPLQTVTRKKSTQVIDIGCHPGTRQKPREHIPTCIPQWFPLAHHGEQGTSNVLEKEYLAIGKRRRHKATHQKIPLIVQGAQVNDLENWTT

SEQ ID NO: 1013554 - protein, 66 aa, Homo sapiens
KLLQLARCLPKQPPSFELERQALVVRHPRESPGLRVVNDRGKKHSIWAESAPFLDGDEYLMASLLC

SEQ ID NO: 1013555 - protein, 150 aa, Homo sapiens
MFDLLHICVWETELYTYVHGYHSWRASMNYGSTSSDTMLGAPLQNPGDPLHALPIASPPLCQTLSTTELTIFEIPNPFYAQTLWMRAEILGAIREHIGYTEVNANEWVHNLGDAPRPPRWFQRLRKGNRLRGREVLKRCGHRLETGLSTQ

SEQ ID NO: 1013556 - protein, 44 aa, Homo sapiens
  misc_feature (11)..(11): Xaa can be any naturally occurring amino acid
MAWLVLVWDLXDRAFPEQPCADEREEKYATLRPGPELESPLPPP

SEQ ID NO: 1013557 - protein, 106 aa, Homo sapiens
MKETIMNQEKLAKLQALSVAVVWAMELLAEMQRRWFIGTATADDYKLQFSLTERYVGKRYLCVLKTVQYCLPTKATVIHFDNPKVQASLAANTFTITGHAETMQLT

SEQ ID NO: 1013558 - protein, 90 aa, Homo sapiens
MDSSGAGVYVSALPSLLLRPWRPLRLQPLLLPAGPAEAACALCQLRAPGTGARRLRPPLLSGCAWCCFLVPDGVTGPSLAPDVRLSDLLG

SEQ ID NO: 1013559 - protein, 125 aa, Homo sapiens
  misc_feature (53)..(53): Xaa can be any naturally occurring amino acid
  misc_feature (102)..(102): Xaa can be any naturally occurring amino acid
KQNTQGFFWMDLKGKRDGEKYCFWENHPLSSYKGQCSRISSTPNSLIILLVEXIWLLTWFLTEKKKPPTLKTPCDNPCVSKCENIKVSPFLSLGYNPQGTIXNYNFLVAREYPCYHLCWEHNSCS

SEQ ID NO: 1013560 - protein, 114 aa, Homo sapiens
MSARSSSAWSQAPSPSPFLPRTLNSVEPTAEARWGSILGPIISPMWHLGEPQAYSPGWTHPPYRAKHHITKGPMDQHHSPTTMGLAIHRSQDRSTKASQTALIVAKTERIRTDR

SEQ ID NO: 1013561 - protein, 236 aa, Homo sapiens
SGSGAVHQHQRPRAGSVSWVPRFWGVPSPGSCAFPFLRPSPSSRTPLGLECQPVLDSGAAPDTAADTILSVTQQCPTSLCTDGTFHHVTPVSWSLWLPRKPRAPIVAIMTTSTSFHVRQHQDQHIQTQTRMPGTVSKHCGFQLTAPLSQMMPSGVQHCEQRPGAQVPGTAGPRSASCAVMYWSRLLLLRLPLLQGSASSITGELNWLGGSSFLTHDYRERVLDDNSKSAWGRDDGK

SEQ ID NO: 1013562 - protein, 103 aa, Homo sapiens
MCLSIVYSTSVTHATIVSRHDMLASGSKSPCTSDYTKIEQLSPRAQAILPVQWTVLRTHVLLCTRGENVIRFREVAQRAYGRDCKINTIACEVSATDRHAKVE

SEQ ID NO: 1013563 - protein, 116 aa, Homo sapiens
  misc_feature (93)..(93): Xaa can be any naturally occurring amino acid
MPNVTQELGHDPRTWCPNPSLSLNGPMQVFILSPRRLPSEGDQDLRLEINFYHGYHYPNDEVVQMYLPVIIHSIIAAREDECTSRYPIAASSXVQEVLGEALLARKCVWKGERILP

SEQ ID NO: 1013564 - protein, 259 aa, Homo sapiens
RTEPPTRVRRSPPPRSSPAAPRRACFSPALPHWRPLPNLAALTGPDSRIFTTYYGRTCASTTSAGYQVISFGPNTKQRLRSTTQKLPIRSYPQHTKQHIEKYTYQPGQQRPKHRTTENNDTTKQRASPKHTHNRHTPATNNPTPTQTQPNTLRQQTAKDNSHNTTKTGSSYYSTTTQRKSPPHTTHDRHPTCHNTNDTHHTMHSQTTQGSQKYTQQPHRTRSTPRNAYPETKETHRTQTIIPSREKTHESTTRPTTTPD

SEQ ID NO: 1013565 - protein, 193 aa, Homo sapiens
NLLKEAASLLEAGEERPGGAKPGTQSQGSALQDPECFAHLLRFYDGICKWEEGSPTPVLHVGWATFLVQSLGRFEGQVRQKVRIVSREAEAAEALRSRGAEEALEKAGGGAHGWESKPEEPPPPKKPALDKGLGTGQGAVSGPPRKPPGTVAGTARGPEGGSTAQVPAPAASPPPEGPVLTFQSEKMKGIEGA

SEQ ID NO: 1013566 - protein, 265 aa, Homo sapiens
SVAGAAVPRSARRPPSADFKGLPLDPSPVLNPDAGTMHGRREGEDVRKEQAEAKRLEREQKLKLYHVQAPQAVFHESARRGELDDVRAGTDKPDSWEPTLIVATLWKLPTRGAPSSWRLRSLREELAALVKAELGFLEELLRVNPKSYGTWNRPMLAAGRLPEPNWTRRAGASCARFLEVDERNFARAGTIWRWSGHSMAMPVPRCKKEKLSLALSSLITRNFSELTLAVHYRSLSTWPLACTPAGSWNTGCASLKDVLLTGAGA

SEQ ID NO: 1013567 - protein, 104 aa, Homo sapiens
KEKEYSEDKPYQSESCQNQSIVRRCEQKRRKAGRTRESNRKRQRKKKKHKKQQSQKKKKKAASSSPDSTITLRKIRIALINEKSQCRRKLQTVENYRAYVTKNA

SEQ ID NO: 1013568 - protein, 178 aa, Homo sapiens
ESDPDAWCDLINVQAFREARTHSGDEEVSLSEALDLIESDPDAWCDLSEIDSLRTICGVDSIKTAYAMHSVTISSKSCHPRQDFRACVPSVTEYRLDGTTKLQTVSRSSRGELDPHTPPSTEVGGSGHWHTAPLCSSGRVKRREALDPLSLRMHQYESFPWDSCKHDYTPQEHSCLRT

SEQ ID NO: 1013569 - protein, 199 aa, Homo sapiens
GLRSPTETGPHGAHQDGASESRPLRRQPRGSPDYGSCSGQSSATRAPPPAHFAGSQGDYGDLQASEAYLVVPYPWLAATTALIPGSARLRSTSARSAAPYAPSTPLTFKTGPPLVPPLCPAPRPGEAPNFPRFQPWGTRSAGLKPYNALDARPLGEARMRCGRVGDSAGRFSGGEPLDTTGAEWVSSTRGWEGAPQSCA

SEQ ID NO: 1013570 - protein, 314 aa, Homo sapiens
MDVGSVVQMEYQDSVVTALSERSLISKMEKKGERNEKPLFRLNHKQAMGLNFYCMSGKTCYDGVISYMLQLLAETTNSPVLTPQTDTAVCILQYMQMFTESYSRCDLMKLVNHLACFCLAGSFSVRKANHLGATELCTHKAQSFVATRGPHGPCVRVVPTLALFRNGWDTSSIQTSLGATLSHIIIRWRFPPWRIPFTSAKSLSKQFHFSLLNVGPMDTEQAGKGTNATNIRRRHMRLTPVPKHANVATSPRDWTLHPPEAGKSTRDGRGTPHGNYDNSSNDQPTQQSRERPASTPPRTQTIQCPTSEFRPNGG

SEQ ID NO: 1013571 - protein, 148 aa, Homo sapiens
  misc_feature (99)..(99): Xaa can be any naturally occurring amino acid
PSQEPLWSGRDNGGGGDRRALLMQRAYGASLRGRGRSGSLTRSGFLGDCFLLLVLLHLAGARSGFCRPRSCASFFADPLFFLVQLRVCLDSVLRMIRMXRTIVVVGAEECSMDPDYVKASSGLTGYTRGQRSIIVHTIVNTRLRASNR

SEQ ID NO: 1013572 - protein, 270 aa, Homo sapiens
GSVLRCAGACEARSLGAEPRPCRAGAMKGKEEKEGWRTVLWRWRAEAPENEPELLQELQGCMGKSVCSVGLKCTRSAAGLATAALITLETRWVAVYYTNRALCYLKMQQQLSSALADLPARPGAWTGASSVERAALLPWAGGQVGKLEKRILAVKAPSRPNLVARENAYHSSWRQGRTQAGREICGETEYSHEALFDIRDKRERSLETSISERAGSIPIREEGGCLNLYLLSSEASVWPGGSGSGRDAREIGAITENPRGVMKDGQATFR

SEQ ID NO: 1013573 - protein, 330 aa, Homo sapiens
MDNKKRLAYAIIQFLHDHAPARGPLRPMLRKTWKSPSSCLETAFEGDVEKTVTLQLPHTLSGRYLEGWTATGKEMLQDLKEAPRGTPSSEEDSAEAEAASKAEGRRADETCETLWNAAVAILYGTIADRRSSHYCKRRANCLLDRKGARAYSGDIGPTYRTARSWPVTCGAEGPNLGHLDPGTRTSQRPYGPAARGPGGPSQPAKQPRREARGLPRNKRKGHLGSLVKTRNRGKEHYEGSPTLQGLGGSLEDLPREGPPRPHGGGPLGHAIRTSAGACFESNPLGVPLNAVDIDPKLNVGPAEFRTGLGSAHEFPVGNQPPLGNPRDRTM

SEQ ID NO: 1013574 - protein, 75 aa, Homo sapiens
ARSLAESGNRIKGERIRQGRSFGAGGWSAHLRARTRDVDRELVTMCGAAGPWVLQPGTVVEPETNARRTLKSDPE

SEQ ID NO: 1013575 - protein, 255 aa, Homo sapiens
PFGPPDGVAGSARWGRPLPSGARLHLLGDYTPTSPPYWSLSPLNSWNHLWGAREPGAAQRGSWVGYRVGSSGHLMGFGGLLWEMLLGAQLGYVKVLREGEGQARRGGGSELDIQLKSFGFDTNGSLEVESSVLRLGLREADREDLMLVGFISGRVRAGRVRSYSSPGFRRTALSQKSEEQCPRSVYLINIKDLQVQVRKYGEQKTCVSYPGSSRECTVQDRAPEATGQQSPGKGDGGGSSAGMQAQVNTAVIQGS

SEQ ID NO: 1013576 - protein, 120 aa, Homo sapiens
MGPIERELLVEHVCAKKQVVTDRKPEIISDSLSRDHLSIQRKTWERSKQAPRGKHLERPPLYEKQKKVIVKRRHIVTQIVIKNKITTEKNTHTKTPTEENKNRTKTKKKKKEAKQSETGD

SEQ ID NO: 1013577 - protein, 320 aa, Homo sapiens
CLEIALCTMLRVRREPRWTQRSFSEQSACAHVLRSQSSTAQPETCYGQLSILGEEPLLRNDPCWPMLAVRPCNEDRPTLSPLTRCQEIERLRPKAGFHPWKRSSSSCNLGSSLSGFAVATGGRGSGGWRAARAPPTAPSALASTSPTSSAFSSDYVRPLLQLGGLPLAAGGLVVSPAGGAVGQSAFISKVHTTAADGLYPRLCGIVHPYESWLQVGVPFDAWRRARLTKGRGVAWWDVHRQPGLVAWKCRNPRIEGGPKKLGCNFAAPPTKAIDEHSARLGTLTKPELSGSAHDNTGTYRIQRCPQDYLHAPARLPNWFH

SEQ ID NO: 1013578 - protein, 171 aa, Homo sapiens
MQLFVTFSPPGKILSMMEDNKQLALRIDGAVQSAQPGGDQPASQKLNGTNLETGGTELASGGPGPGAQGSLMDSALGRQGGLGGDRDIGETPQALEAAKVGFGPRKTQGEMERPKQDDTDHEPREEWPEWNTGGTPTKPPGRQKNRHYDSTMSFDETTFIQENRRVETQPE

SEQ ID NO: 1013579 - protein, 101 aa, Homo sapiens
VSIPIVPRTVAMKDELLCQLTQSNEEQAAQWQKEEMALTDTCRSELQLDKQAVLAKEVRDLKETLEFADQENQVAHLELGQVECQLKITLEVLLGVAALQV

SEQ ID NO: 1013580 - protein, 253 aa, Homo sapiens
  misc_feature (206)..(206): Xaa can be any naturally occurring amino acid
MSDVRDRTPVGGNSIGLGSFLAGRVCPFPRGSTCLGAIAPGSPSAWSSCRNDAVDRWHLGAQVGQHLSKEQATQYPHSRWGGLVHGSDRVRCTRTCDREWHKGTTGKCQLLSEQKGNCPCELSHVWHKQTRKLDTWADGLVVTRSMWGHNGLGELAGLHCAKDSRCGPQPVFSQQRYKPPIRARACRVGPTCELLVTLLSVPRFPXARCVALLRIREGAPMIGRFRGPRERVRHGCELRDLMASHGPCARAMR

SEQ ID NO: 1013581 - protein, 90 aa, Homo sapiens
KLGPIDLSKPGGENYPHMVLRERTQLATGALHTILTSGAPLWIPECSHAEGYPARVTRFLYTKWRPNGKISFSPGGVGTDASGEGCAPDH

SEQ ID NO: 1013582 - protein, 318 aa, Homo sapiens
  misc_feature (200)..(200): Xaa can be any naturally occurring amino acid
MGAGVGMVLCWLGLLGEGRAARGERGSEAADICVMPSAQGLCLSGVCPAARWVLLGLECDCDWSANLFVCLVSQGTIGTIPYRAGLPRTNVQWRKALGNLRWSQCEPVYVQMWRVRKEVLLRLYLGKRLENPHVVAVLLVNTSSEMRLSRAVVRRQERLLIWEAANDYNRTKVDRAKSELEGSRRLQKRPGVVRGVEMHXHQLDVSNPNTRNSREDSKLSQDSIRHREDLASNCRKSQFLDRADKSISYQGLYRWVKNLTHARVEDEVVPANEVTSLSREGKPFIWNILMNGWEPFVSTRKLNFRINSPNSVPRSPYP

SEQ ID NO: 1013583 - protein, 258 aa, Homo sapiens
CLRQPPSLHVQVTWSYRMLLVQANNVITLMRLILVLLVLTGEINSPGPPGWLRCLGRRSSPARERCGKGLERPGPGEAGGCGGLGDRGATLGSAPAGWLRAGFNSILRTCLRGHQSPSSDADLGSCKPLPKSSPNEHLTDSLWIAAPKRRQVKPEDQLLCWKLSIMIVQMTVISTEEMHQDSLILEKSQNWSSQKLAHILISCVCLGDTSELTLTEINSDGDNVALQVHEAVMNVDGDSDSIMSQMLEKSDEHGECSR

SEQ ID NO: 1013584 - protein, 70 aa, Homo sapiens
SSKMAGELCRALPERVFVVDGLKNTIVENSGLDSEKRKSQWWKRRVEENIGTYPSCVLAVDRSPERYTPP

SEQ ID NO: 1013585 - protein, 330 aa, Homo sapiens
PLLQQLKSATLTTRFKIIHTPALNPHPPNHWILQPHILRWIPRFPVPPTGSWTSTVLTHLGYPTTQLQCNWSPEIDLQATGARIPCTSTRQTRVLPSGTSIQMSKVKRLDSYDPPTLRYAHASQHSGMLQRSSMTGIAGIRTNTFTYLESMTNQRNAWDPGYPQSTGVPRYPLTSNSRGFRASDWRITSIININLRHRGLKILTADMHRSHDNSMHYALPHPKAPGSPDSQDLQTTRFVAPNNKCGGHSGTDKWILATAAAGFQILGTQSLCQSLKVETLISGTADPDIPREWNHKDLEIPGSDLNHSRAGSQCSGPKSQIWANKDTEYP

SEQ ID NO: 1013586 - protein, 174 aa, Homo sapiens
MRSEGSPGPPQVQPRWIGVTHREPTYTEGTRTDGNLRITFGRVNTGVQLVHPGYKGGTVPLGRSHREILRGHELLVLNFGKPHFTARKYYTCLRGHRRSSKYGTNIHAHYYPRSEREKGSRTQTQTVASGEPVSGQKVGLAPRGRSGSHTIAWFPLFPPRIALWCGNHSACDQY

SEQ ID NO: 1013587 - protein, 151 aa, Homo sapiens
MAEALKPLLTSASSQEYRLQNYKACFVFIVVVVVVKFQDIEKNHCSDQINEDRKDKIQGWRRVNNILALEGRQIVIVMLALVFLLDESGWRHYDVAAVILSHRFKAQLPRFDSIHGGKYGRTRTWNNIGDIFQRKEAKHHDTLGGRRVPNM

SEQ ID NO: 1013588 - protein, 225 aa, Homo sapiens
GVLSAPFLRTGEWQNSPGLGPGSLSVWRPIETSVALSSVLLLANSRPFAEMAESPNASPSTLHSQETATKFKDASLSGGGGCRSSQEFRRIIAPTKKKKKTNKKKGGEQHEKSMSPKRGAPTNHHPQRPKCIPTSKEWVPTIQGGDQNLKTQIRQYGHDLATHKRDRNPDAPKPAAQHHGEQPSATAESPHKSNPEERCHHHRGANKKPQRKRIITSTSQGTTLS

SEQ ID NO: 1013589 - protein, 298 aa, Homo sapiens
ERGGRTRAVRCQIVLTSYVMNDLCDFILAYAMRTTEQIGKATPKNVASTRSRDEEGDYGISVPSEACKGAPTGIGKGTEDRDGRRLPIGGVNTEDHDERQATRKSTRDGKTWCQHRMQNASFLSDLSDTDLERRLAHNRGCERREGRGALVGSELEGESLDWGDTYQGNVPRRRTSPRETQRGDEIDRATLVSAERDEPNTERRHEERSGPMCCAAIQHCVDWPATEREARGSRVKPGSPTFHKRAGSRQTRQGKFQFINSPEKRRNSSRGRIYWSTGNSQTSLGKRPRSPIRALFGN

SEQ ID NO: 1013590 - protein, 159 aa, Homo sapiens
VRVVVAVALRRHCLRPSPACQPESEGAAVGSDPVAGDSDTEGEDIFTGAAVVSKHQSPKITTSLLPINNGSNRRMGSMKNKTKSHRSLFADATVELSLQRAHKTKSEEGAIQETLISLPPQEDHNTSSYIPHVNLCRMLGWIVTKHGRTQISDLEHVES

SEQ ID NO: 1013591 - protein, 282 aa, Homo sapiens
RQSSHIGETTMEKVKVGIHRDLVVLGAWSPGLLSNSALKMDIVAASSDPISVVASNYMVYTVFHNRWFHRIGKFAMDTVEADRRVNALSVNGKSHLPVLYQGGENSLHKNPRWETIAARCVAIVACSNVSRVFATQPLCMKRAWRASISQRGEASKGYSAFFWHRTFCVLVHTMIACMGCWKLTAERGDGQIMTCTESFSRCPPCIQASWLSQPPFGPQTIVQIGIETFEPSDAVSRDQNRCATFIEWTESGGTEVESKPQGAIGGRRAPPLLKGRSPMGDA

SEQ ID NO: 1013592 - protein, 518 aa, Homo sapiens
SQARVSPFSHTAAEPGLVRGGGGVGIVEVDPPPPLGRSCAPTPHVSAGRTASLPQHRSLSLASSLPCASTSSWSPDAWCCTSPCVVVPCRPRAGRYRRGSGIPAFPGGSAPGPKSARSKAQDPPNKTPRTSPEDKTQRSKRNWAKHGPRKPYRRDRNQDTRPRIEAREHGTYGLDKQDIANGNNRHHRQRERNEGQRWQHKRNDTIEIRCDTTRNRTTLPYSPTSLTYADILPLPDPEITAQNTNCLGLEPGPKQAPHGNSNYRGKDQTHNGTTFMAPHLHDPPNKYRHFQAYYTPGPTQVPTDYNDYTITYYYHIDERKRKFPSELHKSEDSASPQANFAQLAHYDYTNTIRTTYVTITPNSTEEYKHEANYAEKYPHRDEHKHTRTHTTREHDELADRTKQEKPAQRQIPINKNEKGNTNTQSNTRNRTHNKDTKQNNQTKKRTQPHNSRITRSPHPEATQAANNNTVAQAELGQDRTSKPPPKQEKERNRTNHATRATRKPDTIQRPQLEKQTDK

SEQ ID NO: 1013593 - protein, 134 aa, Homo sapiens
LDNLTECNSAYNEADSTLTIEEGNLDIHKTKAGRGRTQRVTFSEDDEIINPEDVDPSVVSDFRRHGAKLLRGPSLTKKRVEGPGSLRPGQESGQQAHCSNFAFSGGLYGGLPPTRRVNAGSQPHWHSMGDARQS

SEQ ID NO: 1013594 - protein, 483 aa, Homo sapiens
  misc_feature (101)..(101): Xaa can be any naturally occurring amino acid
  misc_feature (121)..(121): Xaa can be any naturally occurring amino acid
MTLPVPGMPRTLPNNDRFVLSKGHAVPILYAALSLKLVFPAPRCAMPVCNAVEKRSDILNLVRRTARSSETNAFTLIDGPHVLPLACLRGPYEWTWRVLAXFGARRPRLRYISDLMGQRSXDDHSLAYACATNRVRTLVPEACVLIDSAMGPVVHFSGTNSIQLNVLAKRKPLFEPTNILKGTNSIVQSLCVPSINYRITRAPQVFAKRQTAEEFEVTNFIQLKKECSAIRPRWGPLLREFVGAKFRPGFHLPRLGHFEETTPHAEIVERGIGPCVLTYIGVHIYSVPTIGGPQKATNPKRPQKNQMAANFQILPQNGSRVFPNRGGPLEKGGTSTLARGGFREQRAPHNGGTALPFFVAQLCGEKAPRFFFHTTEEVKKEDKLSVPFERRQRQFPISPNGGNAQLPLTNGPPQEMSPEERPQTTKGQQGSSSVVGLKNTPLCLQTNVVERKPGHTRLTQRVRGNHYLAPIDSISPGSNLYAP

SEQ ID NO: 1013595 - protein, 206 aa, Homo sapiens
MSRSRERHTSGGHSWSYVAYPTIIVGGLSSGDNVNTLVRPMDVCIMPAGSSLGGVCYYHHLGGGPFTFPHGPFTLWARDNFTRVLTPLWGSQLPLNNVLRIAPQGLVLWGRQTAVEYTWEDLVNMKLPPGASTSKETSIWVKPQNLIVFKNSKGPKTQLQCQTYAFSTTIPPTENVINTPGNARQTGDGGKRPLHTEQPPHYPTSS

SEQ ID NO: 1013596 - protein, 118 aa, Homo sapiens
  misc_feature (76)..(76): Xaa can be any naturally occurring amino acid
MNRYLGHWTIGQSLMEQWVRPYNGAHNTFPKETLSATSVLPYLNARRCFSKPLCGGRGGHNYLWRDVTASVNLGRXTRALCRGRSYYPRTENDTMETGHILCVKHNNTLPLYPTSNGV

SEQ ID NO: 1013597 - protein, 101 aa, Homo sapiens
MAPSCMSPSDVQAAAIIGNSWARPHSPHLGMQGQMFHVAAGRARRSALQQLHWWAGEPALSPIPVWLQSGPMARGLELLAEEDAWEGAVVWRALSARGIRD

SEQ ID NO: 1013598 - protein, 67 aa, Homo sapiens
SLPPVVIVMTALHSPAEPQEPSHDSAFQIANLAELPAESFLLLLVLLSGELGGANPANEEEEKVVEV

SEQ ID NO: 1013599 - protein, 193 aa, Homo sapiens
MAGGGESEDGTVHLRVPRETLQQGSPYSAGCMSRWRPPPVNSSRSSVIGSLNGVHDVRAESGRAVELCEDREHDCWCGTSFHDSITLIVLSSEVGISELRLERLLQMVFGTPWSFLVGLEELTNIRNVERLKKDLRASYCLIDRFLGDSELIGDRDQMCGLAVIPPEGVPLAGSPLRGSLRPRARASCSLVVS

SEQ ID NO: 1013600 - protein, 90 aa, Homo sapiens
CRNPTKLLRLGRLDMPVTLTHVAVSVCWAWSSDYEGEVPRDPWRRRAPYDVEELQRTAYEDDEEEEQSVLGGIIRNYLIHALPLNMCDHR

SEQ ID NO: 1013601 - protein, 216 aa, Homo sapiens
PAALSPPRFLPEPPPVPKLPRLRLTRCRCLTGNSPGCVVPLQGLGGRLMAADGGDRPDARAAEGDVTRSASLGFPPALSQTLPRRTAGYRAQGPACLLLRRSCCAPLTKNPWDSQTLVQLPSPIAASARAHYEQGQNAILVKGDRRSDAWAAIYFPISSSQSEGPVVETLHGRIWEGFVAQHLGHAYHVTQVHTNHMRYALGTRTLLPPLPQVGDN

SEQ ID NO: 1013602 - protein, 297 aa, Homo sapiens
MTRDAENRKRSTTGADDGAIAQRTRHIHNTHSPPISLPTCPNLNNRYPKHELIPHFPHYTSSDSRQVPNPPLYKQLNSVFKRPQHNSYQNQQSTTITQNTSTPPQDAPANTNDQEHNTSTLSPPSTNNYTTYTTTPSYPYDIKTPPKNTIVEIIYTHKPHTTLTHISKSQVAHQRENTGIRVHAGAHSSTPNEQRKRSRYIGTALAGESSEQNGSSNARCGTGGARGDGKPQRRGSSSWRNRPGARGAETSAYVPPVRRSPPPGRVCKTGARSGSRSAVETLGCRREYRTGVHSERR

SEQ ID NO: 1013603 - protein, 130 aa, Homo sapiens
MCASVGPPLVPPLLVVPFHKPSSYLTPIYILSPPLLFPPSSFLFPAPDIICRLLWECAPRLYYLDAACHVSPRKNLRAPLGLCDAGALLPRAISKQVLWRPLRTSQPGATPPVGVCPRAHHLCCGEYLPP

SEQ ID NO: 1013604 - protein, 94 aa, Homo sapiens
  misc_feature (10)..(10): Xaa can be any naturally occurring amino acid
PKGKLLKAIXRDFGSFDKFKKKLPAHLLGSKAQVGVCLVSIRNGDTYKLLLVQIRIHCKEQQALFHCWGLNVWEHAYYLQYKNVRPDYLKLFGM

SEQ ID NO: 1013605 - protein, 216 aa, Homo sapiens
MHAYVHSILGWWSDDPALSNEIKKKKTKQYNDEMEVDYAENEVSSSEDEDTESSSDSPRMADTLTKWMSEDCEEEEEWNVMDEMSILEKPGLPDLKRSTLIEERIKSGGCNNVQEVIAGQSTRDYLLNRWQTLQENYATFATTGRQDILIESSCLEVCKLNKYDCDNSQLLASIGESETEAVCYMITGPRGNYEEEDTKGLKRIGNRIDYYLRAAG

SEQ ID NO: 1013606 - protein, 135 aa, Homo sapiens
MADEPKPISPFKDVLAGGFGGMCLVFVGFPLDTVKVRLQTQPPSLSGQPPMYSGTLDCLRKTLMREGITGLYRGMAAPIIGVTPMFAVCFFGFGLGKKLQQKSSEDELSYPQLFTAGMFSGVFTHRNHDPWRTDQ

SEQ ID NO: 1013607 - protein, 36 aa, Homo sapiens
LGSSTTFIFAAPAGAGPPAESPRSNRSRASPAAIAP

SEQ ID NO: 1013608 - protein, 233 aa, Homo sapiens
MAQQQQLPVWAIEGPMDGPKAPPGGIHGATRVATHLLLSGVQGPDTPLRPSARALLAGKECTADQRTRSAVLCLKSREINLSQPILLELEAPLKICGDIHGQLLRPFCDYFEYGRLSLPRATTSYWGTTVDRGKAVLVDHLLLLAYKIKYPENFLLTPVGTTKCGSIKPGIYGIYDELQDNARTIKLWKNFTDLDFNCLPIGDISGRESIICCTRGMNQELQDNDTRYGASSG

SEQ ID NO: 1013609 - protein, 210 aa, Homo sapiens
  misc_feature (170)..(170): Xaa can be any naturally occurring amino acid
MATVAKFIERCPCKTTFRRKFFPSVSDGSRVATVHGFAVWRHERDLLTSFRCMWHLMAEQLVDVVTSSQGVRNIQGTAMGVTCWERPSVWDISGRAQTTSWTSQSYVGIASCKEMDVLMKSILYNSIAPQNEEIAAVGKDTILDRPGKKVAVHEFLRAWTSRRGYAHKLXAVGVHYYYTEVVLYDDQQVEVRRPLVSIKELEIVETQGPC

SEQ ID NO: 1013610 - protein, 177 aa, Homo sapiens
GGVVERLKPLYPAEFRRRGGYAESYHQHFCGPPGRRGAVRAVLSATPTCCCSGVENLYPNDIINNPKLVGDAAGYGARGASCPPGMIQTCWSATFLSSEAAMEGVDGPDALELECTGAGLRMCLPRGWTAHATCELAIDIIQITLYQAQAKWPESITAGHMGSQIKRVLLVRAACDT

SEQ ID NO: 1013611 - protein, 64 aa, Homo sapiens
ARLYVPKSYDGKRSGRRLLRRVQCPAPCEIFTSLEYGPVPGEPRMRTERRSQAQWLMLVIPALW

SEQ ID NO: 1013612 - protein, 129 aa, Homo sapiens
RLGLEPELRLGFRADVSVILANPRCERGRECSLAGDGAEFTSRRGSSRSARALACPGCLRVRGSEQRASGCVMGLCSLVRQELVPGLRYPLYCASESTPALELAHRMQMAGGVQHAKDKCINECGCAHY

SEQ ID NO: 1013613 - protein, 318 aa, Homo sapiens
STPMQAIVIWKYKSLLPGPPSADVLLPGQRRTTRLNAQSGRREPRLPTPYFECQDSVRTVRVVATKQGYTRVTLGDYYQCRRITITRKCMTCPFDQTAWGDSGVYYCSVGLSPGPPRGTTECLRMELIVLDWLFVVVVCLAAFLIFLLLGHLLVPVLPVTACCCYDQVPLLATDNVLPAPEALYAAGKSRHLRVFPAFLCATMTYAHHVIPTKTKTKQPYDSHGDPSHTDADTPVTVYTGMTLHSGDNSSLKSTSLIVPRVLTGKVGTKDSQIDPTDYDAGLPVNLNANPTSDRLHDGLMFINSNNDGWTHYEPPVLT

SEQ ID NO: 1013614 - protein, 397 aa, Homo sapiens
RRAASGCERESCKSKRARERATGTRPTPPLSPTRALRLPLHPCLIYPGLALLLVHSPRALGAVQCSLGTHPVLQPTAYPDKGLALVAPGPDAAHQTSPENITQGILSSTPHYTITPDALGNRSCRASSSLGPATTINPGHKCKTEQRNKSPSHIFNDEVGQTETAVKPMARPTDGLGPQDKTTQGGAQPGTLPAPEPEPYPKHRRTTKGLHGTKSKDKAEAPNIGNTSKQTHARIPRRNSATTMADEPQEDNTHTATVAHPEPGKHTPKKNNEQSKDEQHQDALESHLQCTHNENGHTEAKTAPPGQPPRTETNTRLAFRIAATYGKAWRALPHPIHTAHPTSACRLPDSTLVGDTQLTHPNDALLPRCLLHSRRSVHPRSPQLRRRHSYVLSQCSG

SEQ ID NO: 1013615 - protein, 184 aa, Homo sapiens
MDALLLVPPFPGLALMGMPVGWVSGPALGRSVTDGLRCWHCPVLPDGPGLPDLPEPGARPTVLGRRAGVAANGMACCRRDEFLWREQFYRYYQVARDVPLTPSCAMSWYEEFQRLYDTVPCVEVQTLREHTDQVLHLSFSIPGTSSRPAPMDCTVKDLEQRTDHLAACTGADMRALKLELHPVS

SEQ ID NO: 1013616 - protein, 313 aa, Homo sapiens
MGSLAACVAAVLIAPVRLRLLAALGAGVLCALPGSWWRDGATACVAPWAVPVCGRGGVSELLQLCVMRLVPDLTYCGVRACSTAFVMCPVILHGTHGQLEVPGPVLPLTGCWLRFGDRVVLAEHLANTYSYHKVDLPFQEYVEQLLHPQEPSSLGNDTLYFFGDNKLHRVVPLSFGTTPQPHLACWEPLQLTALESQELARGCPSTGIGAGVLRSDLRVVRCCNFPRPVGWHCYGSSFDTSVFISSFLGVAKTAGRTAGHTTRNVRIVLTGFITRDSGGHGLRPATLSWFSSPHRGTDQGQANSDVGGETGQK

SEQ ID NO: 1013617 - protein, 270 aa, Homo sapiens
RRRAQVLADWPLVAVRSAAGPSGVAAVRSFALASCSRREAGVMWLGAICGRHGKEGGQPCAQQVQPIGHSSSWYAASAWIVYLVLPKASSLTLHTLLCRDVSKELYPMTQQPGRVFLSSMRGRLSIHPRESGTSRATCKNERSSSDSLMEGNIAAMCTVIGGPADACEERFRDHSIEMSGTACAAIIVSCRQTCKAIERMEFKLLQRLCMTDTGCSQVTEALVDDIRSTSLGQQIALAAGALVGCGDTSPNESAAPFQAFKPFGTRLFGS

SEQ ID NO: 1013618 - protein, 104 aa, Homo sapiens
MLGENMRVIDSCGPFKCCEVVEMDPTIISDFSTKSIEDSSISPSSGSSLDVGEEQTQVKAQKTEEKKSSVGPIFLLDYCLVSMLAIVLSVLTCSEFINSNRPKT

SEQ ID NO: 1013619 - protein, 148 aa, Homo sapiens
EAWAVVADVDLTDCTGAGLVPGAMERGPGALVVRVAGGGLPTALTWRPVVARLPVGSCLDLLMGCLVPLCLLTVACCLGCWELGGALSPLPATLVSPLHPSPDSWAIAWGGALLCGVPPVLEGRRELGRLLRSNRNVGALVLLRVECV

SEQ ID NO: 1013620 - protein, 182 aa, Homo sapiens
  misc_feature (37)..(37): Xaa can be any naturally occurring amino acid
MEDHQHVPSRHPDQQAARLAGGQKALQPEMAGRSWDXLTESRGRNNMLLDSKEMHAWSHHIMLICLSRPAPDIGSLKIDGILCIKDNTYLVELSSLLVRIHYNPLTEEQLQCSSCSKNQRKEESAAGLRMREQFTILQQYGIRAENVEETVAGEDLRVMVNWGRSIPGGSLECPGVGGGVKP

SEQ ID NO: 1013621 - protein, 118 aa, Homo sapiens
MGQGFPYVWHTVGARYTAANSHDVHDTVTQVATLLGSQVILNPSLSSPCLSKASALIKQLSPQVAPYFKFPLLLPIFWPHHLLLWTILKPLVFVSSYFLHLSLLQTWATKVVFKTLLC

SEQ ID NO: 1013622 - protein, 272 aa, Homo sapiens
MQAVGSQRMLSGTWHYVFMTAAWLLNQVGTDPYLTRARSNTRNSVTAAHATHRTTSQLLHPLQPLPRPHTPALATRRTRTTPSQPHQSSPPRNHRTYHKRHSHKLTTLLNTLPPTTLTKPAILAASMQHPHNPPHTPSHTNMHPPHPKSQPQYNTTTHNTTTNKKPQTQPINTQDEQSPHNSRLSLTPNKEHTSYRHTNHKTNKTHTHHNTTQQRRTPTPTHTAPHNPKTETQPPQPTHTHGPPNTTTNHTPHENTNKNNSHAPNTNTTKDQ

SEQ ID NO: 1013623 - protein, 47 aa, Homo sapiens
LACLCKASAAALQDALPDHAYVLLRALAHGCIVQEPPGGRSLHSECS

SEQ ID NO: 1013624 - protein, 194 aa, Homo sapiens
MLLLLLLLPLCWAVEVKRPRGVSLSNHHFYDESKPFTCLDGTATIPFDQVNDDYCDCKDGSDEPGTAACPNGSFHCTNTGYKPLYILSSRVNDGVCDCCDGTDEYNSGTVCENTCREKGRKEKESLQQLAEVTREGFRLKKILMRSGRQLGKKSRVSFLSFRLERSLWKTRKKRCGQRKEEAERPEKEAKDQHR

SEQ ID NO: 1013625 - protein, 40 aa, Homo sapiens
STPEEANRTTGSERGRNEDSNARHTQEKPNRRPRQHTSGT

SEQ ID NO: 1013626 - protein, 212 aa, Homo sapiens
  misc_feature (23)..(23): Xaa can be any naturally occurring amino acid
MHACVNTPGSYRCTCPGGYRYSXLSCEVAVRMWMNCVGLLGRVCPPCGDLSWRSNYLVEASSVSALSAPRAAANVSYVKTSPFQCERNPLPHGTAGPAVICPYTISFAVTSSLPSILKTPIDALPAWPLASVPGRAGPTACGLGLVGGNSRGHFVHASVQDPADLGILIPCAEPGRGLSTLGWWTSHSVRRYLDRSFEADHRVQGSPSFVFP

SEQ ID NO: 1013627 - protein, 147 aa, Homo sapiens
AVVTCVEFSVVCRVTQPRSARNCVAHSVLQVYLRVGASLRRKKWGRLSGAARRGGNSGVLLVPVADILPPDCCACVSAVGLAPCDGRWRGCTWRLPMWCVGVAVLLPCVDDALPSLTCLVFSNPAHVGMQPTENLRRSAGSPARQNS

SEQ ID NO: 1013628 - protein, 48 aa, Homo sapiens
MTPRSAAITPAAGRLLCTVRAALRSLSAKPRNRSEAGGAGDAPADYDS

SEQ ID NO: 1013629 - protein, 95 aa, Homo sapiens
HSHPNSCLLIKTSEGEETLSLSSLPPRHPSATRQELNGLRCRYYCATSLRPVPTLCNPIAYQILTSGCTKTRRNHSTQRNTHKLPHMHSHYIREE

SEQ ID NO: 1013630 - protein, 252 aa, Homo sapiens
LQSRTSPSTTDERWTPCLLYLPQTESLPCCLLIPTRLAETFTIAYLLNSRTFLTSASSCGPYALLPRCTLSRGWTASDPRQHCGSARCLLGCCSMNHTDTNILDHIYQHTSNTQYQVTPEEYEGISILHATSTCTRITAAHTVMIKDHQLWRIVEHQDTKTSRQADTSKSSDIARSKTPRDSSLLRSSVEYVHSKLTKSLIYNIEHIMRRDMEEDPDQKTTMGPNVEEQEQKRVIDTLRGIESTTSDVKKGK

SEQ ID NO: 1013631 - protein, 126 aa, Homo sapiens
MALAECFSSKYLLPAAETPGRGVCRNYLPSSSPPGEYLIRDFISPRQGEYVLEHVAGWRIVRAFGAFDEIKRTDVIGDRVTAEDGSDMRQIQGEHLIHESLEIERLLRRIDEHTGSLRDDRTTYTS

SEQ ID NO: 1013632 - protein, 156 aa, Homo sapiens
ERLVQRKAALPRPERNLRNERLGACEWMQAPPLLSERPRPCSEGVVASPVSGRDVVVACSLPPGVNVDLGVQPLTACDVRLLPGVSVMLFTQQGANAGRWVSQLELKEVLAQGRTRCRHQLEIRRLGIGAGSDTFAVHCLPAHQTCTCRTDTKVVT

SEQ ID NO: 1013633 - protein, 318 aa, Homo sapiens
APEEEEEAGGGMAAVVVAAAGGAGPAVLQVAGLYRGLCCGAQPLPWGLVARVTLLQLRVFPCAAPCSGLALSVGCLMAAGVGGRVPDAPCANRFLRRATCDKIQLAAQVQTQLLLSPAWRNAVNFGSKPVGHSRQGDFIKCVEQEDMMPVGKTGLVNRRIHVRDKTLSFKSFNIADWSTRTKLQKHITQIWQQYFAAKDTVYAVIPCRNSSDWIWNRAQSCPTISIVLCQEGDRVMTLKVGQWTGYLNSTSLHLISIQTRWGSCRTSPADFHIQLFLKLEGRQRAIVLDDFRKLDSHISEVVDEGQRASTEPGPVFYD

SEQ ID NO: 1013634 - protein, 118 aa, Homo sapiens
METEKQKRNHDHNTANQGERNTNKQEQHTKPTTRNQKGKQKTAEQGLQTHNRHNSTWHHATTAATKNHNPTNTLDQHKTETNNTTNQQRKDKTHTVTRTHNQERQTTHKRKQHKNNRP

SEQ ID NO: 1013635 - protein, 136 aa, Homo sapiens
MIPLEKPGSWLAPPHGATSVLVAGACAWGLDAGLCLAACLPAPCALRAVVTENTRLWCAPRPFQGRATCRVPCGPWKLGAGGGHILQVGDEKCIDRTTILREQHICLQEVHGEQHEEKGQDCRDGNNSLEIACTLN

SEQ ID NO: 1013636 - protein, 77 aa, Homo sapiens
HALLHLLLMLPTCLGFPAPGPMYLCAPLWAWTEACKQRRGVWGWTQEMNDNVNPPESHLILVTKGHMSEDKSQRTNE

SEQ ID NO: 1013637 - protein, 182 aa, Homo sapiens
TANKMNGALDQSDQPVPRCQYKMFVGQIPPVMVREKELIEVVEPYGAVYQIKRLSGDRSQEPCREEYTWLWYSSIPVLLATYKSMLPWRHQTCICRQVLKTLAVGMQSCRDSGVRHRLQDYAERRSQGASCVETMDNICSMRHMVIRSKAGNDERLSSGRCSPLIMAQIGRMPVIRPGYLMG

SEQ ID NO: 1013638 - protein, 98 aa, Homo sapiens
WHSWSCDEGRRGRWGPMLDDDFKEMEKKVDVTSNGGDMKCCAMDHRCTCEPNPARVANADHAQHWCPTILVASVREPLATRRSEVASGADVHDPATWK

SEQ ID NO: 1013639 - protein, 228 aa, Homo sapiens
PAPSQPGDCSGPVRTCTAGGAARRGSVSEGTLSAAEPAGSGLVMEPGLVEMALRAPALLPRAAATTACSCACRLPSSLPLLQRHGGVWLPCGCASVPAGNPPGTQTLFLQDNNIALPRCLGALAPLAALRRLYLHNNKPAAPWRPAAFQRAARALLELALTSKRLRGLPQWRPFVGLAQLAALLYLGGQPGWLRLLDFTFLHLPRNNCREASTLQSTNSHWSLLGRTQ

SEQ ID NO: 1013640 - protein, 439 aa, Homo sapiens
TGADAEPRHVHEKSFLVSGDNYPPPQSSGYPGGAPATHATHMVRLPTLGVNGPHRGTKHTKKAEKRRKNTEHTDTHKNGQPNKQNHNKKTTTHKNKHKKPTKKKTSKNKKEKNTTEKRKKTQKEQRKNKKKEEKKQQTKTKEHDKAEKRRKQTNHKRQSSTGRNEKSRTNTGADRKHEGARRKTTEEEERAETKAKEGAQQRRNGHKRDEDGTTRREARREQKRTGDDRKEREREGENERERRKRTRRQEKEKDRKRGPKKKDKKEQQDRRSKTRTQDTEARQDKRRTTTTRRRKQPRARSTKRSERINGDTQATTDRKRRERTQREHARRKPRIGTPRTAPPDQGSQGHKRRRREEKRSGDREKKQSDGDRSTKTGSEQATAREREEGQTEERPTRGEPARRARKTRKEEAGHGRKSTDKDKNNKDKKEDDERGQSTE

SEQ ID NO: 1013641 - protein, 143 aa, Homo sapiens
MAMPVGVLVCLKLVCGCVVMRADCVCCGQWSVMVLWEVWLVLSKIVVAVFLPELEDLSEREGHRGPAWTCKSDQLFCRFSCRLRCRCLLRAIFVRQTMWPTPSITVDLRYQKVRGRILRVKAGRWRMRAESPKSVSTRFLLRF

SEQ ID NO: 1013642 - protein, 236 aa, Homo sapiens
MGGWVLALKMPVRVVALSVEGVENVRIPRGASALGSLQPGPTNSSSANEERINRSSSLSTVGLKFGLLGSNVAIVQKDTAVRFLCCELESVSLTDADFRGHSFRSEHSKNSKWGRDKGDLQVHDMLEKGHGDSVQHEPWNRLVLIKWTQEAIVTNKDANRYRPPKTKYQMTTPDDQGIDVDLDPVRKKEGARDFIILDTPKWGTIDSDGRRRTKPSLALQPPNRYIPDKHGIRTHT

SEQ ID NO: 1013643 - protein, 211 aa, Homo sapiens
  misc_feature (142)..(142): Xaa can be any naturally occurring amino acid
  misc_feature (147)..(147): Xaa can be any naturally occurring amino acid
MGVQFYLGFPFGKEGRGGREGVKPTKNGGHCQKGVGLEWVLALACSIAPPGEPFAKFVASPKAHSVAPPTRRDALGRPPVLGRLVVLCKGAQLDDGPRETPHPPLALAGGLLEVYGSRTIFGEPPGTHDIIDPGTDMARTSXLALEXSPAHMAYRKGIILVYKAATRQFSYLIENMARDWGKYAHTRYFRGGMLSNARLLFGPTVPLADLI

SEQ ID NO: 1013644 - protein, 78 aa, Homo sapiens
MLALRGYSIGGPRGHLVSGTARAHPQGFPRIGQGPGGFGDAGSRDEYPWGSGLYFHLSPSRSLQAQPPRHPRPAVGAP

SEQ ID NO: 1013645 - protein, 331 aa, Homo sapiens
CEWSVDPRSPVRAPPWPWLSGAAARRRAMSLFKCGDYGGAPWRLHSGPGSGRDDPSDQAVLHRNRAACHLKLEDYDEAETRGIKSYLNFSEAESNEAHIRSPQPFFLGLFLEIFSPTCVLGAWRTGGPPLGVRDTGPVPWVLGRPRAHFDKGVGGGVCKATSYTGGGEAQRPYRKKSWGAERYVNPNGVVALLRTLWRRRLFVVRRFGRRPKRTHKGFFTPGDGALLGAGNHIVAVVVAPHGENFPTGARQTGGAGKLPSGFSLREPRENCPPHRVVCTHPTMVFPQKIIRVVVWRTPPGKVQSTAWRTPCGGENNSKGQKKRGVFFYREK

SEQ ID NO: 1013646 - protein, 82 aa, Homo sapiens
EEEEVKPILQKLQELVDQLYSFRDCYFETHSVEDAGRKQQDVRKEMEKTLQQMEEVVGSVQGKAQVLMLTGKALNVTPDYSP

SEQ ID NO: 1013647 - protein, 33 aa, Homo sapiens
PGVVVSRANKLQLARCREAAVCGVMPDGAGVRN

SEQ ID NO: 1013648 - protein, 118 aa, Homo sapiens
MRQDEEKGVLVKRVCGNYCIHYCDVKWRAELEDERTFKCGPITCRIALSRIIVRVRGTVRARSSRAMRCSSRDLRHAGGRSWLGVAYSREYKGKIDIGIQESCTYRNIFKGRFLEYQH

SEQ ID NO: 1013649 - protein, 118 aa, Homo sapiens
ARPRLAHRPVLIYKNTAAEAGESLQPGRRRLQGAETAPCPPAWAKRAKLRLKKKEKQLAETRKLREVAPGPLLLPAVLFRKVSLRGAPAPAKRRRGRDVPGPELKRPWGRSCSPRHRK

SEQ ID NO: 1013650 - protein, 261 aa, Homo sapiens
MTILPKKKPTPPDADPDNEPTTTGPMPPAPRRGGGVGVVRRRHWCCVCGWQIADRDSVRLWVGPSASFATASRPATRTAGRSSSPGRWPCRLCASGVVPVPQAGFSHRPCGVPRWSLAGWSLAGRRCGAAWLGRGVGEPAGRSVVGVEGWCRKGVSGGMLAPGPWATGNAGRPFKLPGGCAPVGQRWQYHERDGTGQAAGLTNQLTEKYEGRADRHRQSERLWDPCTPVRQQAASNSGPGTQGPNEHNERPSSIKRRCTDG

SEQ ID NO: 1013651 - protein, 301 aa, Homo sapiens
MECLCLSCRPVCPAWAFAPDAMPDAAMMPAGLQGVSAVPRPPGMLPLLHYLPYHGSLADSWAAAYCCILGSSFSSGLLKSPTCYTECTDGYEWDPDSQHCLGNVNECLTIPEACTGEHEVHQPLRGLLVPDPLRLPSYNDLHGEGPHDTRAYPHQNPKALTNRAYEHRRSGTDCVNVDWVCPRTCNEQNDTKQGHANKLAMEYEIQVQPWTMNGIQQRNPRAPKDSEERAKDQEEATRKRENKAQSTTSAAIHHTAIGRPVARRPKKDKPREQRNRIREDKTKTRDPEEYDRDREKVHQKE

SEQ ID NO: 1013652 - protein, 107 aa, Homo sapiens
MSTRAKKLRRIWRILEEEESRAERLVQKPGSQGPRKVACSIWRRDDDAKPPEDPGERNSDQGARAITKVTMEKLETSREPQEAGRSIGGKECQRPETRTVDNQDKCE

SEQ ID NO: 1013653 - protein, 217 aa, Homo sapiens
MCALAVSALSPGCCALSAFLSVRRSCYSAWMPARLETCVSELDCASSQRRVTYPGFLHLTEEDCARLQHGSLRFGAARRRPARGCSPISPGRSEVPGAQDDEQERRRRRWPDAGPLRGAGARRWRRSRRVKANDRELQPRCYNLNVGLDALRSRADLVPRQRPSVTAIIDTLRFAYNYSLGSGRESCAWRIKGCRRRCRGAPLPRECVPCLPGSPRP

SEQ ID NO: 1013654 - protein, 257 aa, Homo sapiens
VEWPRAARPQQRRREMAAASAAADTQELVAVGVSKIGATSSSTSSSRKGGCADCWPFCVMEQLVSNVIPARVVPGAWSELVVYEIAMLEEPPGDSQHTSYECLLWGEEYSARTSLVQVQCMPIRKATCLVHVARMPTCCIVLCDPRGSLAKTATTIAWAMPDSKPWGLITAGALYVTYLSRLDKAQDGLPSGPADGLVSCHPGSYLIRVVARSKGIRSSLESVHSRENAWQSPEERPVRGDIVLVFRGSSSHESSIR

SEQ ID NO: 1013655 - protein, 266 aa, Homo sapiens
MARDGQDRPWAQRSSQLDKQFLVCSICLDGYQCPKVSSLPAGPSVMMMSSKDLYPLLHDALTAILVPCMPVRIGPILREPGTSRHWREQRMRSISRSSWQATARMAPEWGPAYSRRRLELPTAVSRTVPSLSACPRHEGKTMECYWKRPCDDGPMCGECRAVEQSVDSMSNKAELTGSLAGRTSNGRGLTKRQGQRLCVGPIGTSWSSYANGRESGEQSRRAGWREAEGRGPVGPRSGARSSEGPWKQGHLEQAHGTASGSRDLET

SEQ ID NO: 1013656 - protein, 203 aa, Homo sapiens
WRIYRGCWLVVMSLFVGGTLGVLSVRPAPLQALLETVHQRLNRAMEEAEKTTTTYLDNGTPSQPKTQSSGERTPECQDAGDENAFHVPHSSTGQTGHPSMKSGACKKQSRKTAGPGSTVHTDGGGHQHQAEDMPGSRQLKLHEPSKNRSAIPRVVNYRGEAKTQGNRRHPTRDNSHTQETLMGQSFQAPRVKGPKRDDTERST

SEQ ID NO: 1013657 - protein, 273 aa, Homo sapiens
MKVLLCGAHSLETTTFLSRPPRHRGANPPYLAPLAAVLVRLRVCALVRIVIVFFRGDPDLADKLFPLVVIHQRDVLENSHHFRFLTAQQTLHSVIYTAGTTNHFPRCRRKCLSDARGALTSYTCALAHPSLSPEVPTYNAKAALALHAARGFLSHAPSKIPICAQGQALLGSPPSESPIPPVTFSVLDQRFSQPLSHPKSSLLPGLLLRFLSFLKGGEGHRCQHRAEKQPRWESSTSSLAVGATGGEANAVTEFHLGEIKCDQLSTIEDAAVV

SEQ ID NO: 1013658 - protein, 49 aa, Homo sapiens
MGAPYGEGRIIYTRERGPACNNQARDGKTPPRDDLEEDRTWGGHKLGHQ

SEQ ID NO: 1013659 - protein, 96 aa, Homo sapiens
PLRGAGRQCLSALTSRTSRACPPGRALLGGCEHRCGTEARFLADLLGPGACPEVVGTGCGLALLGAARPTGPSPSAPHTAGSPGTWAQLVTDPFVC

SEQ ID NO: 1013660 - protein, 188 aa, Homo sapiens
MEHYSCLLQFPPPPTHSCVDQIIKIIIIIGAHLITPSINSTKPIYHLVCDHPHLSTSHVSHRKDQTTTHSPRDDLATRTTSCGPAFTTAGTPLAPTPGDPTTRHTNVPPGPSHGHHGLRTCHYTVSVIPKKASTQTGYKRERIQATSSNHRHSHSDVKRNVKSTRTREQITNFHVQLTAEDRSAKQKY

SEQ ID NO: 1013661 - protein, 125 aa, Homo sapiens
MGATIYCDTHVPFAHALTSMGYRNKPGRHHKRVNANRSNNNLSSLDELRNKKRETAASIAHLGPEQMWYSPTKPNHPLIDHPVGQFNHISAPAGTRHLIENMYTEHRQLRHDISAIGTYYSDSEV

SEQ ID NO: 1013662 - protein, 436 aa, Homo sapiens
IELLRKIREQVLHHPQLGERLKLCQPSLESARAGWELWTAMTDDLPGLAAATTRWSDRTALSHSSTDPELILSCDAHKQLLLKTERAGYIRSSVATPLAALDFCPERPSSSLLSPASLLHRPEQRLPGKPTPDTATSCAAEPCTQPQHGPKGTNTAARRQYDTHGHSNTHTPALAQTGAHATHAQRHGTLLKPPSNGPKAFLVATQPCTPWTHELDSETGSRGRPKKTDPSRDSPTKSPDSYPTATPHHALSPEKPRRPCAPRNAAHTGTLGGSAHCNRQATELPAARRKGYRNPARAPPATAPHGGTDPDRHSLPPYRPKGGQQGQRDHLRDNLATHRTQSGPHTMPPEDTPTLANAPHPLGAAYGNRQHWATATPPRAASKSGRKHYRDETQNVGATRRAKPPQANRQTFPPYFPTLTDAAACTSSKPNPPEWY

SEQ ID NO: 1013663 - protein, 171 aa, Homo sapiens
MENCQCTPRAVALVLQLMASEGRLGVAGALVDPRPYAHNKLLQIALPSSGQLKGEDEHDEEVDHTVKRNAHKNKPFYVQILNRTPQYSHDGRDVEGRWQRGGERDDMCEGRRTRIETKGVGDTATAERQWHLEATLDAQSGGPAEPRDPVTVTSLGTEKRRLGHNPAFTSR

SEQ ID NO: 1013664 - protein, 207 aa, Homo sapiens
MSDVILESYETLRSGLTHWRWMAARRLATCDDVTKPAWTTDRPVIILRIATAGGPWTRPYWTATVSVLRQLSEACRASRVAWIRESQARLHRKSQSYPFPIVPLVQNPPIFPSRVPEMTVKDIAGTTNPIHLPSDIYACGPNSWARYPACAPGVSRTFTSQGWIGWGAFPCGCEKGGEEVSVRQPADRAENFHWLRGLRGPVGPPLP

SEQ ID NO: 1013665 - protein, 85 aa, Homo sapiens
GVRSNAVVPCERGASVAAVIPAYPRAYGRDERMIEVEYEELKTMITVTEDSCDEREIERSSDDVELNEWNSDAYALVSTNDYDVN

SEQ ID NO: 1013666 - protein, 227 aa, Homo sapiens
ALDLVHPAPEKDGWSLPGCVLQVGRNRSVCARQVALNPEEREQRALYADILDYEAGPVTGRKHWQGPAQEDILGDLSLVTGLVSTPCFSSPRPTLMLQLREAGCDVLRCQRPVVPPDEDRARRAVQGAMRLLGEATERQPGDELRRGERVVDERYQTWYMLGRNRSYGMVEREQTWTCECQDSRKGLIGGHPQLTEPCSFGDYGILYTQSGFSMTVYSSKLAKCNRE

SEQ ID NO: 1013667 - protein, 186 aa, Homo sapiens
HPPVRRGTVGGRRCWRALLTGKLTGCAKRRSPRLSCITMAGHFIHITITAGSILVGHDFRKRFSLQPPRTALQVGHPSGSTYCGLPGTRGPSPDNCGSGIRTLDEVLDYGYVTEHIHGDAEELSSSTEAVVSKPFSLFDLRQALACRGCDSEQSKVAPSQMQASRPVLSSRYWPEPKDMTVLRMLV

SEQ ID NO: 1013668 - protein, 135 aa, Homo sapiens
PLNIWCRHGTTPARCYRYSKNNPYPKSRFCRGVTDAYIRIFDLGRNKAKVDEFPLCGHMVVTMNIMHLSSVEPCRLPEFVPHSRHGTNMLWTKSGLPISSGCRLQPSFHVIRIMPRCCSVLLEHDEVYAWSGPYS

SEQ ID NO: 1013669 - protein, 133 aa, Homo sapiens
MLSRLVSSSWSQAVLPPWPPKVLGLQARVPTPGITWLITMTSDVGAGVHACNPSTHGRLRWGNRLRIREFETKVWATISETPSATYKIQGKSQRGTRGHCCSAQPVPPKVDFGARRLDLLGGRRSAGAMARRT

SEQ ID NO: 1013670 - protein, 49 aa, Homo sapiens
MASGGGGCSAFGETASAQNPAWSRSPRGRQRDQKPRLETGDADGGGHNH

SEQ ID NO: 1013671 - protein, 121 aa, Homo sapiens
GSLLRGALRVHRASFSSSPPVLTWSFPSLSQAFMLESLPQGLPTRQFQAFPPDLLVCFSFSHCKRLLVAAWDDVPSTVPHPVPLVAEAIPVVTFECLTGDHNIRSPASDTVMPAWPDPLPS

SEQ ID NO: 1013672 - protein, 212 aa, Homo sapiens
PTREPQRGPQLLGAVAPCSRAGRVVTFDLLPCRARAVSPARQSQDPAASLFPPPLPAPSAMALVLQLGGGGGGPSGGLCAACAAGAGVRAALLLRALSEPLSAVQLRRLEEHRYSAAGCLAARACAAGSTGPGCSSVFPLWMAPNSITLAWGSPSTWSPSSCSSPTCPTATEEAPYLDIPLCALGLWINQSLDAIDGKQARRTTLVPLRGAL

SEQ ID NO: 1013673 - protein, 148 aa, Homo sapiens
PRARSLSPPLPRTRPAHASQRGEAALGEWLTVAGLRPPAAGCHQEGARVPLQGRVQRLRCEPDLVPVLHSAFRSHDMCGLCRQAPRESPSPVCHVSAHVPMLLEMPLTSSDPRGDHDERRHEGGRRGVTGCANALQRFHGNSSHEGSQ

SEQ ID NO: 1013674 - protein, 241 aa, Homo sapiens
LARLRRSDFQWSAVLVEKTRGLGDSALATLMFDEPAWAKAAPVVAGLGARSLGDLLLLAVLPRQITKETPKRPVESSIGPTVNSYSLTRDLTIIVLPTYRTKLVCIISEMLSEEDEYMKKIVPPYTWVIQFDSDGAACCNLAGKEDADMYMYNCCREASGTTLLARVNSERKRKLCTSDKYTNNATARTTRIHCLAHDGQSSQSKAVESQNAISRGHSDPKKTSSPPVIEIPSGSEGTLEN

SEQ ID NO: 1013675 - protein, 216 aa, Homo sapiens
METDETPLDESDGGLGECGESAWGGGWCRVALEAGAVRVAPLRPEGHGCALKLAACTAGAQAACSSLLRGNSGLVRRLGCDGAVWTHCECCREWRCDWPNASWRCALTEVQREGRTGQVRLFRASGLDFVISTPPDARVFGSFSHSGFLACAEVSPRRCEVDPCQGPRGYRPILQLSWLVGLAEQYFGVRVASSLYPFHSWLAAGNFGKWGQRSTR

SEQ ID NO: 1013676 - protein, 45 aa, Homo sapiens
MVPVRACSYRVTALVGSRSGISSYIAGGRRSSVTNYVGVGLPGSL

SEQ ID NO: 1013677 - protein, 133 aa, Homo sapiens
MSTQVRTSEAASQGVRPANAFVLAYAEDQSVVSSPWHCQCTTKVTLASVCEESNLAGTSSTMCMTYTERTHTRRRPQDDTFLHANLYTDARHSIDASRVRSPHLEEHTDSSYGLTVFRHCRSVAWNGRPGRKS

SEQ ID NO: 1013678 - protein, 134 aa, Homo sapiens
ERWLRRPEPLGRGSTGRSLPGRLRQALAGMQPGSRRLLPVACCLSLAWGWLGTKLPELDALSHLAPWADERLPRTPLSSSCGSVLAPASDEPEHGASIPTPQTTGERWSYVGLNKRKKCLGFGLEVIEQEDEAQ

SEQ ID NO: 1013679 - protein, 74 aa, Homo sapiens
MLLRTSHKYSLYRLHHPANTRTHDFLLTTISYSVSILSYYFIYGNVHVELERKKCFTWFALVRPEHADSTKKST

SEQ ID NO: 1013680 - protein, 73 aa, Homo sapiens
RAQEAGGRAHGPDGRPSGSAETPASLPAGPARHAEGSLDMDKTPKLLPQHTAGTHKPSLPPRPVSSLTSYLTT

SEQ ID NO: 1013681 - protein, 490 aa, Homo sapiens
GGSRSPGVAPLPPPPGAMGAPPELPAPQLGCISSHQVPRSRLPASCPVPMRIHCAPMSRNTSRPCLLGWRPCAGPGLCGLTPSYYHSACPNHQSDFCLHAWPLLSPLRVFHRQSPSPRVVTACALPCVSCHYASAPFLQPGLQPWTNFCGTHWLYPITCGSHPQFARNPTLVHHASTASHQRSLPPVNTLHGQCTIVNTRSQHLQYHTNHTNFNTATTTRKHHNTHRSIGLQAASAPAAYGATRTGDPSPRPANVAPDRHCTRLESPRRIAHCRPQETPYARHQSLTVGLGHVPGYEHCGEAHASGYATQLQALCGTLGPPVTPTQTSRRPLTPARRAALTNRSTVPFPGLLVNVATYPQPSHDNSRLSLVSCSYGMILTHYHCPTPHAAVNALVFYPHLLQVIYNQPIQYHTCTLHLPMGTDRPSCYAYHAQSLRSVLMPGPSKPPSALACDSLTAHRTHARHLALYTLSRLRPYHHMVLHDHHSHDLT

SEQ ID NO: 1013682 - protein, 182 aa, Homo sapiens
MTHSEPRTVNETKMQDEPHQPSGATATTPLNQNDEPLTEETTTRRGPSHKQHKHNHAADTAATHTTTNHHQNRHERQQQSARKAETRRERNTKQKKRRERQHNEGRRRTQDTETDRKKTHNEQERTRNRQDKEPEKETRAEQQTTKNRERESTRKKEQDTQKNDRRKAKVAKQQNTEQQNTN

SEQ ID NO: 1013683 - protein, 107 aa, Homo sapiens
MAEGGRFSETLTAAISQCKLKEITYKLMHSNAIVWNRGRNRFKYVHLSVLNSGFISYNRTGYINIKVHKQILPYIPPSFTNEYLYRSTLTRLSTNQTYKGYQDSLIH

SEQ ID NO: 1013684 - protein, 404 aa, Homo sapiens
MHARLSAWSLWRKERCVASGQIRLWDTPYTQENTIAKKITLKDDTETPYTRNKHNTKQKQQTPTQKTQHNKRKQRPNTQRPQNKKKQQQKKNKKHTLEKTNQKTNPAKHQRTTQTSTTTNQTTQRRKHTNRRDQRPNAADKTTQDKRRTQNHTEEDENKNTDEKKENTTKRQNDKRRKTTPTKAARQHRTAEQKHNQQKSKERAGATKQKGEQTKKEQQKNSKKRHGKQKPANRPPTHTDQSGSNPGHTRNSSNTHDNNNQQGNKAADQEAAAPKTERTKQQQQKRKQRKPKKPKTQHTPQNKQHRTRRGAQPEQHTHSTTNTRRTHRTPTNDTKERTDAGPNRKRKNGQTTQPRTQPKADRTHSNTNTQQSRPTTRNQQDKNHRTPAAAQTQTEQTKDTSTRR

SEQ ID NO: 1013685 - protein, 184 aa, Homo sapiens
MDIENSLTRDGGFPKQIGENYAKRKNHQRTLRKTKGSGITMTIMEPITNCGDVKPITQHINTGENNRPHSGKHTTWWLTPEGHWETAQGHIESQRQKTPATHNTHRQAEPTRGRHKKPQNYGKQGPTIGSQRIERGKRANNRTKRHAHKGNKDEVKQHKTVEAKQPGADKHKTEYTRTKLTTQL

SEQ ID NO: 1013686 - protein, 287 aa, Homo sapiens
MVQECPTVFHVPGASHGVVMNRDSSFNLVQQWFPVASAAAMNLARARTPAIPTAVNLADISNGQLQHAANELVPDPEQRWHLLDVNLAEHSHSHSAPAVNLDRVPEPQTDLADSESHRLWTQHQLLQTYPSSSRTPQAPDLWQTWWVLRYCNIDQRILVNLLDLVSQEPNDKHLGHPLMTIHQMYQDMDITGKYDLGCKSINQERHGDGATYDMTLRKPLDHRKRKQQHQHKHRIQLCNTEDHNEDHKKRATQHETLAPPERPQILSAVNHHSVENPGGASPQFYPQ

SEQ ID NO: 1013687 - protein, 56 aa, Homo sapiens
MNTCGNVGARLGRHELGKTRVSLGDADTRLQRMREGDYSGNREKREGGTPTHRHTT

SEQ ID NO: 1013688 - protein, 147 aa, Homo sapiens
MDLQRNSDVLARRSADPCIHLLPMNYWHPLNAGHDSLSTLHAWTREDHRAPPVWPHAPVRAKPRCTTCPISPGMTERPYATHSTVQGQRYIRVRNMEEHKPTADMTQVDGYTNKIKRYRKSKAQQHPTYPPDTKPRETTTNHITHDN

SEQ ID NO: 1013689 - protein, 70 aa, Homo sapiens
RRALRRHVSSCRVTDFFAAPPPVAYSRIRPIHGCTVEHVSIEVEDELLDINIEINYYSEQHIPTIHKTCH

SEQ ID NO: 1013690 - protein, 183 aa, Homo sapiens
MPSSPSERDTGDPGGTGEEEGAGQLRVRIGRVATDVIASGLQGAKAPYPQNPPANRLDRPVGGEAVSQFGQKDAREGPVLGGRWNPGQHKQCAGAHGSRAIVVHKSPSHGTGTGIFITRALALVCGAFLGVWRTPNFPWGALCLPERLGCVPPGLAGTPLGKVWALRRMATPFGGQILAFPSP

SEQ ID NO: 1013691 - protein, 90 aa, Homo sapiens
LVPSGFRDLPRRCGSGPAPAMARLTGELRRAVLAACSSCSRVPSPCGHAAGPSPPGGSPDGMKDLDAIKLFVGQIPRHLDENGPQAALRA

SEQ ID NO: 1013692 - protein, 125 aa, Homo sapiens
KVQLGPWLQRVQASSLGSFYVEFNLWVHRSQELRLGNLCLDFRGCMETPGYPGSLLQGQGPHGEPLLGQCGKEDVELESPHRVPTGAPPSGAVRRGPLSSRPQNGRSTDSLHMCLENWQTLNTSP

SEQ ID NO: 1013693 - protein, 446 aa, Homo sapiens
MPPQTYNTRRTHTRRTQTRTWRDEPPYHTRNWPNTPPLRQHKHRPLHSRAPIALALPSPHGFPLPRNVVLRDQNVSSQHRKNNNQRQQHENAANAKIDTNKHTQQATTTTPRKRQTQRRHKTNKKLEDIKKRKKKIKPKKPTNTQKDGKKQPTTGRGLSTSEEKESTAQAESEAKRKTERQHDNKTTRDRATGAKSDQQTQARRSNATSVWSVSGIHGGAVDSHSNRGVERERSDEDKRRAFGAGRSISAIDLKEQTNRLQWNKVTTNDEEQGELTCVNTDTWSSREKRTGAGAESARVEWSMRGDGGEASQQQGEHTAEEETRDATRTGGAEHEDNGETGKRDNKRGRTEEKKRKVGDHREDKEQNRESDGRTEQTQRPQLAERGEEREGGRNRTRRERISDRTKAKSNKPRENLEKKKQKRQRQRENGSNSERARNSEQMKNRA

SEQ ID NO: 1013694 - protein, 135 aa, Homo sapiens
MGCDRWSPPLWACAAGLAVARPPNIVLIFADDLGYGDLGCYAAPQLLPLPNLEPAGGWEWLLFTDFYVPVSLCTPSSGPPPDRPAPGSGLGMYPGVLVPSSRGGLPLEEVTVAEVLAAPGYLTGMAGKWHLGGGA

SEQ ID NO: 1013695 - protein, 207 aa, Homo sapiens
SPLAPAEVLYRGPGPGLRCCDPARCCRRWGGAGPRRKPLSRLGWAGQGPGAGLVLAGPCSMASCRGLGLGGTVVWSAGNEGRPPGSRRCGARVGCGLYVSAGTRVRASDRVCSCEARVGRLVTFGMSNVVDLPPGCTKQCPCIMPQGPSPACPSSERNGDFVSVLTPGSYRLAVVLGVSSEECVGERSWVWLLGRRGRQGQQPLGRP

SEQ ID NO: 1013696 - protein, 157 aa, Homo sapiens
MISPFLVLAIGSCLTNSLVPEKEKDPKYWRDQAQETLKYALELQKLNTNVAKNVIMFLGELAMRLSPHVTAARILKRSSSTINPMGRTTSAGPLDNVPHSWTFSNDVQHHMPKSLISAGTCTAYLCGVKANEGTVAGEALPLIVPVCNTYPGELGHL

SEQ ID NO: 1013697 - protein, 48 aa, Homo sapiens
DDFYIITEGTSVRAAAPVPPIEEYVEVGRPGDPLTIVLGRLHCMLNRP

SEQ ID NO: 1013698 - protein, 234 aa, Homo sapiens
GSLRAAGGTLMLHCSVLRRRLWVLVCGCVVLAVGSAERLGRGVQPPAGTMRARLARALGVGPAARYPPYCPERMRCALRAWVASDSGAAYAMMDEPWWEGRVASDVHCTLREKELKLPTFRAHSPLLKSRRFFVDILTLLEQPAASSALHPGTWPSTCVDHFMDPLQLSTPPSSSTPVCPSPCLPCLQSGVSALYRPRLDSCKWALIFSIICNPSTFPRIPSKFLPCYQAPQNP

SEQ ID NO: 1013699 - protein, 274 aa, Homo sapiens
ADLKTCKPVLNPGLGSWWGVCYEEEHPYHSVTAHTRSPVPLSTWYSAQRETPMIEDDTDRDAQEHPLRTHSSAAVSIPCRRPPPSAKAVVSTTLEAGVGRHAYQRLHMIPEIAAAGEHLGGRPSNQGAPTEKVAGKREGLGGLTAAVSNDLEQGALRETQGDFSGGPRGHRITWYAEEGRSPPFSGGRPGRLRCLETRACEAHDRRSCRHPYKEGTDGLRARACGEARHHRRLAFRSTLSGNTRGALPLVARQKRGRLRRGGKGNPHEAARGDF

SEQ ID NO: 1013700 - protein, 69 aa, Homo sapiens
DNGIMIAWKGIERLRAGLGILHDIEGIRYEPRMSSWSRHIKRSWRSFHNEYQQLKMADYDFRACCKKSP

SEQ ID NO: 1013701 - protein, 366 aa, Homo sapiens
RLETRHLISMQTHTHTHTHTHTTHTHTHARGGRPERPRSRKKEGKTTEGIGIKYRHDKREQGVQRKTEKHIKHTTPKQEDTNTQTRRAKKRERRKTKKTNETQTQTQEDTQHSGSERDKHTTDRPGERKPQKKDKRKTRLDEKTSEKKKNAHDTKTTQGTKDEREGKKRSKKQKKKETKEDKKPNEQEQEKNENNTKEKRQKTKTKRKRKKKAEERRSGPEARKREAAKPQSQKEADRTRTPRAGTRQEQRREKDDARQKNREKTGEQKGTRRTEQTIARNREAKEREEREPKRSTTGEKNTQTETRTESKKKKEEHERDAKTQNKNSKRKRQNKRKGKANRTPKPQKHKKKTKKKKEKTNKEKTE

SEQ ID NO: 1013702 - protein, 254 aa, Homo sapiens
  misc_feature (38)..(38): Xaa can be any naturally occurring amino acid
MAHCEEMKKGLRKRRGAASQARGRDSEDGEFEIQVRKXDCPWPWKSGTWNDPVAPTFPTSECTSDVEPDTREMVRAQNKKNEEVVEAFRVLVGTERTRVFERQIMTGMGYKVPTPIQRKTIPVILDGKDVVAMARTGSGKTACFLLANVQERAQVPQCPDRVPWALILSPSRELALHDPVKFTNGARQVHVASKTGLILGGDRMEDQFGVLDERSRHNYWQARTVEHVAVENEPESAECGIRRCTGEELNGFYE

SEQ ID NO: 1013703 - protein, 333 aa, Homo sapiens
RAGASGPLLVGGSRGVSAPACLRSTVVLVAEPIGVCCLGHVLQYNGAPCCDVQACAMHLLKNAAEMCSVEQMEVLNAAASPSETILKSSVDKRFSGCITDACWMCLMLECPSTVLWPWWTLELTIEVPCAWELPLVKGEAADAVHAGANCCQPRYGRTHAALARHVMAVHAVRPHVSHCCAAGSCAKRVSGSRPVGRWGSRMGPGVMKADAVRQVKPKWPPACACVTERGAKGRARPRREDRIVAADGRRARNPVCRTEPTGLQPDGPKKHRREPGANRDGARGTHKPPGHHPERRVKPMADRERPSIDGTARATARRVRYAEAQTRRHRNAH

SEQ ID NO: 1013704 - protein, 158 aa, Homo sapiens
MYYPTNHQLQIQHRHDIRRNEWHYYMAPTIRTHIVHIATQLNEHNINETRHTRDKEQSASSSQRMSAWSPHDYVHRRRAHDKRNATQTYRADTISATPTRAYNDSSIRLSKLHEERSEAAHRTIRRKARRGVISSADEATENDRRSMRSSSTNPWSHS

SEQ ID NO: 1013705 - protein, 211 aa, Homo sapiens
MACAPLWTLGTMWLALVGVSLLRWVHTKAFCMAVQASSTIYQQSLEGQLQFPAGENCATLVRCTWISAFPAEFDLNPELAEHDQGAEGSAETKKGTDGTAAYLDIDSVPTYKWKRQVTQRNPVGTEKAQDVPVVRPPGAHGAWLEHLTYLEYTLLLQDPVSGTITSYGDSWVHCGQRRSWSGSSSLFNSGSTGVAAHDPPQNQDPQMGLVI

SEQ ID NO: 1013706 - protein, 263 aa, Homo sapiens
AGLVRARSVSLCTDRGHRAVRSQCVWVLSDLDHIVDIPRWRPWWPRMKPYEDLDEGSRMEGDGHFYAMSLEQHRWSALLERTQSTCQAREAARQQLLDRELKKKPPLTGAHAPKPAAAPATEESEAVEAGDPPEELRKNFTTYMGGWTSECLTERIRGKDAHPPGSKNPHSEGAPSTRQAHREVPWGSAAKRGLVPVVITGDNISTGLPNKGKEKEEQRGGPKGAPERKRRPQEEKPGEGQTSIEARRHGTKSGTPGAQGTQG

SEQ ID NO: 1013707 - protein, 382 aa, Homo sapiens
MASHHVHASSSSSSSSNRQQQLQAVTACSSSSMQQLQQQLVTACLQQLLQQSPPQAPLPSGCQPGCSPRQHATAGLLSDSPWATNIKPSLLNWLHCLLRKLLLQSMQFGKELRPRLQCHQARVLTAGAVHHAIAHDAHTWCNLARGYWQLALPGGHQEGPTGTVETTPRNWTHYANFAHDVILLPHTWPRQTHGTIWHGSTRSRRVVCEGTPFGERYFRKEFKARISSEGDNTREVNSRGPWEPFPDTEFSYTRRLGHALRTAGEFSVTFRFNDAYVACVEEQSMSEGAPSAREVCSARLAQATGRKGSRMILRASRPAKSTAEMLRRYQCPRERSNSLPGGYTKGVASRTAIDALEDLLVRGFRRVRPDTEECAWNPYQSC

SEQ ID NO: 1013708 - protein, 121 aa, Homo sapiens
MGEWAIREACHGRYNWCPVRDWYYLDDLNPPVWLADPRGAGKRTKTPGKARPQKAKQSAWDYNCKGVGYEDYPSGQETTADRSTLQKAYKGTPEMEDERRRTGERHRRNNGLQQQSKWAQH

SEQ ID NO: 1013709 - protein, 223 aa, Homo sapiens
CASRRSLCAAAFSSISFPPAPAVRMATPVTGHARSGSELSVRVLCGASATWPECAEELQPALALTQLVKDRNCGHAPATTYYALAHTVAPNTSMGRMKFQHACKHYYRARPPRRIYYHNPGILHGSTRLQKPRWMNLGLQNCQCELKDHTIRDGGKNFGMETYEEMNRKTRLIEPYGRNGKRHRNTARKKRMKSHMNIKRGLNHDGEAHGKVKNGEYVASKWK

SEQ ID NO: 1013710 - protein, 59 aa, Homo sapiens
MPVALRDVCWGLRQPAPALGDQLQGPLPWLGWACNGAWGERVLVCMACGGPYMGHLLAR

SEQ ID NO: 1013711 - protein, 202 aa, Homo sapiens
ICGLCAKLAILSCGPPWPARTSLRRRRAFRDAGCSGGSVNGASVVRWCCCSEALAHRKSLVMLPWSLPWLPWSPICLVTGRCWKCNLPVPRGCLLPPGTPCALCAPWSASPRRRRRPQIAQSPAVACGMLPTDWSPLVQTLHGPHAAHACQVPPTETNDPTGAGPMEAIGPYIRGYLGGPGSSEEHNPYKNTNKNMERIQEH

SEQ ID NO: 1013712 - protein, 267 aa, Homo sapiens
MAILQLKQQLWTMLECSTRRWIAHASWMRCCCALALAVCCGTGQERELVPMLLALRRTLIPCDACRPVTCDCDDTKIHAMALARHMCSETYFDCSPHDRTHLTHVDCDGGLQDIGEQCCMLLRREKLPPGVDLSDLQGRVGKTGIRCDGGTGRGGPVRQYPELCQHYDGCFLCGHAKAFQLQVQRIEQTAQSLAQGTLDAANSTFRGKQHYEGLRTKGFTLPGMRPFPLKEQIPQENTVSHWSKGPTGPHVARAGTPWPGQRLSVNL

SEQ ID NO: 1013713 - protein, 284 aa, Homo sapiens
MRPADTLLPLRLFSPSERSLGLGDRPGGHWLDTIASTPILCAATCRTILSCGHDYMPLACASQRGITWPHSELIPTGLRTPRLFAIMGSKVPTEDQAPIRTNLTVRISGRRLDVCNLGGNTDGNDSQGTRHIVKEMTTGELSIPNHIVSIGDRHGQRQIDILPERTQNSSGWILDLREGLRRCRDARVTPFAKTRRRRTRTEEPQGTKSESHNRGEKTKRRRRTHKQQENRKGHKSHWGKRHYDHIAGQSYEIIRQAKLSIPGDDHQLPRYTQNLYTHTAKRYQ

SEQ ID NO: 1013714 - protein, 201 aa, Homo sapiens
ARARRAQAARASNGRRVHRRSARPAAPIGRGGPHLSAARPRGRSRGGLCDAQTPRGAGDWSVVLSRLLAVGGEVRGDTWSCFGRPCGSRTSLRALPVSLDGKKGWARPVSVPIGTPSRAADPSQGEMSADAAGGVRSLTRGSAAWRRVRTGYGIPAVDGGEGQVGPMYIRLVEPRLAGREGGGCLAGDRWLEVNRENVEKE

SEQ ID NO: 1013715 - protein, 32 aa, Homo sapiens
TFTVSTLPSFVPGVLSPSPVSRAAGGGSRHRG

SEQ ID NO: 1013716 - protein, 189 aa, Homo sapiens
RGGRITSVSGQLCSAVVCLQRADWSGGDEAGGVWQYVGDAVCWHKSSGLGEPGSSSNSSSSRRSRLPVNCGPYPRGLPSLAGPGKPQLRVPPQSAVGDGQAVAGPAVPRVNPRTVPGPELDHEPSSRNHLRSPLGQVVTQPESEYDKQKNNTEKKKREENNNERREQTAKKQETRRKKKQETEKRKKTR

SEQ ID NO: 1013717 - protein, 174 aa, Homo sapiens
VAALPLLLLLRLLAEAGGSMRRAGGLRLMRAGVMVSGAGRGNGRKRARSAQSALFRPPEEPNAAPGPAACRLALPDKSLRCLAPTAHVRRHAGMRATSLSHEPAAIPHHDTCGPSADFPRELTFNRAIATDAPGVDCSIYQRYTLVTASSEVDLLHSKRFLVRHPYAKFLPMCS

SEQ ID NO: 1013718 - protein, 270 aa, Homo sapiens
ATLGWSETLSQNEKKNKKRKEREMGERERERERDSETDTEREKDKENGRAQCPLLQPCRMLLACALEGADHSPFCPCYILGASLYLCAILPAVCVPACASWICYCAFLAILALIRGAFLFQRTLCGCKTPSSLYLGCTWLVCAAAGRWGPAGCSHLLLHVCAADTSPALPGEDPCVTLQPCAMASCPAPCVYPALLRACASVMVVRWQPAREDALHWSDSVPARALQLTEDPDHVQLWDRQSYHQPLVNPLAAGQRWAPGAYREGGVRRI

SEQ ID NO: 1013719 - protein, 310 aa, Homo sapiens
SLSFPAASGRFPAAYFLPGSLAPHLSGLRRLKPLGNMQQPLPGAHAEPRSPVRPRPTFAAVRTRDPCGIPCIRGPAKWWSPETERCGRALEAEQGPRYVKKPCTWPTPCHGACAAPCLSKQPLFSPEISPHMGYTATSQHEPLPGPLARPAPSLGPGTSSERLNQTLLSTGPCGSPVPDGTCPDTLLWTWRPNERAGAGSHPHKRKNTFLREPHKPQNTHPGEPQTREWQQRSPRNPHMSPQTTQTQRHPGDHPKPPKIQPTEGTHRAPAADHSPRPHTNTHGTNTTRGKSRHNTPIPKSVREKYEQHKK

SEQ ID NO: 1013720 - protein, 114 aa, Homo sapiens
WEDGCDSVASLMRRPVGCEPVPPWPRDLTEWSDCAVAWGVMVSITQLHASMSCSLPQTSPDSGCLACCLIPPVQPCCFWCAQQMGGTWPVVRMAPVQVSCARTCMLCILGTCAE

SEQ ID NO: 1013721 - protein, 210 aa, Homo sapiens
AGSGQRRPWWRAMLAGDDGAGPSSFVRPALPLVLAGVCRGCVTPGCGGREHLLAQCCVESGALCQLVVGALVLAGGALNCMPNALWLLYGVPNVTWALEVAAAVVMATYPLARHTRGTRGGSTPGKGLGLCGVRLGLVAMGPRKWETPVRVVWLARNMRPGGSITLWGHMGKGWKGHWVPNHYTFELLNTGAPEGDIYFKDLIGCTRGAL

SEQ ID NO: 1013722 - protein, 33 aa, Homo sapiens
ASGGLRRSERGSAAEGGGWLSGTVTCRCRVRAE

SEQ ID NO: 1013723 - protein, 275 aa, Homo sapiens
SGNQSCPLLCFVPVPPVCCCSWELSACWLLGGSTAWHNNVWVCVCTAAPGCHVGLPGWRGGVGCGSYLPEEAAWLCVLLELRLDFPAWPVAPQAAGSTPQIHLDSRFGSQQCQLHCHPKVLLWKRTWWCHCCTSDDTKSQIYLTGLRGVEDCEAIAYRDWLASSRASEPGLLALAWVEPGRAPDDPQWNPGQSCQGPGHPNRLPSHGPSSGEAWERLAGLEIKPKLLKVTHRRVLPGVHPGYLKAAWTGNWLTWAAWESAWAWSGWHLSGNAHTN

SEQ ID NO: 1013724 - protein, 249 aa, Homo sapiens
ALPRWGSLCGAREPGLPPVNAGAARYCRMQPRVVGDPCCSSPVHTGELLLRCCVAVVAICAGVMAPRSSAGGAALSHGLLPPASRVANEMLGLVMSCPDLDPGDESPNVTRSGNQHRPTRWGFQNVSTAAAGVLASAQAALQLCYHAVLPFSADSLPALQPGGPPTDVCCTQPSLGLPQYLHSYTPTWLLGVEEMGTDRDLETACKSMLDDQGGKLQGPDMVGAITALEGTHPGRPHDILAYPGANPPI

SEQ ID NO: 1013725 - protein, 109 aa, Homo sapiens
PQCDACAGADVNAAGRSFTDLCTADPAEAESSRGSWIRLLCLSPFCVPAMDNSGQGSWRRCALFVPRAERKVKNSTVLLTLCLFWRLIQNRGSMRNLRQSSKQCSQMCQ

SEQ ID NO: 1013726 - protein, 225 aa, Homo sapiens
RGAWQEFKAAAFGEKELDAQLDAYNGEWTPVKQTSKSCVRNMDPVRLLLLPGKAGRGGCGCAANDGFVSLMLLKYGFKKLMEQVLLYLFASNIFFIASRNPHLCWLTPSVPYCRAIQHLYTWVVRVMVAVSTNWARARIARRINRPHQYYNYLGTYGRVIDTFVGNNYNHIGSRRHNQGGRARQELDRNEISPDSSGDDQAPVHDESTPKVLVIGEKYIQVMGRQ

SEQ ID NO: 1013727 - protein, 279 aa, Homo sapiens
MDLFVLVRLEDARESYCVQNQSVPWTVPCWELDLRATETRDPVRMKIIADIQEDGQAMAMMDAVFCISGKDDLCAAPWRYVRKFVYDCGPTSIAVSLKIQTTQCPTTRWPQAMKGVTKAMGTMNRQLKLPQIQKNHDGDLIGHGRDHGYEGGDDVTDAIDDAHGVLRKDEEGDVMAAVCSPGFLAWRLGTLSLTQHAAVRNLTLKLWGARLQWVDLAMVGDNTQHDGGQASKRLSWIARVTERLEGTRLKEAVRDGELGCHIAKIRVNNPCGSPEDRVP

SEQ ID NO: 1013728 - protein, 96 aa, Homo sapiens
IGARSGALMTRKGRGHACDVWSELSETVQGSETAPMCGECLKGLWSLSCAGGLLVRRLRPWFCCRLVATTVWRCLLCGNCLALLRFLAQCRIGVHL

SEQ ID NO: 1013729 - protein, 143 aa, Homo sapiens
MKEWLLLLGTHDGTIRSGLEHRAIRLKARQWSALIFLCENSRVMSRPNESVSSVSMNDHIGHYLYYITEVSMIHTTEVNLGMSPTISGEMVIADKHAGENKDGVNFDEPQDGDEKKAGKMAENVCVQYSSTIKRWAQTKYYVT

SEQ ID NO: 1013730 - protein, 129 aa, Homo sapiens
MALQRNDHLAWRVLTDLFPSLGLLHVGSTVSPWEQSLVNPPACLSGFASIRVRHSGRHQGGLGNGPRPPFRRRIGMAAKRIRRHGGALRESTMATNTARGTRGPDTYKGARQSEAQEGTTTWHAGRSTA

SEQ ID NO: 1013731 - protein, 334 aa, Homo sapiens
MALPSPLMENHGCRCSVLVPLCMMDLLQVDPDSAHYQRMQPKMYEGHANILVPLSYPSHVGKCGRSILTRPVHGPIGRADLVHEDPGEGQLDKGRLSRVITKERGTGKGLTKDKGRAGDAARGPAHRSGRDGPEKHERARGNNRTGYTGEQRSASPALARSYRNSTNKDTRGNQFDRTRALRYIAPRGAKSQSEGRTTEEQRIEMPRVRKSTYEKWIADKTKTVDRIATHKMQPPENKNAELDIGKRPPENKGQGNEDVTPRENVFKRNLKQTQRYTERRINTQPGIEDDYTSPNEVQHVTTHTQQAKASTTPSKVQKQENVHRQLTGGCKESA

SEQ ID NO: 1013732 - protein, 119 aa, Homo sapiens
MAAVRAKRPRKQALCSIITRKKIFLDPSRCFLYSSQNTKILNSGLGKCLYVCLHRCGVVLAYPFSPVTFPVISETVGIIERSSTKELTLRVICGHGKRHTLCLEVLRAFSKFNAQRETH

SEQ ID NO: 1013733 - protein, 168 aa, Homo sapiens
QTQWRCEGCCGCSPLPCCPLCRGVMRADHALLICPWAAVVPAPGRWRVCARPSLDRSPWRLGPGFRRRCVGPPLHGAEGLAENRVLLLPVRVLGGALPCLIRSPSSVINNPYSSFGATLVRDDEKNLWSMPHDVSHTEADDDRTLYNLIVIRNQQAKDSEELAGRLNY

SEQ ID NO: 1013734 - protein, 65 aa, Homo sapiens
MPLDKYAEDPMGGGLALSWWGYPQCKLSAMDLGQLLRQAGLMKSTEPGEQPEIIPLASDHRMKKH

SEQ ID NO: 1013735 - protein, 178 aa, Homo sapiens
VRGSLKRKEKKVCAELPGKQGPPDSLPGWSSHRPAAPGGRRGTDVLLVGARGGVAMQLVDSARRPGSGGSRGLRLRLSLLEGRRVVRCASPDLFLFQKRARSGRHLIHVLSAWLCDRGRGREPQWSINHRTVRTLRDVPDHLRKCVKGRPFNNKPPCVTQRGPWPRKSPIYPDQNLYR

SEQ ID NO: 1013736 - protein, 282 aa, Homo sapiens
AWRPARALGPAGPRGASCGRRRRARLPAAWAHDDEVAVPAAGRRPEREKLKQELCAFEARLWSMASRISPGPLAFDPELRIMAIATRSGAEKIYGAPGGGVHRPCTVDAGHCHSEMHLLELARAASCSPALMTACSCILWGDGPTSKWLCPSWKNARRSSSLPSRPGLDWCQCIRSGFSRVTVVLLVAAGDFSSAWPLRGSHVPPSWSVTRAESLLEGADGLPQGEVLARLCPRRTYGCWEGHLGAHSESTIQGTPCRGPHKRFLMRYMPGACCSSGTRPRV

SEQ ID NO: 1013737 - protein, 190 aa, Homo sapiens
RGQRKGAVVCDSARTCKHRTGAAAHAALEGFLLSGSATSMGICQGLHPLTRVTCGAAPLPRWSSGIRIGIRKRDGAVHSRSEGIHDGATFCCIAGNEWPSSTSWQCAPVWSNHCHVGYNQKLLALERQKPGSPVVKLAPGHQGTMHNAVIVTYIIPVDSREMTAVWNACAIAGFAMRGLISHRGHSRACR

SEQ ID NO: 1013738 - protein, 245 aa, Homo sapiens
SWYGLEFKDASPRVARVLTLMACSFRERSRTSDPDSVTPARRRPGGRLEAETDRSVNSSSWRRLLRASSPRELGSAPWTHRVLISISHAADPQGPRTQRGGITLHKNLLDVLSWLRNGAAQPLPERALSPELIPVRLEKQTSQYSQPSRPLYSIRGILVTLRRTCIGCRGPMPCHVQRGAELYRAACIPTLWDVGDIVATAENDDRQDRAQHKVPNKSCITRHHTDASYPRFDIFERSHAASSSQ

SEQ ID NO: 1013739 - protein, 195 aa, Homo sapiens
PRAVRSGVYGVRRRRCCPVGLPVRGSALAARPALSPGGGSGSMALWRRLAAAAGVSATVGLRVPADRGWRGGGWVPWPWGDCEPVRMPPGSWEPCPSRMRCPLLSPERRQPDALGPLGGPVAACGMSRLLGGTLERVCKAVLLLCLLHFLVAVILYFDVYAQHLAFFSRFSARGPAHALHPAASSSSSSSNCSRT

SEQ ID NO: 1013740 - protein, 72 aa, Homo sapiens
RLAERRGAADGSGTRLASSDAGRGLDLGSTQTQEQMSTDVCIHTWVHLLPGAQEAMGYWHTLSLNIAVASGA

SEQ ID NO: 1013741 - protein, 183 aa, Homo sapiens
MSARSRHERRQQPLVGAAHRLWDPDDRDINRSPQLLSFSVRLSGYCGSPWRVIGYHVVVWMMAGIPLLLFRWKAPVGGVPAAAPALQTWPKPKTLVHRNRRHKRIVPGSSSLSRCRLRPIGEGTLADVPTSPRQRMAGARRGRWGGYQRVPGRIRPSHQAARTAKRVLRKYLFQGQRYTLDRD

SEQ ID NO: 1013742 - protein, 249 aa, Homo sapiens
MALALQSPAVGCCSRLLLLLRLLLPPRRLLGLTAACILDRAVVPAPRRPGPAHGCPVIISSPGGAHLWHPGTQCYSSYKAVKTKNVKEYVKWMMYWIVFAFFTTDETLTDIVLSWFPFSFELKIAFVIWLLSPLHQGAPGVLYRKFVASNDCPTRQNGDRTEYITQCPRQELCRPMMRVGKMGPEPAANANRHKLDAKGQGGCCQKNAPQTFSDARNLSPNHGDEERQWTLTAGPYRVRDPERDPRQHI

SEQ ID NO: 1013743 - protein, 263 aa, Homo sapiens
MDRELLRGLLLLAGAGACGLRAGRRQAYTEYGGGMAESEAETPRTPGEFESKYFEFHGVLCMPALLPREDGVRSPTSRCLPSDVWIVTYPKSWHQLAVQEVVYLVSQALTPDEIGLSEASERCSSRSMEYPMRGLDIIKGTDLSPAHQGATLALTALLPSDLHNGDSKVIYMARNPKDLVDVLSSVPPVSADHELPRHLSQNSSRRVDWLISLGYGILVLSTLQGVLGAPAWTRHVHFSQGIEDSAYGDLVTDWWRQAGQIPG

SEQ ID NO: 1013744 - protein, 149 aa, Homo sapiens
MNTSPVSRVMFSPRRSGGAVSGGVWGPETGSVLRRCSAQAQLVQIVWRSSGSCTVVVAPRRGHQRMPCGDEDLSGWRRLSVDQKTSMVVISVCEQGRCGLFAVLPYPTRGMPIRSSSLRTNNGILSPRTRIGRAGTHLMKALVRSSKTA

SEQ ID NO: 1013745 - protein, 266 aa, Homo sapiens
MFRRPGTGGGERAELALPLPGRRLQSVRAVPVAANCPELLAEAEGDVRGLHLEGACRAGPEEGALPWLTASPAADWGAGCGPGKEGWSPGPAPLPFTLPWYLVWARSWVATTSGHWGISSVSLEPFSYPPDARSWSSSERKDEFYECFVECSDAKHPLLDLDAGSNFTSVYTFRRASKMCLGSHVIFSRVVFQEFLIRYPPRQAWRPTGFGAIHGWQVVSFRSPEVSRQLIVLDFEATCDKPQIHPQEIIEFPILKLNGRTMEIES

SEQ ID NO: 1013746 - protein, 333 aa, Homo sapiens
PGWYWSGMYGIEKLVVCRVLVRSRTHVWTCRGAGALRVAGIEEPRCGGDMLAVACVWSAEPGLPPMSRRALAGGSLAYAARWPKSHSFFSLLKKNGRSENGKGEPVDASKAGGKQKLVGLRVCCSAGMLLATVKDNAVANCVSACGLGRCALWVRLESYPCARSTCQPCECVKDGDAQSRARSRRSHSQDAPGRPRQAVGEYYCETKEGRRQGSQTVDKALFPVDHANAWASVLKTSNPGPWLAYPSVVPVSRDVTRSRDRKCWDRTKHLFLTREGSVGRTIAFFPPINREGSQWEPQSDPKVEVASGYKRVWTSHWYTLEKDPIWFGIPRRN

SEQ ID NO: 1013747 - protein, 136 aa, Homo sapiens
KRLYGLGFRMRRGALGGSLAAGASDPGSLRAAALPGASRRGPPAAVRGGSELAAGCAQPGSCCGAATAGNATRTGTRWRSWEAARDRSGIPGADARGWLRTACLKESEQDVEDSQNHTGEPVGDDYKKNGNTFLVN

SEQ ID NO: 1013748 - protein, 194 aa, Homo sapiens
AGRYALPCGEAPVCPSCFENRVSDAGSSLWPGHWKGRHSLGRLDSTELNGRDQTSDELCNPLPNTPSRCCRRFQPANSRGGCLDPVPSRRTDLGTKRRHPKGRSNAAWRLFVIPRTPLSPPAPPPLTRNLKAFFLGERLPQSWKTPGSLQAEDSNASKHALHHDPSWRSLRRRGMSKLAHGHRGSVKAAQQPRA

SEQ ID NO: 1013749 - protein, 146 aa, Homo sapiens
MRPPPQTPDGVRLTGNCAGPGPGKDRVQSPSSDEEGVTNEAIHEQWSHFLHQRDMDKHDAIEKKSSANGMRVPRPDLRELMETMHRMSHLPPDFEGRQTVILCWLQTLSGMSASDELDDSQVRQYCCIDLLSQALSERLSSRFLHA

SEQ ID NO: 1013750 - protein, 302 aa, Homo sapiens
RWYGQDLGCMDPTSRSNGTRKLKGVAELGVTKRVSARGPAGFRSSSPLDLFSGPLALILRTRRPPHDLFSQEEDTAARTIDKAETPGKQWERQHKMKRRRQNAGGLDEVGPLAQAVLLTKMHGVSGYNGQRILKDSAITKPNQAEQSVMDSQPMTYLRHTSRAPFTTILQSQPGTKLAACPHVSEHATRRVSQQRPRLGLVLCCPFGDTAGNTWLLTPLHLAATRLLYRTCVPSFWNLIRRPIVLVLSLGCLAPTIHEPLPPCPLRACDTSVRFFPEAAPHCGACVVVTRFTRRRLSSLRPP

SEQ ID NO: 1013751 - protein, 211 aa, Homo sapiens
  misc_feature (5)..(5): Xaa can be any naturally occurring amino acid
RLYGXSLGSSLLFSSFIALLLLQCDESESSSHPARPFFLCLRCFYFSFGRAPLLHMLVSVPLFETPKSFPHAMAQAAWVFLLNVNTVPLEKFRRKRGDALPDSYGADYLTDELSVAKYTTIPGGPRKQCCYREQFDFNAEPPCEPELMIGGFHLPICPFVAYSKDPDIGLMARILSLPGLMTYGLWNYGAMKGWIDDANYSVGLLDEGTNL

SEQ ID NO: 1013752 - protein, 310 aa, Homo sapiens
  misc_feature (90)..(90): Xaa can be any naturally occurring amino acid
LVLVLGGLGSQNVAKATPAVAGAFGKVTLRLSFIFFYAMMCVTIEKWSLPQKCPYKGDHRNGLRCIMVFIHKSAIFFHRTVHFETFKQVXKVHPCIGMGANYTRFISLRGSQSIINSAITLMPCKAVLYKQPVALQIQWVYERLSCHQHKNQQVEGTTYHTRTRIKTRSRIPDNETSPLREYHTVGPQSEHPRDKHTMRDKSITSTSTHRETDKTSSGREGKKNTTDKRPHKEGAHHGKTRETRRHQKKKQHKEGNPTSSATTRQATDTITPRITPVQTKDHNQHPNNKWSRRHTERKQHSEREQRREEP

SEQ ID NO: 1013753 - protein, 274 aa, Homo sapiens
MGVFPLPPLAPISSLPPSLSDSDSVPVRDELAPLADFAKRAPPARSALTLRGTQPRRCHSRGEETRAESELARSRSVLDALEEQGGHPDPIFCLIPHLEDPPETPASEGNMADKLKDPRQPRGFHEETAVKIRKHVPQISQTESADDSVKEQKSMTIHTRNDQRNTYKRHSVQSTRQQRPFKTTNLDKEQNAMSPVYDYWQNELNTKTDQTPAQPKQEGQKVNSPEASTTARKSGDTERKRQQQIPERPHNKLQRKDIQTKHQTRNNQPKTENT

SEQ ID NO: 1013754 - protein, 167 aa, Homo sapiens
MTTRHTLDMLLMALGLLAWGSGAPGVTCCAGTLHGVARASCGGQALVLLTVCPGCWLGAGLGAALRGLSLSRTQVTYLAFPRRDAAPDAAHDQSCRWWSCSLGVRAPALARCPACLGRLGGIDCLTYYGLNHNLSAIGCSPWTLAFIIQARIRCADPLSPSDLGAGG

SEQ ID NO: 1013755 - protein, 86 aa, Homo sapiens
  misc_feature (6)..(6): Xaa can be any naturally occurring amino acid
  misc_feature (9)..(10): Xaa can be any naturally occurring amino acid
  misc_feature (18)..(18): Xaa can be any naturally occurring amino acid
  misc_feature (20)..(20): Xaa can be any naturally occurring amino acid
GLILVXYNXXENHAGGFXEXQVSPIPDVDIEAARTISRRDVIRPCKTYYAYSDRYVGGQLIKKYVNESVKLQQREERQVFLMNRYL

SEQ ID NO: 1013756 - protein, 387 aa, Homo sapiens
MCWLLVLGIYGHRGRACCLVSLACADSASWGRAWASASTWVSIFGCLRCPRHGCARFPPLSPSGVPVGVEPSSLRHVLPMPALVPPCAFCLLDLPLCESVLSCVMPLMCVLGCVTLCVPLGPLLCMPAPLLLSCGTQSPCGPQCSGMAWQCLCRFLCSLGLPARVLTHLEPCAALEPPRQACPLSVTSVSPEFALAPPWDSMIPGPNWPRFSNCALRVENFLAQRVHFSMNASGAPPCEYTGLAVMSYMSICLSLEWDPRGLHSGAVVSLALVTHLCTDTAGEGFRNQGPQDNLSVHLVWALPRCMSKGDYSRSGRLCPLRRMSDSSFQLVHHIRGAAAKEVPGDQRISRRRRVEYHKVNRSGKGILGSSAHKVQRDTQHGVVGVTN

SEQ ID NO: 1013757 - protein, 90 aa, Homo sapiens
HKQAVLPGNYGIPRDRARGSKYKKELDYMNAHPCQDERPLQVRRARSQDSRAAASLSEAWLRCGEGVSEHFWESVITQLKRRRFTETMLP

SEQ ID NO: 1013758 - protein, 249 aa, Homo sapiens
AAVRPGILGMGSCWLCGGQEAGQGLRDRRTHGRAAWEPLSAALGPGGAGRGGLPTARHGDLCVAMCSLGLGLDRDGAVALASYRWLLSGGGSWWVAALPPARDSDHPHPSPAGPVPGGVVGGGPGGGPAWCGARHEWAVADVSSAASSAARPAPSRIAAKLGFRACGVPIYSLGALSPSLGPWLGPGAGPLGEPESLLGRNPGGAWNADPLTGAVDELTRYRPCREGLEDHQRVFTPKQGGARGQPEFS

SEQ ID NO: 1013759 - protein, 70 aa, Homo sapiens
MDVLGARTGKNPTHATLACGNSSLEGTQSLKGREGRGVKFPGNPQGEGHKNPGRSILGLNRRQAGQSHRV

SEQ ID NO: 1013760 - protein, 141 aa, Homo sapiens
MPSIFVGQKQMCVTVEKLVCPDWCAEVSDASDPLTVTCLSVLGCLDELAGKLSEPAAVLCCADMLVQCVLAVWCAVPETPVVPPRETLQCALCLWCIPFAMQHLCEPKGLHKYYFFRLDGTNRTWPAREKLERGEALCDVS

SEQ ID NO: 1013761 - protein, 191 aa, Homo sapiens
YARRPLDGQLHQNNLVCDARFLIFSFVYCYTRLDPLSHPDPLHHILRVISNRCPFFGYYFFNGLLMWLQLLHVYWSLPHSALLYSFMKKGQMEKDIRSDVEESAPEEEAGGADQEPLTDKERDSLEGPRQHPTDGPRKPGGPGSLTNRHTTSHTSRAGLAARGCPTATDREHPWVPKALQPLGHLLPTKPP

SEQ ID NO: 1013762 - protein, 225 aa, Homo sapiens
MARITGSLLRGRRSPVPRASPQSAVSPPTPSPDPLAEGSAERQTARSGEPRVRSCSWGLRPELARARKERPGQWGGAGGPETANWASAAEEESEALGPGGARLTGAERAARWRRKRTEAGPAGRRVAASKGSEGRTSRVPRTEGNPAGAGGRLAGVPGPRGRRSRRRRRAGKGLIQALVLRLGRPGGKQGRGGNSAAGPWQPTGTATQGRAFGGAQLGGIPGKGI

SEQ ID NO: 1013763 - protein, 154 aa, Homo sapiens
LVLARKFWEWRAAGRRGEGVADGNQVRPVSVCAALLVRSRPRVGAAARVVRNEGAAAPCSPPGPEPDLASVSSLESECIMMHACPESEGARMHQVGETRQAGACLQRSTPSRPDTSKPLTATSGKSFVHQQDKPMQTQESGHDSTEVANNIYRQ

SEQ ID NO: 1013764 - protein, 236 aa, Homo sapiens
MLYCSEFGIWAAGLASTCRLRKSASPARCARFHPSPLSVVPSGSNLPRDSAPAACSPNALPADALGTGVWEPRGAGWDSVSRACGSCPALRTSPCIGMPHAGVSAPRCAGDPGPGTRDPSRCLRLCAEACPGRDLSMPSKAENLACTPEPGTTQLRRGRGSDGSKGQFPVSLRSQDHAPRVCPQTDCSGLREALALAKLANTGTRPKRLGDTAQPEQAPNKTQMDHQKETSDLEPN

SEQ ID NO: 1013765 - protein, 227 aa, Homo sapiens
WYGPGIMGSVRIACGAGSSVGRELDESYRTIRLDIWTAGSGGGDPGLTRTLNPSPALVWRRRAALFPPESCGAACLRHADLHVEPTMPISTVAFGIHCQCWEMTRCQDSGGRVTAEFYGKSLKLNTAEDAKDVIKEIEDFDSLEALRLEGNTVGVEAARVIAKALEKKSELKRCHWSDMFTGRLRTEIPPALISLGEGLITAGAQLVELDLSDNAFGPDGVQGFEAL

SEQ ID NO: 1013766 - protein, 214 aa, Homo sapiens
MGCYRLRVYGRLPSWVMRAVVGLGPRVYLGFTGGPGSDRKCAFLTSLLGARGWGCEYHPLRVSSWATSGASFVASLREKGSRIRKKEVPLSTIQASSTCGARLVCTSSVRKVTALYTEEKLGLRKIPWSSLKQEQNLLKAGAEALKVNMEDTKTESPSSGSLGCPVKSQGHGSASYHVLRAILHQKPGQTWKNKEHHLSDTRVRVQKKPQQDST

SEQ ID NO: 1013767 - protein, 282 aa, Homo sapiens
ACPGSGILGSQRERDAVICCARAELGLLLVPGERDQCVEPWTARARPIPAMPPAEWPQRPRAAVAAAVVLLLWRRLPGAPWLSRRPVSPPSPQGASVIQWCDGCIVEAGELVPRVPVGLSGIVVLGTGLLLAGLAPHDSGGCGHACPSVIAWAPWVAGHVLPALASSPSSVPWVFDECLPLYAVCQALYLLPERRQLILYEDLVHDSPRRLPGALSRALVQFQRRGLPAWLSAPTYMPALGLSLTPCQNPSRNLQGLSLPSWAHEAIQAQGNGILDWSLIAH

SEQ ID NO: 1013768 - protein, 163 aa, Homo sapiens
QLQAGPALGFMGWLEAAPCDLVTHSLADPGPPECVHRETAWLLHCSGLRSPALAMAVPPARLPRSPFRVSCSGFITPLQKKFWPCGGPKCPNVNPFLARWTAEPPPVHPVWPMLLHRWAGWAEIPPVRSTPGTRKINTTMTHHQTITPYTMTKMATQKAHKVS

SEQ ID NO: 1013769 - protein, 204 aa, Homo sapiens
MQAVLPLEFWDGVAAPLGVGGELRGWPGAPPPGLACCDNSAPLRVAGLSCGSRAAECGRWSSRRLGCWLGDWLKEQLGENGPRCALRPGKACLGTLGEPVPYGPLTACNHRLNSALSGSDSEANGFAERRIDKFGFICGLAGRRRALLEEVPLEVLRQRGVQRGWDIAQTTGTNWMAKKHKKIRLRVPKTVHTCLLLRGTCIGR

SEQ ID NO: 1013770 - protein, 270 aa, Homo sapiens
AGWYRPELGIRARRSHSDKVGCPVGLCERSECRCVNVTRQAELAGLGPQTHQTLKDCVVGALHLFLAPVAPWIRLGRLHPAVSMMSYLKQPHTCMNVAVAWTGPAMDLLHPSVGFRVSTRTSRHLASDSQTVGGPTRHVGFECKLIVAETSPGSRTENTGPNVMFTNYMGPHNASDAIGGKRYVRRCEVGQMGLRKNDGKYEAHSTGTGINRENTKTHGICWYAQDRKQCDQEAIKYYSFACDFRITHKGGGNRYFGAYKYRPSQWESVE

SEQ ID NO: 1013771 - protein, 120 aa, Homo sapiens
MHDVLQCSAGPPEWVLALIPGWMPAVPAALPELVPRRPRPLDVVVVHVACCTAICQGWCRRGFKDTTPLTSFSRQIMTVVLNVTVNLNAGTAGGHLCRKCCLQPWWPVGNHWHRNLAQVS

SEQ ID NO: 1013772 - protein, 55 aa, Homo sapiens
  misc_feature (2)..(2): Xaa can be any naturally occurring amino acid
MXNEKHSKNITQRGIRRQDLEKCPRREGVCRPWLLALFTFVVCGSAIFQIIQSIR

SEQ ID NO: 1013773 - protein, 66 aa, Homo sapiens
  misc_feature (31)..(31): Xaa can be any naturally occurring amino acid
  misc_feature (40)..(40): Xaa can be any naturally occurring amino acid
  misc_feature (45)..(45): Xaa can be any naturally occurring amino acid
  misc_feature (51)..(51): Xaa can be any naturally occurring amino acid
  misc_feature (61)..(61): Xaa can be any naturally occurring amino acid
SLAMTENPSLKQQLFSYAILGFACLRPGAFXFDGRLPNPXRHVRXHGGSPXLLILQLHTIXGAGVC

SEQ ID NO: 1013774 - protein, 36 aa, Homo sapiens
  misc_feature (36)..(36): Xaa can be any naturally occurring amino acid
IDYETAKEAYLLMELAKSQDKSLKIYDGAYHVLHKX

SEQ ID NO: 1013775 - protein, 42 aa, Homo sapiens
  misc_feature (36)..(36): Xaa can be any naturally occurring amino acid
  misc_feature (41)..(41): Xaa can be any naturally occurring amino acid
SPAGWGQLPGYTALQLFLKPILLNMAIPEVKALGSXQGLTXK

SEQ ID NO: 1013776 - protein, 48 aa, Homo sapiens
  misc_feature (25)..(25): Xaa can be any naturally occurring amino acid
  misc_feature (43)..(43): Xaa can be any naturally occurring amino acid
  misc_feature (45)..(45): Xaa can be any naturally occurring amino acid
DLPTLASKVLDYKCEPPHQARFIPXSACMPSSLGARPQVSPFXEXVAW

SEQ ID NO: 1013777 - protein, 59 aa, Homo sapiens
  misc_feature (35)..(36): Xaa can be any naturally occurring amino acid
  misc_feature (49)..(49): Xaa can be any naturally occurring amino acid
ILQKNNLNLLRDLAVHIAHSLRNSPDWGGVVILHXXEGDSEFMNIIANXIGSEETLLFL

SEQ ID NO: 1013778 - protein, 43 aa, Homo sapiens
  misc_feature (10)..(10): Xaa can be any naturally occurring amino acid
  misc_feature (35)..(36): Xaa can be any naturally occurring amino acid
  misc_feature (39)..(39): Xaa can be any naturally occurring amino acid
  misc_feature (42)..(42): Xaa can be any naturally occurring amino acid
IQRREATLLXLLSIIQVKSTLSFQGQSPDLLLSQXXITXPTXL

SEQ ID NO: 1013779 - protein, 76 aa, Homo sapiens
  misc_feature (13)..(13): Xaa can be any naturally occurring amino acid
  misc_feature (17)..(17): Xaa can be any naturally occurring amino acid
  misc_feature (32)..(32): Xaa can be any naturally occurring amino acid
  misc_feature (70)..(70): Xaa can be any naturally occurring amino acid
ILKSAEGRVLRRXAPAXRQTHETDANGCRPPXLSTAPATSSLCGLQMLLKTQKSVDELMSSHNIYVQAIXYPTVPR

SEQ ID NO: 1013780 - protein, 42 aa, Homo sapiens
  misc_feature (16)..(16): Xaa can be any naturally occurring amino acid
  misc_feature (22)..(22): Xaa can be any naturally occurring amino acid
  misc_feature (33)..(33): Xaa can be any naturally occurring amino acid
  misc_feature (39)..(39): Xaa can be any naturally occurring amino acid
SNVGPFLAAAALPRPXGHHLIXCRASCCCNCFXTFPIKXFLV

SEQ ID NO: 1013781 - protein, 40 aa, Homo sapiens
  misc_feature (7)..(7): Xaa can be any naturally occurring amino acid
  misc_feature (22)..(22): Xaa can be any naturally occurring amino acid
  misc_feature (26)..(26): Xaa can be any naturally occurring amino acid
DHDRNMXWVSTQLQATCNVHKXAFNXWFSGHLNFQIEHHL

SEQ ID NO: 1013782 - protein, 33 aa, Homo sapiens
  misc_feature (23)..(23): Xaa can be any naturally occurring amino acid
SSGVRTLGPAAKARSSHQEATYXFKIKTAFLSW

SEQ ID NO: 1013783 - protein, 31 aa, Homo sapiens
  misc_feature (13)..(13): Xaa can be any naturally occurring amino acid
SIRQTDGVYAPPXFDFTHTHNFPNEAPQYSA

SEQ ID NO: 1013784 - protein, 44 aa, Homo sapiens
  misc_feature (35)..(35): Xaa can be any naturally occurring amino acid
  misc_feature (41)..(41): Xaa can be any naturally occurring amino acid
ISTSKNTKTNIHVEQNLSCLGSSDQVPQQGVKPLXLALPAXGFH

SEQ ID NO: 1013785 - protein, 32 aa, Homo sapiens
DPLALCPDPNQNTGPLEDGIDSGRGTLGLGRA

SEQ ID NO: 1013786 - protein, 35 aa, Homo sapiens
WEHDFLRIRAWEYNPSSRFLLWASLLPPNQGSSML

SEQ ID NO: 1013787 - protein, 59 aa, Homo sapiens
  misc_feature (34)..(34): Xaa can be any naturally occurring amino acid
  misc_feature (49)..(49): Xaa can be any naturally occurring amino acid
MLAAVSLVLSGASKKPASRVLVASRNFPNNATFXIKKCDLHRLEEGPPXTTVLTREDGL

SEQ ID NO: 1013788 - protein, 36 aa, Homo sapiens
  misc_feature (1)..(1): Xaa can be any naturally occurring amino acid
  misc_feature (28)..(29): Xaa can be any naturally occurring amino acid
XGFALRPLTRGLASPAKGGHGGAGARTXXLLTFVLA

SEQ ID NO: 1013789 - protein, 55 aa, Homo sapiens
  misc_feature (4)..(4): Xaa can be any naturally occurring amino acid
  misc_feature (9)..(9): Xaa can be any naturally occurring amino acid
  misc_feature (50)..(50): Xaa can be any naturally occurring amino acid
QEQXLPCAXAKQEMMEYRHQIQSYTCKIDALKGTNDSLMRQMRDLEDRFXSKASG

SEQ ID NO: 1013790 - protein, 40 aa, Homo sapiens
  misc_feature (8)..(8): Xaa can be any naturally occurring amino acid
  misc_feature (18)..(18): Xaa can be any naturally occurring amino acid
MRCILTYXCTLYIYLTFXTYVRFFFVFVLALRLVLLSVSV

SEQ ID NO: 1013791 - protein, 53 aa, Homo sapiens
  misc_feature (25)..(25): Xaa can be any naturally occurring amino acid
  misc_feature (41)..(41): Xaa can be any naturally occurring amino acid
RHERERRKRSENEDLQEQQRAEAFXRAFLKRNAPHEPAARXDQLQRKAVVLEY

SEQ ID NO: 1013792 - protein, 37 aa, Homo sapiens
  misc_feature (33)..(33): Xaa can be any naturally occurring amino acid
MGDRFKDEEVDEMYRGAPIVKKGNFNYVEFHPXSLNM

SEQ ID NO: 1013793 - protein, 71 aa, Homo sapiens
  misc_feature (11)..(11): Xaa can be any naturally occurring amino acid
  misc_feature (22)..(22): Xaa can be any naturally occurring amino acid
  misc_feature (33)..(34): Xaa can be any naturally occurring amino acid
  misc_feature (59)..(59): Xaa can be any naturally occurring amino acid
  misc_feature (61)..(61): Xaa can be any naturally occurring amino acid
EDTAKEDAANXKLGQVCQGLQXVAGTIVRFPRXXWRTPSPRGPEVRGCFILAHGKDGKXFXWKGKQANTEE

SEQ ID NO: 1013794 - protein, 66 aa, Homo sapiens
  misc_feature (25)..(25): Xaa can be any naturally occurring amino acid
  misc_feature (36)..(36): Xaa can be any naturally occurring amino acid
  misc_feature (43)..(43): Xaa can be any naturally occurring amino acid
TRYPVVVIRNAFACFDEEASGFIQXRTTFREHAYHXWVPHYRXRKWTDVREAPIDKKGNFNYVEFT

SEQ ID NO: 1013795 - protein, 47 aa, Homo sapiens
  misc_feature (25)..(25): Xaa can be any naturally occurring amino acid
  misc_feature (29)..(29): Xaa can be any naturally occurring amino acid
  misc_feature (37)..(37): Xaa can be any naturally occurring amino acid
ERAARRKTASVTIEDGEAAKDRRNXPCTXVAAPSVPXTFLHQRQQAQ

SEQ ID NO: 1013796 - protein, 38 aa, Homo sapiens
  misc_feature (2)..(2): Xaa can be any naturally occurring amino acid
  misc_feature (9)..(9): Xaa can be any naturally occurring amino acid
MXPYYDLRXMKQPIVVFKDTYKAVSYDKFVSGEENCLC

SEQ ID NO: 1013797 - protein, 46 aa, Homo sapiens
  misc_feature (27)..(27): Xaa can be any naturally occurring amino acid
LKGLTLQASGYQELPGKKSPQARLPIXHQFIYQLRERLHPAASMSA

SEQ ID NO: 1013798 - protein, 59 aa, Homo sapiens
  misc_feature (32)..(32): Xaa can be any naturally occurring amino acid
  misc_feature (49)..(49): Xaa can be any naturally occurring amino acid
  misc_feature (51)..(51): Xaa can be any naturally occurring amino acid
QTRRPAQFHEPSEPKRLLRTREAPPTRKPSMXSKRAKAKTTKKRPQRAXSXVFEMFDQS

SEQ ID NO: 1013799 - protein, 58 aa, Homo sapiens
  misc_feature (39)..(40): Xaa can be any naturally occurring amino acid
KLSVEALNSLTGEFKGKYYPLKSMTEKEQQQLINDHFLXXKPVSPLLLASGMARNWPD

SEQ ID NO: 1013800 - protein, 49 aa, Homo sapiens
  misc_feature (20)..(20): Xaa can be any naturally occurring amino acid
  misc_feature (28)..(28): Xaa can be any naturally occurring amino acid
  misc_feature (38)..(38): Xaa can be any naturally occurring amino acid
  misc_feature (46)..(47): Xaa can be any naturally occurring amino acid
GILGTGGKFEGNGDGESVPXRLWLLQPXVVFILGDIFXEGKWSTPXXWA

SEQ ID NO: 1013801 - protein, 42 aa, Homo sapiens
  misc_feature (2)..(2): Xaa can be any naturally occurring amino acid
  misc_feature (7)..(7): Xaa can be any naturally occurring amino acid
  misc_feature (37)..(37): Xaa can be any naturally occurring amino acid
MXAQPGXVTQALILLLWFHVLWKTKVYQDRFFLFIVXDGVNP

SEQ ID NO: 1013802 - protein, 59 aa, Homo sapiens
  misc_feature (35)..(35): Xaa can be any naturally occurring amino acid
  misc_feature (54)..(55): Xaa can be any naturally occurring amino acid
HIPLCTYSPQWSPKKTRAQERMMPRQPPRQLQLPXLPLSLSALKEVEFDASMFXXEFTP

SEQ ID NO: 1013803 - protein, 30 aa, Homo sapiens
  misc_feature (15)..(15): Xaa can be any naturally occurring amino acid
GFVHMMFQYAIQKKXPLYMSTKNTILKAYD

SEQ ID NO: 1013804 - protein, 50 aa, Homo sapiens
  misc_feature (6)..(6): Xaa can be any naturally occurring amino acid
  misc_feature (33)..(33): Xaa can be any naturally occurring amino acid
  misc_feature (35)..(35): Xaa can be any naturally occurring amino acid
MIDLPXTACTVQLEKPQAVNASPVKAVTVAYPXKXQGLSCPRPWSPPLHQ

SEQ ID NO: 1013805 - protein, 132 aa, Homo sapiens
  misc_feature (3)..(3): Xaa can be any naturally occurring amino acid
  misc_feature (5)..(5): Xaa can be any naturally occurring amino acid
  misc_feature (8)..(8): Xaa can be any naturally occurring amino acid
  misc_feature (20)..(20): Xaa can be any naturally occurring amino acid
  misc_feature (78)..(78): Xaa can be any naturally occurring amino acid
  misc_feature (124)..(124): Xaa can be any naturally occurring amino acid
EVXCXLHXQKREVLFVCLFXCLLAESGSGSVAQAEMQWQDHASLRPQLPRLKQYSPTSASQVAGTTDLRHHTCLIFFXFLGEKRSWYVAQAVLKFLSSTDPPTWASQSAGITGMSQPAQPEKRXFNAYVLYV

SEQ ID NO: 1013806 - protein, 32 aa, Homo sapiens
  misc_feature (24)..(24): Xaa can be any naturally occurring amino acid
MGKDEGLEINGFGRIGRLATRAAXNSGKVDIV

SEQ ID NO: 1013807 - protein, 56 aa, Homo sapiens
  misc_feature (5)..(5): Xaa can be any naturally occurring amino acid
  misc_feature (54)..(54): Xaa can be any naturally occurring amino acid
SVVKXHSDDTITKKGFHLRYTSTKFQDTAPQQEVTTCQSRGGDVEPACPLPPDXEC

SEQ ID NO: 1013808 - protein, 56 aa, Homo sapiens
  misc_feature (11)..(11): Xaa can be any naturally occurring amino acid
  misc_feature (24)..(24): Xaa can be any naturally occurring amino acid
  misc_feature (53)..(53): Xaa can be any naturally occurring amino acid
MGPWKLVDIKXFDDNMKSLGVGFXTRQVASMTKPTTIIEKNGDILTLKTHSTXKTT

SEQ ID NO: 1013809 - protein, 69 aa, Homo sapiens
  misc_feature (37)..(37): Xaa can be any naturally occurring amino acid
  misc_feature (45)..(45): Xaa can be any naturally occurring amino acid
  misc_feature (55)..(55): Xaa can be any naturally occurring amino acid
  misc_feature (60)..(60): Xaa can be any naturally occurring amino acid
FDVHVHEVVDASLSVIAQTFMDACTRTEHKLSRDSPXNKLLYAKXISTYKKMVEXYYKGXRQMVQVSDQ

SEQ ID NO: 1013810 - protein, 52 aa, Homo sapiens
  misc_feature (25)..(25): Xaa can be any naturally occurring amino acid
  misc_feature (40)..(40): Xaa can be any naturally occurring amino acid
  misc_feature (45)..(45): Xaa can be any naturally occurring amino acid
MGEVKNKDLRNSLALNKKPVKKSIXESEAFLPQSIPEERXKMKSXPLGICLI

SEQ ID NO: 1013811 - protein, 103 aa, Homo sapiens
FFPETESCSVAQAGVQWHNLNSLQPPPPEFEQFSCLGSRVAGTTGARHHARPISVFLVKTEFQHFGQADFELLTSGDPPASASQNAGITGMSHCAQPRVLKKG

SEQ ID NO: 1013812 - protein, 31 aa, Homo sapiens
  misc_feature (11)..(11): Xaa can be any naturally occurring amino acid
  misc_feature (30)..(30): Xaa can be any naturally occurring amino acid
NQPKEGKCTQXPPSHVMGGVPLIGGGHYHXP

SEQ ID NO: 1013813 - protein, 51 aa, Homo sapiens
GRVGQAADLYLRGVALVVKKLQEIMIDVSGRLHSSYQLVGICVLDRVERVE

SEQ ID NO: 1013814 - protein, 185 aa, Homo sapiens
LFGDVNISEWRGWAGLGLGKGGEAWLRRGKTRGGGGGWDGVIGGAAAAAAPARGGRQRGQGKGGGARRLEKGRAQQTATREAKLGKKRDRDRGGDGGGGAPRGGGRRAGPPGGKKYGNPGEKEEKKKWNLEERQKEEKKGQQEHPEEERRTAQEEETYRRSKEMTERGHNSPKPEPKKDEAKFPG

SEQ ID NO: 1013815 - protein, 49 aa, Homo sapiens
MYRPSQQVQVRFNVLKVTEAFRHRRSSSRSSEAEHRPAPSYEIKLFLIL

SEQ ID NO: 1013816 - protein, 100 aa, Homo sapiens
  misc_feature (26)..(26): Xaa can be any naturally occurring amino acid
MAGGPDVAATSASALVVAAGASSVSXIHSSVQCKFRYGNLGISYFLDKASKGLAERSRVITVDSNICTPEQQTWKRNSRRTRFKDFSAAGLHYPDSTTGV

SEQ ID NO: 1013817 - protein, 73 aa, Homo sapiens
GTWGNVGALFLALCPMWVGGPRGPAGRPVPFCMSEATGNRRPTPDLPPACFERPLFITFILCGGKGGFLPHPG

SEQ ID NO: 1013818 - protein, 89 aa, Homo sapiens
EKDGPKQAEDAAKSITNGSDDGAQPSTSTAQEQDDVLIVDSDEEDSSNNADVSKEERSRKRKLDEKENLSAKRSRIEQKEELDDVIALG

SEQ ID NO: 1013819 - protein, 104 aa, Homo sapiens
  misc_feature (70)..(70): Xaa can be any naturally occurring amino acid
GVIKDKYGKDATNVGDEDGFAPIILENSEALELVEEAMDKACYTDKIVIGMDVAVSEFYRDGKYDLDFKXPTESCPEYITWGPDWGHFVPGTCVSARSPWWVVH

SEQ ID NO: 1013820 - protein, 85 aa, Homo sapiens
MNGKEGVEECSFVKSQETECTYFSTPLLLGKTGIEKNPGIGKVSSCAEKMISDAIPELKAPSGLGEISEDPEVSRCDGWPLFLIY

SEQ ID NO: 1013821 - protein, 89 aa, Homo sapiens
MADEGIAAGGVMDDNTAVQRGSEDSPSLHDGPSTWDFAKSPKGSETERQAMLCGAVHPAVDEPDCISSSVGGPFFLNNKQPELRLDGKQ

SEQ ID NO: 1013822 - protein, 104 aa, Homo sapiens
MLPVIRQNDEHNGKAERHPIYVLSAFLKTLELFLPATYMRIYKNGDIVDITGKGTVQNGMPHTRYQGKTGRVYNVTQHAVGIVVTNKFTGKILAKRINERTGTL

SEQ ID NO: 1013823 - protein, 61 aa, Homo sapiens
DLDRNKMKDIPKRPSLSVYLHYFSSVCRVEGEEPGVRRELGVIEELRGTTSESVPAFDTCA

SEQ ID NO: 1013824 - protein, 103 aa, Homo sapiens
  misc_feature (84)..(84): Xaa can be any naturally occurring amino acid
EERKEIDVEVRKEIVDAAQFAAAGPEPPLEELGYRGLLLATRCLKFVVQIQWIQFKSVCYRGGEGEVIPSGGYQTVFFTWLRRXKTRSMKFYEIPGNTDKCVD

SEQ ID NO: 1013825 - protein, 90 aa, Homo sapiens
FTLLETTKYFDSPFSISDGIYGSTFFLTKGFLGLPVIVGSTFLTICFFLQQRIVFKSKEHFFLEIPPPDGWQFLDVWFEELCMSPSAQEG

SEQ ID NO: 1013826 - protein, 66 aa, Homo sapiens
VATGFHGLDDIVGWIFLNMLLHPRSKEGNITSKHHFGFEADRLIKSILEMWAFLILFMSPSIDEGL

SEQ ID NO: 1013827 - protein, 92 aa, Homo sapiens
MCTRTYTHARIYVYTHMHTCIYARLHIYTPALTQAETKHACGHVHTHAAYVYMYVRECTHTRVHAHTRICARMYAYTHVYARMDTRARTHAR

SEQ ID NO: 1013828 - protein, 116 aa, Homo sapiens
  misc_feature (62)..(62): Xaa can be any naturally occurring amino acid
MIKAAPEKSTVNIILNGEKLEAFSTKAGKKGRRITSGHKFETSLDNKVRPLSLLKIRNQKQXKYQPDGTFLCLKKSTGWAWWLKPVIPALWEAEAGGSQGQEIETILANMVKPCLY

SEQ ID NO: 1013829 - protein, 73 aa, Homo sapiens
IALAVRLTANITAGTLLMHLIGSATPAISTFNLPTTLIIFTILILLTIQEIVSLYITAYVFTLLVSLYLHHAA

SEQ ID NO: 1013830 - protein, 74 aa, Homo sapiens
KADAAIRENPVYEEKPEKEVKKKRWNCPEMSLSQKKDRVAPKKATFRRAQKRAAENYTLRFSMIFSDIDNKPMN

SEQ ID NO: 1013831 - protein, 68 aa, Homo sapiens
MVRLKNRCNSRTSKPNQATPLHNLGYTTVNALKSVEPNQSFMPSVPELIPPKTIEKDPNLPYSTPTTR

SEQ ID NO: 1013832 - protein, 132 aa, Homo sapiens
  misc_feature (4)..(4): Xaa can be any naturally occurring amino acid
  misc_feature (32)..(32): Xaa can be any naturally occurring amino acid
WIQXAAGIRHEAARPSGLHMGHGAFLQHVVLXGLTPSSAFSALCCCRRPSASSCPGGASWDGELLLAEPSLLREPPPTRCDHGPLLPTPNPGPVERALSTLGGGWPTEKGGKKIGKTSVGEAGAAQKSQRHL

SEQ ID NO: 1013833 - protein, 36 aa, Homo sapiens
MARKIEEIKAFLLTARRRMPNLSRSRKIRTTWKFKV

SEQ ID NO: 1013834 - protein, 85 aa, Homo sapiens
  misc_feature (40)..(40): Xaa can be any naturally occurring amino acid
LAVLEEPPPMTLPGAGLSSQELSGGPGDEPLRLEPPWPAXPGPVLSPLTPSPPPWWPDTHTLVAPSPSSSRYGFYCCGFNKNFSS

SEQ ID NO: 1013835 - protein, 100 aa, Homo sapiens
  misc_feature (11)..(11): Xaa can be any naturally occurring amino acid
KLQNQRGGRTXFLDNKKPDSYDLESWQNAMKCARQFEKNVNQPPLELHKLATDKNDPHLCYPSETQDLNEEVKAIKDFGDHVTNLRNFGAARILLGGKPL

SEQ ID NO: 1013836 - protein, 110 aa, Homo sapiens
RWRKPSSDFIRSSRGRGLQEAFGGGGCRSPPFTIHRLSGLAQDGRSALADGLAMAQVRGGYFFLRIMCLMLLSVGADISSDGWVPKEEVEGFLWPELRLIDHHDIFGRGV

SEQ ID NO: 1013837 - protein, 114 aa, Homo sapiens
MALNISDLPLPTHRARPILRIISLLRNLKTSAFFSCLTAIATAFIGYVLPCSPKYHSEGDTVITDLTIRHPIHWDRPSSMNLRRILSRQSHPHTFLYLSLHLALHYCRPSWPAA

SEQ ID NO: 1013838 - protein, 79 aa, Homo sapiens
MLCCAGDDRVQTGMRCAFGEPQGTVGKAHIGQVIMYIRTKLQHTLHVIDALRRDKLKFPGDRDHIIKEWGFTKFNADEF

SEQ ID NO: 1013839 - protein, 89 aa, Homo sapiens
  misc_feature (1)..(1): Xaa can be any naturally occurring amino acid
  misc_feature (55)..(55): Xaa can be any naturally occurring amino acid
  misc_feature (62)..(62): Xaa can be any naturally occurring amino acid
XWPCAKSPQDLKEPPPMPGLLPGNWVGLEDPPRIHGSPQSSDKRPMPQACPLSAXPLRPAFXLKDVKPSLPLNNSHYLSPTNLIDHRRR

SEQ ID NO: 1013840 - protein, 69 aa, Homo sapiens
LKWRDRLSPGGQGYSEPWLHHCTPPWAEVEETLKRLQSQKGVQGIIVVNKEGIPIKGTMDNPTTTQYAI

SEQ ID NO: 1013841 - protein, 106 aa, Homo sapiens
MGGKKGPGSGARAQGGLVAMPRKNVEEIKAFLLTARRKPAKSVKIKKNEGQRGDLKFGGEDTSTPGVITDKEKAEKLKQSLPPWFGIEGNSDEPYTLIGTAIILKL

SEQ ID NO: 1013842 - protein, 101 aa, Homo sapiens
  misc_feature (36)..(36): Xaa can be any naturally occurring amino acid
  misc_feature (80)..(80): Xaa can be any naturally occurring amino acid
MTGGVLRYQPRTHSGNDRGSPGQQLELKEGEAQRGXRRAEWGGIVLVLWPPGVEQADTVKRCATGPRPSHPVPPERLSLXLAGMEIQWENQSGPLIKELGF

SEQ ID NO: 1013843 - protein, 84 aa, Homo sapiens
SFQERSLFFLFETVSLYPPGWSAAARSRLTATTISQERREIFEQHLKSLKLTQSSSFYFQGLAELTPGFSGADIANICNEAALH

SEQ ID NO: 1013844 - protein, 67 aa, Homo sapiens
EKAEKPDTKEKKPEAKKIDAGGKVKKGTLKGKKPKKGKPHWQPEPSSFDRGIGEVIPGLPWNSSKAM

SEQ ID NO: 1013845 - protein, 104 aa, Homo sapiens
LDRPLVGQDEFFLRADQEERSGSATARLAHQAVPGARRGGGACRELPTIQPLKTTRPCSQRPKEEELQRQKEAEKLERQLALPATEQAIIQVSTFQELCEGLLE

SEQ ID NO: 1013846 - protein, 113 aa, Homo sapiens
  misc_feature (8)..(8): Xaa can be any naturally occurring amino acid
LVPFRQKXKPPWVVLGDSERRHVFGESDELIGQKVAHAVAEGLGVMAFIWEKLDEREAGIILEGSFRADKGHLQIYVKDWSKAFLAFVAFVGHLYFQDCEHPNEAQEYTRGQR

SEQ ID NO: 1013847 - protein, 118 aa, Homo sapiens
RNTILRQAGNHKRRVDKAVLQQRHCKPESDEKAAVLGKKLVVGKKGKKAAVGVKKQKKPPVGTKAAATEKPAREKKPAEKKPTTEEKKLLHKLLNLIIPERSNLFGQRRLNKEGIIQA

SEQ ID NO: 1013848 - protein, 85 aa, Homo sapiens
DENIAKKKKAKTPETKTSSLRTAKRGHPSMSKIVGRFIGGGEKPTEPGDNWLSKIKSSFNFKFPPKPSKSPCKLTVSQRGTALEL

SEQ ID NO: 1013849 - protein, 132 aa, Homo sapiens
VLIYSLQSWSLDADHLGTLSCSDRIVDLPATIIPPPGCRAPSRRNLHLPWVFVGGVLIAVVLPLVLVTLFWGDHWINLKDPVADGAILPPPQHHRADDDDRGNGRCDDLQADEITATQTEVLLLWAFGFLLF

SEQ ID NO: 1013850 - protein, 68 aa, Homo sapiens
  misc_feature (2)..(2): Xaa can be any naturally occurring amino acid
GXLRSTSKLAEEQLRIVDAQRKDSEGKDETRTRTGNVNKKRTKKLSWARGSQAKLSFSIKNPGLNCKL

SEQ ID NO: 1013851 - protein, 67 aa, Homo sapiens
DIQTERAYQKEPPIFQNKKRVLLGETGKEKLPRYYKLQPTWAFKTPKEAIVGTYIDKKYPFTGNVSI

SEQ ID NO: 1013852 - protein, 69 aa, Homo sapiens
LRLSSFFYLGLRRNFTVLLAQLSSLSASSADKYFTLHQNITLASKPPLDTGVLEMWFDYFCMSRQLMRV

SEQ ID NO: 1013853 - protein, 50 aa, Homo sapiens
  misc_feature (22)..(23): Xaa can be any naturally occurring amino acid
MYSSVIYVRFFFYANSRFFVRXXERNFGFLLLCENIAQQHVICKEDKISP

SEQ ID NO: 1013854 - protein, 84 aa, Homo sapiens
FSPASKVYNGILEKSCSMNQLSSGIPGPKPRHTSCSSDGNISKPGSGGPKLLPDYEDIPHELCHNGEKSKKPSKIKSLFKKKSK

SEQ ID NO: 1013855 - protein, 65 aa, Homo sapiens
MGHFTEEDKATITCLSGKVYVGDAGGETLGRLLACLPMGPRGFFVQSLGNLFLWALGIMGEPQSQ

SEQ ID NO: 1013856 - protein, 68 aa, Homo sapiens
SPGLQEFRTKVAQNMPSDLILSDDGFICSNMYIIYENSLNAKLKRTKFETTSTEVLLILDIVFDDHKA

SEQ ID NO: 1013857 - protein, 92 aa, Homo sapiens
DICAKGEHIMEDRTQVHRDLSVNHGHNLKAITPIYLKHLSPRVPIYVAHDTARSQVAQPLHSYTMEDEMLAWHTWRKLLSTEQPVEDLSDMW

SEQ ID NO: 1013858 - protein, 147 aa, Homo sapiens
LAPNRHPPVKSPKSPPPKHTRITRTRSINPLSPPKFKKNHPNPNNPTPAYSNFLGFLFYPPQSLRVLRVSLHHFRRHLRLNIFCSHRLPRTSRHYWLNFPHNLLHPPNNISLYIQTSLWLQNPRLKLAFCKCGLTISVCPHPLMRVF

SEQ ID NO: 1013859 - protein, 126 aa, Homo sapiens
MLNCSHQNGALNPHKGSPVNFAHSTKGRLSHSTVNVPPQIVPQGNTPLWRQTYTAQNPHCHLYQKCHFRRVKSKTVFSPHKQHVVSGANSGNAPATLYSETIPEGNNTHHWKHSYSICKGHMSMFF

SEQ ID NO: 1013860 - protein, 153 aa, Homo sapiens
RPILRIFAPPSVSLFTRALCSLLGPFLPSLCTSPPYTGGVPSTFLYRLFILVLLTPHDRYHKYPRGGACLTRSEHKFPTWPHTAPHLVPKVLLNTGDISSCFYPQRGFFFPHGRFFEPLLPPSTPLCRPSSPHFLEGPCRPQQGRISPPLYSP

SEQ ID NO: 1013861 - protein, 495 aa, Homo sapiens
  misc_feature (404)..(404): Xaa can be any naturally occurring amino acid
MICRSSTAAVRCAAERPLSCLLAPASLCASLLGARPADASLLFAPPACGPPPSLTTLTLLFFLLRAAPAFVFSLVALTARGSAIFALPPGCGVARCVCPPRGYMLPPSCVEIHHQRAVLRCHFIDVCPSVGGFLTRAVFYYLGVGGPHRRPNVCVSPRLWGQFLLPVVCLHTRARYDFVVLPTVAGGVRAKHVFLCRRRMVPLPHSPGAGFLICVYFFYALWIAAAPTAPLSPSRVKPPNYVGRSWGVSLPLTTVWPFFVEGPPLWGRSARWLCLPLCVPPARLLVVGSPEDLGGPFWCNVLRRAMNLGTSTRVGRHTSGCTYYSPETTAADHYYRSGVLPHTTGFPPRMLVARFFPTLWEVSCVFFGRTSHFIVREPLHDVHTVEVSSAPLCVVYSRGVIHPXLIERALVDALFWPPTRSPHLCPTLYADRCFTPAAAIISNTLCVFPHAQHTLFLSRPIFPRVNVPPDTLISPRDYTPRDCTIPPTHVNHSAI

SEQ ID NO: 1013862 - protein, 126 aa, Homo sapiens
RAGKSDNALSFPLGFYDADVKDLLCTVYYPMHVCSLPRYIEHHTVVKPFNGMPHTPERHLPRCIRKGIFRCCACLSSFIVCTCELCEIDVKSSNECIFLPWVYRLSSVPGTVCMKANVRIYKWLTR

SEQ ID NO: 1013863 - protein, 68 aa, Homo sapiens
VRWGGMEEGEFQSPEDMAAGEKDYEEVGVDSVEGEGEEEGEEYKSYNVVEVLLLRGSVFRFKRCKVVV

SEQ ID NO: 1013864 - protein, 78 aa, Homo sapiens
  misc_feature (22)..(22): Xaa can be any naturally occurring amino acid
  misc_feature (37)..(37): Xaa can be any naturally occurring amino acid
MSAVQAAACRSFRSLLPPFLCXAVAAPAMTGTQGLLXVVDVPCMGVATLNGSSLALSRPSGPYLCYFVAGGSGFLAST

SEQ ID NO: 1013865 - protein, 82 aa, Homo sapiens
  misc_feature (82)..(82): Xaa can be any naturally occurring amino acid
MTKGTSSFGKRRNKTHTLCRTLYGSKDLPPFRSRPVENVVNLEEGEEKVYLGVPRLKGEIPPELGRMRHLKIVYRDSGMASX

SEQ ID NO: 1013866 - protein, 85 aa, Homo sapiens
LQATEYFESPFTISGGIYGSTFFLQEASEDFTAVIGSTFLTICLIRSLIFHFTSKHHFGFEAAAGYWRFVMVVFDYYCMSRAIDE

SEQ ID NO: 1013867 - protein, 94 aa, Homo sapiens
SRAACTFSPPIQQQSESTRRTGPEDERRLDILPTVSQPGQGGTMARRYTGPRCAQLPPGGGSQGDGQSGGPSSVSADTGGDKSRPSRVLPAPRV

SEQ ID NO: 1013868 - protein, 139 aa, Homo sapiens
RGHERNGVHRGRENMNDLVSEYQQYQDPTAEEEAEMYEDGEEESEALALEWKLLAAGVRGRCRRGRSQQCLNLGSHLAADTLLSPRPRAPLPPAGSIYGLVLPAQPACELLQSLSYCSSWLDALGFCFLRVCVYIFGDT

SEQ ID NO: 1013869 - protein, 66 aa, Homo sapiens
EFSGASAMAWEHEEATTPIQQTFVTAFYIPCGQDAAAECWYVQTCITIMERNVGPQIDKTSYYHAR

SEQ ID NO: 1013870 - protein, 82 aa, Homo sapiens
EYFESPFTISGGIYGSTFFVAGASADFTEILALLSSLSSSSAGKYFTFHPNITLASKPPPDAGGLYIWFDYYCMSRAINEGL

SEQ ID NO: 1013871 - protein, 71 aa, Homo sapiens
  misc_feature (69)..(69): Xaa can be any naturally occurring amino acid
IRKAMSQPIQNINKEIEIVEKNQIEILELKSIITKTENSLEVFSSSLEKAEERINRLQDRTIKIIQAEXQK

SEQ ID NO: 1013872 - protein, 70 aa, Homo sapiens
HGLYEKKKTSGKQRTERKNRMTNVPGTPTANVGAGKKELEIGSQPKSKGAAMMLAAATADFSKNINKLKT

SEQ ID NO: 1013873 - protein, 82 aa, Homo sapiens
  misc_feature (30)..(30): Xaa can be any naturally occurring amino acid
LRVDLVNFNLLTNCLLVTLAAHLPAEFNPXVHASLDKFLASVSTVLTTKYLKLEPRWPCFLPPGPPPSPSSLSFTRTPVVFE

SEQ ID NO: 1013874 - protein, 124 aa, Homo sapiens
RPSFLSGSSTRCLPVLTDTSHVQAEQIEVGGNHSGLAKARGSQGWSPPLEGEAEEEEKDKEEAEEEEAVEEEEVAKEEFEEAKEEEEGGEGEEGEETKEVEEEEKKVEGFGEEKKKKKVEPHFL

SEQ ID NO: 1013875 - protein, 68 aa, Homo sapiens
RYQWMNLMESFYGQKRLLCGNYKAMWKFGTYCQELAALEKERSQLSCSLATFLTTCSDLLILHLLNKI

SEQ ID NO: 1013876 - protein, 105 aa, Homo sapiens
VRFVRLCPSGRLLMYPCCLAFGNDDVDVSPPTHNHVPGRGSRAAAYQRDVLQDSGGGLGGGAIGQLTLVLKESGVTSSESMNDAGMKDSRKIMETWLVAVTEMVE

SEQ ID NO: 1013877 - protein, 85 aa, Homo sapiens
PLQDETLGVASVPLAVEGLQGILRETKSCQTASIATTSTSTQARNHVDAQVQTRGPHNYSLCSPRPSTTYPGSQPFIRRVEAMVI

SEQ ID NO: 1013878 - protein, 120 aa, Homo sapiens
MYKTPPDVNHCIWIQNSFGGGVKTGFGMIYDSSGVVPKKKWSRNSSLARHWLEYEKKKTTREQRKDRKKQNEESQGDSKGTMLVLAKSELEIGSQQKEERCCYDVSCAPSGFSPDINTKL

SEQ ID NO: 1013879 - protein, 51 aa, Homo sapiens
MRIYSSTDHKNNNTLCVDELSTPLQQEEATVYRQQQNSNIFFLADRTEMLS

SEQ ID NO: 1013880 - protein, 74 aa, Homo sapiens
RTGASSAGTQYGYDGKDYIALKEDLRSWTAADMAAQITKRKSEAAHVRGAAERLTWTARALDGLRRYLENGKET

SEQ ID NO: 1013881 - protein, 81 aa, Homo sapiens
KRPKVEYSVEALKTHISKCTLGKFTVPMLKEACRAYGLMICLKKQELLVALTKHFQDLSEAARPAALSQFCQAAWSFSQPV

SEQ ID NO: 1013882 - protein, 88 aa, Homo sapiens
  misc_feature (66)..(66): Xaa can be any naturally occurring amino acid
NEFGYSKKGGGSSWPKWPPRSKTPGPPAPERAQEEVERPPLLGSPCHTQAPTTLNLPTSQLPCRPXEEGRGLGSRTLSCTINKVPGAQ

SEQ ID NO: 1013883 - protein, 70 aa, Homo sapiens
GFGMIYDSLDYAKKNEPKHRLARHALYEKKKTSRKQRKERKNRMKKVRGTAKAMLVLAKSELVIGSQPKE

SEQ ID NO: 1013884 - protein, 88 aa, Homo sapiens
NARCLGASARRKMAEQATKSVLFVGPGNICRSPIGEAVFGGLDNRSTTMSVDLRVDSAATSGYEIGNPLAYPGPELSLQRHGIPIEAR

SEQ ID NO: 1013885 - protein, 87 aa, Homo sapiens
RLVLSVVATYYSTIAPTTVLSNKCNSMSVTAKITVQIPPSQSTPVKPVPATTAVQNVLINPSLIGPKIFLLPPTWFRHRTQPLRQTH

SEQ ID NO: 1013886 - protein, 78 aa, Homo sapiens
KWMDLMEFSCLTLIAGVLIFTLPALETQATLKKFSVCRVHVKVPTASPDNCVPVRYCCARFPNLGAHKMQLISLSVHS

SEQ ID NO: 1013887 - protein, 102 aa, Homo sapiens
RRSPPLCRGSLPGSQMLCGRDFADFPTARLGKNIYPPAAVENASVPVKHSCSSVLQTRRPLGQAEALKHEQSAQLSTGPLWCDPQMVKHSPQCMSCIRYLTH

SEQ ID NO: 1013888 - protein, 43 aa, Homo sapiens
  misc_feature (17)..(17): Xaa can be any naturally occurring amino acid
MPPPAAKDIQEDLLDIXGVIEADGRSALKKVYQCSLMEKTLED

SEQ ID NO: 1013889 - protein, 73 aa, Homo sapiens
  misc_feature (3)..(3): Xaa can be any naturally occurring amino acid
RVXEGVKWITSWAEDRGFLRETAADKVFKLGFAKSIHHGRLLIRQHHIKVRKQVVNIPSFIVRLGSQKHIDFS

SEQ ID NO: 1013890 - protein, 104 aa, Homo sapiens
QRPRGRTERTNGSLGYGLDITAKLGIGEMAETDPKTVQDLTSVVQTLLQQIQDKFQTMSDQIIWRIYDISSRIDDLEKNIAALITQAGVEELESETRYLATQKS

SEQ ID NO: 1013891 - protein, 116 aa, Homo sapiens
ETESRSVAQAGVQWGSLSSLQPRLPGSGDSPASASLVAGIAGARHHARLIFVFLAETGFHCVGQAGLELLTSGDLPTSASQSAGITGVSHHTQPHRNFNRHCIESVSHVQWHLNNI

SEQ ID NO: 1013892 - protein, 71 aa, Homo sapiens
AQAATCTRCCLATGALASGFTGPMSLGGRHEGLVGGSHPEDGLEGSTSLMHNHGALPSQPGTLPDLSWPPD

SEQ ID NO: 1013893 - protein, 69 aa, Homo sapiens
DSIYFSLVLLPVKLKNRIGQELGYSYSWYYYWMERTVGINRGQRLMLEWTVEVVEQSRHLLVGLYQAGF

SEQ ID NO: 1013894 - protein, 77 aa, Homo sapiens
MECLYYFPGFLLLAARLPLDAAKRFHDVLGNERPSAYTGEHNQLNGWSSDENDWNEKLYPEWKRGDMRWKISWKGGR

SEQ ID NO: 1013895 - protein, 138 aa, Homo sapiens
ISRAWWRAPVTPATWEAEAENCLNPGGGGCSEPRSRHWTPAWVTDRDTVTNEKQQKTGKTKNSLLVSDLEHGSLCTIVGHLYFHLCEFAFKFWLWVSPDEIFKHIYLFLCDRFFSVPFPVKHTDPSPIWTLNEYSFSF

SEQ ID NO: 1013896 - protein, 177 aa, Homo sapiens
MPATVTERVQALGVPGGQALPTESQEQPWPPSALLDAPPEGTANHFAHTHVTTALSNATDNYIVQLPSRGGTDETTAHRQPAVARGSGGLRGSGTRPHTGAPWVGWPCFYAILFQLHVSQIPLMSLFIGKPSLYLETLIIHCGGHSFPHPIDPGFGNSGRVGPLDITVSLLLQGTHR

SEQ ID NO: 1013897 - protein, 40 aa, Homo sapiens
  misc_feature (37)..(37): Xaa can be any naturally occurring amino acid
MAAGSRPSLLLAFALLCLPWLLAAGAVLTVPLPSFLXRLA

SEQ ID NO: 1013898 - protein, 106 aa, Homo sapiens
WCGGKRRTSLGIQNAAGEFVDLYDDAENAALSNRIIGAKAHGSIQMNVAEVLQGHRKVYGQFKTYAICGAIRGMGESDDSILRFARRRHRLKALLTGENHRCGIFV

SEQ ID NO: 1013899 - protein, 69 aa, Homo sapiens
IRHEVHQTSCTCPPMRKIDGLLNEHKKKVLKRLSLKPALQVPGGLDRGFLGAKGPHVEDIYVSPPFARG

SEQ ID NO: 1013900 - protein, 69 aa, Homo sapiens
MVLGKTATPQQAQEVHEKLRGWLKSNVSDAVAQSTRIIYGGSVTGALARSWPTSLMWMAPCGWCFPKAR

SEQ ID NO: 1013901 - protein, 68 aa, Homo sapiens
IRHEERLRGKRGEKEKESWNSKEKGRQPPEKAPETSLYREGDAPRLTCKAGERVPLNSRFPCFYASEY

SEQ ID NO: 1013902 - protein, 69 aa, Homo sapiens
IRHELTTITKQITAYVRSIAKVKERLEPSEAKGGVPGALRLFRMCMGLGAVAHGCNPSTSASKMLGLQG

SEQ ID NO: 1013903 - protein, 65 aa, Homo sapiens
NSWHEPGVRDVLSGILPCSACPGLKRLVPFKPFAYPGFLTTLCFKAIEVDQLAIDTYHEFYETYI

SEQ ID NO: 1013904 - protein, 33 aa, Homo sapiens
RVVRYNETKLAGWKQIILPFFQVFECTSNLGLI

SEQ ID NO: 1013905 - protein, 61 aa, Homo sapiens
  misc_feature (10)..(10): Xaa can be any naturally occurring amino acid
  misc_feature (61)..(61): Xaa can be any naturally occurring amino acid
ASIPAGHTLXLGTTSILLTAAVVQVPRVLVVAELHFLVGWWCQASFLCPTVYAVSLLVPVX

SEQ ID NO: 1013906 - protein, 66 aa, Homo sapiens
MATGAVGAAIYPCPAPNWKKMLIKVKTLTGKEIDFGIEPTDKVERIKERVEEKEGIPPQQQRLIYS

SEQ ID NO: 1013907 - protein, 72 aa, Homo sapiens
  misc_feature (41)..(41): Xaa can be any naturally occurring amino acid
SCKFGRGSNPLEVPLPKHILITRIRSINHLSSPESNRKQPXPNISSTSYYKLDLGTLFYPSYQSLMSNFEVL

SEQ ID NO: 1013908 - protein, 82 aa, Homo sapiens
PGPSSNFSSAARRSHILHEKFGLPPSSNAGLNFEDIGGLEKLAFIPMIGYFGSKYHPQSFALSDKLAGPWHFIEGFQFSGPP

SEQ ID NO: 1013909 - protein, 266 aa, Homo sapiens
MNSFIGAIAIGELVKRKLGKKGMEKIVVRSGRDESIMVKNDGGNIIKKIGVENEEAKVLVDMLRVEDDEVGDGNNFVIVLAAELLREAESLIAKKIDEKKIIEGWREEKKDEREELLSYEVDDGFDEVKFRQDLMNIAGKKLFLKIVNNKKEKFTKLAVEAVLRLKGSGKLEAIHIIKKLGGSLADSYLDEGFLLDKKIGVNESKGIENAKILIANTGMDTDKIKIFGSRVRVDSTAKVAEIEDAEKEKMKEKVERILKHGINWFI

SEQ ID NO: 1013910 - protein, 81 aa, Homo sapiens
FVYHKVTPYTSLSPYVGYYSKPSAYISSTNSPGADALSSVTLRAGHLLMHLIGGATLAISAINLPTTLIIYTILILLTILE

SEQ ID NO: 1013911 - protein, 139 aa, Homo sapiens
YGPVHKHLTAGITYPKKVKPSRGSNSANLSSGHSGRRVRTSVSQACGSRLRFPEGSLSVPRGSRPPVNQRTTRPFSHNDRTDSTLADIVVCALKCTIFPSVKVRPGYLSLRLEGQEAVQEVTKGLNLSLKRLLQEVNGL

SEQ ID NO: 1013912 - protein, 124 aa, Homo sapiens
GSQFGRNGKTGCNQVIDRIIFIFKRWTEITVRQLSQVAEILCHDRIIKMIFRFDIAITSGGKVRSPVKGLPGARRIIKNEIVIRINSVGIASRQRRRINFDIALPSGLSFCNAIKLRHRGAGHF

SEQ ID NO: 1013913 - protein, 137 aa, Homo sapiens
AFEITDLHPTSSNGDLDVTIDERDGNQQNYTIPYSTVPILQREGRFKFDLTAGDFRSGNSQQSSPFFFQGTALGGLPQEFTAYGGTNYLQLHRLFIRAGAQSRELGRSVAGCNAWAQSVSRRQLMRGILFVSSMRNR

SEQ ID NO: 1013914 - protein, 91 aa, Homo sapiens
  misc_feature (31)..(31): Xaa can be any naturally occurring amino acid
MHSDRLGYETLGRIWQWLKGCQASHGKSDFXARSKLRRLNRPVLTSCATSSHNTYNQRRQMNDSATGRVAGNSRANLPPENYPLVGTVRIL

SEQ ID NO: 1013915 - protein, 51 aa, Homo sapiens
GSHCHNWYMVGLVAQEAVKNSGGLRAVKHYMQRTAVQGSPTLLAAISKQWV

SEQ ID NO: 1013916 - protein, 58 aa, Homo sapiens
FAYFVNDTTFFTHATFAIRQYRQHVERQLTPEEIFFVNRNAVEQFRTLPRYRIDRFFA

SEQ ID NO: 1013917 - protein, 94 aa, Homo sapiens
VAGQLDLKKVAKALGAKKVEMADPMVAQFDGIPGWGDEPTGAEKTSANDYRQPPTQEFATIYVSGGKRGLDIELAAGDLAKILDAKFSDIARRD

SEQ ID NO: 1013918 - protein, 101 aa, Homo sapiens
EFVLHPRCVTTPFHFHSAALFSSRSLLNPPTKKKPTSSLQKTRFSHIMVIRTLLTLSTKNPLSPLSPSLSHSDTRGQVPPLTPHTLSLALSLSQTRSLPLT

SEQ ID NO: 1013919 - protein, 118 aa, Homo sapiens
PGLTVIEAPTGSGKTETALAYAWKLIDQQIADSVIFALPTQATANAMLTRMEASASHLFSSPNLILAHGNSRFNHLFQSIKSRAITEQGQEEAWVQCCQSLSQSNKEVFLGQIGVCTI

SEQ ID NO: 1013920 - protein, 45 aa, Homo sapiens
MSVRLCRFENGASFNESHKNTKEMKMYRQSNGCTNSLALPAHAVK

SEQ ID NO: 1013921 - protein, 107 aa, Homo sapiens
  misc_feature (31)..(31): Xaa can be any naturally occurring amino acid
MKELLTIAALAPGTNNMLRRVRVLRCCSEAXIIGNPPMAEPGYRWRVPAGLPVVHVKCSQCAFVIDIQLYAAHVVAGENVQNGGANCIAKLFLNAAIDLQVDILRIL

SEQ ID NO: 1013922 - protein, 88 aa, Homo sapiens
MAGIDKDIEGEARPQPDIKIGYLPQNLQLNPEHTVRESIEEAVSEVVNALKRLDEVYALYADPDADFDKLAAEQGRLEEIIQVHDGHN

SEQ ID NO: 1013923 - protein, 125 aa, Homo sapiens
SGGEKSLPAGDYAAQPGDCCRSGPENLLVTVANPDIETAQRLFKFPGIGLLVVTGGEGVVEAARKHTNKRLIAAGYGNPPVVVDETADLARAAQSIVKGASFDNNIICADEKVLIVVDSVAMTYA

SEQ ID NO: 1013924 - protein, 92 aa, Homo sapiens
MPKCGGVRVWIKDWNVASLCPWWKGPQTVVLITPTAVNVERILAWFHHNRVKPAAPEILGGKTKSGQPLQSDPEEDDKPFSITPEVDGQDSR

SEQ ID NO: 1013925 - protein, 109 aa, Homo sapiens
  misc_feature (52)..(52): Xaa can be any naturally occurring amino acid
MDPGSRTSLAPAAFALLCLAPASSALVPSKSFRYSRTVAPPLLLPGHSRRTXCDIATPTQAALKKPYIPKHQKDSFLHDSQTSSLLLRLYSATLQHGGTQQKYNLELLR

SEQ ID NO: 1013926 - protein, 67 aa, Homo sapiens
SRVGALKVCAPWNGRLEEPRVANHGSGPSGVSHEPAEPECEDGEKADHSHDINPHNLGTTQENHTGG

SEQ ID NO: 1013927 - protein, 125 aa, Homo sapiens
  misc_feature (63)..(63): Xaa can be any naturally occurring amino acid
  misc_feature (86)..(86): Xaa can be any naturally occurring amino acid
  misc_feature (88)..(88): Xaa can be any naturally occurring amino acid
  misc_feature (121)..(121): Xaa can be any naturally occurring amino acid
VGDAGRLPPAEAFLPRPLSGLYVLSSLSTPASSPLEEPPRRGDTCPRQEAANGNPLCGLIVHXPPGRKSRKLVSRRPGVGAGVPGXTXHPHARAPPGSGSVRSPSVGPGAINSGPVSLRLXPEPS

SEQ ID NO: 1013928 - protein, 52 aa, Homo sapiens
  misc_feature (14)..(14): Xaa can be any naturally occurring amino acid
  misc_feature (30)..(30): Xaa can be any naturally occurring amino acid
  misc_feature (42)..(42): Xaa can be any naturally occurring amino acid
  misc_feature (48)..(48): Xaa can be any naturally occurring amino acid
FVAGLAVDAPTMGXAGRLPPPTFLQTSGLXSSSLVLLSFVAXSSINLXQMLQ

SEQ ID NO: 1013929 - protein, 74 aa, Homo sapiens
TEHHDGRREQSQRRKTGKRRQTERTETQEHQQEAEAQQATTKKARRKQARDTKRGSRRQSEALSIPIFEAVEQA

SEQ ID NO: 1013930 - protein, 46 aa, Homo sapiens
  misc_feature (41)..(41): Xaa can be any naturally occurring amino acid
  misc_feature (43)..(43): Xaa can be any naturally occurring amino acid
MAMPRPTAGGGCTVATLTAAGKVYTKSSHVKAHQRTHTGQXPXGPR

SEQ ID NO: 1013931 - protein, 51 aa, Homo sapiens
  misc_feature (20)..(20): Xaa can be any naturally occurring amino acid
  misc_feature (27)..(27): Xaa can be any naturally occurring amino acid
  misc_feature (32)..(32): Xaa can be any naturally occurring amino acid
FSVPLLAPTYALRGLVTTRXVASWSPXPCTTXRCSFPNCSCLRYYRAWVSL

SEQ ID NO: 1013932 - protein, 89 aa, Homo sapiens
  misc_feature (12)..(12): Xaa can be any naturally occurring amino acid
  misc_feature (15)..(15): Xaa can be any naturally occurring amino acid
  misc_feature (21)..(21): Xaa can be any naturally occurring amino acid
KEGSKGAHQPGXREXLRSSTXGDREEGHSTRKGRQKGRTRNNGKGDRGTQTAGKEAQGDEKKKQKRGSWLAPFSVEKTECQEKKSTRAK

SEQ ID NO: 1013933 - protein, 47 aa, Homo sapiens
MRTFFVPGAHPAPGLPAAFYIRLYCLGSQMAPAEGTPCFPIYIIKGS

SEQ ID NO: 1013934 - protein, 60 aa, Homo sapiens
GYNEKDGSSFWIKSVDESEAISLNLVVNKTIFAKGETELAGIYQLPETQGIQIILLNDWS

SEQ ID NO: 1013935 - protein, 109 aa, Homo sapiens
RREGGPRERKKRQNEDIEEKLGGREERGAGAGGEEKPSRDKRISRETGRDESKGARFGFLQDLGDYRPPTPSRRERVAGTGASRRSPMKGRGIVWTIVFKDWNKNNLFW

SEQ ID NO: 1013936 - protein, 33 aa, Homo sapiens
MATNPLFRRVWKTGQELFTGKFPDSRLGTARLT

SEQ ID NO: 1013937 - protein, 84 aa, Homo sapiens
  misc_feature (83)..(83): Xaa can be any naturally occurring amino acid
MNRNTSLFMFAIDLRIILKFDFGFVRDNKIEELHHFSDFASNSLESGYLLIDMSLSSILPVKVALPSSLAKPLYLVPQKSFYXS

SEQ ID NO: 1013938 - protein, 90 aa, Homo sapiens
LASRINAISASASQVLTPGGSHEPEFKTNPAIMLKHHLYLYLKLAGLVTHACDPSYSGGRVLRHENCLNLGVGSCSELRMCHYTPAWATE

SEQ ID NO: 1013939 - protein, 78 aa, Homo sapiens
  misc_feature (32)..(32): Xaa can be any naturally occurring amino acid
YIFTPALSDYYRESWYPPAGNRSDFPGPTQRXPKISGAWWQIPVVPNTSGGTRGEDHLNPEVEAAGALGSHPLYSSLC

SEQ ID NO: 1013940 - protein, 33 aa, Homo sapiens
EAGQPHLMIACIPKKGKACGREPAGCHADDGVI

SEQ ID NO: 1013941 - protein, 31 aa, Homo sapiens
SPSSRAIAATSGEAGPPRNSSATVTITRMMQ

SEQ ID NO: 1013942 - protein, 68 aa, Homo sapiens
PRVITLAKWKPSFPKAYGGSLRQVVLPSVRPQQLWLSWCQPAEPCSRERWVDALIEHPKQFLEMNKVL

SEQ ID NO: 1013943 - protein, 39 aa, Homo sapiens
IEVTNELTKHYHAGGGDSKRYRCHRLEEDMRLLSKLHHS

SEQ ID NO: 1013944 - protein, 48 aa, Homo sapiens
LGAGGSTFCHRLAELENWRQSFYHLIYSLAWFETQITRESGSVVVCRC

SEQ ID NO: 1013945 - protein, 33 aa, Homo sapiens
QESESLSLLPPHAIHLLKPSDQLNRTERLKIQE

SEQ ID NO: 1013946 - protein, 43 aa, Homo sapiens
MQASLTHRKQVFAKPRGVFPSAYKCYLSNCLENNPPPNPEGTR

SEQ ID NO: 1013947 - protein, 33 aa, Homo sapiens
MSLLKTRALTVQPDSLVQYHVLTERCPRKKWQK

SEQ ID NO: 1013948 - protein, 72 aa, Homo sapiens
SPSCYLIQTRALNPREQPTLDVVPTSAPKTHLPGGEWLQDNGWAPSVLTDATVDACIPWPDLGQQQRAIGKQ

SEQ ID NO: 1013949 - protein, 82 aa, Homo sapiens
  misc_feature (2)..(2): Xaa can be any naturally occurring amino acid
EXTNDLYMLKGCVVGTNDSGLLTLRKSLLVHEKRRVSGVRLTLSFIDTTSIVLAMARFPDHGGEESHSWDSLKKDRMCKGRR

SEQ ID NO: 1013950 - protein, 79 aa, Homo sapiens
  misc_feature (6)..(6): Xaa can be any naturally occurring amino acid
  misc_feature (10)..(10): Xaa can be any naturally occurring amino acid
  misc_feature (17)..(17): Xaa can be any naturally occurring amino acid
  misc_feature (55)..(55): Xaa can be any naturally occurring amino acid
GGPKKXPPLXLHAKRPXCWLDLADPFSRPNSGPAPGAVARPVGRKGGGAFYPVSXCPPLRNTGACLKGPGPPGPPPLVA

SEQ ID NO: 1013951 - protein, 62 aa, Homo sapiens
  misc_feature (21)..(21): Xaa can be any naturally occurring amino acid
  misc_feature (38)..(38): Xaa can be any naturally occurring amino acid
  misc_feature (42)..(42): Xaa can be any naturally occurring amino acid
  misc_feature (52)..(52): Xaa can be any naturally occurring amino acid
VTVGESYRSRSTLGHSRSHWXQGSSSHASRPQEPRNRXRISXVIQPLRQNAXEVVDLTVDED

SEQ ID NO: 1013952 - protein, 47 aa, Homo sapiens
ERAGTGCADRGVKDSRIGGMMKTLLLFVWGLLLTLGELASSWVDQTV

SEQ ID NO: 1013953 - protein, 32 aa, Homo sapiens
KEVTNGQKVSRAQPAAPPVGDAWSASSGGPKE

SEQ ID NO: 1013954 - protein, 99 aa, Homo sapiens
TAYYNFTGLYFTLLQASEYFESPFTISEGIYGSTFFVATGFQGLPVIIGSTFLTICFILQLIFLFTAKHHFGFEATPDTGILYMWFDYFCMSPSIDEGL

SEQ ID NO: 1013955 - protein, 94 aa, Homo sapiens
KKLRALRSSKGPSGKEDGPELGKGGMEDQLAFSCGKASAFAPVSCLYYNPNYLWEQQLKKGKRKLGQTEVTAPPSPALPPSACVLAAPPLSSCT

SEQ ID NO: 1013956 - protein, 91 aa, Homo sapiens
LVKWFKAPRGPGSKMLIVHVVGYGKYELEEDGTPSSEVSNSSCEVMQLTYLPTSPLLADCIIPIADIRAFTKKLNLLPYIKIVKEIKSSHV

SEQ ID NO: 1013957 - protein, 116 aa, Homo sapiens
MELEGFYRENSYKCSGVLAVKCLLLKDEQDQGGIGRALAEKPAGLCQFAFPALVVWHYFQNCTFLLVMTFDTPAMTCVSVNMKFCGSASGGRGKEEVLLRFVRNKYGHMFNKTVLL

SEQ ID NO: 1013958 - protein, 70 aa, Homo sapiens
NTFSQMEALIPQRATGLLPTGLGPDPSPLGRVNSSGGGDVCTYVNEKRDVSTDAFISPGMCIVFTLRNQG

SEQ ID NO: 1013959 - protein, 126 aa, Homo sapiens
  misc_feature (119)..(119): Xaa can be any naturally occurring amino acid
  misc_feature (122)..(122): Xaa can be any naturally occurring amino acid
  misc_feature (125)..(125): Xaa can be any naturally occurring amino acid
KLHHPDPTTNSHPKQANMTNTLIPSTLLSPGGLPPLTGILPKWAIIEEFTENNSLIIPTIIATITLLNRYFYLRLIYSTFITLLPISNNIKIKGQFKHTKPTLFLPTLIALTTLLLPIXPIXLIXL

SEQ ID NO: 1013960 - protein, 70 aa, Homo sapiens
  misc_feature (11)..(11): Xaa can be any naturally occurring amino acid
  misc_feature (20)..(20): Xaa can be any naturally occurring amino acid
  misc_feature (67)..(67): Xaa can be any naturally occurring amino acid
NQLSLQELQTXSPLFAGDVXCVWDYGHSVEQYGALGGTARSSVDWQIRLVRALLQAQQAKVHPHLPXDKV

SEQ ID NO: 1013961 - protein, 119 aa, Homo sapiens
DIQTERAYQKQPTIFENKKRVLLGETSKEKLPPYYKNIGLGFTTPTVAIDRHLHCQEMPFTGNVSIRRRILFSVVTKMKMQRTIVIRETICTTSEYNRFEKRHKTCLYTCPLASGRQIR

SEQ ID NO: 1013962 - protein, 109 aa, Homo sapiens
  misc_feature (16)..(16): Xaa can be any naturally occurring amino acid
  misc_feature (20)..(20): Xaa can be any naturally occurring amino acid
EVGAGGAGSCWDGQAXAEGXKYLEDPELLLQSNPPNQFLDSLEGQAPTTQNPGFPGGRLVPPALSSQAGPASKHPGCHGNRMPPSYCMPPPPEEAECTHRELIVMFIML

SEQ ID NO: 1013963 - protein, 116 aa, Homo sapiens
QIRKTTYAQPQQVPQIRKKMMEIMTREVQTNDLKEVVNKLIPDSIGKGIERACQSIYPLHDVSVRKVKELKKPKFELGKLMDLHGEGSSSGKATGDEEGAKDERADGYEPPVPEAV

SEQ ID NO: 1013964 - protein, 40 aa, Homo sapiens
MKLCCHGPFWKFLVPFLNCYNLYFQTWFIFILCNPYKDNL

SEQ ID NO: 1013965 - protein, 71 aa, Homo sapiens
  misc_feature (7)..(7): Xaa can be any naturally occurring amino acid
EIRIARXARKAGNILCASQNPNWRFTSESEVSMESAKSLERCCSFFAFDKIINGTLLKLNKASFNMLRFVE

SEQ ID NO: 1013966 - protein, 33 aa, Homo sapiens
  misc_feature (14)..(14): Xaa can be any naturally occurring amino acid
MPGGEMRISIIAAXNVFLRNVGFSFMSLIILPS

SEQ ID NO: 1013967 - protein, 93 aa, Homo sapiens
MHAMLAAPFPSWAPRVSPDPGSQVMFPPPPAPLTTYVSSRHLHAHLVLSHRPQKGGARGARLAESGREQGEGGRPKIPPPFPNKDEGTKVRLR

SEQ ID NO: 1013968 - protein, 104 aa, Homo sapiens
FGRFVKDMKIKSPEEIYLFSLPITESEIIDFFPGASLKDVVLKIMPEQKQTRASQRTKFMAFVAIGDYNSHVGLGVKCSKVVATGIRGAIIAGQALHRPRARGY

SEQ ID NO: 1013969 - protein, 86 aa, Homo sapiens
GIVGYEETPRGLRTFKTVFAEHISDEWKQRFYKKLHKSKTTAFTKYCKKLQDADGKKQLEKDFSSMTKYCQVIRVIAHTQMRLFLC

SEQ ID NO: 1013970 - protein, 101 aa, Homo sapiens
ENEAITSAELRLFLEQVDQGPDWERGFHRINIYDVMMPPAEDVPGHLITRLLDTRLVHHNVTRWETFDVSLDPSLDPGEEAKLWVAIAVVTSIKTRTNQGR

SEQ ID NO: 1013971 - protein, 68 aa, Homo sapiens
LSSSEVANRSKKSRALFLSAAVFCIFIICFGPTNGLQIPDYSFPSDTFTTEGDYFVLPPLCSVSADIS

SEQ ID NO: 1013972 - protein, 61 aa, Homo sapiens
MGGSLSNERGDVIDYSSSGVSTNDASSPDPITEEDEKSDQQAVSFSRQGIFRTVKLFQTDL

SEQ ID NO: 1013973 - protein, 126 aa, Homo sapiens
  misc_feature (22)..(22): Xaa can be any naturally occurring amino acid
  misc_feature (25)..(25): Xaa can be any naturally occurring amino acid
  misc_feature (65)..(65): Xaa can be any naturally occurring amino acid
FLFVRTCASGETSTRFQARATXIFXVCGGLGGRSRAPCPSHGHCSHPVCAAVLLSAERAQSLPIXLITRHNVPNSQPHHPFSVMTLVGCRRYLLHTVGEIKGRQSPGTRDGPSLSLSVPLIQLGPS

SEQ ID NO: 1013974 - protein, 124 aa, Homo sapiens
  misc_feature (3)..(4): Xaa can be any naturally occurring amino acid
EVXXEPMFKWTRVGSRLLGRSAYEFRAGRSGRRSGFPPSSICSMYRCTAQNPLGSTDTHTRLIIFENPNIPGRNGGLYMVPLAHWCPAHLGARPDSDSGADVKAPAPATPSGTDISTAGFHFFT

SEQ ID NO: 1013975 - protein, 312 aa, Homo sapiens
QGYGVLAWSAFLVYFRPFFTWIFLGRVRLPSMWGGDSPRVPYGGVSPRAPGGVAPSLMILFMLLVLIRTTLGLRWLVFLVRRLPPRPDWGSNVFFLSRGGEKYTSFSQNVVGPSIAGAQLAWASPLSYVGGVRSRFHPPLPLLSMGGVAAPRVVFSPAPGSPMNSPRLCSSFVWWWEHPLCDLLVVWRIKHAPPPPACFLLGCRGAPPTHSRAGFLYVMRCAPPPRGGRPPLPFVFFMLDPSSLRGDLLCREFLLVAPSGRGGPPLLRLCSPPPPPHACLMDVVAPPFFRGGPPATPPFFFFPKKTPLPPPT

SEQ ID NO: 1013976 - protein, 120 aa, Homo sapiens
IVHPLFARPVPHAYIVVSIPCVSYSLPQHLPHILCALSYHPEIAADSYPVQRKRSGMAHRYEHLHICVYTPYTLNEASKVHSTIPYSIFISIRTSNTPIAYAQSNYKIQTFVSLLFPNKH

SEQ ID NO: 1013977 - protein, 31 aa, Homo sapiens
TGRPRVREQINKDLHNTLEDLRLRRESPESE

SEQ ID NO: 1013978 - protein, 78 aa, Homo sapiens
SLFFFTSPPPDSPLIHHPKTVTSSEPPEIHDEKIMIATMRKFPPNSILPPSNIRLPPHIRHQEAPFNTIPLEIPSLRL

SEQ ID NO: 1013979 - protein, 71 aa, Homo sapiens
QSACHVIAVTLGSSLQESGLREIYNAKAVETGEKLLKSCNSNTAWLALALRVCRQPSCSTPRVNVEEMMSE

SEQ ID NO: 1013980 - protein, 77 aa, Homo sapiens
DLGLSRAPGLRLGEKGERGPPRPYGIPGCAAKGLLDVLEPKGPEGPPGPNWCLAKGEKGEPGRPGDPCKWWDLLLLD

SEQ ID NO: 1013981 - protein, 70 aa, Homo sapiens
IQPGPAKWSGQNKAPVKTWRRRERRSSGHIEGCVTSVLGPSWSEGQHHPRPHLAAVAAPWVCPTKVIKVV

SEQ ID NO: 1013982 - protein, 100 aa, Homo sapiens
APPLLPPGCALLLFPGGRPVVPLGGGSARLAAGASVVFGCLAAGWDSAAGPPFFGEERVGPLAVGEGAPEEFCYLCVTRMDDNDSSDINLTPLIEIPFMK

SEQ ID NO: 1013983 - protein, 99 aa, Homo sapiens
VRQRVPTSRHCPSYQFDIGVLRVRVSLGGWSRRVPSTLVFHVTVGTDPKKTNKTRNKKNQKEKTLLYPRVVTLTDPTPPSRSEHGPPSSNVTRLYQRVT

SEQ ID NO: 1013984 - protein, 85 aa, Homo sapiens
HRLQARENRTEGRSDGASMGKVGGHRDVAEVRLRIEDSEADPCLAALGLRRAPRSGHRCPLEDLLVTYPKHLHRWTLASPLNPRT

SEQ ID NO: 1013985 - protein, 71 aa, Homo sapiens
  misc_feature (65)..(65): Xaa can be any naturally occurring amino acid
MEGGVHRTSRSVRTKKCEACPARGRAQEAPVVVDSGFPPRRVALVLPPKHVHTWTRAFTLTPVLXNSNTAF

SEQ ID NO: 1013986 - protein, 30 aa, Homo sapiens
  misc_feature (16)..(16): Xaa can be any naturally occurring amino acid
GQPSSQPNSNVSSGPXPSPSSFLPSPSPQP

SEQ ID NO: 1013987 - protein, 63 aa, Homo sapiens
  misc_feature (2)..(2): Xaa can be any naturally occurring amino acid
  misc_feature (17)..(17): Xaa can be any naturally occurring amino acid
  misc_feature (61)..(62): Xaa can be any naturally occurring amino acid
QXPALLVVGDSSPAVDXVVECTKNLDPTKTTLLKMADCGGLPQISQPAKLAEAFKYFVQGXXY

SEQ ID NO: 1013988 - protein, 121 aa, Homo sapiens
  misc_feature (45)..(45): Xaa can be any naturally occurring amino acid
  misc_feature (66)..(66): Xaa can be any naturally occurring amino acid
  misc_feature (94)..(94): Xaa can be any naturally occurring amino acid
  misc_feature (98)..(98): Xaa can be any naturally occurring amino acid
  misc_feature (101)..(101): Xaa can be any naturally occurring amino acid
  misc_feature (107)..(107): Xaa can be any naturally occurring amino acid
  misc_feature (112)..(112): Xaa can be any naturally occurring amino acid
  misc_feature (121)..(121): Xaa can be any naturally occurring amino acid
PDSKSFGRHHVRLAVFILDVKGKPLISRNYRADVAMSKIEHSCLXWYREEEAPGPLLSHGQVHSLXQTQHLYLVATHRDAMLLVYSFRIDIEVXDIQXEGXIGHLYXRFCGXAWFETRTVX

SEQ ID NO: 1013989 - protein, 136 aa, Homo sapiens
  misc_feature (83)..(83): Xaa can be any naturally occurring amino acid
  misc_feature (120)..(121): Xaa can be any naturally occurring amino acid
  misc_feature (136)..(136): Xaa can be any naturally occurring amino acid
GEIWRSTDHRGRRVIVNNTESIYMSYDHVDSAFNDMKNVPEAFKGPEGILPYPYRSFSVQGKDAMQSFMMHFIIMKTVRSAAXFGATTSGTVSGGEVAGSSVPQVASRRAHEFVSGVQCXXAQVSPVGLYFTATGX

SEQ ID NO: 1013990 - protein, 32 aa, Homo sapiens
  misc_feature (4)..(4): Xaa can be any naturally occurring amino acid
  misc_feature (16)..(16): Xaa can be any naturally occurring amino acid
MKKXAVPPSHWVRPPXFDSTQKGFHHQESSPG

SEQ ID NO: 1013991 - protein, 32 aa, Homo sapiens
  misc_feature (24)..(24): Xaa can be any naturally occurring amino acid
  misc_feature (26)..(26): Xaa can be any naturally occurring amino acid
NDCTNIIRKPVVCGVSSLGIDHTXLXGDTLEK

SEQ ID NO: 1013992 - protein, 32 aa, Homo sapiens
  misc_feature (17)..(17): Xaa can be any naturally occurring amino acid
  misc_feature (30)..(30): Xaa can be any naturally occurring amino acid
GGLCVRTGYTPNDECFXIFLDVSRDFVASXAE

SEQ ID NO: 1013993 - protein, 88 aa, Homo sapiens
  misc_feature (21)..(21): Xaa can be any naturally occurring amino acid
  misc_feature (54)..(54): Xaa can be any naturally occurring amino acid
MTRTGAGALPGPSSGLPTPIXVSPEGELTITTDVEDLSTALFYDTVPDTWVARXYPSMMGLAAWYADLLLRIRELEAWTTDFALPTTV

SEQ ID NO: 1013994 - protein, 269 aa, Homo sapiens
MRAPSLWDFQKKGLSPSCWLDYTTPNPCSPNPEEGARPGRAVDKEPGGFGERMAGSMVSRGGGSHLGGHFLAAMTTESATPPKATAVTPNIHFHAINQAPFPGHLAAILLAFPIIFLYNSFSFLLFSSFFFTIFESSAFDRLFGRFQLQGCPQDGDGLTVLPLLGQHLALAEESLDVVWLVLQHKAAGAQGCAVVVELQLRGRQVVQTLHLQLQELCLLLERHVHFGAGGDSLDGEVVGVGGQDEYALLVVGVAHSRFRLAGHALLPVS

SEQ ID NO: 1013995 - protein, 103 aa, Homo sapiens
QWRTGLKLLSVGWDLHLKSAGGLPLAEGSWLWHVAGLWLSPGQAAILVSVALVIRAAPCPGAQGNEVAMDCQDMARVDRPGAEVKEVEMFLSVVLGQGPREPG

SEQ ID NO: 1013996 - protein, 43 aa, Homo sapiens
  misc_feature (23)..(23): Xaa can be any naturally occurring amino acid
  misc_feature (40)..(40): Xaa can be any naturally occurring amino acid
RLVSATPWIILAKDFAIYFPAFXGRISLLPEVLDERSSSXGRF

SEQ ID NO: 1013997 - protein, 40 aa, Homo sapiens
  misc_feature (29)..(29): Xaa can be any naturally occurring amino acid
  misc_feature (34)..(34): Xaa can be any naturally occurring amino acid
AKLGPGRPHHDETGSCCSDGRSPGSGGCXVVLSXMGFIGA

SEQ ID NO: 1013998 - protein, 239 aa, Homo sapiens
  misc_feature (47)..(47): Xaa can be any naturally occurring amino acid
FLRAAATLPESTGHRSTITYPKFGPPPAATSPESIGPCLLLAPGDFXGPQLTRVWLVLLLLTLQVGVTAGAPWQFAPCSAEKLALCPPVSASFSEVTRSAGCGSSPMFALPLGAACGVATARCARGLIFRALPGDQQPVHALTRGQGAFFHDYYASAPHSSEAGSPESPESTEITEEELLDNFHLMAPSEEDHSILWDAISTYDGSKDLHATNIKKWKEPCRIELYRVVESLAKAQETS

SEQ ID NO: 1013999 - protein, 66 aa, Homo sapiens
  misc_feature (42)..(42): Xaa can be any naturally occurring amino acid
  misc_feature (54)..(54): Xaa can be any naturally occurring amino acid
IVDVNQIYKIHYSPVINGIRSKTPSGCLKLANAEPYIYYVFXVHIYDKDLNDKXGTVTTITVKQQL

SEQ ID NO: 1014000 - protein, 36 aa, Homo sapiens
  misc_feature (9)..(9): Xaa can be any naturally occurring amino acid
IKDILIQYXLDLLVADPRLLRAKKFGGPSALLVTIN

SEQ ID NO: 1014001 - protein, 118 aa, Homo sapiens
  misc_feature (89)..(89): Xaa can be any naturally occurring amino acid
TTHARSAVNETYNATHTRNTMRFFAQRSFSFYFRSSHEKKEDKRGKHTHREENPSVAQRAPQFPILSHENCENAHGVLYKSPPVSLSHXTTTVKFCVVGCSTLCLSATPTHRRGKAKG

SEQ ID NO: 1014002 - protein, 106 aa, Homo sapiens
RNAWAVSEPIAHEDTASRQGVSFTPSPRRRRRGNTQKERLVQSPHSYFTGMCNAPGVLLNHHRSLATCTNGKFCVLAAPLSFASLQEETQAYRRIFLQEEAALKAL

SEQ ID NO: 1014003 - protein, 114 aa, Homo sapiens
  misc_feature (14)..(14): Xaa can be any naturally occurring amino acid
  misc_feature (92)..(92): Xaa can be any naturally occurring amino acid
MLHCEDPGIHIGAXFPPVFLTCMFLVETEFTLAGTISDEAFWRLDGKSCASPLCPVPPPSTVAKPGKPLTCRCCCCHFFLLSLPFLLLDGGXLFLTSVSELLGGNKHINEILFR

SEQ ID NO: 1014004 - protein, 104 aa, Homo sapiens
  misc_feature (38)..(38): Xaa can be any naturally occurring amino acid
RQTEPPRPSEGESELVSGLNIEYVQAPRPFFIAEYTYXIIINTLTTTIFLGTTYDALSPELYTTYFVTKTLPLTSLFFEFEQHTPDSATTYSYTSYEKTSYDSP

SEQ ID NO: 1014005 - protein, 205 aa, Homo sapiens
MPWTRRGTPDLGEPFGVIAAAVLCCLRWRLKCGSACTMGALARVMLQEHQTRVPNPWPVWHACASCRDTAARPAPRMRSSSERHAELACPSSIRGTLEHRSYELTCGDAMAAEDAAPVVTGHTDFVAAADRAEVAGWWHDARVSLLRSSLRFSISYSGGVTALPVILFSDSNWHVSCLSTLQPPPKMAWSVGCGWAVASVVSAAP

SEQ ID NO: 1014006 - protein, 230 aa, Homo sapiens
  misc_feature (122)..(122): Xaa can be any naturally occurring amino acid
  misc_feature (124)..(124): Xaa can be any naturally occurring amino acid
  misc_feature (219)..(219): Xaa can be any naturally occurring amino acid
MCGALGRCGRGGCCIPDVVCPHPPPVVCPLGLVVVSAPIVGPASDYFLSVATPPRCLWRHPRSVVVATPEQRSPHRRRVVWFVAPAWFSPRGDFFSPPGRGSLFLLFVAQHPTTRRSRPRRXFXERWCISLWWGKNRGCFLAACDILAHCVGPSLVWCPPPPPPRCDSLIAARISHRERCPARNYYSLVCSPHCLYERDTPSPLWESSVSLPRALSQQXCIQRNNIAREI

SEQ ID NO: 1014007 - protein, 104 aa, Homo sapiens
MLLNLEAMRQSPLYSRLLEPAEVQQLADKYHFRGHLRDQDFFTMICMEHPKLFHVLDCTPNRQLWTWWRDHGYSDAFEAYLRCEGHVKIYHGTGKTGIPGEEGV

SEQ ID NO: 1014008 - protein, 78 aa, Homo sapiens
GSMLFPIPGLRLISLNMNFCSRENFWLWINSTDPADSSSGWWGSFKAAEDLRAKVHIIGHIPPGHCLRAGAGIYECAS

SEQ ID NO: 1014009 - protein, 71 aa, Homo sapiens
  misc_feature (15)..(15): Xaa can be any naturally occurring amino acid
EHLLPLFLAQLKDEXPYARLNIISNLDCVNEEIGIRQLSQSLLPAIVELAEDAKWRVRLDHHLSTCPSWLD

SEQ ID NO: 1014010 - protein, 100 aa, Homo sapiens
  misc_feature (95)..(95): Xaa can be any naturally occurring amino acid
MMPKRQCELREGDKAAGGWKPRKAPPTSYFSALCPRVLRQAASRALPHSKRTGDVTPGKKPYLCKTFGRCFSVQGNLQKHERIHPGLKESSASIXTQIHF

SEQ ID NO: 1014011 - protein, 71 aa, Homo sapiens
AIGMAEFLDKDDDLCNRSRTSYCHYDCLGLAEELDLFPSFLSLQSFEDPLVGEDTERANSIGLFLEKTNII

SEQ ID NO: 1014012 - protein, 69 aa, Homo sapiens
LNINPELSEAVTKSSARFVFSVKPDFNLDFFSIKLKTQEESSTVYRNALRILQKATDSLGSESFGLFHV

SEQ ID NO: 1014013 - protein, 63 aa, Homo sapiens
MQLQKLNNQYFNHHPYPHNHYMPDLHPAAGHQKEGDKPALSEIGTPSTAGAEHPGVRGGEQDP

SEQ ID NO: 1014014 - protein, 68 aa, Homo sapiens
GTRQLAEKREHEKEVLQKAIEENNNSQENEQKRKLHPQNRKLIKENREAQMAAKLGTFAERRISTLKK

SEQ ID NO: 1014015 - protein, 69 aa, Homo sapiens
GGVARRQQRRQALREAEADKPERLGRLKYQAPDIAVQLSSELADSLRTLKPEGNILRDLFKSFQRRNMI

SEQ ID NO: 1014016 - protein, 75 aa, Homo sapiens
RWSRALENNLVPGGPYFVREDEETIMNQEKLAKLQAQELISGKETARRKKKVVHENSTEDDKKLQISLKKLGVNN

SEQ ID NO: 1014017 - protein, 108 aa, Homo sapiens
ELQAQCADELLKRVYGSFSVNPESDTMSLCYKTLKIFRHPGIPLCIMLACGGEIVLPQSLKNTSKFQDAGKEGENRAVIHYGDDETMYEKSKKDRVTVVFSTVFTDND

SEQ ID NO: 1014018 - protein, 69 aa, Homo sapiens
MIQLLQSHRIKTPVDLVSADLEEVAQKYGLPYKALVAPAAGAAVLSSLAFPVNSADLYEELKTPTAILA

SEQ ID NO: 1014019 - protein, 89 aa, Homo sapiens
MATTAKKTITISLAAKVCWEPITCGNGVVDFLRRILLDDDELTVIEMVFYIDDDFDPATIIRGKTTDEARKLGLVLERDDHETLTIGRF

SEQ ID NO: 1014020 - protein, 75 aa, Homo sapiens
RPGISHYFVSLANHPDRDSLFASSSALTSSVPVQNDLVCILLIVSVAPRPYIHPGYSEVLKSDGIRLSNLLPSSL

SEQ ID NO: 1014021 - protein, 115 aa, Homo sapiens
MLLISSSLAKYAPKHYGQQLLLSMEHQLPKMKTFHEPTTLFGNSLPKCTALKPEDNTLTADAKLWDDAKNCFARCTAAASKALPFVLQGCCLMLKRALIPMQLVAALMTLWMVYP

SEQ ID NO: 1014022 - protein, 74 aa, Homo sapiens
  misc_feature (37)..(37): Xaa can be any naturally occurring amino acid
LGWKNWKVKQETCHAKKLKVAKNLFWKLAFFQAKRRXNGLFQLTTMCSQELYYKVSILTTYYIVSFYSDFPPVS

SEQ ID NO: 1014023 - protein, 175 aa, Homo sapiens
  misc_feature (27)..(27): Xaa can be any naturally occurring amino acid
IIARLIMSAAVPCHWRVNGCTFSRCTXSTIAGFDIRQIQTALDGEMSEGELVDAFRHVSDAFEQTSETIGVRAITQINDMVRQRLLNRFTSEQAEGNAIYRLTPLGIGITDYYIRQREFSTLRLSMQLSIVAGELKRAENAAEEGGDEFHWHRNVYAPLKYSVAEIFDSIDLTER

SEQ ID NO: 1014024 - protein, 85 aa, Homo sapiens
  misc_feature (69)..(69): Xaa can be any naturally occurring amino acid
SSFAWPLRITYCVTFRQVPSPTLGPQFLTSGKQGVDQMITMGLPSSGHQEFVNIRAPGLEGRARAADWXSLSFREDFIGPERIAE

SEQ ID NO: 1014025 - protein, 80 aa, Homo sapiens
RKLAEAEETHKRPQSQKGGQGINDVNTEGNAIKSTIGNPTTTQYSSLNHSLNPKARSTMSVQGPPERGYPSLKLSSRENK

SEQ ID NO: 1014026 - protein, 66 aa, Homo sapiens
YPDMMMDPPICYITRPISRHYETILHSDIKDTHIPKYACAYDHRAGRCLLTSSRPAPKTAETSENT

SEQ ID NO: 1014027 - protein, 80 aa, Homo sapiens
FPPPPGVVLSPGRRAPVSSDIPIPVRICAPASLLIPAPQIFSLLSPKHTCPCPRGRPGIALGSRPVGQNGCSGEVKQVWA

SEQ ID NO: 1014028 - protein, 91 aa, Homo sapiens
INNPINLGEGPKLGPFEQQDGVTHYYFPMIASNERGFPLPHCDLTYSDLETRIFKRNTSEAVFYYLFSYIKLWFHLNSVFLMLSQVQVIGL

SEQ ID NO: 1014029 - protein, 93 aa, Homo sapiens
KKQISTLLLLLQLLPPIQVNLEVSKLQQKREEYKPVAKETDKYIKEFGSRPPPPVNPSKGKYRRICLVAEFTTSLTNFQKVQRQAAEREKEFV

SEQ ID NO: 1014030 - protein, 82 aa, Homo sapiens
MTDEFQITPLSILKKQYGLIDFTNKILLMDIIVALVYDVLDDLSCVDYESEYGISVCYYHHSCSISRFWLDWGTNIWRHSFI

SEQ ID NO: 1014031 - protein, 104 aa, Homo sapiens
  misc_feature (48)..(48): Xaa can be any naturally occurring amino acid
  misc_feature (86)..(86): Xaa can be any naturally occurring amino acid
  misc_feature (98)..(99): Xaa can be any naturally occurring amino acid
WKEKQQNFDKKRKAKTNKKMAHIKKRNTENAYDAIINWEANVTGSQLXSSIFATSDVSQHNILTSHSKTRQEKRTEMEYYTHEKQXKGTLNSNADYEXXDFFNK

SEQ ID NO: 1014032 - protein, 55 aa, Homo sapiens
MGFLLFAPRCLVSWGPSATFLPCPLRNARPVQGPEARQHPKVDFVWVLQRAGGLL

SEQ ID NO: 1014033 - protein, 73 aa, Homo sapiens
  misc_feature (71)..(71): Xaa can be any naturally occurring amino acid
AGAGTQVAAGHRAFVYHMKLGWHGKPPVLVRSPFSPRKKGGTQRVLWNTDSPTFQLGTSFMMMASSRIRRXKL

SEQ ID NO: 1014034 - protein, 71 aa, Homo sapiens
RTSEQKVLSFLASLFGGKIAVLEINPAALVRAQQSPAWGRSLSVPAQLLCSYQTSPLYLGIAKEKSTKDVS

SEQ ID NO: 1014035 - protein, 67 aa, Homo sapiens
AGPQGCLACDADGRGGCVRGEEASAVEPRRRLRQPHLQENENPPGDQPLPVPPSSRCHTAGMEKGWE

SEQ ID NO: 1014036 - protein, 77 aa, Homo sapiens
TPSFHFLECGHASSASIQPPLTDSFHPLRRETPPASCPPPPEAPGWGGLPSPPTPNIAMPGDAHTTDSPTPSVRCVT

SEQ ID NO: 1014037 - protein, 70 aa, Homo sapiens
EDKIREQQVRERRQTEERRQSNLQEVLERERRELEKLYQERKMIEESLKINKNGLEMENELDMSNQDIKD

SEQ ID NO: 1014038 - protein, 98 aa, Homo sapiens
MVLLLTWQSGLHTVIRPGPLDAGQLGYTNWILGDEGVTTCDPPKTGHRDTTTPTDPFRFSLTDVYFVGPTTPGFALNPRTEIAAVLRNVELLYTTTLH

SEQ ID NO: 1014039 - protein, 63 aa, Homo sapiens
MLSEVEKMTGEQDSHSFVSSFAAYIFGFFHKNDKPSPNSENEQNSVTLGVLLVKVCTKKERMY

SEQ ID NO: 1014040 - protein, 67 aa, Homo sapiens
HKDSYRKYPGGSAERESQTGQKVSGRSGWAQLGSQKLLGPGILGDQSSLVLGTGQRAHSITTVVFEE

SEQ ID NO: 1014041 - protein, 74 aa, Homo sapiens
SCEYGKELSLKYISKFEEERIIKKTVNVDVTSYIIEHQKNFYQMRQQLWVSSSSRSFLMCTQFLYTVCFALIKG

SEQ ID NO: 1014042 - protein, 96 aa, Homo sapiens
  misc_feature (75)..(75): Xaa can be any naturally occurring amino acid
MANLFIREIVNPPALSQSSHGEASSPLHISIWFHSRCSPRGCGTRGSSALTSLTRPPAPSCCLLLGFKDKTFLKXAPAGTGYLVKRRDSVDTSYCK

SEQ ID NO: 1014043 - protein, 73 aa, Homo sapiens
GEGAHGKWQPLEQGLSPGPGKAQQGMGETIYGPVGGAVHTIISYPVSPHWVKGLGEMSKPPAAAGWPPGEGIL

SEQ ID NO: 1014044 - protein, 77 aa, Homo sapiens
AGEVTFADGGRQRERELFLRPPAAGPNSSRRKAHGGGGGQPMAAPDRKRSLANGPNAGEQPGQVAGATSEEDEGEEF

SEQ ID NO: 1014045 - protein, 65 aa, Homo sapiens
  misc_feature (7)..(7): Xaa can be any naturally occurring amino acid
  misc_feature (35)..(35): Xaa can be any naturally occurring amino acid
MTTAVNXPLRPFPCSSYPSFTHSHIVLTPYYYTRXCPDPFATLFRAGLHAISSAGVPFARRYRVY

SEQ ID NO: 1014046 - protein, 117 aa, Homo sapiens
MICLGGARGGDGAGALLRQPTVWLSYQCWELILHRFRDYLLWVHTLSEQTQVELLSSQDTQELSLLKDETFKGPENLQTCNLQELLTRPVYKIVDDTIRSFVHLISPAIPILVMILV

SEQ ID NO: 1014047 - protein, 311 aa, Homo sapiens
FLSSACSCAGVLPGGVGAVSWLMGSGAVWGVLGVFVCVVELVLVRGCAGGGGWGEWMGPSVYGKWSGEWMLPVVCGCSGWCGLVCVGDYKRDTHKPWEQSGAPELENQQGQKRGVTPPVCSASSATPGGNFPKRGCGKGGCVGARGAPRSVHKLKDPQVGGAPVDKPSWTVVGPPQGCRLSGIPPECCGKGVLSKNTGGTVAKVHERGCAKGVHSTHNNGGGPPQRGGAPKKEECSVVLAQQCGVPPRKLWFIIMRCLGMSLWGRWENVRDGTQTAVMMCSAGLTKCRCGGEHKTRGVCRWPHVRSDRVGE

SEQ ID NO: 1014048 - protein, 151 aa, Homo sapiens
  misc_feature (7)..(8): Xaa can be any naturally occurring amino acid
  misc_feature (11)..(11): Xaa can be any naturally occurring amino acid
MEAVEEXXLLXELNPGPQDKFDWKSSCETWSGAIFLEVSLFAWFQGHCIAKQNLWSVGGVAHSYKVLSLKVEVAKMRRKGWAAQKRSRWTVVRLFVGWPFAPGLPQPAGGSGHATTPQVPDVSCLVLATGLNDGQIKIWEVQTGLLLLNLS

SEQ ID NO: 1014049 - protein, 153 aa, Homo sapiens
GQNTISFKKLNLLRLPITSGVGSDQRQKEEAAAPGALVVAAAGAAALYTLREKKHCLAQGNPTLSNGNPGQVSILLKKNRKEGAYPPLPATGSEGHSPTSPKKRTRLLHCDHDRGSNKKCLGPPSKFYYQKKEKEKIFSVTNSGEGDYTWLLP

SEQ ID NO: 1014050 - protein, 68 aa, Homo sapiens
  misc_feature (29)..(29): Xaa can be any naturally occurring amino acid
VKTHQQTLLPEKLSHKLLEAFHNQGPVIXGKHDLHKMAERQPCACDPLTAGAESSPGGAQGPLPQETV

SEQ ID NO: 1014051 - protein, 44 aa, Homo sapiens
MPWAGVSSDLLECPEHGGEACFRAQLLQQWHDCGGPLQDGKRKV

SEQ ID NO: 1014052 - protein, 65 aa, Homo sapiens
MADAASQVLLGSGLTILSQPFMYVKVLIQVGYEPLPPTIGRNIFGRQVCQFPGLFNYASKHISFP

SEQ ID NO: 1014053 - protein, 83 aa, Homo sapiens
GTGDCPRESREDYWRPDRYTKVKVRYCEEMIRMIGCVIGIWLLPRYIVPFRVWFQWCVVDRFFRKLCPIRINNGVFKKKKRPK

SEQ ID NO: 1014054 - protein, 78 aa, Homo sapiens
EVVEEVEAPVRPQWFVKHHTVHLRGPVVHPRSVKGVPMVKGRYLVDRRYEGSHHVVKPKFITLTVASAAASDTRPVQT

SEQ ID NO: 1014055 - protein, 112 aa, Homo sapiens
ERSPLLVDPVSVSFSPVPSLAEIVERTSPGENQGAGTDLQVVSPDPEQPSLCLIASPGAPPCAVLHLTTCTPFVAGPELAYGIYVIHQAGNGHLQGKLLNVGVREALRYEEW

SEQ ID NO: 1014056 - protein, 67 aa, Homo sapiens
HKLKADKARKKILADQAVARRSKTKAARKPVKSASRPSRGEIIKSLSKGAETKKENLPLCLYILASV

SEQ ID NO: 1014057 - protein, 72 aa, Homo sapiens
  misc_feature (31)..(32): Xaa can be any naturally occurring amino acid
  misc_feature (35)..(35): Xaa can be any naturally occurring amino acid
VVTYVYQLIGDDVKVERIEYKKPYSQACLDXXFCXNSLFLLKSRIKHLRATKLYHFYNIATVKYNTIFSVNT

SEQ ID NO: 1014058 - protein, 72 aa, Homo sapiens
QKRDDEGNVIVWKRRNKADTLCRRCGSKGYHLQKIDLWQCGYPAKRKKKYNSESPRLKRRNTTGTWSIEAPK

SEQ ID NO: 1014059 - protein, 108 aa, Homo sapiens
EEKIREQQVKERRQTEERRQSNLQEVLERERRELEKLYHGKEMIDESLKIKIKEELEMENELEMSNQEIEDTSAHSENPLERYMSVIQQEQDQESADKSSKKMDKKAP

SEQ ID NO: 1014060 - protein, 126 aa, Homo sapiens
HSTLGLASQRDQLDQLELRMQHNLEQQIQARNTTGVTEEALKEFSMMFKHFDKDKSGRLNHQEFKSCLLFPGPMTSPWVEEGEPDPEFEAILDTVDPNRDGHVSFQEYMAFKSSRETENVKSSEEI

SEQ ID NO: 1014061 - protein, 39 aa, Homo sapiens
MRAIKVQWKFFKRKGAPAPGFRAQEIATGSARFTNKLSD

SEQ ID NO: 1014062 - protein, 108 aa, Homo sapiens
MRVAAPKHWMLDKLTGVFAPRASIGPHKLKRVSAPHHFPEEQTEVCPEQEDEVKKICMERFIKIDGKVRTDINYPGWIHGMSSDIDKTGENLRLIFDTSGVCCKSYYN

SEQ ID NO: 1014063 - protein, 79 aa, Homo sapiens
PVQVDQQQRTWEPDEEEGTFRSSIRRLSTRSGRNTWSDGIRPGLPWHLTCATLHLRGQRPLRGPSPALPRRLPLPQEFQ

SEQ ID NO: 1014064 - protein, 68 aa, Homo sapiens
AKGHDMIYLHTSRDQPKPLRPCRRESELVSGFNIEYGAAPSPILHSRIHKHYYNKPPHHYIFLGTQMP

SEQ ID NO: 1014065 - protein, 94 aa, Homo sapiens
LDGPKGTGYIKTELIFVSEVHPSRLQTTDNLLPMSPEEFDEVSRIVGSVEFDSDDEHSIEHDFFLSSLATFFLLICYSRLLLYSFTSCVSREIK

SEQ ID NO: 1014066 - protein, 75 aa, Homo sapiens
SDGIYGSTFFVATGFTALRHYWFIFPHYLLSSATLLFPLYIQTYTLACEAAALILGIFVDVVFDYFCMSPSIDEG

SEQ ID NO: 1014067 - protein, 70 aa, Homo sapiens
LVKALEKLLHGTVIEHPEYGEVIQLQGDQRKNIWQFLVEIGLAKDDQLKVHGFSVLVAHCSLSAGFPCNE

SEQ ID NO: 1014068 - protein, 96 aa, Homo sapiens
DVVPKDDNAAIATIKTKRTIQFVDSVPYYIQGWHQLPASHLLVPGGDLAKDRELCASLSNTTAIAEAWARLDHKFDLMYEKGAFVHWYVGEGTGGR

SEQ ID NO: 1014069 - protein, 83 aa, Homo sapiens
  misc_feature (66)..(66): Xaa can be any naturally occurring amino acid
NHKLRVDKAAAAAAGTTSQISMSKAAVAGKKPVVGKTGRRLLLVFKKQKKPLVGKKAAATKKPAPXKKPAEKKPTTEEKKPAA

SEQ ID NO: 1014070 - protein, 66 aa, Homo sapiens
EARYTKGTSSFGKLRNKTHTFFRRCGSKAYHLQMSTSGKYGYPAKRKKKYNWSAKAKRRKTTGSGR

SEQ ID NO: 1014071 - protein, 92 aa, Homo sapiens
GIGMAEFFDKHVTSEQEWDKYFHYVAGLVGIGLSRLFSASEFEDPLVGEDTERATLWDYFSRKQTSSVTIWETSKEEESSGLKRFGAGILRS

SEQ ID NO: 1014072 - protein, 143 aa, Homo sapiens
MLTPSFIKSTTLRKLSSRNCREVKAGAQAAAPGVMALRSPGQVFLLAVMDTSSSTRSARAPSRPLGAGPPAPGGCQYHLIPVSSLALAGHLPWPEHSSEPAGSTPGTWGCRPPLGPQLLQQWHDCGGPLQGWETAKLIRSSNV

SEQ ID NO: 1014073 - protein, 142 aa, Homo sapiens
MEQIRTTPWTLISMLGSRTVLFEVLEPSDMQTVGACCVMWMCHSWLRHSQPQARDSRLGVNARHGCLDMCHVMSLSDSDPEMWELLQSGEGQCKCLWPGAHLPQRYYGGARGVWMKFELLCQRRALEAFGPWIHAQWGVNVQ

SEQ ID NO: 1014074 - protein, 110 aa, Homo sapiens
MLLVYLHSGVFLCGVTVVLFLLVVVLGVSPCCAPLWALVIVMLLCLLLVCSSSVVILSTLLFLSTSLVLLVDLIGCLSLLGRLCRSLGASMPLTSSVQFTCRMYFLEYVV

SEQ ID NO: 1014075 - protein, 290 aa, Homo sapiens
RSRTPSEGVSSAFPCVWWRLLGFPPPPQRWGPLPQDPEGPLSSDDAPACPLGPRLTLPIACGPRGGGPKTRPLWGLLLPGRSYCPTCRPQSHEPAMVLSSPQEPGDNLLPMSGAPRSPLQLGARPRGAPFRPQLVTRRCVFFPPGSPPPSSLEAHRMGHRPPFGGLIYRTATQPFPALEWVCGSHLLLPPPVFCSSIPPFLSFFMTNGPTLPRVLRCFRAKFFFGSTRSRNISPVPPLRGAPPRHPPSVRWSSTAPPLSFAGERPGRTLGRVEPAGPRPPLKFLPSLSHK

SEQ ID NO: 1014076 - protein, 117 aa, Homo sapiens
  misc_feature (111)..(111): Xaa can be any naturally occurring amino acid
MVGFLPSPHHEGAHTELCPLFFKRLSCEELVTPLAAPLFWRNFFSHQSGGQNTRTSREVDTYLFVGRPYSTPGKECLAPVRLGWAAVFSLFCWVTSYPWAQRDCVLVSLGXILSFGE

SEQ ID NO: 1014077 - protein, 66 aa, Homo sapiens
MGRMQCLPGKGPCPRSALPYRRSVPTWLKLTFDDVKEQIYKLGQEGPYFLHRSGCNPREIHMVLHK

SEQ ID NO: 1014078 - protein, 68 aa, Homo sapiens
  misc_feature (23)..(23): Xaa can be any naturally occurring amino acid
MRVSACSICPIFPVSPTPFPSYXSHSQRKWMASLGGPTFTLPQVQTSGGESRRAETTWLQTIPYRLWA

SEQ ID NO: 1014079 - protein, 59 aa, Homo sapiens
MGVRQGSVPPPARWTQAECPDLPSSSTRVHSGTYGCTGTSIMGSYKSLLAPSISNDPSS

SEQ ID NO: 1014080 - protein, 73 aa, Homo sapiens
LCSVAESVSAEDLSSHVLKTHSEDGTDFIQNQQLHATWLTHYWSTCNRLDIDSTTITDRNTGIICTLEPAYRS

SEQ ID NO: 1014081 - protein, 84 aa, Homo sapiens
MSTSNTPQPFALFFIAEYTNIIIINTLTTTNFLGTTYDALSSELYKKYFVTKTLLVTTLFLWIRTADPRFRYANSYTSYEKLPT

SEQ ID NO: 1014082 - protein, 87 aa, Homo sapiens
TPTIYNLAMAIPLCAGAVIIGFRSKIKDALAHFLPEGKPTPLIPILVIIEPISLLIQPIALAVRLADNITEATYSCTNWSDPRISPL

SEQ ID NO: 1014083 - protein, 60 aa, Homo sapiens
MATIITYTYYLHTSEVQCYLYIPKPHFKSAIEKCITSPPFSNKKGLRDAEIFDEKKLKHL

SEQ ID NO: 1014084 - protein, 87 aa, Homo sapiens
DAMIQDRAGKYGVKAGIINQSHRDLYCGWMISCYCNCQATAAPFRKSVSGQLKLASAFEFFQYGFLIRLVVTHHYIRAVLVRCNIQR

SEQ ID NO: 1014085 - protein, 163 aa, Homo sapiens
TPNVFDAKVTVDGLRAVKPMREWQLSDNAAYMHYCPNETIDGIAIDETPDFGADVVVAADFSSTILSRPIDVSRYGVIYAGAQKNIGPAGLTIVIVREDLLGKANIACPSILDYSILNDNGSMFNTPPTFAWYLSGLVFKLAEKNGGVAEMEKINQQKQTAIW

SEQ ID NO: 1014086 - protein, 114 aa, Homo sapiens
  misc_feature (64)..(64): Xaa can be any naturally occurring amino acid
KELCRAGRTAGVGEDLPYQEYSRGITNASYSDDLTGAEKLREELDFLKSVRRPEIIAAIAEDVXHGDLKENAEYHAAREQQGFCEGRIKDIEAKLSNAQVIDVTKMPNNGGGYF

SEQ ID NO: 1014087 - protein, 103 aa, Homo sapiens
AKQYITALNIIHYMPDKYSYEASLMALHDRDVIRTMACGIAGLSVAADSLSAIKYAKVKPIRDEDGLAIDFEIEGEYPQFGTVIRVVDDLAVDLVDVYEEIQK

SEQ ID NO: 1014088 - protein, 119 aa, Homo sapiens
RNFERVFKVPHFILIVVTDVDKKCIGIVKHGVHFRRLQILTNIAGIKVRIVNTVGNNAIGTFMRSTQKDFPSSSNAIFRRKPSNSRVEGIVLPEKCFNIARRYADLRVNALMRQIHSPK

SEQ ID NO: 1014089 - protein, 67 aa, Homo sapiens
LRTLPHQRLIVATERGIFYKMQQEVPDKELLEHHRSEGCNLSAAARICPWMAMNGLQAIAEALEQGG

SEQ ID NO: 1014090 - protein, 106 aa, Homo sapiens
KGLPPITPVPPHAGMMAFLSQSSLVTAAWAVRKMVSGIAGGFPLAGVTGRAEVMDAVVPGGLGGTYAGNPIACVAALEVLKVFEQENLLQKANDLGQKLKDGFLAI

SEQ ID NO: 1014091 - protein, 135 aa, Homo sapiens
AGVVLAGAVQDFMVLFVSTGRDGRSLGELVKEEMGPTAGVIALVACFMIMVIILAVLAMIVVKSLTHRPWGTYTVAFTIPLALFMGIYLRYLRPGRIGEVSVIGLVFLIFAIISGGWVAESPTWAPYFDFTGVQL

SEQ ID NO: 1014092 - protein, 111 aa, Homo sapiens
IRHHLVVGCGAGWKPCMLRFNSRNVDCISVGNCCIDWLSEDLVHAIQRRLQVFHCALTFRKRTGCLFNHRIQWQFVDLIQRFHQSLLDLRQAAANGRDNLITIKFTEYRLL

SEQ ID NO: 1014093 - protein, 84 aa, Homo sapiens
  misc_feature (54)..(54): Xaa can be any naturally occurring amino acid
ADWDQQATHASRVRVRDLGRGPGVRPEREENLPQHSVCIGSEGASPDPRCCSIXSQEQREKGTSRAAGPPGVPTPFLAERTLAE

SEQ ID NO: 1014094 - protein, 76 aa, Homo sapiens
PFSLAVWRAVYKALRMPYRILPRQLPQKGRQVATAVQWTKARRQLWVPLGIIILAILFGLLLLSLLIYILYKLGFF

SEQ ID NO: 1014095 - protein, 91 aa, Homo sapiens
EDEEEDTKKGKPMALASAHSFHGVLARSVRGECIPAPGNRGFRFLLALWGAVALQGPGRVMRSPVSCGSCENPPEEAGISRPPALQRRSSY

SEQ ID NO: 1014096 - protein, 93 aa, Homo sapiens
  misc_feature (23)..(23): Xaa can be any naturally occurring amino acid
MSACTSRTRVEDLLQPLSLFVSXFLRLKEMREHLAYRVNMEGEKLKYYWKCFQLSRFLAISSLFVLSKFNGYSSVVVDVFVCIFDFIKMVVSR

SEQ ID NO: 1014097 - protein, 114 aa, Homo sapiens
MIGVRNRSNRQLGPDKEIREKNGIVRCLDPRAVGQGETVQPGWEQDPVKADAPVPWELPLNPCPKPAGYGINVTICSHPLGPVPGGASPADQQPPRLLHPPQEGPVSLLLWLRK

SEQ ID NO: 1014098 - protein, 73 aa, Homo sapiens
LAEQNELCPGRPGSCFRICISSGAGQVTPGGGMPEAAWTGREGAPGIYSVNRLEGCWQFFPFVHHLARFNNCT

SEQ ID NO: 1014099 - protein, 120 aa, Homo sapiens
  misc_feature (118)..(119): Xaa can be any naturally occurring amino acid
KLAGVSLKEESEKPLIEPGSRKWPGVKPTAVTIQNKILLQPTSSISTTKTTLGHLAALEARDAVYLEYLASFEEELKRFRDDCTSQIKGAQALEGTAGSSPCTLSKACMCDPPPDYEXXL

SEQ ID NO: 1014100 - protein, 73 aa, Homo sapiens
ESSADVKMNECNSWCEDECKPWRQLRHFSFRLCYNSALAWLTSTGKIVEFYFLYIRCPGRDLKKFTIVWALVL

SEQ ID NO: 1014101 - protein, 70 aa, Homo sapiens
  misc_feature (63)..(63): Xaa can be any naturally occurring amino acid
  misc_feature (70)..(70): Xaa can be any naturally occurring amino acid
EDALEKTYVPCRKTLLEEVMEAVGIKETRKYEKVYVVLSPGAEELLPNFCPNCEGWGTTFSDXGKEPVVX

SEQ ID NO: 1014102 - protein, 66 aa, Homo sapiens
MGTSTVEITWDETHHAKITIINRKFKKAELLDMDFQGYLDILYVKMEEEDRRGATRWMNGVHVEED

SEQ ID NO: 1014103 - protein, 148 aa, Homo sapiens
PRSPPAGSPPPLRLFSARPSALPPHAPIVCLPNLLCCPSRGPTPPPRAPRSSPRRFLGPRAGYFEGATTPAAPHRFIQWSCEWEKHLVKNVSCPAGYWPRLVPVYLAWVGLFRPFLAVPQASCQPPAAWFLPPAASQRRRKMRRRRSL

SEQ ID NO: 1014104 - protein, 154 aa, Homo sapiens
VPPPPFMSVCPRFCEVWRVSPHPACVTLSPVSCFTCLGIQPHTPWEPPLGPPRRTTLSVLSWEGRGAHHRGEWPSWEATREEKESGAVSITCERELAHLGPQCHWTFLSSLPQSAHRDLPWSVTGVYTLALKAFFSCVINSCVIMIIDKKVCRD

SEQ ID NO: 1014105 - protein, 219 aa, Homo sapiens
  misc_feature (67)..(67): Xaa can be any naturally occurring amino acid
  misc_feature (91)..(91): Xaa can be any naturally occurring amino acid
  misc_feature (105)..(105): Xaa can be any naturally occurring amino acid
MRKNIEDVIAQGIGKLASVTAGGAVAVSAAPEALSAPCCWFCALLAAEEKKDEKKEESEESDRSTWXFRRVWDYSCLLARARVNALILPTXQHYQQQMNYLERYXWSEEWQAAGISSPVSQVGATNSSIPGTSKLSLVVTECGIRMQVGVHHLFKESVWTEDARMRGPGIALAITKGGGTIPWREKWGMERRKNEPEQGRILDPVPSDQRNSPCEEEFS

SEQ ID NO: 1014106 - protein, 94 aa, Homo sapiens
EDHWYSVGIEADDDQAQNKVISEHEWKKTVEDVIDPRVLGKLASVPDGGAVAVLCCTQALQRLLLVLRKLQAEDEERLRRRRSRRVKRMTWDCL

SEQ ID NO: 1014107 - protein, 84 aa, Homo sapiens
GSEGGGPRGSPVRCGQAVRLTHLLTEQQNLHTNHFPSPMSNNQEVSSFGEDGEGDDLDLWTVAAALDSTEEREAAVRFQHDGHV

SEQ ID NO: 1014108 - protein, 112 aa, Homo sapiens
  misc_feature (4)..(4): Xaa can be any naturally occurring amino acid
  misc_feature (30)..(30): Xaa can be any naturally occurring amino acid
  misc_feature (64)..(64): Xaa can be any naturally occurring amino acid
PASXGPAGNRLGSGGARISTVEHAGLLVDXLEWEIAQVDPKKTIQMGSFRINPDGSQSVVEVTXTVPPNKELTLALDEIRLLKKDLGFIGMKETDSEKRIGVCLILEEAAGL

SEQ ID NO: 1014109 - protein, 91 aa, Homo sapiens
NFLTISHVLLFIRLPGFVPYLRDYGLHSCLAVRAWLRDNGSSKRQAVKRQAAPGAWSRWKHGGRNQPQPCFTRLTSAEFQHAADAGESPAP

SEQ ID NO: 1014110 - protein, 98 aa, Homo sapiens
  misc_feature (2)..(2): Xaa can be any naturally occurring amino acid
AXVEDISIYVYIYISKPVSPWEAVVNLVEEETDPLSRAQFSSPMAGLALSPTVHRHLEEEPLSELLWDGLQEAREKGSAAPLGTGPKAGTPPQDFMSA

SEQ ID NO: 1014111 - protein, 116 aa, Homo sapiens
RQGWELEQEAEGLVMPALPSSGSTRLPSGKGGPGMPAASQQEESTVHVAHRFLLKSRVSLQDSQKAHPRCLSLELTQDAEQVQVQVQVQVQVQVQTADGRIRGVVLNNAPLEKLRP

SEQ ID NO: 1014112 - protein, 121 aa, Homo sapiens
QPGETIFIENGSSNALLARTLGEQKKNVTIITVSSYIAHLLKDAPCEVILLGGVYQKKKRKYGWPFDTAVIQQVHFSKAFIGIDGWQPETGFTGRDMMRTDVVNAVLEKECENSPELTARN

SEQ ID NO: 1014113 - protein, 122 aa, Homo sapiens
LELESVSLTNFNQTSKEHFNPNNAFDAEVYTKLTQETERRRRERNEVEQDVEVAVREKYRDALSRKLEIEQQEAFITLEQEQQVKTRTAEQNARIAAFEAERRREAEQTRILAERQIQETEI

SEQ ID NO: 1014114 - protein, 68 aa, Homo sapiens
PVLWLDSRFLGYPLLKAFFLGHVITFTIPVFVNELKTRITLFYESYTILSKITNFVCLNCDGFRTLFL

SEQ ID NO: 1014115 - protein, 147 aa, Homo sapiens
HIVINEVAQTVIHRQLLHQCRAHAHSHCANDLAARISRIQDASCSTHSEHTPDPNFSRRAMHADLHKMPGKGRLLVLFAQCSEFNALFLLSVCRLRWLHVAWRFGYLGNLAVGKLRLLRIKPDCRGNHFAGFIQAAYAEVEVFAPIV

SEQ ID NO: 1014116 - protein, 122 aa, Homo sapiens
GNPQHITILNHLIQIHATGTCKASPHQLCIITLSGMFAIRHDDHSLEIEFIANLQSSVDRAKDIHIQVDMNQSIFPGCLQVFDNRDAGHPHDSCNFSLAFAFLIVQPCCMKYGVIIEQAAVC

SEQ ID NO: 1014117 - protein, 74 aa, Homo sapiens
  misc_feature (1)..(1): Xaa can be any naturally occurring amino acid
  misc_feature (17)..(17): Xaa can be any naturally occurring amino acid
XVTIIMTVIGAILTSLXGGARMGTWHHGGSALYGDYPHGTAAVEADPIITLLGMLAMFAVYGWGQYLFSACHIA

SEQ ID NO: 1014118 - protein, 70 aa, Homo sapiens
MASSGAVSALVATAKSECAVRSAPRSSDGDPTSAVNINMGTLVGSYASVARMLDEVASVPGAEGNYYTFD

SEQ ID NO: 1014119 - protein, 72 aa, Homo sapiens
MAEVEETLKRLQSQKGVQGIIVVNTEGDSHQEAPWDNPTTTQYATLMDSFILKARSTVGDIGPQERSHLPSN

SEQ ID NO: 1014120 - protein, 125 aa, Homo sapiens
  misc_feature (114)..(114): Xaa can be any naturally occurring amino acid
MLRSVLPATFLLAYRSDFLNQFHSSLNRDKQILRKPKCVPLFLPHHPLSVLTIFVCFLFFCPCHIIFWCFKLVPSLYILSFSLGSYYKGDNVRCNYQKDRETRISSLFLGLSEXILCKINMGCWI

SEQ ID NO: 1014121 - protein, 140 aa, Homo sapiens
MLGVRNDRAPQGWRCAVSLPQVVQPCTPSAVSAAVGPLLTRDTVGLTVSSTRPFLKCRVQSFVAVAVAVAVAVGILLLTLSLVADMHIGSSLPLLFFKVEVSPDPEQVGGPVGARGPGAASTKRDSCCLYFYSNKAEFDT

SEQ ID NO: 1014122 - protein, 104 aa, Homo sapiens
LLLSSQVAEVPYHPDTQTAVAPEVLGKYGGLPRLVGQCSLCKLSLCLKDNSNELEREGEITWHAAHTAAPVHGLPGVLGMHPEWLSETELEPSQLASSPSHYPA

SEQ ID NO: 1014123 - protein, 102 aa, Homo sapiens
  misc_feature (6)..(6): Xaa can be any naturally occurring amino acid
ETDKYXAASVATVASIQVNLEVFKLQQKQQYTNQLAKATDKNSKEFGSLANNPSEQRQREIQKARLVAEFTNITDKLQKVQRQAAEREKEFVARGGAQYPIR

SEQ ID NO: 1014124 - protein, 76 aa, Homo sapiens
VGKVEGHCQRLPASAPPGKCPGTLQLPDPGDPQSPYLCLKSGYCCFVILPVLTGNACALQHIPLLVFFFSKPAHSL

SEQ ID NO: 1014125 - protein, 96 aa, Homo sapiens
  misc_feature (93)..(93): Xaa can be any naturally occurring amino acid
ETDKYTSASVATVASIQVNLEVFQLQQKQQYTNQLAKETDKYIKEFGSLPTTPSEQCQRKIKKDRLVEEFKHHWTNFQKVQRQAAEREKEFVXRGG

SEQ ID NO: 1014126 - protein, 49 aa, Homo sapiens
PLSVEVSVGKATDIYVVNGTEILVPAPSPAALASRTHSRTTHSDAFKIT

SEQ ID NO: 1014127 - protein, 40 aa, Homo sapiens
GCYINCSQANALGTRRNRNPEPNLADSKPDEDFPLKVISN

SEQ ID NO: 1014128 - protein, 33 aa, Homo sapiens
LEHLLCSQVLCKDLEGNITAPCRKLPAVWWGRQ

SEQ ID NO: 1014129 - protein, 99 aa, Homo sapiens
LVRSEDAEIEECGKAFYHSSHLTTHKVIHTGEKPFKCEECGKAFNHPSALTTHKFIHVKEKPYKCEECEKAFNRFSYLTKHKIIHSGEKSYKCEQCARL

SEQ ID NO: 1014130 - protein, 79 aa, Homo sapiens
RHEARTEDSIAEGIPKRPPDEQLAVEDDTFEALSSEPVSSPPELPYVMKPQDPGSSANEEAVQLRTPKRPISPNERDLG

SEQ ID NO: 1014131 - protein, 76 aa, Homo sapiens
MPFVRLPCTEITWRASCRLYLRTLVKYLLSFFAARMQKEAEGPLEGRHNEEVGGGGEKKTDFQNWIRHLGEINFPH

SEQ ID NO: 1014132 - protein, 76 aa, Homo sapiens
LTKHNTAKLDKKKGQGAFQFSSLQWQCFACAFLSDGEGDKKTFLSLSRRMYVTKALSSVKNYKKEGGKDSPLLQKF

SEQ ID NO: 1014133 - protein, 92 aa, Homo sapiens
STKPERDKKDTNVGFCCSFTVLPNVRIIRTIIIRPIFFARYAIIIQEVTTSCIRLYKPVRKKEKPKTEQGVGLGMQGKDQGGRKYKRIKELK

SEQ ID NO: 1014134 - protein, 66 aa, Homo sapiens
RGGGLPRGTGLSPAGLLSHGFYGSAPRLVPSGGDKRFDYEKMETGQELLKTFGTMKRGEGSSANRS

SEQ ID NO: 1014135 - protein, 77 aa, Homo sapiens
  misc_feature (17)..(17): Xaa can be any naturally occurring amino acid
  misc_feature (60)..(61): Xaa can be any naturally occurring amino acid
GELHRGSLYRNGGQSWXGAGPPPPYPTASWSLHSPGPDPKLLLSTSGERAVPSFPSTLIXXLAQPNALVLDFLGPPP

SEQ ID NO: 1014136 - protein, 80 aa, Homo sapiens
FLKGGYETFFQGCMDVKLFHSFQSEKALISQCGKLVVLNINYRPAYDQGGPVEILSSLYLGGAYHASKCKFLIKLYITAS

SEQ ID NO: 1014137 - protein, 68 aa, Homo sapiens
EKEEEEIRASVRDKSLVKKAKATARAKKPGFKHMRSHASGGPRCKDGPSLGCDCRTAVPLSSPLHLCA

SEQ ID NO: 1014138 - protein, 67 aa, Homo sapiens
GKGRVRALCSAGPQMWPAVILLPAWAKSSEFCIGGLGLMCRDITPNITGMCPAHLKLVFQTIEDKTT

SEQ ID NO: 1014139 - protein, 60 aa, Homo sapiens
MWLHSGAAEQGFKAVTRRSSGAEDLKIEKVNGHPGRVSRQGYKGMDKPCGCPQGVCNHGM

SEQ ID NO: 1014140 - protein, 68 aa, Homo sapiens
KLRNKCLIPYSRNENNGGRGAEDSSMQTDYTGGHERLTAGVLREPLTVTGDSRLTPPRSSADTTPSRS

SEQ ID NO: 1014141 - protein, 88 aa, Homo sapiens
KTDSDFITKMDYPKQTQVRSFLKGGETPLFKQFFKNWRDPDQTDGLGFSYLFQPYVNVERVPSDGRTLHTFTAMAAQHGHGMIGGTGQ

SEQ ID NO: 1014142 - protein, 39 aa, Homo sapiens
MSNTAMLININIGSTATRRSPNIFSKLEKNVSGRGGRTR

SEQ ID NO: 1014143 - protein, 66 aa, Homo sapiens
EVMLAVEMRNEQAWAIWVGRVGRKISEEIYNLIEKPRPHVSFLPYAIGKFKKENHSVKEHFFYQQV

SEQ ID NO: 1014144 - protein, 70 aa, Homo sapiens
MTKEMGLTTSAQPGLHQKFVESSTIKKIGRVRWLTPVISALWETEVSRSPEVQEFETSLANIVKPRLYYK

SEQ ID NO: 1014145 - protein, 93 aa, Homo sapiens
  misc_feature (75)..(75): Xaa can be any naturally occurring amino acid
DSEPPAPRDSSRAGSRCVPFGWSAEEGRQLDFCRQDRYCKDSKDQTDWQIANVCAKRESDDCPQPAQVRVEDVFXCAADLSHAFKQLELDNAA

SEQ ID NO: 1014146 - protein, 117 aa, Homo sapiens
PKPKHNPFLSLVPEQGVKLTPRHYAYLIISEGCNHRCTFCIIPSMRGDLVSRPIGEVLSEAKRLVDAGVKEILVISQDTSAYGLMLNIVLASTTASRYNQHGQPVRTVIETGDLDTS

SEQ ID NO: 1014147 - protein, 69 aa, Homo sapiens
WLWMDASSRESHVTANINDNIQTFGYIMHQLTVLIHTSDYYSSREHTNQPLQHIIYSLISLLQVTCSLT

SEQ ID NO: 1014148 - protein, 142 aa, Homo sapiens
RQKVASAQAEHHLVADIAWAVIQYWQTTGDESFIAHEGMALLLETAKFWISRAVRVNDRLEIHDVIGPDEYTEHVNNNAYTSYMARYNVQQALNIARQFGCSDDAFIHRAEMFLKELWMPEIQPTVFYADDSFMAKRRLIWR

SEQ ID NO: 1014149 - protein, 118 aa, Homo sapiens
HRSFELADNGIIFTPQSDLVILNYIANYIIQNNAINQDFFSKHVNLRKGATDIGYGLRPTHPLEKAAKNPGSDASEPMSFEDYKAFVAEYTLEKTAGMTGVPKDQLEQLAECMPIRQE

SEQ ID NO: 1014150 - protein, 113 aa, Homo sapiens
CRRHPMSFDPTGYTLAHEHLHIDLSGFKNNVDCRLDQYAFICQEMNDLMTRGVRNVSEMTNRYMGRNAQFMLDVMAETGINVVACTGYYQDAFFPEHVATRSVQELAQEMVDE

SEQ ID NO: 1014151 - protein, 58 aa, Homo sapiens
MDEKDRCAIFRLLVMVIFAIGLIKLVITAYAPCPGVNSGGTVGIQVSAAAAVLWAVAA

SEQ ID NO: 1014152 - protein, 194 aa, Homo sapiens
MRVLYKGPQGWLTRPPPGEKTVGLQPPRLTDVGTSPNTGGNACPHMGPPDKCSLGALATHKQVNPWLPATMEERNVCQAAIECKAPPPFAWPAKLLREQGEEADFLKKKVNPLVGPHKSEIGGHDAQKNRARHPEDGPEKTYNGEHHPIRHNGWSRYGWAPPGLRNCPPRRRVHTAKTTHQFRSAPETNIPRPT

SEQ ID NO: 1014153 - protein, 64 aa, Homo sapiens
MVVIIEVDGGGRDMNKVTHTPGDSHSPRRRVARTLARSKACCVPQGEVKLEQCHSVSLPAGITL

SEQ ID NO: 1014154 - protein, 96 aa, Homo sapiens
YTAVNLYLPLSWAASTNWRVIQFVPITAKRIITRGYSIKGFCRQCSSAFFIFDVRKYALFLRRTAMLTKRANHDRRPRYFGWRWRIFASITALTRA

SEQ ID NO: 1014155 - protein, 127 aa, Homo sapiens
  misc_feature (80)..(80): Xaa can be any naturally occurring amino acid
  misc_feature (94)..(94): Xaa can be any naturally occurring amino acid
TYRTPEGTITAFMHMVEYRRNQKQLRETPALPSNLTFNTGEAHLLLQQAIAEGLRRSIPMKFSPSCKRMAMNTLPTWIAXDSTKAVHIAEQIGXPVALKLRSPDIPHKSEVQGVMLYLRTANEVQQA

SEQ ID NO: 1014156 - protein, 109 aa, Homo sapiens
KRQYADGVASRYGGENVSMRRFSGLVAAALLLAGCAGEKGIVEKEGYQLDTRRQAQAAYPRIKVLVIHYTADDFDSSLATLTDKQVSSHYLVPAVPPRYNGKPRIWQLV

SEQ ID NO: 1014157 - protein, 118 aa, Homo sapiens
FKNQRVEAAYRKELVYGEDDATRATPPTVRELFSAVRKNYFRLYFHYMYFNIARILYLQVDNVFGLFLLFPSIVAGTITLGLMTQITNVFGQVRGAFQYLINSWPHWLSWMSIYKRLR

SEQ ID NO: 1014158 - protein, 124 aa, Homo sapiens
FSSNGDRSAVCCSYRVYCRAASVLDDAAHNCFPVRAGCGNWFCKPVWCSGRVYCPILRVKAETLFASDAAGLLTLAAVAVIGSLIIFTLRVNRTVAQTDVATSLNRLRNTMYRLLSNPLKNVYA

SEQ ID NO: 1014159 - protein, 117 aa, Homo sapiens
HFAYLPTGLYVFAYKKDVYLRVCTLIIFFAALVAVISGASCLYLVRRVINRGIVEKDAIINNHFERVLDGGLFFSAADVKKLYSMYNSAFLDDLTKAMGRKSFDEIYKRCRKKAVIC

SEQ ID NO: 1014160 - protein, 83 aa, Homo sapiens
NKPPPQQYRSASDTGNWVNADGAIFYPYIGRLKVAGKTLTQVRNEITARLDSVIESPQVDVSVAAFRLAKSVRQPPKSANPVS

SEQ ID NO: 1014161 - protein, 59 aa, Homo sapiens
MHKGSDGAVENASVYRSYWVADAKLGYRVNRNLDFQLNVYNLFGTDYVASINTSGYRYH

SEQ ID NO: 1014162 - protein, 93 aa, Homo sapiens
HEAEIAQLIQHIHDKGPVRSADFEHPRKGASGWWEWKPHKRHLEGLFTAGKVMVIERRNFQRVYDLTHRVMPHWDDERDLVSKQKQKSSCWIT

SEQ ID NO: 1014163 - protein, 73 aa, Homo sapiens
ISETGACHRRKFPDDGAVAACNTTFCIAENCPAAWLISRQTSVASSSILSVISCFTSPAVILFLTASISIDES

SEQ ID NO: 1014164 - protein, 112 aa, Homo sapiens
PINPAFRFKVDGFFCYLKLIYYPATLSTILKISSRDKPYGSVTKCSVIPSDKRIKRAGGSGFKPLFERCCLRCIQFCITVFNSGFRLASAESWYNQLHVIRRLQPCDPVGQL

SEQ ID NO: 1014165 - protein, 107 aa, Homo sapiens
MVSRHRDHSGTSFICEGETTPLPRVDFSPRLMFLCPCRLFSDHRGGDPTKVGRLSSLFLTPAQQPGLLAVGGAFFFLAQRLFFGGGGGAPFSCRVGGCSCRTPTAVG

SEQ ID NO: 1014166 - protein, 86 aa, Homo sapiens
GKGSPEVTLRPGTSTQGLVVNVKGSVPTGQLSFTNISVATWDLPPRPFQEEPRVRPNPSQAQCKNRLTRGFLASASFARAPRQDTE

SEQ ID NO: 1014167 - protein, 45 aa, Homo sapiens
MPESQMCSKFSRDCEDQKQIKKPESFTKQIVLRGKSIKGPLGKKP

SEQ ID NO: 1014168 - protein, 99 aa, Homo sapiens
IKAVLHRCLDEFEKDPVPDRFLKDLDEKVDLDSAWSLWLWDKASLRDRSFRHLRKDFHRPYVMDVPQDPGKYLFPQKSPSSCSPTGGRFTINSNIPTRP

SEQ ID NO: 1014169 - protein, 55 aa, Homo sapiens
HEGRLSGQRKLDDSIVVKANKHQINRVLTLANINVIQLDSALMERRRHIRLAPDY

SEQ ID NO: 1014170 - protein, 32 aa, Homo sapiens
QRLQRPVITTCGHTFCRRCALKSEKCPVDNVK

SEQ ID NO: 1014171 - protein, 34 aa, Homo sapiens
SNIELLAVQEGIKVLETLVALGEEQNRVQLLALL

SEQ ID NO: 1014172 - protein, 42 aa, Homo sapiens
  misc_feature (18)..(18): Xaa can be any naturally occurring amino acid
  misc_feature (37)..(37): Xaa can be any naturally occurring amino acid
KQQITWKIGLSNDVNSSXPGEAEGRPVQVILKGTYIXLHCCL

SEQ ID NO: 1014173 - protein, 37 aa, Homo sapiens
  misc_feature (13)..(13): Xaa can be any naturally occurring amino acid
  misc_feature (28)..(28): Xaa can be any naturally occurring amino acid
LHLGTVTDFKQTXNKGVLVFSSAIGKHXFPGNSSRPN

SEQ ID NO: 1014174 - protein, 49 aa, Homo sapiens
  misc_feature (15)..(15): Xaa can be any naturally occurring amino acid
  misc_feature (45)..(45): Xaa can be any naturally occurring amino acid
EVGDDWCIMNWEPPXSVTVGATGEAHASIKVKVVDFPDPPVAPTXTEVG

SEQ ID NO: 1014175 - protein, 92 aa, Homo sapiens
  misc_feature (42)..(42): Xaa can be any naturally occurring amino acid
  misc_feature (79)..(79): Xaa can be any naturally occurring amino acid
  misc_feature (91)..(91): Xaa can be any naturally occurring amino acid
EASARVGGGMMGLSLGCSQLAVNVGISAPPACSPPHREMEEXERELRWHAGVGSEGGDVIECVVSSRYMACTHLLGIAXLLGIVVSPLCTXS

SEQ ID NO: 1014176 - protein, 51 aa, Homo sapiens
  misc_feature (5)..(5): Xaa can be any naturally occurring amino acid
  misc_feature (44)..(44): Xaa can be any naturally occurring amino acid
RLEIXEKKEERKLRMPYDVPEPRKFEADYHEKKDQRIKQFVPMXDMKWYKK

SEQ ID NO: 1014177 - protein, 56 aa, Homo sapiens
  misc_feature (19)..(19): Xaa can be any naturally occurring amino acid
  misc_feature (27)..(27): Xaa can be any naturally occurring amino acid
  misc_feature (38)..(39): Xaa can be any naturally occurring amino acid
  misc_feature (51)..(51): Xaa can be any naturally occurring amino acid
MGKDLTPITPSSGFTIDLXSAFTVVIXSNIGLPVSTTXXKVGSVVAVGWIXSRKAV

SEQ ID NO: 1014178 - protein, 84 aa, Homo sapiens
MLAKLNRINYSDKLYKLALEESKKEGYDLRLDAIPIQAAKASRDIASDYKYKEGYRKQLGHHIGARNIKDDPKMMWSIHVAKIQ

SEQ ID NO: 1014179 - protein, 45 aa, Homo sapiens
  misc_feature (30)..(30): Xaa can be any naturally occurring amino acid
  misc_feature (32)..(32): Xaa can be any naturally occurring amino acid
MLARMVSSPDLVIRPPGLPKSWDYRREHLXLXYIHYFINSLHRPE

SEQ ID NO: 1014180 - protein, 55 aa, Homo sapiens
MRVKNTFLGKWTRYPRGPVRFRTHLEAVDQSPDADVLDPVPQRRSTHPPQDEVDP

SEQ ID NO: 1014181 - protein, 68 aa, Homo sapiens
  misc_feature (9)..(9): Xaa can be any naturally occurring amino acid
  misc_feature (25)..(25): Xaa can be any naturally occurring amino acid
  misc_feature (40)..(40): Xaa can be any naturally occurring amino acid
  misc_feature (55)..(55): Xaa can be any naturally occurring amino acid
QPDLFKDIXNMLMHHDRFKVFADYXDYIKCQEKVSALYKXPREWTRMVIRNIATXGKSSSDRTIAQYA

SEQ ID NO: 1014182 - protein, 43 aa, Homo sapiens
  misc_feature (4)..(4): Xaa can be any naturally occurring amino acid
  misc_feature (17)..(17): Xaa can be any naturally occurring amino acid
PAWXCLEKEVESMGAHXNAYSTRKHTAYYIKALSKVLPKAVEL

SEQ ID NO: 1014183 - protein, 81 aa, Homo sapiens
  misc_feature (14)..(14): Xaa can be any naturally occurring amino acid
  misc_feature (30)..(30): Xaa can be any naturally occurring amino acid
  misc_feature (64)..(64): Xaa can be any naturally occurring amino acid
  misc_feature (73)..(74): Xaa can be any naturally occurring amino acid
  misc_feature (79)..(79): Xaa can be any naturally occurring amino acid
SPEQRGSEVHTKKXVMIKTIETRDGEVVSXATQQQHEVLYKTETLCHQRPSSPLSSLLPEASLXSIPGQHNQXXFFPLXGF

SEQ ID NO: 1014184 - protein, 102 aa, Homo sapiens
  misc_feature (4)..(4): Xaa can be any naturally occurring amino acid
  misc_feature (29)..(29): Xaa can be any naturally occurring amino acid
  misc_feature (48)..(48): Xaa can be any naturally occurring amino acid
  misc_feature (92)..(92): Xaa can be any naturally occurring amino acid
MSFXLVAQAGVQRCNLGSPQPPPLGFKQXSCLSLLSSWDYRHVPPRLXNFSVFSVETGFLHVGQAGLKLPTSGDPPTSASQSAGITGVSNHXRPGSHFSWEG

SEQ ID NO: 1014185 - protein, 73 aa, Homo sapiens
  misc_feature (19)..(19): Xaa can be any naturally occurring amino acid
  misc_feature (57)..(57): Xaa can be any naturally occurring amino acid
RRARSADVQGQEKMDVTAXEARTNLPFYLFVLFRSSMNWMMSMHIREGCLFITRSTXSNANLFRKHPHRHTQK

SEQ ID NO: 1014186 - protein, 70 aa, Homo sapiens
  misc_feature (2)..(2): Xaa can be any naturally occurring amino acid
FXLETVSFLSPRLECNGAILAHCNLRLAGSSDSPASASQVAVITDRVSVSCRLSVVRNHSLLQPRPPGFK

SEQ ID NO: 1014187 - protein, 82 aa, Homo sapiens
KACDQRPWHVVTSDAYRDIKGNPGIAGQVECEYTRAHARTTVRVCTKHNSGTTKPLDTLMPANDVSIVDTVVVSLDRVHSCR

SEQ ID NO: 1014188 - protein, 92 aa, Homo sapiens
NWNAPQEPAPPLEKMFSMRNVCLLPNVVGKARTAENGEGDFLAEGGGVRGPKVVEKYQSACKKSKRPFCSEENRKKKSSSGCRKKRLNEEVK

SEQ ID NO: 1014189 - protein, 105 aa, Homo sapiens
MKNKVIEKVQHIQLLEKNVRAQLVDMKRLEVDIDIKIRSCRGSCSRALAREVDLKDYEDQQKQLEQVIAKDLLPSRDMQHFSLIKMKPVPDLVPGNFKSQLEKVP

SEQ ID NO: 1014190 - protein, 124 aa, Homo sapiens
  misc_feature (114)..(114): Xaa can be any naturally occurring amino acid
THVVAPKLPPRKKNVVGKKKHRLRLVGPPREVSASRCDSILSPLVGRSPFLPRGGRPLCKTLRKRRFIRAKSHIIPLVHEQNLHNPGAKLPHVFSPPKQKPTPLWFCNSQTHTXPYYNPNGHYH

SEQ ID NO: 1014191 - protein, 153 aa, Homo sapiens
  misc_feature (1)..(1): Xaa can be any naturally occurring amino acid
XEEEESREETKRKRPTGVSQSRLQGVCCTPRCTRCVRQMSGRLNSGAKMSSVWCPCRGCPCPLKCSWAKAETCHQGAPISNSGTGWYLSLKHALSEKILNRARQSSPVFGSPGKKFTRCRGAKGLQCAFQGQGLYNDKWSAKRSHWVGPSEPP

SEQ ID NO: 1014192 - protein, 41 aa, Homo sapiens
MRYHYIATKIAKIKNNDNTNADRMQITGSVIPSGGIEMDSH

SEQ ID NO: 1014193 - protein, 70 aa, Homo sapiens
DLPAHQLVMEGYKWHFNETVLTVWSAPTTATVWECGSILELDEHLQKDFIIFELLPRARGIPPRAVPLFL

SEQ ID NO: 1014194 - protein, 57 aa, Homo sapiens
  misc_feature (47)..(47): Xaa can be any naturally occurring amino acid
DQDILIQYDRTWLVADPTSLRVQKVGGQCRARTRNPTDKPSWLKLTXIINSFEGFKV

SEQ ID NO: 1014195 - protein, 105 aa, Homo sapiens
  misc_feature (26)..(26): Xaa can be any naturally occurring amino acid
  misc_feature (99)..(99): Xaa can be any naturally occurring amino acid
SEERLGHWASLRSSAMGLTSPGSQRXTLKLSKAVHKAVLTIDEKGTEAAGACFERHTMSIPRGKSQPFVFLMLTNTVSSSWESGESTKYCFVYPPHPGXLVHKRW

SEQ ID NO: 1014196 - protein, 348 aa, Homo sapiens
  misc_feature (15)..(15): Xaa can be any naturally occurring amino acid
  misc_feature (88)..(88): Xaa can be any naturally occurring amino acid
  misc_feature (101)..(101): Xaa can be any naturally occurring amino acid
  misc_feature (212)..(212): Xaa can be any naturally occurring amino acid
MCLLPICAWQAPSPXDVHISARQHGRVLIPALTTGRFVLLKPLETTRRTSAQRVMFLAIGPETQAPYQKPRGDTPNDPHSCGRDNPMXPLSAPNAPQRTSXGAPPENRSGVRRRGPLQFGQNESQEGPARKTNGDGAAPLLPKHRGVESQNTPGAAVERGMHALATRTLPRRGSPFVRSNTPTDRRWASSFSSTQQAGPNNRTRASGVRNSXPRSKRRISCFTLWCGRHHAEAPPIGRWGNLSYTQDPTMGALLKTPESRETREYGKDRRVSHSQRGMEQCQCSPSRAGSPRSVLPAGHSGDLVLPRCRRKSRVSYNTSVHGPAMIKIFMVYQNLPQNINPHLSRAVT

SEQ ID NO: 1014197 - protein, 54 aa, Homo sapiens
EEVTRAEIQIRIEANEALVKDLEEGSQSPSLTSASEPPLDELPSAPAPLKTRKP

SEQ ID NO: 1014198 - protein, 76 aa, Homo sapiens
MSAKPCQEAREGVQGRLISMCDADTAAGVVERRGAYKILEKPWTSTWLALALSGCAYCDSRSVPTHGLMNKWLLRL

SEQ ID NO: 1014199 - protein, 81 aa, Homo sapiens
LVGWEIIETGIPLSPREPKVGSSSTRSIDSLRERRRSRAASGLGIRPLGPPLVSRVGRNRRLAHLAWVGPILVIVKINAHS

SEQ ID NO: 1014200 - protein, 305 aa, Homo sapiens
  misc_feature (289)..(289): Xaa can be any naturally occurring amino acid
TIMRTAVTVVFVLPLWPSTGPVCGPLCCAPAGAAGVVCDPGLVVSAPAMWVVGPTIPLLIWDNIGPITILVAEAKVSLSSRCPPADKMSSVGGYKRGVDPCFYKFLMQQLRLAHERVFRDLPTQIPLWFQWGWDTPRLTRTKHSEVAEISNAPLGPAARGNFRLQPIVFQPPKGFSGGRYISTCATDKTAPKRRVARWWRLPSPHWRGPPKHTGGATGREIIPHPLGVDSNISILRFAYATIRGRPRGGPCCEESLYLHRGDLATEFCLAWDATCEKSWKTEMHDHENXNVFKLNEENGESTRMP

SEQ ID NO: 1014201 - protein, 126 aa, Homo sapiens
MSRHEYVRNLLPECALPHNRLSSKIVCGTLVRRLFFEGSSGESQVVVIKMSRRCVNLVGEHHVGSRRARFRLMAEVWVLRPRPGVARNIWPNSGYLPTIGRVTNNATYALFKSRGRASPFGGPLDK

SEQ ID NO: 1014202 - protein, 51 aa, Homo sapiens
QHLRIRTKRLTPGEDGNHTLFYNSHVNPLSTGYDTPEVPDDPGHNKGVRLR

SEQ ID NO: 1014203 - protein, 223 aa, Homo sapiens
ISKDRIPYKAVIKLGKEFRLEKELEEQHGIHCNMTLLFSFAQAVACAETGVTLIFPICWAHPLIGMWQTPTKKSYEPLEDPGVKSVTKIYNYYKKFSYKTIVMGASFRNTGEIKALAGCDFLTISPKLLGELLQDNAKLVPVLSAKAAQASDLEKIHLDEKSFRWLHNEDQMAVEKLSDGIRKFAADAVKLERMLTERMFNAENGKKRILRWTPDLHRRPDGI

SEQ ID NO: 1014204 - protein, 115 aa, Homo sapiens
MFGDPERIVVFDTRGVEPLHKRCAGGGKQLNDYPVETGKNFVGGKALPDEGIMGGLMRPHRQEGGGPLKPPNTKTKTPWASPCGAGGPPPNKNTRREKMCGPPQKKKYLVTPPRG

SEQ ID NO: 1014205 - protein, 76 aa, Homo sapiens
VDTDGRGIADVAWGRLGSVVPTHNSLTRVPSLYLPGVVAMWLPHLSTSIFFAAWVAMGTSWAHILQLEIHPEVMFQ

SEQ ID NO: 1014206 - protein, 68 aa, Homo sapiens
YQEEVVDRDSKLKNEGRVRWLTPVIPVLWEAEAGGSQNQEIETILANTVKPCLYKKYEKLAGRGGGRL

SEQ ID NO: 1014207 - protein, 61 aa, Homo sapiens
  misc_feature (11)..(11): Xaa can be any naturally occurring amino acid
  misc_feature (33)..(33): Xaa can be any naturally occurring amino acid
  misc_feature (42)..(42): Xaa can be any naturally occurring amino acid
  misc_feature (51)..(51): Xaa can be any naturally occurring amino acid
  misc_feature (53)..(54): Xaa can be any naturally occurring amino acid
ALPSTAFYSSXDQGPQALPSPRGLLQNRGLNNXSLSGGAGWXWQLTNISRXDXXKKIDSPT

SEQ ID NO: 1014208 - protein, 63 aa, Homo sapiens
  misc_feature (2)..(2): Xaa can be any naturally occurring amino acid
  misc_feature (36)..(36): Xaa can be any naturally occurring amino acid
  misc_feature (42)..(42): Xaa can be any naturally occurring amino acid
  misc_feature (49)..(49): Xaa can be any naturally occurring amino acid
HXNPDVDDRFEASESSFITGDINSSASLNREGLLNXARDTSXMDDSTTXWYHGNSYSIATRIP

SEQ ID NO: 1014209 - protein, 68 aa, Homo sapiens
LGYRIQHKNLPCVKAVIFLTEEGEKCSHWRENWVFQKVHELEKAQKETAEDLFTIRVAQAAGIAELVR

SEQ ID NO: 1014210 - protein, 47 aa, Homo sapiens
  misc_feature (38)..(38): Xaa can be any naturally occurring amino acid
  misc_feature (42)..(42): Xaa can be any naturally occurring amino acid
RSPKTGIKNLALLISKAGTIKNLQTPSLLQPHANPGYXAALXQVSLT

SEQ ID NO: 1014211 - protein, 61 aa, Homo sapiens
  misc_feature (11)..(11): Xaa can be any naturally occurring amino acid
  misc_feature (26)..(26): Xaa can be any naturally occurring amino acid
  misc_feature (39)..(39): Xaa can be any naturally occurring amino acid
WLEGPNDSGRXNPAACASPVDACPSXASLPSPSLCCSRXVPKNGYPELMRAQPFFCMIQEH

SEQ ID NO: 1014212 - protein, 68 aa, Homo sapiens
  misc_feature (10)..(10): Xaa can be any naturally occurring amino acid
  misc_feature (22)..(22): Xaa can be any naturally occurring amino acid
  misc_feature (26)..(26): Xaa can be any naturally occurring amino acid
  misc_feature (29)..(29): Xaa can be any naturally occurring amino acid
  misc_feature (50)..(50): Xaa can be any naturally occurring amino acid
YQQTVCWATXSGVAQPLWSRRXHHEXGPXKNLPFSVENKWSLLAKMCLYXGSAFATPFLVVRHQLAKT

SEQ ID NO: 1014213 - protein, 55 aa, Homo sapiens
  misc_feature (42)..(42): Xaa can be any naturally occurring amino acid
MNIDIASIDMVSEVNMDYTLTMYFQQYWRVKARYSGSLSLTXDNRVADHYGARHI

SEQ ID NO: 1014214 - protein, 93 aa, Homo sapiens
  misc_feature (16)..(16): Xaa can be any naturally occurring amino acid
  misc_feature (30)..(30): Xaa can be any naturally occurring amino acid
  misc_feature (68)..(68): Xaa can be any naturally occurring amino acid
RDMYRWPPFTKAKLTXYPYVKVYMYQLFRXWPTSLPGRVSPRHQAPDLLVELTLLSSSLDFGSERVGXGANVSYIVLATTGPRAHFGAMITLI

SEQ ID NO: 1014215 - protein, 45 aa, Homo sapiens
  misc_feature (44)..(44): Xaa can be any naturally occurring amino acid
MITRALNYYYTLCFVWMLLMTLARLSLSLAAITGSSEAFPNKRXL

SEQ ID NO: 1014216 - protein, 72 aa, Homo sapiens
  misc_feature (71)..(71): Xaa can be any naturally occurring amino acid
QEAQGRLCRDVLHLPMCDADTSGPGSSWKGGEPYQDSCKNPWDLLHVVAVYWPLLQAVLTCDSSSSPPHGXS

SEQ ID NO: 1014217 - protein, 110 aa, Homo sapiens
  misc_feature (17)..(17): Xaa can be any naturally occurring amino acid
  misc_feature (23)..(23): Xaa can be any naturally occurring amino acid
  misc_feature (77)..(77): Xaa can be any naturally occurring amino acid
  misc_feature (100)..(100): Xaa can be any naturally occurring amino acid
DVLEDEVYDPEDEVTRXIRRNWXNALNDITYPAEPHANVTTSALFSPLLSILCYGEGSRQEEQKLANIAQPGWGAAXGEPPCMPTTHSGTGLHTFNLCPXPPSFGCFNKF

SEQ ID NO: 1014218 - protein, 32 aa, Homo sapiens
  misc_feature (14)..(14): Xaa can be any naturally occurring amino acid
RSSSARPAHGVTHXLQFEETFPRDSTCSDTSP

SEQ ID NO: 1014219 - protein, 68 aa, Homo sapiens
  misc_feature (10)..(10): Xaa can be any naturally occurring amino acid
  misc_feature (16)..(16): Xaa can be any naturally occurring amino acid
MSGSRRISGXNFADGXYPLGTKHAGFDFGAAPGYAEGKDYAHPTYMRDESVMPLPSRSEITKQNDLLG

SEQ ID NO: 1014220 - protein, 143 aa, Homo sapiens
  misc_feature (1)..(1): Xaa can be any naturally occurring amino acid
  misc_feature (11)..(11): Xaa can be any naturally occurring amino acid
  misc_feature (23)..(23): Xaa can be any naturally occurring amino acid
  misc_feature (31)..(31): Xaa can be any naturally occurring amino acid
  misc_feature (142)..(142): Xaa can be any naturally occurring amino acid
XVDNNTKNDMXRSNLNVVYLFAXCWWVNDIXALYDWMIMIKIESIIIIKGIMPSCLSRKGAWAVALWLMDREECVSRRLICEIRDEVLDRALGYPDVSGPLLPARGGFMAARGLLERVFLFFQGPGSPPTGSFSRGNHQNHXI

SEQ ID NO: 1014221 - protein, 66 aa, Homo sapiens
MPDSIGYRIRAPIISAVGGKSAAPTLETPIGTDLRSLKTPEQNNPALDCVLGEAQRHGPFNLVILS

SEQ ID NO: 1014222 - protein, 263 aa, Homo sapiens
LLFCRAFALSLCLGFLFVPSFAWLVLSCCIVFFLFFSVCVLLLFACFLPSALFFYLGLLFCLSFSLFLLYSPLFLLFLFLLSVSRSASFCFLILLLLLVYCLSIVVRSHFPFLSSPCFVPGEVLGLSSCFVSSPSVSSSYIWFLMCHLCMLCNTILPVLVWSYSSWLFLASHTSSLVMMMHFCPHVHAGHDACVWLLVPRAPLCSRAIGPHCSRCPPVHGGVYVGCGPPSWRCPCFKEALLSRDAHSVLKGAWELLLSCVTAE

SEQ ID NO: 1014223 - protein, 55 aa, Homo sapiens
  misc_feature (14)..(14): Xaa can be any naturally occurring amino acid
  misc_feature (17)..(17): Xaa can be any naturally occurring amino acid
  misc_feature (38)..(38): Xaa can be any naturally occurring amino acid
  misc_feature (49)..(49): Xaa can be any naturally occurring amino acid
SGGSVSRDHATTLXLHXHDEEEEDDGGDYDRNGDGDDXNGDSRDGLALXNNNDHN

SEQ ID NO: 1014224 - protein, 86 aa, Homo sapiens
MPNRVTPAESGQKLMSITDRVNGHRGRDGRVIILTSRGIAARTAYISHPNSAPAESFNTELDWLTGVAHSESLRSQSYQGVLLAPN

SEQ ID NO: 1014225 - protein, 56 aa, Homo sapiens
  misc_feature (6)..(6): Xaa can be any naturally occurring amino acid
  misc_feature (24)..(24): Xaa can be any naturally occurring amino acid
  misc_feature (35)..(35): Xaa can be any naturally occurring amino acid
MAKLKXQSYEINVTVQPHQPRPQXPEGGKVTASLXAAGSEDAAPDSGTRESLGLYV

SEQ ID NO: 1014226 - protein, 36 aa, Homo sapiens
  misc_feature (20)..(20): Xaa can be any naturally occurring amino acid
  misc_feature (29)..(29): Xaa can be any naturally occurring amino acid
MRARLLGTRTKFRPSGQSEXAKLFTPLIXPMTLTAG

SEQ ID NO: 1014227 - protein, 98 aa, Homo sapiens
  misc_feature (13)..(14): Xaa can be any naturally occurring amino acid
GKHRDCRRRNSGXXPVGTADMVTEKDHHNKEGEEQNAGIKKTLVSAGLSAEKTPLEEEGSRKAGSATNRKMTGGTGAVGSDRGGTKKAGRSEGMTSHT

SEQ ID NO: 1014228 - protein, 46 aa, Homo sapiens
MEGSSQESYYYYFSIRGPADGLLESGRISQISEIDERPPTKKGSRL

SEQ ID NO: 1014229 - protein, 120 aa, Homo sapiens
  misc_feature (96)..(96): Xaa can be any naturally occurring amino acid
DYCDYHFKQDGFRALLQLRPLNVLSYLYMLELYYYKTFYELEDLDELIRCTRWVLRCKVRCAVNAVLAPAASGPRLGLIDCLKWLRAEGSCVAVVXSRRGLARKGAPEYAHPPRGNKVLR

SEQ ID NO: 1014230 - protein, 44 aa, Homo sapiens
  misc_feature (15)..(15): Xaa can be any naturally occurring amino acid
  misc_feature (34)..(34): Xaa can be any naturally occurring amino acid
  misc_feature (40)..(40): Xaa can be any naturally occurring amino acid
GPQPIFFQMVNEAVXTPAKKMVTVCHVGVPKVGXEAVPTXLVLD

SEQ ID NO: 1014231 - protein, 94 aa, Homo sapiens
AVLVGSLDQSTGSQMFVTSLVKYNIDPRSPRPLATRQRAAAGVSAQVFIEMSGVWRLGAFCGPLGNPRVLATPDCQLTESTGSQHMKLLLNGLR

SEQ ID NO: 1014232 - protein, 78 aa, Homo sapiens
RIASVREHIYRAQSGRECIFFQFTVRWLTWKGVVKPSGFPANSTCRTSPPECKRNVCWVVKGGTFIPWSGDLRVLESP

SEQ ID NO: 1014233 - protein, 51 aa, Homo sapiens
VNWYVGEGMEEGECSRPARIWLASRRIMMRWRIGSYEDEDEGEEESSCLEP

SEQ ID NO: 1014234 - protein, 119 aa, Homo sapiens
TVYQRAVVAVSVGRTGSIRGIVRCFTGFSGFCLQSHRLFSFRLPPSSGSEVPPRGVHRVAPRPTGALGVLVSLQPCRRATRRPCRAVLATAPASLGFSATAQGFGAPPSLESWESLEKL

SEQ ID NO: 1014235 - protein, 96 aa, Homo sapiens
  misc_feature (6)..(6): Xaa can be any naturally occurring amino acid
  misc_feature (23)..(23): Xaa can be any naturally occurring amino acid
DIERRXEVESILKKNSDWIWDWXSRPENIPPKEFLFKHPKRTATLSMRNTSVMKKGGIFSAEFLKVFLPSLLLSHLLAIGLGIYIGRRLTTSTSTF

SEQ ID NO: 1014236 - protein, 96 aa, Homo sapiens
  misc_feature (3)..(3): Xaa can be any naturally occurring amino acid
  misc_feature (7)..(7): Xaa can be any naturally occurring amino acid
  misc_feature (9)..(9): Xaa can be any naturally occurring amino acid
  misc_feature (12)..(12): Xaa can be any naturally occurring amino acid
  misc_feature (15)..(15): Xaa can be any naturally occurring amino acid
  misc_feature (33)..(33): Xaa can be any naturally occurring amino acid
DIXRRKXVXSIXKKXSDWLWDWPSRPENIPPKXFLFKHPKRTATLSMRNTSVMKKGGIFSAEFLKVFLPSLLLSHLLAIGLGIYIGRRLTTSTSTF

SEQ ID NO: 1014237 - protein, 38 aa, Homo sapiens
  misc_feature (21)..(21): Xaa can be any naturally occurring amino acid
  misc_feature (35)..(35): Xaa can be any naturally occurring amino acid
FFSQLHVHSRCELLGFAPAVXRNKAVMAITHNVPXAAL

SEQ ID NO: 1014238 - protein, 86 aa, Homo sapiens
  misc_feature (6)..(6): Xaa can be any naturally occurring amino acid
  misc_feature (58)..(58): Xaa can be any naturally occurring amino acid
  misc_feature (66)..(66): Xaa can be any naturally occurring amino acid
  misc_feature (73)..(73): Xaa can be any naturally occurring amino acid
  misc_feature (79)..(79): Xaa can be any naturally occurring amino acid
GGCRVXGFRVYSPGEKEHCGYMEYTSEGLNARKLPPKQRFVLAGPWKQREKECPHSTXYPLSSTIXGMWPDSXLKLAWXGGARFEY

SEQ ID NO: 1014239 - protein, 189 aa, Homo sapiens
  misc_feature (171)..(172): Xaa can be any naturally occurring amino acid
  misc_feature (174)..(175): Xaa can be any naturally occurring amino acid
  misc_feature (178)..(178): Xaa can be any naturally occurring amino acid
RPEGSWPPAPPRSPPPPPTPSVVEKMVGRNSAAAAGVCGAPFFGYRFHRYRQNPSDPHHQNGPPEQRKKLKPAKERAGPAKLPDPKDAEAVPKFPPEEIQPGEELPAPGEYEKGVDPPTNAIAVCGPPQPSPPAPPPTPPPPVSPMPPTKPPTISQRIVSAQGLAEDDVEXXTXXHPXAAPPSPFNPFR

SEQ ID NO: 1014240 - protein, 63 aa, Homo sapiens
  misc_feature (34)..(34): Xaa can be any naturally occurring amino acid
RVGPLLILSQIVLMQTVLRLAGPVVALVDGLVRXPLAGPDVRRRDPGLFHPSRPVFMMSSSQG

SEQ ID NO: 1014241 - protein, 57 aa, Homo sapiens
  misc_feature (50)..(50): Xaa can be any naturally occurring amino acid
MATGTDQVEGLGLVVVSLIIFTYYTDWVILLACHSPRPLLTFPEPWHRHXNYYIGSR

SEQ ID NO: 1014242 - protein, 42 aa, Homo sapiens
MPDVPSHPQEPQGPSLEWMKKLRAPPLIEAAPPTVPNKNVKT

SEQ ID NO: 1014243 - protein, 85 aa, Homo sapiens
DLCGKHIEDDIAQCIDTLDSAPCGGGGPLSSPPVCGAPSSFSPPSRREEKRYEKREVSEDTYDDMVCALCDYTPSPLHINSFHTS

SEQ ID NO: 1014244 - protein, 31 aa, Homo sapiens
MLSTMHVITSWVRTKTLGEELASWLIDNTPY

SEQ ID NO: 1014245 - protein, 39 aa, Homo sapiens
  misc_feature (18)..(18): Xaa can be any naturally occurring amino acid
  misc_feature (33)..(33): Xaa can be any naturally occurring amino acid
  misc_feature (35)..(35): Xaa can be any naturally occurring amino acid
TVTNPKRTAQAGRARRPXNRLLPKVNQTGSVTXSXQACK

SEQ ID NO: 1014246 - protein, 31 aa, Homo sapiens
YPTEDYKVYGYVTNSKVKFVMVVDSSNTALR

SEQ ID NO: 1014247 - protein, 52 aa, Homo sapiens
IEKEEQAAAEKAVGKEEFQGEWTAPVADFAAPEVADWSEGVQVPSVPIQQFP

SEQ ID NO: 1014248 - protein, 33 aa, Homo sapiens
GPTLPGAGQELWYDGLHLGRCGPVGLVWATDWR

SEQ ID NO: 1014249 - protein, 77 aa, Homo sapiens
VNSAEEAEEQANTNLSKFRKVQHELDEEVALPHFDLLIQLVLHLADEAEERADIAESQVNKLRAKSRDIGTGGLNEE

SEQ ID NO: 1014250 - protein, 46 aa, Homo sapiens
GVIRLLWRPAGNGTSKRNYVWKACGPMAMLLLCYEAGGSGTKGSTQ

SEQ ID NO: 1014251 - protein, 35 aa, Homo sapiens
MEFQDTECTYFSTPLLLGKKGIEKNWGIGKVSSFE

SEQ ID NO: 1014252 - protein, 33 aa, Homo sapiens
IVGEIRERYGASLRKMVKKIEISQHAKYTCSFC

SEQ ID NO: 1014253 - protein, 38 aa, Homo sapiens
DKFEFEGEAENARAYDIMNVRARVQMLAKFSKKAGTPA

SEQ ID NO: 1014254 - protein, 42 aa, Homo sapiens
CVVEFQLSSGAELRHVLATLGERLTEDEVEKLMAGQEDSNGC

SEQ ID NO: 1014255 - protein, 48 aa, Homo sapiens
KERPGAVSIPKPLLRTQGFSPQPAIPYAVLNSTIVPPLRHSPPLPPLF

SEQ ID NO: 1014256 - protein, 109 aa, Homo sapiens
SLEVGGPEWSPSMPALTVPKSFPGEFQLPVTEPDINNRLESLCLSIDGQALGKRVYRNFNIKKLKTRINALAVKSNAAGPVSGIFRVAQNPPRYFAAFFPPGPSPVLIL

SEQ ID NO: 1014257 - protein, 41 aa, Homo sapiens
MPRRYSVKHIMSDLNGALKNKHCLGKSARAFKVLDPEGKGT

SEQ ID NO: 1014258 - protein, 50 aa, Homo sapiens
MKDKLRRLRTIHVLKAVRENATLTELRVDNQRQWPGDAVEMEMATVLEQC

SEQ ID NO: 1014259 - protein, 30 aa, Homo sapiens
CGVNLEGRKKMFDAAKSPPHNRGQLAVLRS

SEQ ID NO: 1014260 - protein, 46 aa, Homo sapiens
VTDYAEEKEIQSSNLETAMSVIGDRRSRGQKAFEEREKELAKVTIK

SEQ ID NO: 1014261 - protein, 68 aa, Homo sapiens
VDSHSGVLLQYYGLTEASFYTVLFGVARAIGVLPQLIIDRAVGAPIERPKSFSTVKYKELVKKIESKN

SEQ ID NO: 1014262 - protein, 52 aa, Homo sapiens
  misc_feature (31)..(31): Xaa can be any naturally occurring amino acid
SWAVWATLRDAHARNARAFRDVLAHLDNLKXTFATLRELHWDKLHVDPENFR

SEQ ID NO: 1014263 - protein, 97 aa, Homo sapiens
SRRQARIELLRPSEIPTDCAGDRRKLRSGQEERAGLQRSLRGRALANVPQCEGHRVQQASSESTQARSEGPGHPSSLVLQQLLLTQACREEDLSFLL

SEQ ID NO: 1014264 - protein, 59 aa, Homo sapiens
GLAGIQDCIFMEKNLQILPPQGAMAHSSASASELLKTPGAWREWGVHRCSVLTGSVSEI

SEQ ID NO: 1014265 - protein, 36 aa, Homo sapiens
YIGEFEIIDDHRAGKIVVNLTGRLNKCCAISPRFDV

SEQ ID NO: 1014266 - protein, 73 aa, Homo sapiens
  misc_feature (8)..(8): Xaa can be any naturally occurring amino acid
  misc_feature (15)..(15): Xaa can be any naturally occurring amino acid
  misc_feature (26)..(26): Xaa can be any naturally occurring amino acid
  misc_feature (64)..(64): Xaa can be any naturally occurring amino acid
VKPIFSRXMNVAKRXVREFYARLVSXGAEHCAPIPAGHNIVKMGRDKVREMFMKNAHVTDPRVXDLLVIKGKI

SEQ ID NO: 1014267 - protein, 94 aa, Homo sapiens
TKGGKTLPLDHLRTKLYQNAHFLLDVLNGIAPGYVDYDLVTPGNTEEERYANARLAISIARKLGALIWLVPEDINEVRARLIITFIASLMTLNK

SEQ ID NO: 1014268 - protein, 70 aa, Homo sapiens
HWRHLDESNYKRYCLTKLTDRPKITTYQSIYKVRLGQIRVRVKVVYVKPTDGNREPVVYLLQISCKAEKP

SEQ ID NO: 1014269 - protein, 32 aa, Homo sapiens
MIPTAPARVTPALRRSCKCKKAKHLCKKAVLC

SEQ ID NO: 1014270 - protein, 256 aa, Homo sapiens
PQVGGPQCQKGPKPLPQHPYNSKKEQLLSGLCRKEAQSDLLQQKSKKSKKIEKLRKSNDLSDKFPVLPGSQLLLKKPALEFKKEVCKVLSLEKKNKKEVKKVKGEMLRLVDVGEFSEEAQFREACRSYVLPEVICRSCKFCRELELCKKSSFSEDGAVLPQWLCSKCQAPKDSSAIEMTLVEILKKKVMAFTLQELVCLKCRGVKEKKNACVMQLRGKIRPKIQKQVFMEDIGIFRNIAQHYGMSYLLETLEWLLQ

SEQ ID NO: 1014271 - protein, 49 aa, Homo sapiens
AVTRLPPGPDAVSAGSRAGVLPPPPGLTSHLGIPAPSHGVGMNTGLSTA

SEQ ID NO: 1014272 - protein, 33 aa, Homo sapiens
ANVTEGPAPAALAPVSINLKCSSLAVPRNRRCL

SEQ ID NO: 1014273 - protein, 40 aa, Homo sapiens
  misc_feature (18)..(18): Xaa can be any naturally occurring amino acid
  misc_feature (27)..(27): Xaa can be any naturally occurring amino acid
MWPQSELARRVNYARCRXDMVGGLLSXGLGTIECIGELPG

SEQ ID NO: 1014274 - protein, 93 aa, Homo sapiens
  misc_feature (28)..(28): Xaa can be any naturally occurring amino acid
RASNPGPSGGARTRRHFSTSRGATTVRXDGCDACAGKFVHRDNTGDMPYEDEGRILQAQECQRLPANHQKLGEKCGLDSFSQPSEGTSPAKNL

SEQ ID NO: 1014275 - protein, 44 aa, Homo sapiens
AYAETSVVSASQSLRALHVRDLRSATSMAVESFRLTPQPLPAHP

SEQ ID NO: 1014276 - protein, 87 aa, Homo sapiens
PSEPHARRATISVSFSSSHFPIALYRRVGARHGGSERIAQQLHELRLVSSTREEPAINASPLHFWHMAFIAFTLSTFQPSFASLSKF

SEQ ID NO: 1014277 - protein, 86 aa, Homo sapiens
EIFRASGEHGTDEEIESLMKDGDKNNDGRIDFDEFLKMMEGVQEGVDSRLYQDRVTLDSSILSTCRSFHQGGAAPCGSLSGRNKSK

SEQ ID NO: 1014278 - protein, 57 aa, Homo sapiens
EPYWTCSLRPPECAMTGMLFILGNVDFRTCRVPPCLKRAGAATLCPHSLAFPFLSQA

SEQ ID NO: 1014279 - protein, 35 aa, Homo sapiens
  misc_feature (13)..(13): Xaa can be any naturally occurring amino acid
CILITLPPPHSGXNCGGKAGNERLSSCRRKRHLVV

SEQ ID NO: 1014280 - protein, 70 aa, Homo sapiens
APDPRGGNKASASSSSSWNGMTPPVNHHWTFLASQLALRYTDLGSPQLAMHSIRKMDCTTGVLQTLTLFK

SEQ ID NO: 1014281 - protein, 42 aa, Homo sapiens
LNIFDEPLVDKTYEAALETGQNMSKVVYSLYNKAKKLTYELD

SEQ ID NO: 1014282 - protein, 55 aa, Homo sapiens
  misc_feature (3)..(3): Xaa can be any naturally occurring amino acid
PPXLRPFPAAAPASSRAPFMRSKLRRDGEANLMLKVITLAPLSSCGSISSNNTMK

SEQ ID NO: 1014283 - protein, 87 aa, Homo sapiens
GSSDSTVRVWDVNTGEMLNTLIHHCEAVLHLRFNNGMMVTCSKDRSIAVWDMASPTDITLRRVLDGHRAAVNVVYFDDKYIVSASGD

SEQ ID NO: 1014284 - protein, 46 aa, Homo sapiens
  misc_feature (14)..(14): Xaa can be any naturally occurring amino acid
MSSYTSAQKPFKAXSYVSSPGVMLTPAAWSRVKEGSLTKTPAKTLG

SEQ ID NO: 1014285 - protein, 37 aa, Homo sapiens
  misc_feature (1)..(1): Xaa can be any naturally occurring amino acid
XTILLNHTFNETQIDCFSRWQCPQQNEGAATVRAVPP

SEQ ID NO: 1014286 - protein, 32 aa, Homo sapiens
QPFFRTLGWEALLARRLQPPFVPILSVRTDVS

SEQ ID NO: 1014287 - protein, 52 aa, Homo sapiens
LFSELRMPPKDDKKKKDAGFSAKKDKDPVNRAGGKAKKKKWSKGKVRDKLNN

SEQ ID NO: 1014288 - protein, 111 aa, Homo sapiens
  misc_feature (61)..(61): Xaa can be any naturally occurring amino acid
ATGAGLRECVGRAFLTRALCDNEISRHGWVHCLAPQGSWRSVRPIIEQLCPNSRGGTWRTXEVIAWGRYPALRDERDLCEAESGLRDKLIDPTTRREGNMLDVGYWKSGTR

SEQ ID NO: 1014289 - protein, 91 aa, Homo sapiens
LQSSKLLTIAFGAIMSSYLAQSPGKAGRRLISHVELTPAAESERREPYQDSCKTLDLSIVVPLCPSQAVLPVTAALPHPMGLMNKWLLAGF

SEQ ID NO: 1014290 - protein, 72 aa, Homo sapiens
ALVPRRCRSLLTAEPFRTGQTSFRGFVGGTDAHRSPERAGGRALRSSQHPFLIRHPHIQEDNDIPLYLKGGI

SEQ ID NO: 1014291 - protein, 43 aa, Homo sapiens
PAPGAQQAKGITEWGTTRGLHYLNLSLHRLEVVGTTPTKPRAE

SEQ ID NO: 1014292 - protein, 42 aa, Homo sapiens
LDDDDDDATTPAPVCDLKARCEKTTILLDEFWFSKWCNNLSG

SEQ ID NO: 1014293 - protein, 48 aa, Homo sapiens
MSSSGQEHTLRVKEGLSWEDGIMPVIPALCEDPLSPEIGDLPRRQRET

SEQ ID NO: 1014294 - protein, 71 aa, Homo sapiens
MRRLVEITRGDGKELTVASLVQCERENKQAGRSGSRLQSQHFEEAKVVGSLEAEEFKTSLGNMVETLSLQN

SEQ ID NO: 1014295 - protein, 64 aa, Homo sapiens
PTAYTEKRRGPAASRRALSLQESSYLGPAHEVLESRQAATLGREEEKPRPLPEKKQLMRLRKQP

SEQ ID NO: 1014296 - protein, 68 aa, Homo sapiens
ACGLWVWPHVPHEPLGKVREQGGLRAASLLTPLERRRPRPLGELRGSVLTSSQAKAACLCSPAQPQPL

SEQ ID NO: 1014297 - protein, 46 aa, Homo sapiens
  misc_feature (15)..(15): Xaa can be any naturally occurring amino acid
  misc_feature (41)..(41): Xaa can be any naturally occurring amino acid
IFGGWAWQGRTKSVXRRQTVREMKVRILSELEKPLDIDYMXEEQLR

SEQ ID NO: 1014298 - protein, 64 aa, Homo sapiens
  misc_feature (1)..(1): Xaa can be any naturally occurring amino acid
XTPELDEGEWTTLQGFRPAASIGRGWPAVAQPTLPSLAEARRHHDSLSIIRPFALALPPGLAEP

SEQ ID NO: 1014299 - protein, 43 aa, Homo sapiens
YPYTTTDPGANSAERGEDLGTRLQLGMHGHRFVLIPSLLGKTL

SEQ ID NO: 1014300 - protein, 41 aa, Homo sapiens
SPPPPDAVPRTQQSWEGQPPKKGVMLACPLPTPTFRQKGPG

SEQ ID NO: 1014301 - protein, 42 aa, Homo sapiens
  misc_feature (13)..(13): Xaa can be any naturally occurring amino acid
  misc_feature (29)..(29): Xaa can be any naturally occurring amino acid
EEQRDYVFYLAVXNYRLKEYEEALKYVRXLLQTEPQNNQPRN

SEQ ID NO: 1014302 - protein, 63 aa, Homo sapiens
TRRAGAIIERGEDAAHHRLGSLVMMGAREKTERKSERSCRGFRIFDRSRRYIDPGELLRFQAS

SEQ ID NO: 1014303 - protein, 91 aa, Homo sapiens
  misc_feature (47)..(47): Xaa can be any naturally occurring amino acid
  misc_feature (82)..(82): Xaa can be any naturally occurring amino acid
LGVGPRALVPAGLSPALPVAPCSAFGMALLSPRVRQAWRPRRQLALXIGTWGAGANISGSSQGRGPVPLRDGVGRRQTSHSXRNAEERSFH

SEQ ID NO: 1014304 - protein, 34 aa, Homo sapiens
FTIDTYSARNLKGVCLKAQKKSKEDRRCLPDLDT

SEQ ID NO: 1014305 - protein, 88 aa, Homo sapiens
  misc_feature (20)..(20): Xaa can be any naturally occurring amino acid
  misc_feature (85)..(85): Xaa can be any naturally occurring amino acid
FRRSRDPRMRSLLYLLLPEXNSPPAPDIKRFDSGYRATTTAHKVSGLKENIEDAFPGIASLQGPAGGCSRSAAQLSALLLVCPLXREK

SEQ ID NO: 1014306 - protein, 95 aa, Homo sapiens
TTESQGKRTTIEKGRKVRARWLMPVTPALWEAEVGKLRGQEIQTILANTVKPRLYKKYKKISRVRWRAPVVPATREAEEENGMNLGGGACSEPRL

SEQ ID NO: 1014307 - protein, 54 aa, Homo sapiens
  misc_feature (15)..(15): Xaa can be any naturally occurring amino acid
  misc_feature (41)..(41): Xaa can be any naturally occurring amino acid
MLSETSKAAAEALEXQTLLGPLELVGSLLEPSSHVAIYHGXQELGKHNKGGIRR

SEQ ID NO: 1014308 - protein, 93 aa, Homo sapiens
  misc_feature (28)..(28): Xaa can be any naturally occurring amino acid
  misc_feature (47)..(47): Xaa can be any naturally occurring amino acid
  misc_feature (81)..(81): Xaa can be any naturally occurring amino acid
SSWVKLLMVLTLQFLSHDQGQFTKELQXFVVSGSPMRAPEEVTGAQXGVQWRDLGSLQPPPPEQPALAFQSAEIAASAQPXPRLGSEERLCLA

SEQ ID NO: 1014309 - protein, 100 aa, Homo sapiens
  misc_feature (3)..(3): Xaa can be any naturally occurring amino acid
  misc_feature (6)..(6): Xaa can be any naturally occurring amino acid
  misc_feature (9)..(9): Xaa can be any naturally occurring amino acid
  misc_feature (21)..(21): Xaa can be any naturally occurring amino acid
  misc_feature (51)..(51): Xaa can be any naturally occurring amino acid
  misc_feature (61)..(61): Xaa can be any naturally occurring amino acid
QVXTLXSTXVGSVGSGPHHCXRQRAHWLQTGRGAVRRRRWDSPKLQAQRRXVTLPRIFTCXPEHPWLALSPTTWRLQISEGIEGSQADLRLSCAVYHCMK

SEQ ID NO: 1014310 - protein, 87 aa, Homo sapiens
  misc_feature (1)..(1): Xaa can be any naturally occurring amino acid
  misc_feature (47)..(47): Xaa can be any naturally occurring amino acid
  misc_feature (53)..(53): Xaa can be any naturally occurring amino acid
XTCCAPDLSSHRLRRSPICCQRDYSEEMPSVARPRLSGVHRSQIQTXTVGIAXIGAQQWKSRQAEEQYGGQVASYGETSGAKRGRAR

SEQ ID NO: 1014311 - protein, 63 aa, Homo sapiens
VHAAVPRTGNTQQKVCSNAMRSCPEGFCNASKWSPPQNYKKRVAAWKPSKSQTSQSQGYTTRQ

SEQ ID NO: 1014312 - protein, 66 aa, Homo sapiens
  misc_feature (10)..(11): Xaa can be any naturally occurring amino acid
  misc_feature (27)..(27): Xaa can be any naturally occurring amino acid
NLTVVLQTKXXLSILSKKVFEYVHQFXSRHLRTTFTLVVVTQGFRRAPWPHGRGAELKRAPPREAE

SEQ ID NO: 1014313 - protein, 68 aa, Homo sapiens
  misc_feature (27)..(27): Xaa can be any naturally occurring amino acid
  misc_feature (33)..(33): Xaa can be any naturally occurring amino acid
  misc_feature (38)..(38): Xaa can be any naturally occurring amino acid
  misc_feature (54)..(54): Xaa can be any naturally occurring amino acid
AVWVIRNQWGEGEYDPRTVAGEEYFGXWTLNSXGDVGXQPRTLNTTVSSSDKDXCGKASWTWCGLGHN

SEQ ID NO: 1014314 - protein, 43 aa, Homo sapiens
  misc_feature (25)..(25): Xaa can be any naturally occurring amino acid
MAALRKHLTLPSASTMGLVCGGVLXILWVYSATEKRSSGFWEI

SEQ ID NO: 1014315 - protein, 65 aa, Homo sapiens
VLPFWFMLLRVKLTIPSCLPFWPLGGREWRYVQLGPRTMGLCCLLQSSLPGSLQDKQGICGRLRE

SEQ ID NO: 1014316 - protein, 58 aa, Homo sapiens
KLTGISDPGLSRPPLEVRILDDRPSRPEGDNRVWYMDDYHNNHSYVSTSAMVDFMNTD

SEQ ID NO: 1014317 - protein, 77 aa, Homo sapiens
MVQPLIKGSILFNDLYKVLGDRESADRELKFARSVLLIYLPYIFLSLGSPAQRQLSMKIRRALIISTRRCLCCSLTD

SEQ ID NO: 1014318 - protein, 70 aa, Homo sapiens
ARRGPSRNPALTPAPRRRSVRHRTGSHPVNIRELTRTRAVPPPSAAATLGDAHGHEDREHAGAEEVEKAR

SEQ ID NO: 1014319 - protein, 69 aa, Homo sapiens
KAERVRDAAESDETSLTVLCVQVVSQNPLTMQLDKKTGVELAVFIFNLLPYMLVFELRINVPFLFLKKK

SEQ ID NO: 1014320 - protein, 84 aa, Homo sapiens
HVCVLRANVTCIAARTVWIICQRSKAGCSAVLVAGHEYLAGVAEDFLHGVQVQTLAGDFRGLAIFRDQFGKAVCLTLGARRSSR

SEQ ID NO: 1014321 - protein, 136 aa, Homo sapiens
QGCSKVLSFHLLQRFTQIGRRLVDIVLHLFVISSQRHWHRVDTVFQHIQLAEHKSFHPAVELPATDAVDGIHHVANRTGYIAIKRQPKISAIPVQNSIITLEIKISLYCCKRTDFEIQVQRNISQHILTICGHRYF

SEQ ID NO: 1014322 - protein, 71 aa, Homo sapiens
  misc_feature (8)..(8): Xaa can be any naturally occurring amino acid
PGIPPATXSSWDLGKLPLVFPPSVGPDAWRTPPGLGSLLHSQPCTRFKPPGLRHVSSGVLGCCRRLAVFKS

SEQ ID NO: 1014323 - protein, 50 aa, Homo sapiens
LDSVSTVLTSKYRYAGGSVAVPPGRWGSQRVLLPSLDRPFLVFEESLSGR

SEQ ID NO: 1014324 - protein, 281 aa, Homo sapiens
  misc_feature (187)..(187): Xaa can be any naturally occurring amino acid
  misc_feature (215)..(215): Xaa can be any naturally occurring amino acid
KAMYFRDLRAHLRLPTPPPTTPPPPPPPTPPPPPYAPPPPPHPAPPRPPRAPPPPPPPPPPPPPAPPPAPPTPPLPPPPTPPPPPPPRPSPPPAPTHPPPPPPLPTPSPHPPPPPPPPPPPPPPLPPAPPPPPPPPPPDPPPPPPPPHPPPPPPPPPTPPPPPPPRPPPHPPFSPPPPPTPPPTPPXERSRWGSAKCGRCPLCTQGLTGAEPLLXVQALFGGPRGTEEQPGTRLLPSSPRSGTRASLFTVTQVRAQSDPRLSPAHRDAGGWWRHRTAHGNA

SEQ ID NO: 1014325 - protein, 271 aa, Homo sapiens
YSELRLYYSVANLHLEETLAEFWARLLERLFKQLHPKLLLPDDYLDCLGKQAEELRPFREAPRELRLRATSAFVAVSFLSPGLGVASDVVRKVADVPLGTEFSIAVIKLVYCAHCLAVPGARPCPDYCRNVLKGCFANEADLDAEWRNLLDSMVLITDKFWGTSGVESVISSVHTWLAEAINALKDNRDTLTAKVIQGCWNSKVNSQGPGPEEKRRRGKLAPRERPPSGTLEKLVSEAKAQLRDVQDFWISLPGTLCSEKMALSTASDDRC

SEQ ID NO: 1014326 - protein, 72 aa, Homo sapiens
GDTDTAEQVIASFRILASDKPYILAEELRRELAPDQGQYLIKKVARLSGPRKVPCAIDEGWFFSGIFGEREL

SEQ ID NO: 1014327 - protein, 31 aa, Homo sapiens
MVAEYQEGVPEVLRLDIGPLPTMEIKLFSHS

SEQ ID NO: 1014328 - protein, 75 aa, Homo sapiens
ESHYAPRDGLPGEQGLATVRERKGVPALLTGLRSSLGTEMEGPTSQSLACDCLWHACEEFDRDLISKLRWQKIKT

SEQ ID NO: 1014329 - protein, 80 aa, Homo sapiens
  misc_feature (4)..(4): Xaa can be any naturally occurring amino acid
  misc_feature (29)..(29): Xaa can be any naturally occurring amino acid
  misc_feature (68)..(68): Xaa can be any naturally occurring amino acid
PFLXRLPKTLAMGWGWDSSLVNPSPGYPXTLGYPKGIPKAQVGALKLRGRYESSLLGGLGPNGTKARXGPEAVGGALKVG

SEQ ID NO: 1014330 - protein, 42 aa, Homo sapiens
MSLRLRALTRRLTSAAKGAHGGAELVLRLLTFVLALPSGALC

SEQ ID NO: 1014331 - protein, 66 aa, Homo sapiens
TGIVSAPVPKKLLMMAGIDDCYTSARGCTATLGNFAKATFDAISKTYSYLTPDLWKETVFTKSPYQ

SEQ ID NO: 1014332 - protein, 103 aa, Homo sapiens
PVSWQRDCHYLKMSIAQCTSSHPIIRQIRQACAQPLEAFGGRVFRTETEASLWGKLVPGAYCARFPCRCAGGKCSRHAHLQLWRHSHFLPPEDSSDGRKTGHE

SEQ ID NO: 1014333 - protein, 41 aa, Homo sapiens
  misc_feature (18)..(18): Xaa can be any naturally occurring amino acid
GFVRVALVTPTSVHFLTXGPCTSRTAFGPTDGHWLWSKVPG

SEQ ID NO: 1014334 - protein, 39 aa, Homo sapiens
  misc_feature (19)..(19): Xaa can be any naturally occurring amino acid
NQQVALGAVGSGDLIDERXRLCVTPESDSRIRELTFCDV

SEQ ID NO: 1014335 - protein, 30 aa, Homo sapiens
  misc_feature (7)..(7): Xaa can be any naturally occurring amino acid
  misc_feature (20)..(20): Xaa can be any naturally occurring amino acid
MRLPVGXHHPGNRELALGSXCSAWFGSELI

SEQ ID NO: 1014336 - protein, 52 aa, Homo sapiens
  misc_feature (12)..(12): Xaa can be any naturally occurring amino acid
  misc_feature (32)..(32): Xaa can be any naturally occurring amino acid
  misc_feature (50)..(50): Xaa can be any naturally occurring amino acid
ALLLRLECSVTXIALSATNSWAQVMPSGSASXAAGTTGTGHQAQIVKDKXNW

SEQ ID NO: 1014337 - protein, 71 aa, Homo sapiens
EFGRARVSDQLRSGVREQAGQQQEPKRTIEPTSSRKNSQPENWFLNFPAKGVLNLLAPPEGQLGGWVVNQS

SEQ ID NO: 1014338 - protein, 31 aa, Homo sapiens
  misc_feature (11)..(11): Xaa can be any naturally occurring amino acid
RGFVQAGRGCXDTNPNDEFAHYPDLFFSELI

SEQ ID NO: 1014339 - protein, 130 aa, Homo sapiens
  misc_feature (32)..(32): Xaa can be any naturally occurring amino acid
  misc_feature (95)..(95): Xaa can be any naturally occurring amino acid
NPDDHRSAAFSDWLKAECVRFGEDRFARAVEXEAACVTTAAGGRLDRSAKIRAEGMAANYSLPSVGLRMACAWTGPGALSERPDTPDSRSTGRGXIRSPATHRFPFLCLLKTWAARLFGIQRCALVKSQF

SEQ ID NO: 1014340 - protein, 151 aa, Homo sapiens
  misc_feature (15)..(15): Xaa can be any naturally occurring amino acid
  misc_feature (125)..(125): Xaa can be any naturally occurring amino acid
  misc_feature (133)..(133): Xaa can be any naturally occurring amino acid
  misc_feature (143)..(143): Xaa can be any naturally occurring amino acid
VNTPGSYRCACSEVXTGDGFTCSDVDECAENINLCENGQCLNVPGAYRCECEMGFTPASDSRSCQGGSPGIPTHFQVGSTTVNETTTRAGTSSTWEGRNYIRHMLALLKVHFVLSVGFFFGRNGXIDGWAGFXLFMEVFPGAXEPLVWEFW

SEQ ID NO: 1014341 - protein, 92 aa, Homo sapiens
  misc_feature (7)..(7): Xaa can be any naturally occurring amino acid
RYGRTGXRFAVVAAQVRFAPQRSATAAKEIKSLIVSSNETVEHGATLVTNAGETMAEIVQSVRRVNEILDEISPPSREQSAGIEQVNRAVGE

SEQ ID NO: 1014342 - protein, 242 aa, Homo sapiens
  misc_feature (85)..(85): Xaa can be any naturally occurring amino acid
VFGSGRKRGFWGVKSRERRRKFDRNTRIISQLESGYAESTHRKMKVRSEEEITDSHHTKSLERGSRRKPSTLKTQRAAIVAENEXLMQERDQPIQMFLCRVIKKKIFSERIRSPGARYIMRRQKQRTHVTNERPHSTTDCPKRSRKIWSKKQIWKRKKHTYTKGQTRWFAQVEQIALRPKVKDRASTPRRALGGQTKQRSAPARGESTYKYNQAQEGEGKHDFYTTPQWVARDKIFENISTR

SEQ ID NO: 1014343 - protein, 35 aa, Homo sapiens
  misc_feature (7)..(7): Xaa can be any naturally occurring amino acid
MVLSPAXKTNVKAAWGKVGLYVASMVRRPGEDVPV

SEQ ID NO: 1014344 - protein, 60 aa, Homo sapiens
LVRSLQTFSQAWFTCRSATGATWVSIHNFNINYRIPVFCQRAQPGSSLGLEAGSQARVAA

SEQ ID NO: 1014345 - protein, 180 aa, Homo sapiens
MGAHLNSYNTREHTAYYIKALSKDLPKTVELLGYIFQNFSLEDSQIKKERDVILREMQENNASIRNVVFNYLHATTFQGTPLAQAVEGPSENVRKLSRADLTEYLSTHYKAPRMVLAAAGRSGAPATVRPRPEAPGGIPWTYAEDAVPTLTPCRFTGSEIRHRDDALPFAHVAIAVEGPG

SEQ ID NO: 1014346 - protein, 153 aa, Homo sapiens
  misc_feature (19)..(19): Xaa can be any naturally occurring amino acid
  misc_feature (25)..(25): Xaa can be any naturally occurring amino acid
  misc_feature (55)..(55): Xaa can be any naturally occurring amino acid
  misc_feature (75)..(75): Xaa can be any naturally occurring amino acid
  misc_feature (78)..(79): Xaa can be any naturally occurring amino acid
  misc_feature (86)..(86): Xaa can be any naturally occurring amino acid
  misc_feature (127)..(127): Xaa can be any naturally occurring amino acid
  misc_feature (135)..(135): Xaa can be any naturally occurring amino acid
  misc_feature (147)..(147): Xaa can be any naturally occurring amino acid
  misc_feature (150)..(150): Xaa can be any naturally occurring amino acid
VLTTSNIKSDRGFRALPTXNVPHGXCGGDGRTQTLCHILNLYRAGPPGCTRALRXGTESSSVEQIREVASGGCQXPRXXLGIIGLXRVGQAVALRAKAFGFNVLFYDPYLSDGVERALGLQRVSTLXDLLFHSDXMTLQFGLNEHNXPPXQRL

SEQ ID NO: 1014347 - protein, 80 aa, Homo sapiens
  misc_feature (6)..(7): Xaa can be any naturally occurring amino acid
  misc_feature (37)..(37): Xaa can be any naturally occurring amino acid
  misc_feature (57)..(57): Xaa can be any naturally occurring amino acid
EVSTCXXRAHGSSPMYCKSAGDFPPGAAPAVIPAPLXRGRGYDREENGQTLRQNGDXKRSAALMRRELVLTQPLGLLPEP

SEQ ID NO: 1014348 - protein, 30 aa, Homo sapiens
  misc_feature (11)..(11): Xaa can be any naturally occurring amino acid
GEVGRARGPPXADPGFALSPQGRIIEGCRL

SEQ ID NO: 1014349 - protein, 99 aa, Homo sapiens
  misc_feature (6)..(6): Xaa can be any naturally occurring amino acid
  misc_feature (57)..(57): Xaa can be any naturally occurring amino acid
  misc_feature (64)..(64): Xaa can be any naturally occurring amino acid
  misc_feature (72)..(72): Xaa can be any naturally occurring amino acid
  misc_feature (83)..(83): Xaa can be any naturally occurring amino acid
  misc_feature (91)..(91): Xaa can be any naturally occurring amino acid
QLNQYXLKDEIGKGSYGVVTLAYNENDNTYYAMKVLSKKKLIRQPTFHVALHPEAPXQLLEAAXSPGAPLRXVYQGNCPSSSXLDHPNVVXAGGRCWDR

SEQ ID NO: 1014350 - protein, 115 aa, Homo sapiens
  misc_feature (36)..(36): Xaa can be any naturally occurring amino acid
  misc_feature (38)..(38): Xaa can be any naturally occurring amino acid
  misc_feature (41)..(41): Xaa can be any naturally occurring amino acid
  misc_feature (61)..(61): Xaa can be any naturally occurring amino acid
QIEMSTHISLREKLIQYCQSKVIVGDRPTAPSALPXQXPGXSPEVPFSSWEGSQDQGRSQXKHNKTTAQVLIRFPMAEELVVIPKSVTPERIAENFKVFDFELRQPGYDHLTQLQ

SEQ ID NO: 1014351 - protein, 71 aa, Homo sapiens
  misc_feature (26)..(26): Xaa can be any naturally occurring amino acid
  misc_feature (41)..(41): Xaa can be any naturally occurring amino acid
  misc_feature (71)..(71): Xaa can be any naturally occurring amino acid
LSHCLLVTLAANLPAEFTLRLHASLXKFLDFCEHRADLQIXLSWSLGGHAYLPLGPPPAPPPLPAPYPRGX

SEQ ID NO: 1014352 - protein, 96 aa, Homo sapiens
  misc_feature (3)..(3): Xaa can be any naturally occurring amino acid
  misc_feature (35)..(35): Xaa can be any naturally occurring amino acid
  misc_feature (49)..(49): Xaa can be any naturally occurring amino acid
  misc_feature (60)..(60): Xaa can be any naturally occurring amino acid
  misc_feature (62)..(63): Xaa can be any naturally occurring amino acid
  misc_feature (79)..(79): Xaa can be any naturally occurring amino acid
  misc_feature (92)..(92): Xaa can be any naturally occurring amino acid
MRXMSERECNRTRGSATTQDAGRKYNIEKDIDGYXSRREFNKEVQSHLXIAIVGRNFGSXVXXETKHFIYFYLGQVAIXLFKSGKKHGLCHXPSNP

SEQ ID NO: 1014353 - protein, 173 aa, Homo sapiens
  misc_feature (9)..(9): Xaa can be any naturally occurring amino acid
  misc_feature (24)..(24): Xaa can be any naturally occurring amino acid
  misc_feature (29)..(29): Xaa can be any naturally occurring amino acid
  misc_feature (33)..(33): Xaa can be any naturally occurring amino acid
  misc_feature (45)..(45): Xaa can be any naturally occurring amino acid
  misc_feature (75)..(75): Xaa can be any naturally occurring amino acid
  misc_feature (123)..(123): Xaa can be any naturally occurring amino acid
  misc_feature (129)..(129): Xaa can be any naturally occurring amino acid
  misc_feature (142)..(142): Xaa can be any naturally occurring amino acid
  misc_feature (148)..(148): Xaa can be any naturally occurring amino acid
  misc_feature (163)..(163): Xaa can be any naturally occurring amino acid
  misc_feature (168)..(168): Xaa can be any naturally occurring amino acid
SERTHHGDXSPDRTRPTFKDRPGXKVRRXRWAXYGAVGPGRGCSXSFPTTKYLLPALRPETTALPRLRATARRWXDALTNAVANVDDMPNALSALSDLHAHKLRVDPVNFKLLSHCLLVTLAXQLPAEXNPAVHGFLDKFLXFFSTVXTSNTVKLELGSRFFXPLASXGPSPS

SEQ ID NO: 1014354 - protein, 111 aa, Homo sapiens
  misc_feature (1)..(1): Xaa can be any naturally occurring amino acid
  misc_feature (83)..(83): Xaa can be any naturally occurring amino acid
XAAGFLFQGLGCHHHGWAPGLRHTWKDCLAGSLGGPPFIGLPLLGLRFPLGEWGPLLCQPAPGRRHGAGQWLGGHLGPEAFCXWSGNAVGGRSDHPHCSCLHGQHLWDVGG

SEQ ID NO: 1014355 - protein, 99 aa, Homo sapiens
  misc_feature (22)..(22): Xaa can be any naturally occurring amino acid
  misc_feature (31)..(31): Xaa can be any naturally occurring amino acid
  misc_feature (80)..(80): Xaa can be any naturally occurring amino acid
  misc_feature (92)..(92): Xaa can be any naturally occurring amino acid
TSCTLPTLDPDIAPSAPAPFQXLPTFHTEVXLSLFKADLQDGVLTPPPPPPPPPPAPDVLASAPPLPPSTAAPVGQGARXDDSSSSKSSSVXGASKGSW

SEQ ID NO: 1014356 - protein, 100 aa, Homo sapiens
  misc_feature (4)..(4): Xaa can be any naturally occurring amino acid
  misc_feature (8)..(8): Xaa can be any naturally occurring amino acid
  misc_feature (13)..(13): Xaa can be any naturally occurring amino acid
  misc_feature (38)..(38): Xaa can be any naturally occurring amino acid
  misc_feature (75)..(75): Xaa can be any naturally occurring amino acid
  misc_feature (99)..(99): Xaa can be any naturally occurring amino acid
RSHXSQPXTRPSXETYCATPAKSERDVSTPPTVLPDNXPRYPVGKFFQYDTWNQSTQRLEGPAALLRARRGHVLXKELEAFREAKRHRPLIALPTQDPXQ

SEQ ID NO: 1014357 - protein, 250 aa, Homo sapiens
EPVTTSSRDQPFLSPVLLATSLGSGQIQPSPTPGTTMSRGPCICIVPGITWPWNLLLQDPARLGQGRLPTRGPVDRPSASRWRDPDETRAGSHQPGQFLPTLSLSRRSTASRQASWLLSVLFTTAARTSRSPAAPSSPLTSRCGPWGWAGPPSRSQLCCRAPSSFSSASRGARRAALHSGPRPQPPALASQAARLGSAASRCSSSNACSPRTTRSNSPPPRSGTQGKKVGCEAAAGTPGQQVPKTVSIHR

SEQ ID NO: 1014358 - protein, 52 aa, Homo sapiens
MPIAEYSIAFRKWVSAFGNVFRFPTKGIHHHGHDVGGHEVSAKTVTTAYGSS

SEQ ID NO: 1014359 - protein, 83 aa, Homo sapiens
  misc_feature (2)..(2): Xaa can be any naturally occurring amino acid
  misc_feature (20)..(20): Xaa can be any naturally occurring amino acid
  misc_feature (69)..(69): Xaa can be any naturally occurring amino acid
KXSNPCPPPAFASANPRVPXLKFQSITGTHPWSLQLPGPQRQDFVLASLVLCWGDDKTNNPRLERSGSXPNPNILGGRGGWIN

SEQ ID NO: 1014360 - protein, 56 aa, Homo sapiens
ECNGEIQNAAYRRLSPIAIPTGIPNNTAANSATIMRVRLAARCCHSVVHKALRPAM

SEQ ID NO: 1014361 - protein, 38 aa, Homo sapiens
  misc_feature (27)..(27): Xaa can be any naturally occurring amino acid
ALAPALSARLFSRRSPAKLHELYEKVXSRRADRHSDFS

SEQ ID NO: 1014362 - protein, 32 aa, Homo sapiens
GLCGHCLQFSWIYTEDWNCGICQIDNTVRLRR

SEQ ID NO: 1014363 - protein, 44 aa, Homo sapiens
PVVWVAPPKSGKVNMNILHRKSFAQKKGIEQMTKQQISAASHIC

SEQ ID NO: 1014364 - protein, 62 aa, Homo sapiens
RNPRISCFIQTDDDLAMRASIALDAPIFSSNRRVSSVSGRRSPVCGTVMTPSSHSDEAWNVL

SEQ ID NO: 1014365 - protein, 144 aa, Homo sapiens
  misc_feature (66)..(66): Xaa can be any naturally occurring amino acid
LAVSARLECSGRISAHCNLRLPGSGNFPASASRVAGIAGVCHHARLIFVFRIFSRILKQHGFTMLXQAGLELLTSGNPPTSASQSAGITDVSHHAQPRTIWFLTQYRKEGNRVQEEGSLGTVGEGTQFPKVFQEVLLLHSVFRG

SEQ ID NO: 1014366 - protein, 116 aa, Homo sapiens
  misc_feature (16)..(16): Xaa can be any naturally occurring amino acid
  misc_feature (20)..(20): Xaa can be any naturally occurring amino acid
  misc_feature (27)..(28): Xaa can be any naturally occurring amino acid
  misc_feature (47)..(47): Xaa can be any naturally occurring amino acid
  misc_feature (114)..(114): Xaa can be any naturally occurring amino acid
KLEECPAVPGLESARXHQVXLQELPGXXSIEMLANATTLAYLKRVLXVALTPVPQDSCGSAVDLLLASGAVMAHAFCKVCDFTIQGPESWTVKHLPWGSAVCYPFSVAVKKEEXRV

SEQ ID NO: 1014367 - protein, 110 aa, Homo sapiens
  misc_feature (86)..(86): Xaa can be any naturally occurring amino acid
  misc_feature (94)..(94): Xaa can be any naturally occurring amino acid
MALHSSLGDSARPCLRINKVCDEDVHTLYANTVFFFFNLNSLTVLPRDGVRWHSSWLMGKLCLASSWGLQACSTVPQLIFFVFLVXRQGFAILXQVGLEISGPQVIQSPK

SEQ ID NO: 1014368 - protein, 33 aa, Homo sapiens
DEPVRKKRQAALEVTARYCGRELEQYGQCVAAK

SEQ ID NO: 1014369 - protein, 56 aa, Homo sapiens
ALAAFIQTADDLAMQGSIAVSTDQFYVRKGRFFPAIARYLVSVDDVSVRSSRRFKP

SEQ ID NO: 1014370 - protein, 55 aa, Homo sapiens
SASDQALYLHYSSGLATSRFAQHIAYALFSGSRNLSRSQSTQIVHVRLEVHVSSR

SEQ ID NO: 1014371 - protein, 33 aa, Homo sapiens
VTTGKSQLPAVWGPAVPLPKQREPLDLTKIIFK

SEQ ID NO: 1014372 - protein, 42 aa, Homo sapiens
CVSRRAGALCFLALRNADNSRTIVEGGWAVAALRAMKRRPQK

SEQ ID NO: 1014373 - protein, 90 aa, Homo sapiens
  misc_feature (41)..(41): Xaa can be any naturally occurring amino acid
  misc_feature (63)..(63): Xaa can be any naturally occurring amino acid
  misc_feature (70)..(70): Xaa can be any naturally occurring amino acid
  misc_feature (76)..(76): Xaa can be any naturally occurring amino acid
MLALLPESRTCAEEAVHLWPAVLRGPRWGNPGDGAWPAICXGLGWSERRGRFFPPALPLLLRXERAAGLXGSGAGXEDVNSNVNADQEVR

SEQ ID NO: 1014374 - protein, 42 aa, Homo sapiens
DLDTRYEKRYERERERCARESTNARSHRESVLRDSEIYTLPD

SEQ ID NO: 1014375 - protein, 34 aa, Homo sapiens
MRHLIKLFQCQDLRAWVACDGYADKEDLEILPTQ

SEQ ID NO: 1014376 - protein, 30 aa, Homo sapiens
KTGIKLNVVFSPDTAITPSHCQRMHHEESY

SEQ ID NO: 1014377 - protein, 53 aa, Homo sapiens
AEDARRDSRQNASVGTQNVRTSHARVVHSSYASLTSRRRFAELGMIRAIALDH

SEQ ID NO: 1014378 - protein, 35 aa, Homo sapiens
MYSVGLRTMSILRTLSDVACTDVYLQEQETAHETH

SEQ ID NO: 1014379 - protein, 78 aa, Homo sapiens
  misc_feature (17)..(17): Xaa can be any naturally occurring amino acid
  misc_feature (24)..(24): Xaa can be any naturally occurring amino acid
RPRSLVGKNGFGGQAWXLLLSVAXGHCYLHLADPAPPMAQSAPDTVQATALEDTSYKTWWLPHGVMSAGEQNARVKKA

SEQ ID NO: 1014380 - protein, 63 aa, Homo sapiens
MFERSSRCSQRGYYSTGQGHLYRCSEDAHLRCCASMHVFDLTMSMHSSRQANYACRIHVTVTQ

SEQ ID NO: 1014381 - protein, 74 aa, Homo sapiens
  misc_feature (25)..(25): Xaa can be any naturally occurring amino acid
  misc_feature (35)..(35): Xaa can be any naturally occurring amino acid
  misc_feature (59)..(59): Xaa can be any naturally occurring amino acid
KNGCGGAYWKTGQWGPSENTTLPVXAKLPPLTCLXPYPGKVTLPSLSPQFLYSLNSNMXPGMVAHACNPTALGG

SEQ ID NO: 1014382 - protein, 42 aa, Homo sapiens
RFEGYRPNLAESCPCRQYRAYVLTHSGELYERPERSDRQICV

SEQ ID NO: 1014383 - protein, 35 aa, Homo sapiens
DDHRQVISSLLSGALAGACPKQRSVPVTEPKSSSK

SEQ ID NO: 1014384 - protein, 163 aa, Homo sapiens
  misc_feature (21)..(21): Xaa can be any naturally occurring amino acid
  misc_feature (26)..(26): Xaa can be any naturally occurring amino acid
  misc_feature (44)..(44): Xaa can be any naturally occurring amino acid
  misc_feature (51)..(51): Xaa can be any naturally occurring amino acid
  misc_feature (63)..(63): Xaa can be any naturally occurring amino acid
  misc_feature (86)..(86): Xaa can be any naturally occurring amino acid
  misc_feature (89)..(89): Xaa can be any naturally occurring amino acid
  misc_feature (110)..(110): Xaa can be any naturally occurring amino acid
  misc_feature (158)..(158): Xaa can be any naturally occurring amino acid
PSISNSPSSFQEISDPNLWGXSNFRXNKDYYIISTSNGSLEGRXNQEGGVXQTRAMKILMKVXQDDKFCWINQEKDPTRRPELEAXTNXRSSTTSPFVKPNPGSSTDGNXAGHSGNNMLGSEVALFAGIASGCIIFIVIIITLVVLLLKYRRDTGSTXRSTRP

SEQ ID NO: 1014385 - protein, 74 aa, Homo sapiens
RIALLAINVEFFFRLVQLARALQVTGTSVRIQGFVNPTSRPPGSDILLQIVVSDAVQNTSNQLGIITSHDLEIS

SEQ ID NO: 1014386 - protein, 85 aa, Homo sapiens
  misc_feature (25)..(25): Xaa can be any naturally occurring amino acid
  misc_feature (53)..(53): Xaa can be any naturally occurring amino acid
  misc_feature (78)..(78): Xaa can be any naturally occurring amino acid
  misc_feature (84)..(84): Xaa can be any naturally occurring amino acid
SRLVHGSGSSDYPPSSPSLRTRGTXVPRREEGWTRIRWPEQMAAIRKKLVIVXDGACGKTCLLIVFSKDQFPEVYLPXVLRTLXK

SEQ ID NO: 1014387 - protein, 100 aa, Homo sapiens
  misc_feature (9)..(9): Xaa can be any naturally occurring amino acid
  misc_feature (19)..(19): Xaa can be any naturally occurring amino acid
  misc_feature (81)..(81): Xaa can be any naturally occurring amino acid
  misc_feature (87)..(88): Xaa can be any naturally occurring amino acid
  misc_feature (100)..(100): Xaa can be any naturally occurring amino acid
VEAVDGFCXPSIGVRIVHXPVSQALPCDLVPNQLAGLDVANAAEETLELILGHVLGQVVDDEVGLAVVSGSICPKELALGXAGRPGXXPPETPWPPVSEX

SEQ ID NO: 1014388 - protein, 120 aa, Homo sapiens
  misc_feature (15)..(15): Xaa can be any naturally occurring amino acid
  misc_feature (22)..(22): Xaa can be any naturally occurring amino acid
  misc_feature (43)..(43): Xaa can be any naturally occurring amino acid
  misc_feature (57)..(57): Xaa can be any naturally occurring amino acid
  misc_feature (60)..(60): Xaa can be any naturally occurring amino acid
  misc_feature (64)..(64): Xaa can be any naturally occurring amino acid
  misc_feature (72)..(72): Xaa can be any naturally occurring amino acid
  misc_feature (115)..(115): Xaa can be any naturally occurring amino acid
KGLRGRSSLPGVGLXKPQGFLXLLKYTPPWWWPPPMSPTDGSXTVLVAMSPENPTQXSPXIPNXFAGGSSQXIHASLSGAATQAACPSVLPPAAPPGPWSGGAMARDTVASHVNXPGHCG

SEQ ID NO: 1014389 - protein, 115 aa, Homo sapiens
  misc_feature (44)..(44): Xaa can be any naturally occurring amino acid
  misc_feature (90)..(90): Xaa can be any naturally occurring amino acid
  misc_feature (111)..(111): Xaa can be any naturally occurring amino acid
  misc_feature (115)..(115): Xaa can be any naturally occurring amino acid
MIQGRARFVRSLGGRTDWDQRDPLGSGGLGPWEAGSQGHRIHTXTIVGPWEAGSQGTEIHTLTIVGPFGGQQPDYGIHMLTIGSQSLACXETLLVAPFIGEQGERVLCSCXCLGX

SEQ ID NO: 1014390 - protein, 133 aa, Homo sapiens
  misc_feature (124)..(124): Xaa can be any naturally occurring amino acid
MVPQDQSHQVTGNHQQASSGRTLGFPRRQSGPITIVVVCLVEGSRGARGLMNGYRGPANGFRGGYDGYRPSFSNTPNSGYTQSQFSAPRDYSGYQRDGYQQNFKRGFGRVDHGEPHEVVEGPQXPTEGFRNYP

SEQ ID NO: 1014391 - protein, 121 aa, Homo sapiens
  misc_feature (3)..(3): Xaa can be any naturally occurring amino acid
  misc_feature (18)..(18): Xaa can be any naturally occurring amino acid
  misc_feature (53)..(53): Xaa can be any naturally occurring amino acid
  misc_feature (70)..(70): Xaa can be any naturally occurring amino acid
  misc_feature (85)..(85): Xaa can be any naturally occurring amino acid
  misc_feature (117)..(117): Xaa can be any naturally occurring amino acid
GRXKKTGRNSLELRKRCXGGGGDYGGCSSCRRCTGKQSCRQVEELAAEVQRLXTENQRLRQENQMWNREXALSVMRSGYLGVPPXPGGPKEKVPFRAHSGPVWVSRREVADENHRQXPVRP

SEQ ID NO: 1014392 - protein, 59 aa, Homo sapiens
  misc_feature (8)..(8): Xaa can be any naturally occurring amino acid
  misc_feature (19)..(19): Xaa can be any naturally occurring amino acid
  misc_feature (30)..(30): Xaa can be any naturally occurring amino acid
  misc_feature (38)..(38): Xaa can be any naturally occurring amino acid
  misc_feature (49)..(49): Xaa can be any naturally occurring amino acid
LVTTPRAXPGPTRVPCTLXGPVQFGVSSAXQEKNLKNXFSLLVFQSFDXSLHLNKVFKR

SEQ ID NO: 1014393 - protein, 114 aa, Homo sapiens
  misc_feature (13)..(13): Xaa can be any naturally occurring amino acid
  misc_feature (16)..(16): Xaa can be any naturally occurring amino acid
  misc_feature (32)..(32): Xaa can be any naturally occurring amino acid
  misc_feature (70)..(70): Xaa can be any naturally occurring amino acid
  misc_feature (87)..(87): Xaa can be any naturally occurring amino acid
EVLWQEAGAGRPXRTXLLTPVERMVAETFSAXGPQGEGQTTEPLPNSIEASLEVRSSHAEAARQLLAGSXPAPTDEEDETPSCLWLXLRSLEGPACLNLTPWTYEESSTHPPPH

SEQ ID NO: 1014394 - protein, 77 aa, Homo sapiens
  misc_feature (4)..(4): Xaa can be any naturally occurring amino acid
  misc_feature (58)..(59): Xaa can be any naturally occurring amino acid
EVVXVRQELSHYRAVLSRYQAQHGALLRLPHIPTWELSFALLDLRPVPFLPWCHGPAXXVPQGRDNADKYIYIFKKK

SEQ ID NO: 1014395 - protein, 144 aa, Homo sapiens
ERKVEVVFFDGKSDPCGLRGRELRHARRRGAPGGLWVREEGLAGLRELLLVGNQKYWQSVCAGASVGGDGPTLATRRPGGRRGPASHRLPDGGEGGLRHSGVAVGSQAWPLGTVGAQGQAHGYGMQGDAKGKRVAGISTVTMQN

SEQ ID NO: 1014396 - protein, 69 aa, Homo sapiens
  misc_feature (2)..(2): Xaa can be any naturally occurring amino acid
  misc_feature (13)..(13): Xaa can be any naturally occurring amino acid
  misc_feature (31)..(31): Xaa can be any naturally occurring amino acid
  misc_feature (39)..(39): Xaa can be any naturally occurring amino acid
  misc_feature (49)..(49): Xaa can be any naturally occurring amino acid
  misc_feature (65)..(65): Xaa can be any naturally occurring amino acid
PXQPRKARKEPKXKNHGTKRPPTCGIPVAKXNGRGQSKXGFRNYPGLNXLELKPVGCKRLPSYCXGTQG

SEQ ID NO: 1014397 - protein, 86 aa, Homo sapiens
  misc_feature (74)..(74): Xaa can be any naturally occurring amino acid
MYAYALQVFPSKKSVWLRAGNLEKNHGTRESLEALLQRAVATCPKAEVLWLMGAKSKWLAGDVPAARSILALAXQATPNSEEIWLA

SEQ ID NO: 1014398 - protein, 108 aa, Homo sapiens
  misc_feature (31)..(31): Xaa can be any naturally occurring amino acid
  misc_feature (62)..(62): Xaa can be any naturally occurring amino acid
MPGSSNLAVQLFHAGQGGHEVSPADYVPGTXGPCGETFGRYQNSELLISKLPLLRESALDPXHESEAEELCDTIVHLPAKALSETHIFPDGSCEAFSYPPYCMLQSIL

SEQ ID NO: 1014399 - protein, 110 aa, Homo sapiens
  misc_feature (93)..(93): Xaa can be any naturally occurring amino acid
  misc_feature (109)..(109): Xaa can be any naturally occurring amino acid
MRPIGSTTSVAPRKQRKVITLQEKVDLLDMYYRLRSAAVVAHHFKINEPSARTIIKEKGNLWKAVHWQLCQAGMEKPCYFFAKIPFLCLYLKXAAFYVGLQGLAMEGRXL

SEQ ID NO: 1014400 - protein, 124 aa, Homo sapiens
  misc_feature (36)..(36): Xaa can be any naturally occurring amino acid
  misc_feature (68)..(68): Xaa can be any naturally occurring amino acid
FISVQPGPTVASGENVTLLCQSWRQFHTFLLTKAGXADCPTVASGENVTLLCQSWRQFHTFLLTKAGXADAPLRLRSIHEYPKYQAEFPMSPVTSAHAGTYRCYGSLNFRPLPAVFTPVSPWEL

SEQ ID NO: 1014401 - protein, 66 aa, Homo sapiens
  misc_feature (14)..(14): Xaa can be any naturally occurring amino acid
  misc_feature (16)..(17): Xaa can be any naturally occurring amino acid
  misc_feature (52)..(52): Xaa can be any naturally occurring amino acid
MGEARRRAAAAGPXLXXFLQGGTGGNDTELVACLRTTTSAGPGEPTNCNVLXQESVFRFFFVPVVD

SEQ ID NO: 1014402 - protein, 56 aa, Homo sapiens
  misc_feature (31)..(31): Xaa can be any naturally occurring amino acid
  misc_feature (50)..(50): Xaa can be any naturally occurring amino acid
GEALSLLEVQSQPHMVAYACDSRLLGGLRRXSRLGLGGGGCGELEIVPFXSNLGSK

SEQ ID NO: 1014403 - protein, 107 aa, Homo sapiens
IERRKEVESILKKNSDWIWDWSSRPENIPPKEFLFKHPKRTATLSMRNTSVMKKGGIFSAEFLKVFLPSLLLSHLLAIGLGIYIGKASDNLHQHLLDEGTGSLDLVR

SEQ ID NO: 1014404 - protein, 106 aa, Homo sapiens
  misc_feature (55)..(55): Xaa can be any naturally occurring amino acid
  misc_feature (69)..(69): Xaa can be any naturally occurring amino acid
  misc_feature (101)..(101): Xaa can be any naturally occurring amino acid
ISVKTSGSKERASKSQDRKSASREKRSVVSFDKVKEPRKSRDSESHRVRERVNVXQRMQAQWEREELEXWEIARERLAFQRQSGERDHWSGERLERERCTXSTSAG

SEQ ID NO: 1014405 - protein, 65 aa, Homo sapiens
  misc_feature (51)..(51): Xaa can be any naturally occurring amino acid
  misc_feature (56)..(57): Xaa can be any naturally occurring amino acid
VQRQVIGAREGTIAQMALEHAVARVLSVVARELVWARKLPAAAVPVAVVGXLTCVXXRCAFRCEL

SEQ ID NO: 1014406 - protein, 64 aa, Homo sapiens
  misc_feature (14)..(14): Xaa can be any naturally occurring amino acid
  misc_feature (22)..(22): Xaa can be any naturally occurring amino acid
  misc_feature (46)..(46): Xaa can be any naturally occurring amino acid
LGKGKRVAQLQVSXARKAKAKXGGERTVSMSSLGSGSRVIPSPCGXPISSMSLGLGALCWRLSH

SEQ ID NO: 1014407 - protein, 75 aa, Homo sapiens
  misc_feature (7)..(7): Xaa can be any naturally occurring amino acid
  misc_feature (9)..(9): Xaa can be any naturally occurring amino acid
  misc_feature (18)..(18): Xaa can be any naturally occurring amino acid
  misc_feature (30)..(30): Xaa can be any naturally occurring amino acid
  misc_feature (73)..(73): Xaa can be any naturally occurring amino acid
TGRFSAXRXPQCWSSFGXLQYLGMAIQPPXEFFRVSGWHFGSPERHLTPPHPGSPPASRDVPWSLVTYPGREXES

SEQ ID NO: 1014408 - protein, 102 aa, Homo sapiens
  misc_feature (90)..(90): Xaa can be any naturally occurring amino acid
  misc_feature (92)..(92): Xaa can be any naturally occurring amino acid
DEALDDSPQKPMFTLREELVKPEFQQLSGPLKTKHVPLSLANLQPSCCPEDCTGLAEMALPILGKVLPCPKLSFSNQKQGWSPTNYCTKXSXGWALQGWVKL

SEQ ID NO: 1014409 - protein, 63 aa, Homo sapiens
  misc_feature (57)..(57): Xaa can be any naturally occurring amino acid
  misc_feature (63)..(63): Xaa can be any naturally occurring amino acid
SHECTHLLEGPGFHHAAGKLVENVKYEDIYEMLVHTYSSMDRHDGVPSHSSRPLPSXGSVFPX

SEQ ID NO: 1014410 - protein, 122 aa, Homo sapiens
  misc_feature (2)..(2): Xaa can be any naturally occurring amino acid
  misc_feature (25)..(25): Xaa can be any naturally occurring amino acid
  misc_feature (66)..(66): Xaa can be any naturally occurring amino acid
  misc_feature (101)..(101): Xaa can be any naturally occurring amino acid
GXSWPPQDLLNPPWEEEGNWWRALXPFFLSPKHPRSRVPFLVTSHLRVTFLEGGILEGKSFIFSAXRQGTWIVFRSYLEFPEKSKQTKKTGGWEIYSSFLXIFGNGTNGLNGLTIAHPWMVI

SEQ ID NO: 1014411 - protein, 293 aa, Homo sapiens
FARGATVFSKGDQGAFTRDDDSFSPLFLRPPREGVFIPLLLSLLPRWASKRNVFLRPRFLCENPSGVAQDVVVATPRRCCAAPRKRCPWFHNSVLFCGRTHPAPFSCFSCGNSSNLLPRTPPPVVGIEQQPTRGPTTRMFSSGEEIVPTPEEFFWSPNRVCCERFLRSPPPGFLPPTPPFPLPLMVFITLKLFRHTLSLTHHTTVGCFFSSGECARVPSWATSGPPRLGFRRGDCPPPGPPRFLPLGPLLPPTTEFPRAGFFILFPPFSGVSPPRERTFFFWGPHTQINPGVP

SEQ ID NO: 1014412 - protein, 32 aa, Homo sapiens
  misc_feature (2)..(2): Xaa can be any naturally occurring amino acid
  misc_feature (16)..(16): Xaa can be any naturally occurring amino acid
LXGPTLVVGSDKKNKXTCCLLTSGKFLVHNIK

SEQ ID NO: 1014413 - protein, 45 aa, Homo sapiens
  misc_feature (5)..(5): Xaa can be any naturally occurring amino acid
  misc_feature (28)..(28): Xaa can be any naturally occurring amino acid
NSLLXSFFSFRSVLSLRTVSRTRRSSSXAFRLGAGRKFSSSGASS

SEQ ID NO: 1014414 - protein, 81 aa, Homo sapiens
  misc_feature (2)..(2): Xaa can be any naturally occurring amino acid
  misc_feature (8)..(8): Xaa can be any naturally occurring amino acid
  misc_feature (18)..(18): Xaa can be any naturally occurring amino acid
NXSRSSSXSATGSPTRRXGGGPKFGGWAHEESQAKALVEVVGVAEEACRGGSPKGGGGHGNSQGSCARTWEGGAALSPSSP

SEQ ID NO: 1014415 - protein, 34 aa, Homo sapiens
MLTLRSKVHPAHDGKTSSTGWGSESAHPHKPWVP

SEQ ID NO: 1014416 - protein, 43 aa, Homo sapiens
  misc_feature (12)..(12): Xaa can be any naturally occurring amino acid
  misc_feature (34)..(34): Xaa can be any naturally occurring amino acid
FLGRVTCEGVWXLGPHPGPALETKALYASPYESXVSQLLSLPE

SEQ ID NO: 1014417 - protein, 36 aa, Homo sapiens
  misc_feature (27)..(27): Xaa can be any naturally occurring amino acid
  misc_feature (35)..(35): Xaa can be any naturally occurring amino acid
MWRHGQTIGGCDPILSRLHKVVLNLTXQEGTKWEXT

SEQ ID NO: 1014418 - protein, 88 aa, Homo sapiens
  misc_feature (14)..(14): Xaa can be any naturally occurring amino acid
  misc_feature (17)..(17): Xaa can be any naturally occurring amino acid
  misc_feature (83)..(83): Xaa can be any naturally occurring amino acid
PLHARKLADTGRYXRIXGVGLCRRWRHLPHEFVADAVISGLMRVQLDTQVPVLSAVLTPKSFHDHEDHRKFFSEHFVVKGREXKGLHQ

SEQ ID NO: 1014419 - protein, 121 aa, Homo sapiens
  misc_feature (30)..(30): Xaa can be any naturally occurring amino acid
  misc_feature (66)..(66): Xaa can be any naturally occurring amino acid
  misc_feature (69)..(69): Xaa can be any naturally occurring amino acid
  misc_feature (73)..(73): Xaa can be any naturally occurring amino acid
  misc_feature (89)..(89): Xaa can be any naturally occurring amino acid
  misc_feature (103)..(103): Xaa can be any naturally occurring amino acid
  misc_feature (115)..(115): Xaa can be any naturally occurring amino acid
  misc_feature (120)..(120): Xaa can be any naturally occurring amino acid
MWELPWAIGFPCGILLFILTKREVDKDRVXQMKARQNMRLSNTGEYESPEVQGFLPELPRPLMLGXGVXWGAXPEERLLTLLGLLTVKXLRFGPEFRFVPLRXHQRAHEDPGLLXKPYPXP

SEQ ID NO: 1014420 - protein, 84 aa, Homo sapiens
  misc_feature (21)..(21): Xaa can be any naturally occurring amino acid
  misc_feature (32)..(32): Xaa can be any naturally occurring amino acid
  misc_feature (50)..(50): Xaa can be any naturally occurring amino acid
CWTGYELEIRAFLQQLKRRVXGDAISESASGXPSGTKAPGHMPPAPIEVXTDLAEKITGPLEEAVAVAFSQVLTIAATEPVTLL

SEQ ID NO: 1014421 - protein, 123 aa, Homo sapiens
  misc_feature (6)..(6): Xaa can be any naturally occurring amino acid
  misc_feature (58)..(58): Xaa can be any naturally occurring amino acid
  misc_feature (109)..(109): Xaa can be any naturally occurring amino acid
MPLPVXPFCPLNVTVLQAQTCFQTIQMMLLLQRHGPVPRRKGHLCQQCAPDSVRRQDXRSHEKGRPEDTYSGWKTRTPEDQERSYLGTMKQLRQYQDTSCLQETIKPLXLSSLDVDPILGLSP

SEQ ID NO: 1014422 - protein, 78 aa, Homo sapiens
  misc_feature (9)..(9): Xaa can be any naturally occurring amino acid
  misc_feature (28)..(28): Xaa can be any naturally occurring amino acid
  misc_feature (41)..(41): Xaa can be any naturally occurring amino acid
  misc_feature (50)..(50): Xaa can be any naturally occurring amino acid
  misc_feature (52)..(52): Xaa can be any naturally occurring amino acid
  misc_feature (59)..(59): Xaa can be any naturally occurring amino acid
IYWSEEMEXPAAGPGEGQAIPEGHLLRXLPAAGCCPGRPAXRATLGAHQXPXMALTLAXPRFGRETPAESGLFLASIF

SEQ ID NO: 1014423 - protein, 36 aa, Homo sapiens
  misc_feature (13)..(13): Xaa can be any naturally occurring amino acid
  misc_feature (35)..(35): Xaa can be any naturally occurring amino acid
TQSLVTLAEDNIXLLLESRVLGKRSQRLFRRFCRXT

SEQ ID NO: 1014424 - protein, 105 aa, Homo sapiens
  misc_feature (14)..(14): Xaa can be any naturally occurring amino acid
  misc_feature (39)..(39): Xaa can be any naturally occurring amino acid
  misc_feature (52)..(52): Xaa can be any naturally occurring amino acid
  misc_feature (73)..(73): Xaa can be any naturally occurring amino acid
  misc_feature (83)..(83): Xaa can be any naturally occurring amino acid
  misc_feature (86)..(86): Xaa can be any naturally occurring amino acid
  misc_feature (93)..(94): Xaa can be any naturally occurring amino acid
HAHQVLHWASHPGXVSSPSDDAIASVARACTRQWYMGFXIVVPGSCTWSFLXSVVGPIRAGVTRACTPVCLPXHVRHPGRRLXSRXSVGVRAXXFSRVPCSHTGA

SEQ ID NO: 1014425 - protein, 83 aa, Homo sapiens
  misc_feature (10)..(10): Xaa can be any naturally occurring amino acid
  misc_feature (18)..(18): Xaa can be any naturally occurring amino acid
  misc_feature (21)..(21): Xaa can be any naturally occurring amino acid
  misc_feature (25)..(25): Xaa can be any naturally occurring amino acid
TLTALTTSVXQVTICVPXGQXTSSXNLLQGGLPPVSIDDLFSGKSVPHRHVLSIVVRLCIMYLRRCILSHGAVLWHPGNSSVY

SEQ ID NO: 1014426 - protein, 66 aa, Homo sapiens
  misc_feature (10)..(10): Xaa can be any naturally occurring amino acid
  misc_feature (22)..(22): Xaa can be any naturally occurring amino acid
  misc_feature (43)..(43): Xaa can be any naturally occurring amino acid
  misc_feature (58)..(58): Xaa can be any naturally occurring amino acid
  misc_feature (61)..(61): Xaa can be any naturally occurring amino acid
TPIYQSLPGXMQSNTRDGGNWXTEKGDLDQPKKPKAPDNPFMXIVSKCFEPHLYVYIXFQXKNLGG

SEQ ID NO: 1014427 - protein, 139 aa, Homo sapiens
  misc_feature (5)..(5): Xaa can be any naturally occurring amino acid
  misc_feature (14)..(14): Xaa can be any naturally occurring amino acid
  misc_feature (28)..(28): Xaa can be any naturally occurring amino acid
  misc_feature (42)..(42): Xaa can be any naturally occurring amino acid
  misc_feature (89)..(89): Xaa can be any naturally occurring amino acid
  misc_feature (93)..(93): Xaa can be any naturally occurring amino acid
  misc_feature (105)..(105): Xaa can be any naturally occurring amino acid
  misc_feature (116)..(116): Xaa can be any naturally occurring amino acid
  misc_feature (131)..(131): Xaa can be any naturally occurring amino acid
  misc_feature (135)..(135): Xaa can be any naturally occurring amino acid
MLVRXDPGKKSLRXLPLSPTAVSMTPFXHGRRCSDMFVAGIXPTVHSIIRQNDALMRELMGLPGTSQHRTVVMHRTEAHCPAEPGLCSXPRSXAAWVENNERVFXHKQGTYGGYFXDQKDGYRKNEGYIRXGCYXSSSF

SEQ ID NO: 1014428 - protein, 160 aa, Homo sapiens
  misc_feature (13)..(13): Xaa can be any naturally occurring amino acid
  misc_feature (22)..(22): Xaa can be any naturally occurring amino acid
  misc_feature (42)..(42): Xaa can be any naturally occurring amino acid
  misc_feature (148)..(149): Xaa can be any naturally occurring amino acid
  misc_feature (158)..(158): Xaa can be any naturally occurring amino acid
SKIIVKKIWVLAXNARDHVLQXWVQKMGTDIPKGNTGAPSSXSQGHPIMNPHKVLNDFLHVLELKQWLEARFIVKSHIVVGKDRWAFGFGGAIDSESDRAVWCLHRVSLGPSGVCPGNSGFSSVICTSCSPPWWLGSYWLDAVGLGVXXLTPSELWGXSA

SEQ ID NO: 1014429 - protein, 79 aa, Homo sapiens
  misc_feature (31)..(31): Xaa can be any naturally occurring amino acid
  misc_feature (73)..(73): Xaa can be any naturally occurring amino acid
IAAQGAGGGPDLERPEHRPESPPTAAPGAPXPHSPAPSPDLPACPPGTGETQLLGTLDFYMARLHGAIERDPXQHEKLI

SEQ ID NO: 1014430 - protein, 39 aa, Homo sapiens
GTYLGVPRMPVPQMGGGRFAHPALLQLRDPGGGGSFSLL

SEQ ID NO: 1014431 - protein, 125 aa, Homo sapiens
  misc_feature (61)..(61): Xaa can be any naturally occurring amino acid
  misc_feature (78)..(78): Xaa can be any naturally occurring amino acid
  misc_feature (85)..(85): Xaa can be any naturally occurring amino acid
DRVSLCLPGWSCSGAMTAAPPGLTASCLSLLYSREQRCTPPDLAYFLIFCRDEVSLCCPGXSQTPGLKQSSHLGFPKXWDYRHEXLCSAFMFTFLKCMYFFIGDVGSSLCSPGLSSELLGLKGDN

SEQ ID NO: 1014432 - protein, 134 aa, Homo sapiens
  misc_feature (3)..(3): Xaa can be any naturally occurring amino acid
  misc_feature (7)..(7): Xaa can be any naturally occurring amino acid
  misc_feature (84)..(84): Xaa can be any naturally occurring amino acid
  misc_feature (124)..(124): Xaa can be any naturally occurring amino acid
PGXEIVXLCRLKPNSPEVPFQGGRSQGRSSLRGPTDILLAQLRKLWLPVCAQSGFGSQGSWAGGKPSLGHLLGTGQPLHSLDPXDNLVVRLALHVDAVDLDQAVPPAQRGGLGGGTGFHAPDEXARGGPSRRAG

SEQ ID NO: 1014433 - protein, 80 aa, Homo sapiens
  misc_feature (20)..(20): Xaa can be any naturally occurring amino acid
  misc_feature (42)..(42): Xaa can be any naturally occurring amino acid
  misc_feature (61)..(61): Xaa can be any naturally occurring amino acid
  misc_feature (69)..(69): Xaa can be any naturally occurring amino acid
APLVTTLGAQLPPQAPDPLXLRTQATQLPIIPTAQPSLTTTXRSPVSPAHQISVPAATQPXALPTLLAXQSPTNQTSPIS

SEQ ID NO: 1014434 - protein, 83 aa, Homo sapiens
  misc_feature (12)..(12): Xaa can be any naturally occurring amino acid
  misc_feature (69)..(69): Xaa can be any naturally occurring amino acid
  misc_feature (78)..(78): Xaa can be any naturally occurring amino acid
  misc_feature (82)..(82): Xaa can be any naturally occurring amino acid
MQEVGDALGVGXLVHRLRLLGVQQRGGEHRPAHWLWRFRKPAWPGRLSTRPCCRWRLLHRMAGEMPASXSPPSFFYLXMAMXP

SEQ ID NO: 1014435 - protein, 110 aa, Homo sapiens
  misc_feature (1)..(1): Xaa can be any naturally occurring amino acid
  misc_feature (11)..(11): Xaa can be any naturally occurring amino acid
  misc_feature (36)..(36): Xaa can be any naturally occurring amino acid
  misc_feature (44)..(44): Xaa can be any naturally occurring amino acid
  misc_feature (71)..(71): Xaa can be any naturally occurring amino acid
  misc_feature (86)..(86): Xaa can be any naturally occurring amino acid
  misc_feature (88)..(88): Xaa can be any naturally occurring amino acid
  misc_feature (106)..(106): Xaa can be any naturally occurring amino acid
XWFIISFLEKXTTPQYFILNLAGSSVSVKVPTMSGXHVPVIQKXDSALGCGAHLARSRPTENSGTMLSWQXEGLGVLLGHGRTRSXRXEALSKFSLTRKLAAAAEXAAGA

SEQ ID NO: 1014436 - protein, 86 aa, Homo sapiens
  misc_feature (4)..(4): Xaa can be any naturally occurring amino acid
  misc_feature (9)..(9): Xaa can be any naturally occurring amino acid
  misc_feature (37)..(37): Xaa can be any naturally occurring amino acid
  misc_feature (71)..(71): Xaa can be any naturally occurring amino acid
MNPXTWLLXDHDERLHESVFLRGVDHIYTPAACPCQXACPAQCQLSPGTPKPFALGLPSQPVPRTSSSPLXIIKSMDRAVVEVLTQ

SEQ ID NO: 1014437 - protein, 31 aa, Homo sapiens
NLKWERPVLAHNDVEPCESRIRIKGHVCTQK

SEQ ID NO: 1014438 - protein, 51 aa, Homo sapiens
  misc_feature (9)..(9): Xaa can be any naturally occurring amino acid
  misc_feature (23)..(23): Xaa can be any naturally occurring amino acid
  misc_feature (33)..(33): Xaa can be any naturally occurring amino acid
  misc_feature (39)..(39): Xaa can be any naturally occurring amino acid
QALGPPSLXWSLAVWVTSVGSIXPELLSKGPVXSLSQEXPKRQLNDVLFHW

SEQ ID NO: 1014439 - protein, 145 aa, Homo sapiens
  misc_feature (44)..(44): Xaa can be any naturally occurring amino acid
  misc_feature (54)..(54): Xaa can be any naturally occurring amino acid
  misc_feature (58)..(58): Xaa can be any naturally occurring amino acid
  misc_feature (68)..(68): Xaa can be any naturally occurring amino acid
  misc_feature (141)..(141): Xaa can be any naturally occurring amino acid
GTLWQFQEGAESYSLDACHQIPLSSDLSHLVEKVRALRGQLEQXFRGTIVCDSXCNSXEERCWQSTSXPSSINQNFPASTDPGNKQLLLQDSAVSPPVRDVGMNSPALVFPSSASSTSGFRNAHNQQSKWLWVLDNFSSNXRPLP

SEQ ID NO: 1014440 - protein, 133 aa, Homo sapiens
  misc_feature (10)..(10): Xaa can be any naturally occurring amino acid
  misc_feature (23)..(23): Xaa can be any naturally occurring amino acid
  misc_feature (26)..(26): Xaa can be any naturally occurring amino acid
  misc_feature (57)..(57): Xaa can be any naturally occurring amino acid
  misc_feature (100)..(100): Xaa can be any naturally occurring amino acid
  misc_feature (108)..(108): Xaa can be any naturally occurring amino acid
  misc_feature (119)..(119): Xaa can be any naturally occurring amino acid
  misc_feature (121)..(122): Xaa can be any naturally occurring amino acid
  misc_feature (132)..(132): Xaa can be any naturally occurring amino acid
ADWFGVSKDXDSTQKWQRKSIRXCSXRYGKLKPQVLRELDLPSQDNVSLTSTETPIXLYVGPCQLGMQKIIDPAARGRAFRVADDTAGRPECPTHSVTPXAASLCSFXQSRSGFQPAAXAXXHESRWTKMSXP

SEQ ID NO: 1014441 - protein, 103 aa, Homo sapiens
  misc_feature (17)..(17): Xaa can be any naturally occurring amino acid
  misc_feature (27)..(27): Xaa can be any naturally occurring amino acid
  misc_feature (58)..(58): Xaa can be any naturally occurring amino acid
  misc_feature (75)..(75): Xaa can be any naturally occurring amino acid
  misc_feature (79)..(79): Xaa can be any naturally occurring amino acid
  misc_feature (89)..(89): Xaa can be any naturally occurring amino acid
  misc_feature (99)..(99): Xaa can be any naturally occurring amino acid
GLIRVFLEESRVGPGIXSDDTRETGGXTAFHYLHECIGNVGVCLLSAMPLPITLQTRXAKRGILNIWSLEPEEEXIAEXYDDDPVDYEXTRLGGPTTKXGTRC

SEQ ID NO: 1014442 - protein, 103 aa, Homo sapiens
  misc_feature (11)..(11): Xaa can be any naturally occurring amino acid
  misc_feature (42)..(42): Xaa can be any naturally occurring amino acid
  misc_feature (64)..(64): Xaa can be any naturally occurring amino acid
  misc_feature (84)..(84): Xaa can be any naturally occurring amino acid
  misc_feature (91)..(91): Xaa can be any naturally occurring amino acid
MSGELLPSWRXLPYSGCFCLPLAQRAWLKMFVIVFSPPDRFXVPPVVERGHEQCPAQRSGLPQXAGVGCEVHADYPLDHSYQLXIAPCLFXPLSYLCIGFGFL

SEQ ID NO: 1014443 - protein, 61 aa, Homo sapiens
  misc_feature (43)..(43): Xaa can be any naturally occurring amino acid
NPGSCVISPLSQGPTGTGGQPLSEVPYQDDLVGFKLFLPEGPXDHTVSSFQPGDMAAITTK

SEQ ID NO: 1014444 - protein, 129 aa, Homo sapiens
  misc_feature (4)..(4): Xaa can be any naturally occurring amino acid
  misc_feature (69)..(69): Xaa can be any naturally occurring amino acid
  misc_feature (119)..(119): Xaa can be any naturally occurring amino acid
  misc_feature (123)..(123): Xaa can be any naturally occurring amino acid
LKLXAILSPTTGAGASRSSVTVLGCESKAPPWTCRFLPPSTTLARTGGRSFFRPDVVRTGSYPARAMDXGPAHKSGAEDWQCHSYAIMVKFVFRQKSSAGAELHGEPALGQLQKGNVGXGALXAESPLK

SEQ ID NO: 1014445 - protein, 72 aa, Homo sapiens
  misc_feature (3)..(3): Xaa can be any naturally occurring amino acid
  misc_feature (28)..(28): Xaa can be any naturally occurring amino acid
  misc_feature (62)..(62): Xaa can be any naturally occurring amino acid
EKXQASRCCFMRFKERSHPYYIKLQGEXARVDTEAIASYPEDLAKITDEGGYTKQQTFNVGXKVFYMKEGAT

SEQ ID NO: 1014446 - protein, 114 aa, Homo sapiens
  misc_feature (29)..(29): Xaa can be any naturally occurring amino acid
  misc_feature (88)..(88): Xaa can be any naturally occurring amino acid
  misc_feature (102)..(102): Xaa can be any naturally occurring amino acid
GHSANRGHFRIGGPGRPKAPFLPFPASLXGPGINPLPGRTPGQAPSPLCTSQDAEIVRDPGSRKTRFLDIVVEVGGEYDPRRHRYDHXQEMYENFVEEVDAXDNGIFPVGQRGS

SEQ ID NO: 1014447 - protein, 134 aa, Homo sapiens
  misc_feature (10)..(10): Xaa can be any naturally occurring amino acid
  misc_feature (15)..(15): Xaa can be any naturally occurring amino acid
  misc_feature (27)..(27): Xaa can be any naturally occurring amino acid
  misc_feature (130)..(130): Xaa can be any naturally occurring amino acid
RCPRKDQDMXPGTTXFNTNDHDCGQPXTAACAQHCPEGHDLRSLPIRLIPPSPSQAGSFQEGMGVYNPNKIFGRGRPWDIVRGQHLCWQSWKGLDPGSSQRPCHWWAMLGKDHHPPDLSVHPQGGTFPRXSLTA

SEQ ID NO: 1014448 - protein, 72 aa, Homo sapiens
  misc_feature (8)..(9): Xaa can be any naturally occurring amino acid
  misc_feature (25)..(25): Xaa can be any naturally occurring amino acid
  misc_feature (30)..(31): Xaa can be any naturally occurring amino acid
  misc_feature (38)..(38): Xaa can be any naturally occurring amino acid
  misc_feature (43)..(43): Xaa can be any naturally occurring amino acid
  misc_feature (53)..(53): Xaa can be any naturally occurring amino acid
  misc_feature (60)..(60): Xaa can be any naturally occurring amino acid
TWVHLGSXXPTTAPLPLFYLRRPQXLEALXXPFTDAKXGLSPXRHYHVKHVLXVVFSYIXHSALRGSMGCSL

SEQ ID NO: 1014449 - protein, 61 aa, Homo sapiens
  misc_feature (1)..(1): Xaa can be any naturally occurring amino acid
  misc_feature (18)..(18): Xaa can be any naturally occurring amino acid
  misc_feature (29)..(29): Xaa can be any naturally occurring amino acid
  misc_feature (34)..(34): Xaa can be any naturally occurring amino acid
  misc_feature (56)..(56): Xaa can be any naturally occurring amino acid
XGTRTLGETWMRSGWAVXWDLARTWSVLXSTPRXGMAGDLKNPRCEGTTKKFVALXLEGEN

SEQ ID NO: 1014450 - protein, 37 aa, Homo sapiens
GRIQCFKIDTKEFVREIKHPSFGRNVFAISYIPGLLF

SEQ ID NO: 1014451 - protein, 35 aa, Homo sapiens
VLHFGFNNCLGFFDFLNLNASLLNDRCSIFSVEVN

SEQ ID NO: 1014452 - protein, 93 aa, Homo sapiens
  misc_feature (16)..(16): Xaa can be any naturally occurring amino acid
  misc_feature (19)..(19): Xaa can be any naturally occurring amino acid
  misc_feature (61)..(61): Xaa can be any naturally occurring amino acid
DRPGPSLLAVVSLWRXVLXGRLVLGLVSMAGRVCLCQGSAGSGAIGPVEAAIRTKLEEALXPEVLELRNESGGHAVPAGSETHFRVAVVSSRF

SEQ ID NO: 1014453 - protein, 63 aa, Homo sapiens
  misc_feature (62)..(62): Xaa can be any naturally occurring amino acid
MAPGDLAGDRESDRISQGETFVTLTSLGRNGDRSSFIDLVSSGLRVVVNFNGELKSNLNWSXL

SEQ ID NO: 1014454 - protein, 89 aa, Homo sapiens
  misc_feature (3)..(3): Xaa can be any naturally occurring amino acid
  misc_feature (36)..(36): Xaa can be any naturally occurring amino acid
  misc_feature (45)..(45): Xaa can be any naturally occurring amino acid
  misc_feature (52)..(52): Xaa can be any naturally occurring amino acid
FPXRGSGIHRLAFLLFKQGQPIDFSEEARPSPCYQXAQRAFRTFXFYKKHQXTMTPAGLSFFQCRWVCSVTYIFHHSSGSCGSRCLELR

SEQ ID NO: 1014455 - protein, 122 aa, Homo sapiens
  misc_feature (10)..(10): Xaa can be any naturally occurring amino acid
  misc_feature (46)..(46): Xaa can be any naturally occurring amino acid
  misc_feature (113)..(113): Xaa can be any naturally occurring amino acid
  misc_feature (115)..(116): Xaa can be any naturally occurring amino acid
  misc_feature (121)..(121): Xaa can be any naturally occurring amino acid
YEAALRKKLXAVRPNLLVKGHFQQLECAGAQLEPVLQELVHRGLEXDGFSLVSAATGKERTTTCSPTRGSVGIPVKMTRYVVRKTAPSAGSNVVPQHCPPALLTPIRQQVDAXFXXAHTSXP

SEQ ID NO: 1014456 - protein, 45 aa, Homo sapiens
IHCQGFDELLEVWGLGRLLLDQGSPVELRLQKRMQGCMCGTVRSG

SEQ ID NO: 1014457 - protein, 68 aa, Homo sapiens
  misc_feature (33)..(33): Xaa can be any naturally occurring amino acid
  misc_feature (36)..(36): Xaa can be any naturally occurring amino acid
  misc_feature (57)..(58): Xaa can be any naturally occurring amino acid
MLMLSPWRISCLFRPSKDTHAVFLASGDSMIFXLRXAGTTMGRKDSEWGQMGVIMIXXYVGVDHGRSR

SEQ ID NO: 1014458 - protein, 112 aa, Homo sapiens
EAEEKSLETLTRTITETSEQQVSWETIPLIEPISLSLGYKLVALVDKAQGNQLTQRIRGVRQVISDGNGVLLPEIRIRENFRLKPSQYAIFINGIKADEADIPADKLMPCPP

SEQ ID NO: 1014459 - protein, 37 aa, Homo sapiens
PRILILQKRGQVSSATGESREAHSEGSASDHPAAPRA

SEQ ID NO: 1014460 - protein, 35 aa, Homo sapiens
IDKLTEKSQVSEDGTLRSLEPESQSSSAEGSPSEG

SEQ ID NO: 1014461 - protein, 110 aa, Homo sapiens
  misc_feature (2)..(2): Xaa can be any naturally occurring amino acid
  misc_feature (17)..(17): Xaa can be any naturally occurring amino acid
  misc_feature (75)..(75): Xaa can be any naturally occurring amino acid
  misc_feature (83)..(85): Xaa can be any naturally occurring amino acid
  misc_feature (93)..(93): Xaa can be any naturally occurring amino acid
RXIAITAQGQNRTSTHXRKEIRPGLLRDSSGVLPGNGTCWLLRSWELGAPGFPRCEGAVPLGRDRPLSAAPRGSXPPAAGVGXXXRRRRGYNXPRRRGCTAQKNTFGTGA

SEQ ID NO: 1014462 - protein, 66 aa, Homo sapiens
LFRLEDSGPPDAVLHKGHTTSVFPPKVSNRTLVRQMKTEGKIHKNKIHFQNAPVKEAREDRRKDDR

SEQ ID NO: 1014463 - protein, 42 aa, Homo sapiens
FQGDSHLEQPGCTIIVVDENIERRNHYLDLAGIENYTSQFGP

SEQ ID NO: 1014464 - protein, 44 aa, Homo sapiens
CCACPAAQGSEGKRFGSLPPATSRTVPASDAHAHAVANSGVSSD

SEQ ID NO: 1014465 - protein, 138 aa, Homo sapiens
  misc_feature (19)..(19): Xaa can be any naturally occurring amino acid
  misc_feature (35)..(35): Xaa can be any naturally occurring amino acid
  misc_feature (62)..(62): Xaa can be any naturally occurring amino acid
  misc_feature (68)..(68): Xaa can be any naturally occurring amino acid
  misc_feature (112)..(112): Xaa can be any naturally occurring amino acid
  misc_feature (117)..(117): Xaa can be any naturally occurring amino acid
  misc_feature (127)..(127): Xaa can be any naturally occurring amino acid
  misc_feature (135)..(135): Xaa can be any naturally occurring amino acid
ASKNSLGSDHSSVVTPKKXSGKSKSGRSLNEELGXEDSENKRKAAFFFVVADQEHREVPEKXGARGPXQTIALHAQWRPCVVRESQGSVCLCREPGPCRRPAGLWSPEKDKXHQALXAFISRMGTSXRGGLSRRXFSI

SEQ ID NO: 1014466 - protein, 48 aa, Homo sapiens
TWRKNLLFRKPEDTQKRFMTVTWERMLTIDGNTVNAHQMEDTITSKQS

SEQ ID NO: 1014467 - protein, 67 aa, Homo sapiens
  misc_feature (21)..(21): Xaa can be any naturally occurring amino acid
  misc_feature (29)..(29): Xaa can be any naturally occurring amino acid
  misc_feature (31)..(31): Xaa can be any naturally occurring amino acid
  misc_feature (48)..(48): Xaa can be any naturally occurring amino acid
VIILLQHALATANLHHHGHFXCILVPFLXYXAAVCCGICVPRCSLPVXREVINICSMLYRWERGQHY

SEQ ID NO: 1014468 - protein, 33 aa, Homo sapiens
YFIPANKDPPMAKVKAKDFQETGYWGRDFNNKT

SEQ ID NO: 1014469 - protein, 32 aa, Homo sapiens
LPCVKKPVQGLPCQGLKVFGCNKPGTQTCQQP

SEQ ID NO: 1014470 - protein, 30 aa, Homo sapiens
VLQNVQKFAYLVGDYWLETGEQAGKQAEEQ

SEQ ID NO: 1014471 - protein, 84 aa, Homo sapiens
  misc_feature (15)..(15): Xaa can be any naturally occurring amino acid
  misc_feature (20)..(20): Xaa can be any naturally occurring amino acid
  misc_feature (43)..(43): Xaa can be any naturally occurring amino acid
  misc_feature (80)..(80): Xaa can be any naturally occurring amino acid
GMTLFKGSLLGLTSXLGLGXQMQPCPSQLVSGGAMKMLKCPSXPGTVCTSLSSIQGCYRLSQERVEALDDAKWKPQARAXRKGF

SEQ ID NO: 1014472 - protein, 42 aa, Homo sapiens
LLNRKDKTTFEKLDYLMSKEDNYKRTRDYIRSLKMVPSIPYL

SEQ ID NO: 1014473 - protein, 133 aa, Homo sapiens
  misc_feature (6)..(6): Xaa can be any naturally occurring amino acid
  misc_feature (20)..(20): Xaa can be any naturally occurring amino acid
  misc_feature (36)..(36): Xaa can be any naturally occurring amino acid
  misc_feature (43)..(43): Xaa can be any naturally occurring amino acid
  misc_feature (47)..(47): Xaa can be any naturally occurring amino acid
  misc_feature (99)..(99): Xaa can be any naturally occurring amino acid
GSAPAXPPACGQLASSHSPXMPVRLSLGTGRCWSTXNFEVVPXPPSXVQCGPCGKIGQLAEARQRDRVRDGDHMIIRTAEALLGTTSWDFQVGKEFEEXLQGIDDRKCMTTVSWDGDKLQCVQKGEKEGRCLT

SEQ ID NO: 1014474 - protein, 31 aa, Homo sapiens
MYILWALLFAFLAVSLVRVFAPYACGSGIPE

SEQ ID NO: 1014475 - protein, 54 aa, Homo sapiens
QGHNPCFENYCSNDFEDTMGTPGDGKSYSERATQKKWRPDCLTSSSQSELTMRG

SEQ ID NO: 1014476 - protein, 111 aa, Homo sapiens
  misc_feature (12)..(12): Xaa can be any naturally occurring amino acid
  misc_feature (70)..(70): Xaa can be any naturally occurring amino acid
  misc_feature (96)..(96): Xaa can be any naturally occurring amino acid
  misc_feature (110)..(110): Xaa can be any naturally occurring amino acid
RSSCSAQTVSKXWGRRNFHVFREPKDPPRRPRGFHRRTPRPLRHITQRQWANIADPCALSQMGAGPQGVXDTAGSMGSDSASFCSAAKDGQKHCHXSNIKCLKTWQPFSXT

SEQ ID NO: 1014477 - protein, 48 aa, Homo sapiens
RRVSGCILSQGPWTLGPENVYLPAGSAVSGTPQANRDSPRTHLDDYVT

SEQ ID NO: 1014478 - protein, 101 aa, Homo sapiens
  misc_feature (4)..(4): Xaa can be any naturally occurring amino acid
  misc_feature (7)..(7): Xaa can be any naturally occurring amino acid
  misc_feature (101)..(101): Xaa can be any naturally occurring amino acid
PLKXLDXNYRGPGEDAWVPLGALPRGPVRTPPLHWARTTPRAARSVLHHVLRPTFPPNSGAHSLGSQVIRASAVGPGTPWPWGTTCPHMLQTLGQGRPGVX

SEQ ID NO: 1014479 - protein, 105 aa, Homo sapiens
  misc_feature (16)..(16): Xaa can be any naturally occurring amino acid
  misc_feature (22)..(22): Xaa can be any naturally occurring amino acid
  misc_feature (37)..(37): Xaa can be any naturally occurring amino acid
  misc_feature (41)..(41): Xaa can be any naturally occurring amino acid
  misc_feature (44)..(44): Xaa can be any naturally occurring amino acid
  misc_feature (53)..(53): Xaa can be any naturally occurring amino acid
  misc_feature (103)..(103): Xaa can be any naturally occurring amino acid
  misc_feature (105)..(105): Xaa can be any naturally occurring amino acid
MFVGFLGCYGAIQESXSLLGTXFTCLAILFPCQVAAXSGAXSTXSQIAKDVKXFYDQALQQAVVDDDANNAKAVVKTFQETFDCCGSSTMTALTNSLLKITLXSX

SEQ ID NO: 1014480 - protein, 67 aa, Homo sapiens
  misc_feature (1)..(1): Xaa can be any naturally occurring amino acid
  misc_feature (29)..(29): Xaa can be any naturally occurring amino acid
  misc_feature (51)..(51): Xaa can be any naturally occurring amino acid
XLLDIKTRLEQEIATYRSLLEGQDAKMAXIGIREASSGGGGSSSNFHINVXESVDGQVVSSHKKKSK

SEQ ID NO: 1014481 - protein, 33 aa, Homo sapiens
AQEALLQMLQEAQQACWPHNLPVVQAAQQRELE

SEQ ID NO: 1014482 - protein, 91 aa, Homo sapiens
  misc_feature (6)..(6): Xaa can be any naturally occurring amino acid
  misc_feature (20)..(20): Xaa can be any naturally occurring amino acid
  misc_feature (71)..(71): Xaa can be any naturally occurring amino acid
PQELLXIFPHDLNLCGLTEXPRSSGFCDAAPEQCWELNRDWGGGRLQPPPSLWARTLLVFEVQQPFLFVLXDQQHKFPVFMGRVYDPRGLR

SEQ ID NO: 1014483 - protein, 115 aa, Homo sapiens
  misc_feature (10)..(10): Xaa can be any naturally occurring amino acid
  misc_feature (21)..(21): Xaa can be any naturally occurring amino acid
  misc_feature (40)..(40): Xaa can be any naturally occurring amino acid
  misc_feature (84)..(84): Xaa can be any naturally occurring amino acid
  misc_feature (92)..(92): Xaa can be any naturally occurring amino acid
  misc_feature (95)..(95): Xaa can be any naturally occurring amino acid
  misc_feature (106)..(106): Xaa can be any naturally occurring amino acid
  misc_feature (112)..(112): Xaa can be any naturally occurring amino acid
HTGFWGKTRXEIINYEFDTKXPGVPGALSSIVGVLVPAEXSTGIANNLFGPGPSPLMGVELLHLNNVSLGCILLGGLFIYDVFXVFWHQCDXDSXPSSFEGTNKIXVFPGSXLEK

SEQ ID NO: 1014484 - protein, 64 aa, Homo sapiens
WRQCNPLVIQADVLQRELESCLRREYTPENLPLLLLQHYTERITQLVQNKYLHMLRWRRLCQTS

SEQ ID NO: 1014485 - protein, 56 aa, Homo sapiens
MLKDVDTSWTVLASSGFKEQLGRTPALNVFPDLEDGTEDTGQTSTASMHQHVEACA

SEQ ID NO: 1014486 - protein, 38 aa, Homo sapiens
MSGSGRELGEYGLQAYTEVKTFTVKVPQKNSEESCKLS

SEQ ID NO: 1014487 - protein, 71 aa, Homo sapiens
  misc_feature (53)..(53): Xaa can be any naturally occurring amino acid
MGAPPGSGATWGDAFGGARPPADANLSRQTTGFPERKDREMVGHTAGDDGRGXEAPAAGTTSPTTLSGLLK

SEQ ID NO: 1014488 - protein, 57 aa, Homo sapiens
YKAPSFIPGVYDKAKGKNLSVFCFRGSPHCLGSDSICLDSGHLSPPPCPEPCADSFT

SEQ ID NO: 1014489 - protein, 118 aa, Homo sapiens
  misc_feature (2)..(2): Xaa can be any naturally occurring amino acid
  misc_feature (8)..(8): Xaa can be any naturally occurring amino acid
  misc_feature (11)..(11): Xaa can be any naturally occurring amino acid
  misc_feature (28)..(28): Xaa can be any naturally occurring amino acid
  misc_feature (47)..(47): Xaa can be any naturally occurring amino acid
  misc_feature (70)..(70): Xaa can be any naturally occurring amino acid
  misc_feature (113)..(114): Xaa can be any naturally occurring amino acid
GXPGLSPXQSXAAGLAAQDFSVYVHPQXPPGRAGRQSSFLKSRDRKXNLDATAKQRTHFLPGTRFCPLLXLSACPASSALLGRVPLTACPRTRGLSPFPPHRPGGDLFTPKDXXYKMK

SEQ ID NO: 1014490 - protein, 72 aa, Homo sapiens
FDEGRNNFEGEVTKEKLLDFIKHNQLPLVIEFTEQTAPKIFGGEIKTHILLFLPKSVSDYDGKCGNFKKRAE

SEQ ID NO: 1014491 - protein, 127 aa, Homo sapiens
  misc_feature (13)..(13): Xaa can be any naturally occurring amino acid
  misc_feature (21)..(21): Xaa can be any naturally occurring amino acid
  misc_feature (49)..(50): Xaa can be any naturally occurring amino acid
  misc_feature (76)..(76): Xaa can be any naturally occurring amino acid
  misc_feature (80)..(80): Xaa can be any naturally occurring amino acid
GPSSRTGDLYEAXPAVADRLXSSPEWPSRARQTVTSTPAALLKGQYSWXXGEGLESFAHLPFFPPAPTRFECRDPXGLLXFVVGGAEEVPPPLGTAAWECRTVTAVRVMTSLPSSSCSLVLGGRRCV

SEQ ID NO: 1014492 - protein, 38 aa, Homo sapiens
FTVGAKTFKMRKHRHLPLVALFSLLLSGIAMTHAQQQS

SEQ ID NO: 1014493 - protein, 37 aa, Homo sapiens
EKDVMFLIEGSEGVRSGFPLLKEFVQRVVETLDVGLT

SEQ ID NO: 1014494 - protein, 31 aa, Homo sapiens
SLIDGQTLSKESPSHGLELSAPEKASPSNAS

SEQ ID NO: 1014495 - protein, 35 aa, Homo sapiens
ETILGLTGATMGSLICFICPALIYKKAHKNAPSAQ

SEQ ID NO: 1014496 - protein, 46 aa, Homo sapiens
SRADGVFEEDSQIDIATVQDMLSSHHYKSFKVSMIHRLRFTTDVQL

SEQ ID NO: 1014497 - protein, 33 aa, Homo sapiens
FSSAICDSFLICPQGSEWQGVSPRMTQDKRQQQ

SEQ ID NO: 1014498 - protein, 52 aa, Homo sapiens
YWANLKLWFKQKISKEEFDLEAHRLLTQDNVHSHNDFLLAILTRCQIFGFYT

SEQ ID NO: 1014499 - protein, 34 aa, Homo sapiens
MMSRGINKGDTQGLLTFAFRGFDENLTFLISYNV

SEQ ID NO: 1014500 - protein, 67 aa, Homo sapiens
KAVFLARDKHHLSDICHLVRHDVPYLFQKYVKESHGKDIRVVVVGGQVIVSMLRCSTDGRMQSNCFL

SEQ ID NO: 1014501 - protein, 44 aa, Homo sapiens
AGDRSQERGNSMVPPHWVQLLGMQRRLTGDGKAGQGSTSGKITR

SEQ ID NO: 1014502 - protein, 32 aa, Homo sapiens
GVNLFYFCIIIYLYGDLAIYAAAVPFSLMQVT

SEQ ID NO: 1014503 - protein, 58 aa, Homo sapiens
VLEEPAAHTSAPALRRCVRSHLFLRSLLLESQCPILSFTVKSADMMNQCVHMPFHVLT

SEQ ID NO: 1014504 - protein, 32 aa, Homo sapiens
PYDFGGVLTNSNRDIINGDAIHKRNQSHREMH

SEQ ID NO: 1014505 - protein, 73 aa, Homo sapiens
  misc_feature (11)..(12): Xaa can be any naturally occurring amino acid
  misc_feature (34)..(34): Xaa can be any naturally occurring amino acid
IRHRGRPEPHXXAIPTGDAGGFPVGAAALPEPRXGMDFLLCIADTNRRRKYSVEEGGSLAKAPPSSLDTRGPK

SEQ ID NO: 1014506 - protein, 103 aa, Homo sapiens
  misc_feature (8)..(8): Xaa can be any naturally occurring amino acid
  misc_feature (11)..(11): Xaa can be any naturally occurring amino acid
  misc_feature (14)..(14): Xaa can be any naturally occurring amino acid
  misc_feature (19)..(19): Xaa can be any naturally occurring amino acid
  misc_feature (42)..(42): Xaa can be any naturally occurring amino acid
  misc_feature (59)..(59): Xaa can be any naturally occurring amino acid
  misc_feature (69)..(69): Xaa can be any naturally occurring amino acid
HRLGSSSXPEXRFXPHVHXLGKALPFIWGQRQGRHVRPFLQXGPVFGDMNSLPSPPCLXSVDKPGHVWXVNWAPCSHCFLGFKYATRPQEKKSSRDPFPHLSS

SEQ ID NO: 1014507 - protein, 121 aa, Homo sapiens
  misc_feature (13)..(13): Xaa can be any naturally occurring amino acid
  misc_feature (35)..(35): Xaa can be any naturally occurring amino acid
  misc_feature (43)..(43): Xaa can be any naturally occurring amino acid
  misc_feature (83)..(83): Xaa can be any naturally occurring amino acid
  misc_feature (100)..(100): Xaa can be any naturally occurring amino acid
  misc_feature (115)..(115): Xaa can be any naturally occurring amino acid
AANFPGIMTSRVXQAAGWGISARQWDWAALDSWWXPRHPYVRXLPVCRTNGGRYEHQGGIGRRCNPHFGETFAFKVPYVELGXRVLVMAVYDFDRFSRNXAIRGGAGPYELRGPXAASSGL

SEQ ID NO: 1014508 - protein, 90 aa, Homo sapiens
  misc_feature (8)..(8): Xaa can be any naturally occurring amino acid
  misc_feature (12)..(12): Xaa can be any naturally occurring amino acid
  misc_feature (23)..(24): Xaa can be any naturally occurring amino acid
  misc_feature (46)..(46): Xaa can be any naturally occurring amino acid
FGTMAVPXSRGXVERRGKAVQTXXWARMSVVSACVLLTQCLRDLAXTPTGRQDVGPQGEAEELGLRLSEGCTLLSQALRERSSPRDFNRQ

SEQ ID NO: 1014509 - protein, 76 aa, Homo sapiens
  misc_feature (7)..(7): Xaa can be any naturally occurring amino acid
  misc_feature (16)..(16): Xaa can be any naturally occurring amino acid
  misc_feature (19)..(19): Xaa can be any naturally occurring amino acid
  misc_feature (50)..(50): Xaa can be any naturally occurring amino acid
  misc_feature (71)..(71): Xaa can be any naturally occurring amino acid
EPRLSPXEAGGFLTYXNLXSGGELMKSKYSDITIMFEETQVPALLEAGFXMENIRTEVVALVPPADCRYYXFPQMD

SEQ ID NO: 1014510 - protein, 31 aa, Homo sapiens
RIGKRVKALLEEFPDKGFFFAFGAGHFMGNN

SEQ ID NO: 1014511 - protein, 45 aa, Homo sapiens
  misc_feature (33)..(33): Xaa can be any naturally occurring amino acid
  misc_feature (39)..(39): Xaa can be any naturally occurring amino acid
  misc_feature (43)..(43): Xaa can be any naturally occurring amino acid
FYQRQDVARRCLSPSGSSGAPASPACSSPPSSXFMDVNXEPWXLP

SEQ ID NO: 1014512 - protein, 84 aa, Homo sapiens
  misc_feature (33)..(33): Xaa can be any naturally occurring amino acid
  misc_feature (66)..(66): Xaa can be any naturally occurring amino acid
MAVCLGVGGPRKALQDPGEYLSLSLQTSSFSFXSLLNYRNIWKNLLILGFTNFIAHAIRHCYQPVXEMREPIGLLPVLSAGQRT

SEQ ID NO: 1014513 - protein, 111 aa, Homo sapiens
  misc_feature (92)..(92): Xaa can be any naturally occurring amino acid
MEFQLLSPMLEFNGTILALCNLQPSPSRLKRFSCLSLPSSWASKYLPPHPANFVFLVGTGFHCVGQAGLKLLTSGDPPASASQSAGITGVTXTPGHESTSLLDVVSEILRM

SEQ ID NO: 1014514 - protein, 86 aa, Homo sapiens
  misc_feature (11)..(11): Xaa can be any naturally occurring amino acid
  misc_feature (38)..(39): Xaa can be any naturally occurring amino acid
  misc_feature (53)..(53): Xaa can be any naturally occurring amino acid
  misc_feature (69)..(69): Xaa can be any naturally occurring amino acid
  misc_feature (73)..(73): Xaa can be any naturally occurring amino acid
NLAKLKAYLAXLTQSGLLVYYAKACWLPIGRGYSSLRXXRAHRRLLREYVTLXKGCFYGRCLGFQVRPXIRPXLQTISMGLVSSGS

SEQ ID NO: 1014515 - protein, 103 aa, Homo sapiens
  misc_feature (2)..(2): Xaa can be any naturally occurring amino acid
  misc_feature (8)..(8): Xaa can be any naturally occurring amino acid
  misc_feature (17)..(17): Xaa can be any naturally occurring amino acid
  misc_feature (29)..(29): Xaa can be any naturally occurring amino acid
  misc_feature (32)..(32): Xaa can be any naturally occurring amino acid
  misc_feature (39)..(39): Xaa can be any naturally occurring amino acid
  misc_feature (51)..(51): Xaa can be any naturally occurring amino acid
  misc_feature (72)..(72): Xaa can be any naturally occurring amino acid
  misc_feature (82)..(82): Xaa can be any naturally occurring amino acid
  misc_feature (93)..(93): Xaa can be any naturally occurring amino acid
  misc_feature (97)..(97): Xaa can be any naturally occurring amino acid
VXHDVVDXKPSSSLPQXAGTAEGPQPKKXGAXPPTSSQXTFLRTLAPVQAXIPPPTSIWGLASHPTGCTVRXRTLSPSTGLXLELQWGPRVLXTQQXPGRYSH

SEQ ID NO: 1014516 - protein, 69 aa, Homo sapiens
  misc_feature (56)..(58): Xaa can be any naturally occurring amino acid
  misc_feature (66)..(66): Xaa can be any naturally occurring amino acid
MVEKVDKGNSEQATVFSFPAAAQDPAAHCEILPNHPLVGFGIWSPGTHGQFPTSKXXXKGTLRVNXVRY

SEQ ID NO: 1014517 - protein, 128 aa, Homo sapiens
  misc_feature (7)..(8): Xaa can be any naturally occurring amino acid
  misc_feature (46)..(47): Xaa can be any naturally occurring amino acid
  misc_feature (49)..(49): Xaa can be any naturally occurring amino acid
  misc_feature (98)..(98): Xaa can be any naturally occurring amino acid
ESMIRMXXPTLRIHLRDYVIEDDVNMAIRVMLESFIDTQKFSVMRXXKXLLPATFQFRRDNNELLLFILKQLVAEQVTYQRNRFGAQQDTIEVPEKDXVDKARQINIHNLSAFYDSELFRMNKVSATT

SEQ ID NO: 1014518 - protein, 124 aa, Homo sapiens
  misc_feature (15)..(15): Xaa can be any naturally occurring amino acid
  misc_feature (20)..(20): Xaa can be any naturally occurring amino acid
  misc_feature (27)..(27): Xaa can be any naturally occurring amino acid
  misc_feature (31)..(31): Xaa can be any naturally occurring amino acid
  misc_feature (42)..(42): Xaa can be any naturally occurring amino acid
  misc_feature (56)..(56): Xaa can be any naturally occurring amino acid
  misc_feature (90)..(91): Xaa can be any naturally occurring amino acid
  misc_feature (101)..(101): Xaa can be any naturally occurring amino acid
GCDCAPAQLPPPPPXLPPPXCALHRPXPSRXLLLGSEANLTXHTDRPEEMPLVPPXTWDGPQVGRGAVQGPPEAVTSVGCYSVSSVLPGXXPAMEPWGDLXLHCCPPRVEDPTNRQHYKIRKHI

SEQ ID NO: 1014519 - protein, 44 aa, Homo sapiens
  misc_feature (6)..(6): Xaa can be any naturally occurring amino acid
  misc_feature (25)..(25): Xaa can be any naturally occurring amino acid
  misc_feature (36)..(36): Xaa can be any naturally occurring amino acid
PGLPPXLRALPPPTLEEEAASSGLXAGLPALFLPSXQWCVVSSV

SEQ ID NO: 1014520 - protein, 114 aa, Homo sapiens
  misc_feature (9)..(9): Xaa can be any naturally occurring amino acid
  misc_feature (15)..(15): Xaa can be any naturally occurring amino acid
  misc_feature (111)..(111): Xaa can be any naturally occurring amino acid
GSTEFQCKXPESLCXVSSKHTDFFLHAMQPLPQGMGEKWHQQFKTVFCTLFSASFSDMKLKPGTLITHLIFDSYQGAFCEDSCSIWWNKLGGVMISGGLLFGPSCSVSILXIYY

SEQ ID NO: 1014521 - protein, 30 aa, Homo sapiens
  misc_feature (13)..(13): Xaa can be any naturally occurring amino acid
IRNEEGLKSGNVXFKYGRDKKNLKELVEYR

SEQ ID NO: 1014522 - protein, 61 aa, Homo sapiens
  misc_feature (8)..(8): Xaa can be any naturally occurring amino acid
  misc_feature (15)..(15): Xaa can be any naturally occurring amino acid
  misc_feature (19)..(19): Xaa can be any naturally occurring amino acid
  misc_feature (52)..(52): Xaa can be any naturally occurring amino acid
  misc_feature (57)..(57): Xaa can be any naturally occurring amino acid
  misc_feature (61)..(61): Xaa can be any naturally occurring amino acid
LSAGTSPXPGKPRDXCQDXFSLSVRGFTPARQAQGIDAETASPSQCRDVTPXRQAQXTQAX

SEQ ID NO: 1014523 - protein, 30 aa, Homo sapiens
  misc_feature (1)..(1): Xaa can be any naturally occurring amino acid
XDGAGSDLETGATAPTPSTSAPSHPGPPQR

SEQ ID NO: 1014524 - protein, 91 aa, Homo sapiens
  misc_feature (4)..(4): Xaa can be any naturally occurring amino acid
  misc_feature (30)..(30): Xaa can be any naturally occurring amino acid
  misc_feature (68)..(69): Xaa can be any naturally occurring amino acid
NPKXCPLVEPRWPLPLENPCLVVLESLLKXPAMANEANLLPLESVYRLLVRYCIVCLLSQEAERLNYXXPPWILPEIARNTQLGSSHTIPG

SEQ ID NO: 1014525 - protein, 38 aa, Homo sapiens
  misc_feature (2)..(2): Xaa can be any naturally occurring amino acid
QXTWRQVQKIEADSRTLWAHCWCPLLQGIACLCCDARR

SEQ ID NO: 1014526 - protein, 112 aa, Homo sapiens
  misc_feature (21)..(22): Xaa can be any naturally occurring amino acid
  misc_feature (27)..(27): Xaa can be any naturally occurring amino acid
  misc_feature (29)..(29): Xaa can be any naturally occurring amino acid
  misc_feature (45)..(45): Xaa can be any naturally occurring amino acid
DLLTSCSARLSFPSAEIAGLXXRPAGXLXFFKKKCIYLVCFRWGXPYVAQAGLKLVGSNDPPASASQSVGITRESTWALFHFFRDKVLLCHPHWECSGCVHYSLNLLGAQVI

SEQ ID NO: 1014527 - protein, 70 aa, Homo sapiens
MTGLALLYSGVFVAFWAALLAVGVCYTIFDLGFRFDVAWFLTETSPFMWSNLGIGLAISLSVVGAAWGIY

SEQ ID NO: 1014528 - protein, 104 aa, Homo sapiens
  misc_feature (52)..(52): Xaa can be any naturally occurring amino acid
  misc_feature (56)..(56): Xaa can be any naturally occurring amino acid
  misc_feature (104)..(104): Xaa can be any naturally occurring amino acid
GRIDDTGPGHGDEAGWRHRLPFGVLAVKGLGDDAAARAFAKRRGVERRRRRXGGVXTANSVIAVGKSGGEFQRRVDAGMPRRRDHPGRFARFEPPLRVRSSSPX

SEQ ID NO: 1014529 - protein, 129 aa, Homo sapiens
  misc_feature (101)..(101): Xaa can be any naturally occurring amino acid
  misc_feature (109)..(109): Xaa can be any naturally occurring amino acid
  misc_feature (119)..(119): Xaa can be any naturally occurring amino acid
EKQPLKEFTGRARWLTPVVLVLWEAEAGGLLELGSSRPTWSTWRNPIYTKNLQGVVVRACGLSLLGCWDYRHLPPHLANFCIFSRDGGEQRGSAPWLAGPXRRLPQESXGRPREEPSTXMPNVGKGTSN

SEQ ID NO: 1014530 - protein, 119 aa, Homo sapiens
  misc_feature (77)..(77): Xaa can be any naturally occurring amino acid
  misc_feature (118)..(118): Xaa can be any naturally occurring amino acid
VTNLKWERRITARALAGVDPSLLELTALRVPAGPGIGQGSWGLPTHLVSSLLFFPGPCCLLSRTPEPDFSRPPGQGXLFPNSWPLAALVSAGFQPPPQPLLGGPEKRVRPCDHVQDKXP

SEQ ID NO: 1014531 - protein, 67 aa, Homo sapiens
  misc_feature (41)..(41): Xaa can be any naturally occurring amino acid
  misc_feature (55)..(55): Xaa can be any naturally occurring amino acid
  misc_feature (66)..(66): Xaa can be any naturally occurring amino acid
MSETKWLLVEHPMLSASLSVTFTLYFVSNLGIKVTINKLKXISLRKNARITVSVXPHSLRNRCTPXF

SEQ ID NO: 1014532 - protein, 146 aa, Homo sapiens
  misc_feature (6)..(6): Xaa can be any naturally occurring amino acid
  misc_feature (13)..(13): Xaa can be any naturally occurring amino acid
  misc_feature (15)..(15): Xaa can be any naturally occurring amino acid
  misc_feature (21)..(21): Xaa can be any naturally occurring amino acid
  misc_feature (28)..(28): Xaa can be any naturally occurring amino acid
  misc_feature (30)..(30): Xaa can be any naturally occurring amino acid
  misc_feature (38)..(38): Xaa can be any naturally occurring amino acid
  misc_feature (54)..(54): Xaa can be any naturally occurring amino acid
  misc_feature (136)..(136): Xaa can be any naturally occurring amino acid
  misc_feature (145)..(145): Xaa can be any naturally occurring amino acid
GFYQLXVFAENIXLXQNFWKXLYGVYYXQXVFVCVHLXTMCVHMCLAGKGHIRXSPCCWEGRLTGLTVPRPQAQWRAGRGCIPLTATLPGGLVALTGPDLQGAESNRKHAETRQLFLCCVSYLERVLCPAMSLMYXAGAVLRLVXS

SEQ ID NO: 1014533 - protein, 102 aa, Homo sapiens
  misc_feature (7)..(7): Xaa can be any naturally occurring amino acid
  misc_feature (85)..(85): Xaa can be any naturally occurring amino acid
  misc_feature (99)..(99): Xaa can be any naturally occurring amino acid
GGSKRVXVEMLPLPPRAALHSGRDPGLKRFKDGGRIGREFSSGPKYEVGIRCEARLGRCSSAAGGSPGPPSLRGAATDRAALSRXELRASLLAALGLKXVTA

SEQ ID NO: 1014534 - protein, 39 aa, Homo sapiens
  misc_feature (14)..(14): Xaa can be any naturally occurring amino acid
  misc_feature (28)..(28): Xaa can be any naturally occurring amino acid
MCKVALASRLHACXCVCGLDSQGHETGXGPALTPYALGR

SEQ ID NO: 1014535 - protein, 46 aa, Homo sapiens
  misc_feature (14)..(14): Xaa can be any naturally occurring amino acid
  misc_feature (34)..(34): Xaa can be any naturally occurring amino acid
  misc_feature (40)..(40): Xaa can be any naturally occurring amino acid
DILQPKGDDVARIXWYLRDIITRYQATFNVIERXPKPVIXAVHGCC

SEQ ID NO: 1014536 - protein, 33 aa, Homo sapiens
RRAPIGSSAGDAIWSRVSLVLHCGLSALENSLP

SEQ ID NO: 1014537 - protein, 47 aa, Homo sapiens
MNSGFYVQISPGLWRASQCLLRDSIEGVLFVFLLAPGMKYRVLGPLY

SEQ ID NO: 1014538 - protein, 38 aa, Homo sapiens
MEALSLLFQHYACLLAAMFSAMMIMNGPPSETVMKQAP

SEQ ID NO: 1014539 - protein, 31 aa, Homo sapiens
PPEDQWKVDSKEWASEDPFSVTKVTPRNTVN

SEQ ID NO: 1014540 - protein, 30 aa, Homo sapiens
VLFHPNSGAAGEYGGLQTVRLDHHKAFYIT

SEQ ID NO: 1014541 - protein, 61 aa, Homo sapiens
RILLNYAVYNPDIGYSQGMSDLVAPILAEVLDESDTFWCFVGLMQNTIFVSSPRDETWRDS

SEQ ID NO: 1014542 - protein, 49 aa, Homo sapiens
VVKVKPNDKDAKMKYQECSKIVKQKAFERAIAGDEHRRSVVDSLDIESM

SEQ ID NO: 1014543 - protein, 30 aa, Homo sapiens
MKLYHQWLSTVRAKDHAKMGIKEVKNRLKQ

SEQ ID NO: 1014544 - protein, 71 aa, Homo sapiens
MLTDMMKGNVTNVLPMILIGGWINMTFSGFVTTKVPFPLTLRFKPMLQQGIELLTLDASWVSSASWYFLNV

SEQ ID NO: 1014545 - protein, 51 aa, Homo sapiens
LLDEGLPDRPGLSKWCPFMGARIQVKGSLEQRLENVELAGGHLSTLKAIPV

SEQ ID NO: 1014546 - protein, 43 aa, Homo sapiens
ISRLTNMDPPRKIPPGCYDCGDGFYNPTTRVIKDYLNRFLRNA

SEQ ID NO: 1014547 - protein, 60 aa, Homo sapiens
HSLFTVFSQFGLLYSVRVFPNAAVARPGFYAIIKFYSSRDAQRAQKACDGKPLFQTSPVK

SEQ ID NO: 1014548 - protein, 48 aa, Homo sapiens
MPCHRQNPLCAKLHMEYKQVMADLSTLENENTEALDKFKELDKESLFY

SEQ ID NO: 1014549 - protein, 43 aa, Homo sapiens
MVSCEELLAVGGLDGGRVTLFGHWTRAMEGCLCPQWMVLHPCE

SEQ ID NO: 1014550 - protein, 41 aa, Homo sapiens
LKEGLAKGEGAFRAVLCCMQLQGKLQLVSSILAKSLSGESL

SEQ ID NO: 1014551 - protein, 69 aa, Homo sapiens
VTIPWLELGMKSSKISEQKAFCSTWRTKDGEPAYREPGLLLPRASLLPSQVLLLGTIFPRHQGRPGGRS

SEQ ID NO: 1014552 - protein, 53 aa, Homo sapiens
KCWALGLPHDPSASPQAVSSPRTTPPLLTPPAGAPAPALEGLGHRHSSLISGW

SEQ ID NO: 1014553 - protein, 36 aa, Homo sapiens
SSPRTTFPSVACAPKQPLFRLLHLGFLPGILEDLGY

SEQ ID NO: 1014554 - protein, 34 aa, Homo sapiens
VKRQLPVKNSDYFQDIRQWGGQREVTTESSHYLN

SEQ ID NO: 1014555 - protein, 112 aa, Homo sapiens
  misc_feature (7)..(8): Xaa can be any naturally occurring amino acid
  misc_feature (31)..(31): Xaa can be any naturally occurring amino acid
  misc_feature (43)..(43): Xaa can be any naturally occurring amino acid
  misc_feature (61)..(61): Xaa can be any naturally occurring amino acid
  misc_feature (97)..(97): Xaa can be any naturally occurring amino acid
QEPQGRXXHGAQRIWSGLEAPLPQGLAAALXATWFNQPARKIXIRKARQAKARRILPRAPXRVPIRPIVRCPTVRYHTKVRAGRAFSLGGAQGGRHXQEGGPDHRHFCGSEE

SEQ ID NO: 1014556 - protein, 72 aa, Homo sapiens
  misc_feature (11)..(11): Xaa can be any naturally occurring amino acid
  misc_feature (42)..(42): Xaa can be any naturally occurring amino acid
  misc_feature (65)..(65): Xaa can be any naturally occurring amino acid
MLSTHRCDWFXKGLAHLFLGFTTLSSFLPSQICAHCFQLFIXKKALSNSFQIKKDQLVYTQHLWXMPPVPGP

SEQ ID NO: 1014557 - protein, 55 aa, Homo sapiens
  misc_feature (2)..(2): Xaa can be any naturally occurring amino acid
  misc_feature (10)..(10): Xaa can be any naturally occurring amino acid
  misc_feature (13)..(13): Xaa can be any naturally occurring amino acid
  misc_feature (39)..(39): Xaa can be any naturally occurring amino acid
  misc_feature (45)..(45): Xaa can be any naturally occurring amino acid
  misc_feature (52)..(52): Xaa can be any naturally occurring amino acid
LXLVHGPWGXGEXTQNIGLGSSCPCRSGQERQVEQLQHXPPGMRXGSSRLVXGGT

SEQ ID NO: 1014558 - protein, 114 aa, Homo sapiens
  misc_feature (14)..(14): Xaa can be any naturally occurring amino acid
  misc_feature (61)..(61): Xaa can be any naturally occurring amino acid
MVSLCHLGCSAYAXWMPWPLRLKLSSFRASQVAETTGMCHQARLIFKYLWRRGLTMLPGLXLLGSSDPPASGSQNAGITGVTHRAQPMIHFLKKTALLRYNSHTITHHPFKVYS

SEQ ID NO: 1014559 - protein, 81 aa, Homo sapiens
  misc_feature (14)..(14): Xaa can be any naturally occurring amino acid
  misc_feature (63)..(63): Xaa can be any naturally occurring amino acid
AQERTQIASDLGPXLLGHEGNSGRLLLRLFTVYPSTKVYFPHLSACQDATQLLSHGQRMLAAXGAAVQHVDNLRAAGARWR

SEQ ID NO: 1014560 - protein, 108 aa, Homo sapiens
MTVFLPFKPWNPLCWFAGLCGVLTQPELRLLPQLFGKRERQSLFLRSMGRCIEMPFVVLAVVLSHEGIELHFGHSGFGDGHKSEERFHYFFLSSFFLRQHLALFPRLE

SEQ ID NO: 1014561 - protein, 115 aa, Homo sapiens
  misc_feature (3)..(3): Xaa can be any naturally occurring amino acid
  misc_feature (29)..(29): Xaa can be any naturally occurring amino acid
  misc_feature (66)..(66): Xaa can be any naturally occurring amino acid
  misc_feature (101)..(101): Xaa can be any naturally occurring amino acid
IRXRPLPPFLRHQSGDFRETRAQLAWQVXCLPDEPLLILALLAWVALADQESCKGRCTEGFNVDKXCQCDELCSYYQSCCTDYTAECKPQVTRGDVFTMPXEEYTVYERLGEEKN

SEQ ID NO: 1014562 - protein, 69 aa, Homo sapiens
TGEVVMGVYSVSFTGYVFIPADSLMPKHPIHYQVSLLIGNSFTLAVPLWFLSDLHLVYSCQDSHSLGDP

SEQ ID NO: 1014563 - protein, 133 aa, Homo sapiens
  misc_feature (87)..(87): Xaa can be any naturally occurring amino acid
  misc_feature (120)..(120): Xaa can be any naturally occurring amino acid
  misc_feature (132)..(132): Xaa can be any naturally occurring amino acid
QLSFSYICGFGERIIPGMIFREPESRKLKGPEIRAARSRQRTPISQTLSQSEQGTKGSLEVAPAQKLQRASCSGHEVMPCFLPIPNXAPGPPMSPMCPSPNSIPTHFFFFFFEMGVFNSXCPGLGVAVGKVXQ

SEQ ID NO: 1014564 - protein, 40 aa, Homo sapiens
  misc_feature (31)..(31): Xaa can be any naturally occurring amino acid
MCFRKKTTEHNILKFFGYCNDVDRELRKCLXNEVLALSPK

SEQ ID NO: 1014565 - protein, 146 aa, Homo sapiens
  misc_feature (10)..(10): Xaa can be any naturally occurring amino acid
  misc_feature (36)..(36): Xaa can be any naturally occurring amino acid
  misc_feature (45)..(45): Xaa can be any naturally occurring amino acid
  misc_feature (143)..(146): Xaa can be any naturally occurring amino acid
LPSPIGPPGXGKGKYPPGFSPWEFPWLRSQDATRKXPSLRAPFPXGIFIHPKSGKILDRSLLAPAFGGGVCWGGVFLPGIPSHLGKVCRFLVNSRVFTFQWLEPVIQRSHKSQRQTFPSVFESENLCKDQQAQSRRTEVNSCXXXX

SEQ ID NO: 1014566 - protein, 71 aa, Homo sapiens
  misc_feature (1)..(1): Xaa can be any naturally occurring amino acid
  misc_feature (50)..(50): Xaa can be any naturally occurring amino acid
  misc_feature (54)..(54): Xaa can be any naturally occurring amino acid
  misc_feature (57)..(57): Xaa can be any naturally occurring amino acid
XAWNPCQSLTTSSFDDVGVLQKKLVPFLTELNMHLGPGIREAERMDPGGXWSSXQAXAAGLNFLVHTNEVI

SEQ ID NO: 1014567 - protein, 86 aa, Homo sapiens
  misc_feature (7)..(7): Xaa can be any naturally occurring amino acid
  misc_feature (19)..(19): Xaa can be any naturally occurring amino acid
  misc_feature (26)..(26): Xaa can be any naturally occurring amino acid
  misc_feature (31)..(31): Xaa can be any naturally occurring amino acid
  misc_feature (69)..(69): Xaa can be any naturally occurring amino acid
PAEALVXVVPLHVPTCLSXWSPTPRXPERPXCVLFPSMYSRVCPDGLLPPVPLRGPGVCCSPPCTHVFXCAVFECVCCVCMCVRVL

SEQ ID NO: 1014568 - protein, 127 aa, Homo sapiens
  misc_feature (6)..(6): Xaa can be any naturally occurring amino acid
  misc_feature (13)..(13): Xaa can be any naturally occurring amino acid
  misc_feature (32)..(32): Xaa can be any naturally occurring amino acid
LLCPPXPTPTNLXPWCQRKPPDPKLPHSRPSXGRCEVEACGMRVPHRSWLLELGRNRECGLAGYIVKQRARGGGGRCTEKSRDGNLGIRKQKTKDRQIDTDRGCLLLAGFPVPNVPRSRPHESFLFL

SEQ ID NO: 1014569 - protein, 71 aa, Homo sapiens
  misc_feature (19)..(19): Xaa can be any naturally occurring amino acid
RNHKVGKIENYPWPNMVKXLSLLEIQGLAGYGGARLWSRLLGRLRQENHLNREAEVAVADIAPLHSSLVTE

SEQ ID NO: 1014570 - protein, 80 aa, Homo sapiens
  misc_feature (8)..(8): Xaa can be any naturally occurring amino acid
  misc_feature (14)..(14): Xaa can be any naturally occurring amino acid
  misc_feature (16)..(16): Xaa can be any naturally occurring amino acid
  misc_feature (58)..(58): Xaa can be any naturally occurring amino acid
  misc_feature (68)..(68): Xaa can be any naturally occurring amino acid
  misc_feature (74)..(74): Xaa can be any naturally occurring amino acid
LPPRFTPXPPASAXPXYRDLQAPAHYAPAKFFVFLSRDRGFHPFVARDGPRSSLTLVXPPRLGLPKVXGITGVXHELLHE

SEQ ID NO: 1014571 - protein, 133 aa, Homo sapiens
  misc_feature (4)..(4): Xaa can be any naturally occurring amino acid
  misc_feature (8)..(8): Xaa can be any naturally occurring amino acid
  misc_feature (49)..(49): Xaa can be any naturally occurring amino acid
  misc_feature (62)..(62): Xaa can be any naturally occurring amino acid
  misc_feature (88)..(88): Xaa can be any naturally occurring amino acid
  misc_feature (92)..(92): Xaa can be any naturally occurring amino acid
SPPXNGFXPTDINDSPFGTLPGSAEPPLTAVRPEGSEPPGFPTSGPRRXRAVHARTAPAATXVWARQAAGVAGLVTQKAQVPYPASPXASPXWAWRWCCGQCLGPAGPPADTRACFSSQVCVTYGVCFHAVQA

SEQ ID NO: 1014572 - protein, 81 aa, Homo sapiens
  misc_feature (8)..(8): Xaa can be any naturally occurring amino acid
  misc_feature (15)..(15): Xaa can be any naturally occurring amino acid
  misc_feature (24)..(24): Xaa can be any naturally occurring amino acid
LLHFFRNXFLPNYSXVWRKLQLEXRKLGVTAHAYVVDCSNREEIYRSLNQVRLQVHKFLQIILFPEDADVENEKGLYDCLI

SEQ ID NO: 1014573 - protein, 112 aa, Homo sapiens
  misc_feature (100)..(100): Xaa can be any naturally occurring amino acid
LCTPCSSAEHGLLCVPSMAVSKRRLGRNRGGQPPPRHPHSQQDCSFKGVVGLGQNMGFRVAAGGPRHCLGDGSLRVALRGGPGPWEEGVWGLLRGFSERXRGQVYTGQALFL

SEQ ID NO: 1014574 - protein, 39 aa, Homo sapiens
  misc_feature (5)..(5): Xaa can be any naturally occurring amino acid
  misc_feature (7)..(7): Xaa can be any naturally occurring amino acid
  misc_feature (14)..(14): Xaa can be any naturally occurring amino acid
  misc_feature (24)..(24): Xaa can be any naturally occurring amino acid
  misc_feature (28)..(28): Xaa can be any naturally occurring amino acid
EAIEXLXALGFPEXLVIQAYFACXKNEXLAANFLLSQNF

SEQ ID NO: 1014575 - protein, 102 aa, Homo sapiens
SLGNSRALHMPDHPYTTTADALLILHFLAGGKQHKTSAINKTTTKDPHRVHFTLLPPPPEQVLLSTAKRPEDGSHHRTLCRHPQVPAWEPGSSAGWLDPEEK

SEQ ID NO: 1014576 - protein, 41 aa, Homo sapiens
  misc_feature (20)..(20): Xaa can be any naturally occurring amino acid
  misc_feature (34)..(34): Xaa can be any naturally occurring amino acid
KRREKKAAEGCKGQGPGEVXPKVALRGAPPTLWXSQIKAFR

SEQ ID NO: 1014577 - protein, 108 aa, Homo sapiens
  misc_feature (88)..(88): Xaa can be any naturally occurring amino acid
MESLSPRLECSGMIWAQCNLHFLGSSDYSASASRIAGTTGTHHHTRLIFVFLVETEFRHIGQAGLELLTIVDLLALAAQSAGITGVTXMPGNNFYLSINLFLNKKLKN

SEQ ID NO: 1014578 - protein, 89 aa, Homo sapiens
  misc_feature (15)..(15): Xaa can be any naturally occurring amino acid
  misc_feature (22)..(22): Xaa can be any naturally occurring amino acid
AAADSGHSRGLSRQXLDHVWTXTHYVGAAIPGSGYPNTLHWVDEAGKVGEQLPLEDPDVYCPLQRHRNVTGELVYAHYGRPEDLQDLRA

SEQ ID NO: 1014579 - protein, 75 aa, Homo sapiens
  misc_feature (33)..(33): Xaa can be any naturally occurring amino acid
  misc_feature (64)..(64): Xaa can be any naturally occurring amino acid
  misc_feature (74)..(74): Xaa can be any naturally occurring amino acid
HINEVVLLDDPVVGVLRLADESGHVVIRWLPPXETPMTSHIRYEVDVSAGNASGAVQRVEILEXRTECVLSNLXG

SEQ ID NO: 1014580 - protein, 73 aa, Homo sapiens
  misc_feature (9)..(9): Xaa can be any naturally occurring amino acid
GKVGAGDPXAAYGGPAPAPASEFPQYLSIIIGHFWESGMWQDNRVIVGRGSAGKHVNKCLCIINKLEKKVLCF

SEQ ID NO: 1014581 - protein, 70 aa, Homo sapiens
  misc_feature (14)..(14): Xaa can be any naturally occurring amino acid
  misc_feature (31)..(31): Xaa can be any naturally occurring amino acid
  misc_feature (59)..(59): Xaa can be any naturally occurring amino acid
AGAFDLKAAVLEAXPAFRRAGADIILPYYTXAAAAVAEGGMMETVPGPRTRTLKRSRGXRQVKTKVNAAF

SEQ ID NO: 1014582 - protein, 109 aa, Homo sapiens
  misc_feature (9)..(9): Xaa can be any naturally occurring amino acid
PEARRIALXPPKFEVPVLSNHNKTPVLLKKKNGLGRGLSRPVIPSSLGGPRWVDHEVRSLRPSLTQHGETLSLLKIQKLAQVWWRVSVIPATQEAKAGKSLEPRRRRLQ

SEQ ID NO: 1014583 - protein, 127 aa, Homo sapiens
IRQSLALSPRLECSGPSRLTANLHLSRNSPASASRIAGTTGICHHTQLIFVFLVETGFYHVSEAGLKLLTLVDPPASTSQIPGITGVSRCVRPAYRFFNVKGTSRDYLGGQKGSLRYIGWGYLSGDH

SEQ ID NO: 1014584 - protein, 30 aa, Homo sapiens
  misc_feature (20)..(20): Xaa can be any naturally occurring amino acid
MARAWEVEVAVNHDSATALXAWATERDPVS

SEQ ID NO: 1014585 - protein, 70 aa, Homo sapiens
  misc_feature (3)..(3): Xaa can be any naturally occurring amino acid
  misc_feature (19)..(19): Xaa can be any naturally occurring amino acid
  misc_feature (43)..(43): Xaa can be any naturally occurring amino acid
  misc_feature (69)..(69): Xaa can be any naturally occurring amino acid
DKXSLLPRLERRGTITTHXRFNLLGSNDPSTSASHVAGTIGAXHHTQLIKKIFLCGVYVAQAGLLTPRXK

SEQ ID NO: 1014586 - protein, 64 aa, Homo sapiens
  misc_feature (6)..(7): Xaa can be any naturally occurring amino acid
PNMVTXXPCCSHQVYPRGDCHGTVTALRRTVPPAVPGVTFLSGGQSEEEASFNLNAINRCPLPR

SEQ ID NO: 1014587 - protein, 108 aa, Homo sapiens
  misc_feature (98)..(98): Xaa can be any naturally occurring amino acid
GALGVRLSSTWLDMVGTLAPSKREREPKLSVLQMDRKEPGHSSACSRPEREKVKLLTLKARESRLHSVCGSHGFKQPRQGGTVLRELVLSCLMESCLXELKPYFTLPK

SEQ ID NO: 1014588 - protein, 73 aa, Homo sapiens
IRHSGTVQDMMLLREYRQLQEQQSLLPSLSPQPSPLSSKKQPEDKAPLFYYLLKGWNVRNKLHQNPSPPAPVF

SEQ ID NO: 1014589 - protein, 75 aa, Homo sapiens
  misc_feature (3)..(3): Xaa can be any naturally occurring amino acid
  misc_feature (17)..(17): Xaa can be any naturally occurring amino acid
  misc_feature (26)..(26): Xaa can be any naturally occurring amino acid
  misc_feature (64)..(64): Xaa can be any naturally occurring amino acid
GPXIGPRRRAIIGAPQXLPMVPCIDXPGLPPLPTDGEGQDFPGIPISKVSPQPPITTTVWPKCXCHACNPSTLRG

SEQ ID NO: 1014590 - protein, 69 aa, Homo sapiens
  misc_feature (39)..(39): Xaa can be any naturally occurring amino acid
STTHYPLMVKGQDFPGIPPSAKVLTHSPPNNNYSLAQVXVVTPCNPSTLEAEAGRSRGQEFESIPGPTW

SEQ ID NO: 1014591 - protein, 123 aa, Homo sapiens
FRHRGQWNESSPRSQAINSVLFMGKTNPFEGNAVPIKVSNKSHLRDMAHEHAVRMISSPPAMCLVLSWVQATTRLMKWCPCSNSGTELEQIHFNTMWDIWGQRHVIRGSSKSHLAIWDEVDGW

SEQ ID NO: 1014592 - protein, 113 aa, Homo sapiens
  misc_feature (37)..(37): Xaa can be any naturally occurring amino acid
  misc_feature (70)..(70): Xaa can be any naturally occurring amino acid
  misc_feature (87)..(87): Xaa can be any naturally occurring amino acid
  misc_feature (110)..(110): Xaa can be any naturally occurring amino acid
RLPWKTHWAETGGRALEPSWRISRALISVLKPSWQWXRADSERQNQEYQRLMGHQVAAGAGDCHLPQPAXRGQEDHYNNLSGLQGPXRQQALGASAVLWKVSCGVEGWGXKGP

SEQ ID NO: 1014593 - protein, 105 aa, Homo sapiens
  misc_feature (105)..(105): Xaa can be any naturally occurring amino acid
DEISWAVAGLCFPRSRAASPGRPASSTPAPFPPRCLNLLLVGPSLPAWDLPVLLKSLAVAPSPGAPLPAAAPPPSWGLPGLVSSTARLGACGSSSCAGCLRPVPX

SEQ ID NO: 1014594 - protein, 35 aa, Homo sapiens
  misc_feature (2)..(2): Xaa can be any naturally occurring amino acid
  misc_feature (26)..(27): Xaa can be any naturally occurring amino acid
VXSAMTEEAAVAIKAMENNGSQGGGXXSSDPLNLQ

SEQ ID NO: 1014595 - protein, 76 aa, Homo sapiens
  misc_feature (18)..(18): Xaa can be any naturally occurring amino acid
KNVPGPTNKNLTCGNNNXPYYSDLALKDEPYNPILKKRLVKTYNPFSGDLIPIPEKFIFKTLINFSEFQLFNLKNG

SEQ ID NO: 1014596 - protein, 133 aa, Homo sapiens
  misc_feature (48)..(48): Xaa can be any naturally occurring amino acid
  misc_feature (75)..(75): Xaa can be any naturally occurring amino acid
  misc_feature (110)..(110): Xaa can be any naturally occurring amino acid
  misc_feature (114)..(114): Xaa can be any naturally occurring amino acid
  misc_feature (127)..(127): Xaa can be any naturally occurring amino acid
LRQSLGLLPRLECSGAILAYCGLHLLDSSGSPASASQIAETPGIHHHXSLIFCVFSTDRVLPCWLRWSRAPGLKXPACLGLSECWDYRCEPLHAAMFSVFLREIPRSRIXGLCXNFQGSLKGLAWDXVEHGFP

SEQ ID NO: 1014597 - protein, 108 aa, Homo sapiens
  misc_feature (80)..(80): Xaa can be any naturally occurring amino acid
  misc_feature (89)..(89): Xaa can be any naturally occurring amino acid
  misc_feature (96)..(96): Xaa can be any naturally occurring amino acid
GDRVSLCSPMLECNGAILAHCNRCLPGSSDPPASVPQVAGTTGTCHHAWLICVFLVETWFCHVAQAGLKLLSLSDSAQRXCPKCWDYRXELLHLAXNRFSTKMPRPFT

SEQ ID NO: 1014598 - protein, 111 aa, Homo sapiens
  misc_feature (15)..(16): Xaa can be any naturally occurring amino acid
LCERLTPRLPPRVRXXFSLQGHPGTNPALGSGFMSGPRRTNVAGTALQPHGKLAAARGSFLDSGLVAGNGPCGTQNPDESRWDFLSRGLQSAGPEALLSRLCPESVDVAVS

SEQ ID NO: 1014599 - protein, 71 aa, Homo sapiens
  misc_feature (2)..(4): Xaa can be any naturally occurring amino acid
  misc_feature (6)..(6): Xaa can be any naturally occurring amino acid
TXXXLXPRLECSGAISAHRKLRLPGSCHSPASASPVARTTDARHHAQQFFVFLVETGFHRVSQDGLDLLTS

SEQ ID NO: 1014600 - protein, 73 aa, Homo sapiens
GKVGAGDPRQHTEDPRRHQPLSSLSIYQIIIGHFWESGMWQDNRVIVGRGSAGKHVNKCLCIINKLEKKVLCF

SEQ ID NO: 1014601 - protein, 96 aa, Homo sapiens
  misc_feature (4)..(4): Xaa can be any naturally occurring amino acid
  misc_feature (24)..(24): Xaa can be any naturally occurring amino acid
  misc_feature (32)..(32): Xaa can be any naturally occurring amino acid
  misc_feature (68)..(68): Xaa can be any naturally occurring amino acid
  misc_feature (79)..(79): Xaa can be any naturally occurring amino acid
  misc_feature (92)..(92): Xaa can be any naturally occurring amino acid
IRHXGADFYGNQIKPKMFCAGYPXGGMMLPGXHGGPFVCEDSISRTPRWPCCGIVSWGTGCAWAQKPXFYTKVSDFREXIFQAIKTHSEASXCVTQ

SEQ ID NO: 1014602 - protein, 104 aa, Homo sapiens
  misc_feature (23)..(23): Xaa can be any naturally occurring amino acid
GLTCNSCLCCILTLTGAAQQQTXRVGVCARVCTPLRAPVPWGRCPSMLCGVDAWPWSVRCFSDPSCCVRGLRPPSHSGLSVTAQGVWAEWVEMSCCTRSRLRSL

SEQ ID NO: 1014603 - protein, 250 aa, Homo sapiens
GADPYDGGGVTPCAATTHKGGVAPTRRDARGGTITITVRRGANNKQSAACFVILGGGPPTKMWCISIRGAAPTKRRGVGLPTPDEAPCINTGQTGYDLSLSSGEDRFSRSSPAYSQTENWLCLATNMKFGALFSGFSPNLMKSFCFLQPEGGEYCPHRENFLYHQAPAVFPLIVLLVGAPWRFVPSGIPQHIVDAPLECPHRGCSTLRGITTSRGCRSGKFYSAVAPFTRAPLSGDFSRNTARLTQHPPN

SEQ ID NO: 1014604 - protein, 131 aa, Homo sapiens
  misc_feature (106)..(106): Xaa can be any naturally occurring amino acid
  misc_feature (115)..(115): Xaa can be any naturally occurring amino acid
MLSEKVVTKDYKRVPPCLANFLYFLVETRVCHIAQAGLKLLSPSHLPTSSSQGAGITGVSHCTLPIYLLFLEMGVLLCCPGWSQTPGLKRSTHLGLPNCWDYRHEXSSPGPVMYXTPGTTSWNLGNCYEFP

SEQ ID NO: 1014605 - protein, 113 aa, Homo sapiens
  misc_feature (113)..(113): Xaa can be any naturally occurring amino acid
MLSEKVVTKDYKLCHHASLIFVFFSRDKSLPHCPGWSQTPEPKPSAHLVLPRCWDYRGEPLHPAYLFTFLRDGGLALLPRLVSNSWASKDPPTSASQTVGDYRHEPFFTWASX

SEQ ID NO: 1014606 - protein, 106 aa, Homo sapiens
  misc_feature (4)..(4): Xaa can be any naturally occurring amino acid
  misc_feature (21)..(21): Xaa can be any naturally occurring amino acid
  misc_feature (42)..(42): Xaa can be any naturally occurring amino acid
  misc_feature (77)..(77): Xaa can be any naturally occurring amino acid
  misc_feature (103)..(103): Xaa can be any naturally occurring amino acid
TKPXECFPPLWLQGYTLTPVXLLSQPKPSRFLDGGSLYRPGXSAMAESRLTATSASQIQAILLASATLEAKARESLXPGRCKFAVSRDSHHCTPAWDDRASAXSSK

SEQ ID NO: 1014607 - protein, 86 aa, Homo sapiens
  misc_feature (19)..(19): Xaa can be any naturally occurring amino acid
  misc_feature (25)..(25): Xaa can be any naturally occurring amino acid
  misc_feature (48)..(48): Xaa can be any naturally occurring amino acid
  misc_feature (84)..(84): Xaa can be any naturally occurring amino acid
VSSNVLFLLDFHSHLTRSXVVGYLXGRWDVNSQMLTVLRAFPCRSRLXDAETAAAIEEEIYQSLFLRGLSLGGLVPQPPTQPGXGH

SEQ ID NO: 1014608 - protein, 107 aa, Homo sapiens
  misc_feature (10)..(10): Xaa can be any naturally occurring amino acid
  misc_feature (12)..(12): Xaa can be any naturally occurring amino acid
  misc_feature (18)..(18): Xaa can be any naturally occurring amino acid
  misc_feature (24)..(24): Xaa can be any naturally occurring amino acid
  misc_feature (26)..(26): Xaa can be any naturally occurring amino acid
  misc_feature (40)..(40): Xaa can be any naturally occurring amino acid
  misc_feature (63)..(63): Xaa can be any naturally occurring amino acid
TDKWRNGTTXPXFHCTSXCSDNTXYXVCDGWYYWNDPLNXLQYSPTDKGMRMWPACCLILPRXRLHLLFSCLCKLAAPAIPLLMPLPLAILIPFSPASLLLYSLLLN

SEQ ID NO: 1014609 - protein, 114 aa, Homo sapiens
  misc_feature (6)..(6): Xaa can be any naturally occurring amino acid
  misc_feature (40)..(40): Xaa can be any naturally occurring amino acid
  misc_feature (55)..(55): Xaa can be any naturally occurring amino acid
  misc_feature (97)..(97): Xaa can be any naturally occurring amino acid
  misc_feature (103)..(103): Xaa can be any naturally occurring amino acid
NGNTMXRAGGPRCSLVGCILPWALTHSQGTGPMGMEGSVXTTGLLCKCEAWPPPXNSGTENPTRTDDLHTEAALLSPRGARPGDRGSCQFSGCSHPXCGSSAXPHNLGGPRPHH

SEQ ID NO: 1014610 - protein, 102 aa, Homo sapiens
ESRSVAQAGVQWCSLGSLQPPPPRFKRFSCLSLPSSWDYSHTPPCLANFWIFSGDRVSPCWSGWSQTHDLVIRPPQHLQQVPRVMPMWLDLGDHTLKTTGVR

SEQ ID NO: 1014611 - protein, 114 aa, Homo sapiens
FYFFETESRCVTQAGVQCHNLGSLQPLSPRFRRYSCLSLLSSWDYRRAPPHLANFLYFSRDGVSPCCPGWSLLSSGNRPPWPSESARITGMSHRIQPERYISNSRNRHGSYSVH

SEQ ID NO: 1014612 - protein, 84 aa, Homo sapiens
  misc_feature (12)..(12): Xaa can be any naturally occurring amino acid
  misc_feature (31)..(31): Xaa can be any naturally occurring amino acid
  misc_feature (42)..(42): Xaa can be any naturally occurring amino acid
  misc_feature (83)..(83): Xaa can be any naturally occurring amino acid
SSTGPYADICKXRLGVGEPQGVVGPRWSNNXSLQCGLLEAPXPNGECIIIKGTTNVVQKNLNNSPGVPDFSTEIVYPNEKESXK

SEQ ID NO: 1014613 - protein, 82 aa, Homo sapiens
  misc_feature (6)..(6): Xaa can be any naturally occurring amino acid
QLCCPXMECSGHNLGLTVNFTLPGFKQFLMPQPSPSSRDYKQYPPMPQDVQPSQHGARFPNAIPQYLLQRRKQHAQDRWRQD

SEQ ID NO: 1014614 - protein, 112 aa, Homo sapiens
  misc_feature (7)..(7): Xaa can be any naturally occurring amino acid
  misc_feature (12)..(12): Xaa can be any naturally occurring amino acid
  misc_feature (17)..(17): Xaa can be any naturally occurring amino acid
  misc_feature (61)..(61): Xaa can be any naturally occurring amino acid
PRMPPEXSSLVXNHTFXQPSKLPLLIWPLGESVGSVFMPGFFGSDWLSGAICVPSCLYVCXSLPPSLPSSSLLFSFFLSISFLSFFLSFFLSFFLSFFLSFLPSFLSFLPSL

SEQ ID NO: 1014615 - protein, 72 aa, Homo sapiens
  misc_feature (13)..(13): Xaa can be any naturally occurring amino acid
  misc_feature (35)..(35): Xaa can be any naturally occurring amino acid
  misc_feature (47)..(47): Xaa can be any naturally occurring amino acid
  misc_feature (49)..(49): Xaa can be any naturally occurring amino acid
  misc_feature (63)..(63): Xaa can be any naturally occurring amino acid
  misc_feature (71)..(71): Xaa can be any naturally occurring amino acid
RQRTIKFGKPLDXALWLSLVASPEKTQGLSGCDGXVKIVIATPGAFXLXAGEPANLVLSRCTXVVLDEADXV

SEQ ID NO: 1014616 - protein, 116 aa, Homo sapiens
ESLTSSPRLECSGAILAHCNLHLPSSSNSPDLASQVAGTTGTCHHAWLIFVFFVETGFHRVRQGGLELQASSDLPTSASQSAGITGMSHHTWAWDLVISDFQIQVKKWEFIYVGFL

SEQ ID NO: 1014617 - protein, 73 aa, Homo sapiens
GMESGSVAQAAHCNLRLPGSSDSPASAFQVAGTTDVHYYARLIFVFLVKMGFCHVGQADLKLLTLGDLPALAS

SEQ ID NO: 1014618 - protein, 86 aa, Homo sapiens
  misc_feature (4)..(4): Xaa can be any naturally occurring amino acid
  misc_feature (7)..(7): Xaa can be any naturally occurring amino acid
  misc_feature (37)..(37): Xaa can be any naturally occurring amino acid
  misc_feature (44)..(44): Xaa can be any naturally occurring amino acid
  misc_feature (78)..(78): Xaa can be any naturally occurring amino acid
  misc_feature (86)..(86): Xaa can be any naturally occurring amino acid
GVQXCKXQSESTGRRARSADVQGQEKMDVTAQEARTXLPFYLFXLFRSSMNWMMSMHIREGCLFITRSTNSNANLFRXHPHRHTQX

SEQ ID NO: 1014619 - protein, 115 aa, Homo sapiens
  misc_feature (3)..(3): Xaa can be any naturally occurring amino acid
  misc_feature (9)..(9): Xaa can be any naturally occurring amino acid
  misc_feature (95)..(95): Xaa can be any naturally occurring amino acid
SPXVKCNSXHLNPPKKSKTFFSGHFKPGQPLAEGAGRVTLLSRGFGLSSCEVGDRGIFQGSWGVPGEGAVTLSVLAGSGRRRLLLGRRTQERRGXRRSARVCGFREGGGNEPVLW

SEQ ID NO: 1014620 - protein, 137 aa, Homo sapiens
MHSASIRLRTCYDNDGSERATALLSLQRQHMHHRCCCASRLSPHSAPTVDAAATHLFCVAAQPQQRHYYYVAERLVMLLLRCCCCWCCGQHSRRCCGGSVALLLQHAAVLQGPTTQRWLLLVRQHTPTQQAAEKRER

SEQ ID NO: 1014621 - protein, 71 aa, Homo sapiens
ALPPLPLQHRGAGCWGPVTYCVPRNAGLGGSKSLFSTQPVGSSLILLGLQTLLPPLEPGHLDADSVVASDV

SEQ ID NO: 1014622 - protein, 73 aa, Homo sapiens
  misc_feature (39)..(39): Xaa can be any naturally occurring amino acid
  misc_feature (52)..(52): Xaa can be any naturally occurring amino acid
  misc_feature (64)..(64): Xaa can be any naturally occurring amino acid
ALPASKEDLLCTPQQYRASGSYFGLEENGRLFAPPSPEXGEAKRSAFVEVKXAARAASLQEEGXSDGAGVASE

SEQ ID NO: 1014623 - protein, 69 aa, Homo sapiens
ETLTKPEIEGNFLNLTTDIYKNPADKITLNGERLNVFPLRSGIRERCSVSPLLFNIVLEVLAREMGQEK

SEQ ID NO: 1014624 - protein, 116 aa, Homo sapiens
IRHRKCLVTVSDSANHRSEDHKNSGFRPTGNTLGTEALPSLPSPAAWGITPNYSQGKHGNPNRICLTPARRWLLRIFHHPVRLANVSGAFALKARERAGDETISFGLLKGPPSELK

SEQ ID NO: 1014625 - protein, 50 aa, Homo sapiens
  misc_feature (7)..(7): Xaa can be any naturally occurring amino acid
MMSEKVXLQSAGQLPDRLSLKPPRGKGAEDADSGPESRSVGEETSVCEKC

SEQ ID NO: 1014626 - protein, 114 aa, Homo sapiens
PPPPGGVPSNRGVPCLVVLGSDLFVVVSRPQLPSLLLAAFPPRGPPRAVLADLIMAAFSFTPVGFNISQLLKRVLSSPHENLGTFVSTKIPWTPTEFHAISLNLDIKNFKPFLN

SEQ ID NO: 1014627 - protein, 72 aa, Homo sapiens
  misc_feature (6)..(6): Xaa can be any naturally occurring amino acid
  misc_feature (22)..(22): Xaa can be any naturally occurring amino acid
  misc_feature (26)..(27): Xaa can be any naturally occurring amino acid
  misc_feature (62)..(62): Xaa can be any naturally occurring amino acid
MARAPXRPSSLPAAGAAPAGSXEARXXAPQPAGEGAVPPWEEASGGPGSLSLRCRGRKWASXAQARPRAAQR

SEQ ID NO: 1014628 - protein, 115 aa, Homo sapiens
  misc_feature (25)..(25): Xaa can be any naturally occurring amino acid
  misc_feature (48)..(48): Xaa can be any naturally occurring amino acid
  misc_feature (102)..(102): Xaa can be any naturally occurring amino acid
MAGTSPNPKFPEASPGPALCAGVSXNGASLHEPCVSCARVCVVSYVWXGAAGGAFVGAEGSSGCAIRTTWLLKAARDYQRYLVSSIYIWISCTSLGQFFFKXHGVEERHKLPDFA

SEQ ID NO: 1014629 - protein, 69 aa, Homo sapiens
  misc_feature (15)..(15): Xaa can be any naturally occurring amino acid
PTKTPDTGADVGGQXQIICHMYILCNLPTAIRIKKSPSPTRISLPHLPLTPGNPLIVHLFLFCHFKNVV

SEQ ID NO: 1014630 - protein, 126 aa, Homo sapiens
  misc_feature (6)..(6): Xaa can be any naturally occurring amino acid
  misc_feature (8)..(8): Xaa can be any naturally occurring amino acid
  misc_feature (28)..(28): Xaa can be any naturally occurring amino acid
  misc_feature (52)..(52): Xaa can be any naturally occurring amino acid
  misc_feature (107)..(107): Xaa can be any naturally occurring amino acid
  misc_feature (110)..(110): Xaa can be any naturally occurring amino acid
PFPLLXLXNCFKTRLPRWPSKTPNNLPXVKAGSFLNLLSKGPEVAVLVQRPXSVSRTVLGLLTQSCSPEPAALAPHLPRSARRPRQRWTGCRRAPVRRRRRLFLPCXAFXCSCSTAALLDTDAGRL

SEQ ID NO: 1014631 - protein, 61 aa, Homo sapiens
  misc_feature (10)..(10): Xaa can be any naturally occurring amino acid
  misc_feature (20)..(20): Xaa can be any naturally occurring amino acid
  misc_feature (43)..(43): Xaa can be any naturally occurring amino acid
NIFIGSEITXLRRAGTGQSXGGSFALGRTCCVGSAGGSLAHPXSSSWHMALGAWHDLCRLG

SEQ ID NO: 1014632 - protein, 69 aa, Homo sapiens
  misc_feature (10)..(10): Xaa can be any naturally occurring amino acid
  misc_feature (19)..(19): Xaa can be any naturally occurring amino acid
  misc_feature (37)..(37): Xaa can be any naturally occurring amino acid
  misc_feature (39)..(39): Xaa can be any naturally occurring amino acid
  misc_feature (49)..(49): Xaa can be any naturally occurring amino acid
  misc_feature (62)..(62): Xaa can be any naturally occurring amino acid
FRHRATCAQXGGQGVTPGXRAFYYNAAALDDHQTVRXGXQDGSVLLLVXTPGSLGWRRQSIXQGDLGTG

SEQ ID NO: 1014633 - protein, 94 aa, Homo sapiens
  misc_feature (7)..(7): Xaa can be any naturally occurring amino acid
  misc_feature (50)..(50): Xaa can be any naturally occurring amino acid
  misc_feature (63)..(63): Xaa can be any naturally occurring amino acid
  misc_feature (65)..(65): Xaa can be any naturally occurring amino acid
NYCSCGXGNTGSRRRHRSVRFPPLIPVFTLGQGVDLYWNRRGLRRLSRHXGSVGTHSLAAQAXRXRALLRLVAAQHEVASCHRGSSLRIFSIHA

SEQ ID NO: 1014634 - protein, 98 aa, Homo sapiens
  misc_feature (19)..(20): Xaa can be any naturally occurring amino acid
  misc_feature (52)..(52): Xaa can be any naturally occurring amino acid
  misc_feature (66)..(66): Xaa can be any naturally occurring amino acid
  misc_feature (73)..(73): Xaa can be any naturally occurring amino acid
  misc_feature (90)..(90): Xaa can be any naturally occurring amino acid
  misc_feature (96)..(96): Xaa can be any naturally occurring amino acid
PELKWQTISETSVGRTSRXXQAAAQKHQMVKEKETQKCCSRRQFQFLYLLRXTKQPKECFLIQPKXRKENTTXTRKRRKKKITDVLAKIXNQNQGXPG

SEQ ID NO: 1014635 - protein, 96 aa, Homo sapiens
DYSKSPETFKSVNMIQENMTSPNELNKAPGTNPGETEMYDLSDREFKTAILRKLKEIQDNTKKEFRILSDKFNKQIEIIKKNQAEILELEKCNWIY

SEQ ID NO: 1014636 - protein, 153 aa, Homo sapiens
MTDRKTGREPSPRNQIGQYLDFGFLNLKNHEEMNVCCSSHPVNVHESKHLCPFGSLLDSLFEKYHPAQQKVWKPSSRKWSSKVWSMDEFDLQTACYWFMTRSTNCILRAQISREQCNLSQKDDYVYALSCLFPCLTQRRHKEKVSSAWINWRL

SEQ ID NO: 1014637 - protein, 49 aa, Homo sapiens
MAVVYVSNNLGLAQGDFRVLRFQNLCFKIEVMFLKIIVLYSTEDELIDK

SEQ ID NO: 1014638 - protein, 87 aa, Homo sapiens
  misc_feature (27)..(27): Xaa can be any naturally occurring amino acid
  misc_feature (32)..(32): Xaa can be any naturally occurring amino acid
  misc_feature (34)..(34): Xaa can be any naturally occurring amino acid
QAVSRRGGEVKYKRIRVNDPGEIMYTXDVVGXGXIIKDINGRGGNALNKGGGSRVSVKVIGRVVVARRAGRRARVWTHIRVKPIEVI

SEQ ID NO: 1014639 - protein, 81 aa, Homo sapiens
  misc_feature (36)..(36): Xaa can be any naturally occurring amino acid
  misc_feature (43)..(43): Xaa can be any naturally occurring amino acid
  misc_feature (49)..(49): Xaa can be any naturally occurring amino acid
  misc_feature (55)..(55): Xaa can be any naturally occurring amino acid
  misc_feature (79)..(79): Xaa can be any naturally occurring amino acid
NIVIPKMDATANDVPSPHEVRGFPTIYFSPANKKLXPKKYEGXRELSDXISYLQXEATNPPVIQEEKPKKKKKAQEDLXKQ

SEQ ID NO: 1014640 - protein, 80 aa, Homo sapiens
  misc_feature (24)..(24): Xaa can be any naturally occurring amino acid
  misc_feature (44)..(44): Xaa can be any naturally occurring amino acid
  misc_feature (47)..(47): Xaa can be any naturally occurring amino acid
MYAIVCTVAAAQYNDEEEAPRHKXNFRYNGLVRRNAVIVVCSYXLGXPIYALAIFQCRKQGVDVDPERVNESGRHGEGSK

SEQ ID NO: 1014641 - protein, 88 aa, Homo sapiens
  misc_feature (50)..(50): Xaa can be any naturally occurring amino acid
  misc_feature (63)..(63): Xaa can be any naturally occurring amino acid
  misc_feature (69)..(69): Xaa can be any naturally occurring amino acid
  misc_feature (75)..(75): Xaa can be any naturally occurring amino acid
  misc_feature (88)..(88): Xaa can be any naturally occurring amino acid
KVDKIPELDQETEAALENRIKNEEPTEPGAASSEKLTDPNKDTPENADGXSDENKADYTIPDXYRIGPXQPNVPXGIDYVIPKTGFYX

SEQ ID NO: 1014642 - protein, 36 aa, Homo sapiens
  misc_feature (10)..(10): Xaa can be any naturally occurring amino acid
  misc_feature (27)..(27): Xaa can be any naturally occurring amino acid
EPTGCLVTLXQSLPRPTEHSPPYSLEXMTDLVAVWD

SEQ ID NO: 1014643 - protein, 53 aa, Homo sapiens
  misc_feature (41)..(41): Xaa can be any naturally occurring amino acid
  misc_feature (47)..(47): Xaa can be any naturally occurring amino acid
ILPYSVTSTKSFEVIQVIHGKPLDMVGPVQIPITLVGNKNXLHMERXISYEEA

SEQ ID NO: 1014644 - protein, 97 aa, Homo sapiens
  misc_feature (2)..(2): Xaa can be any naturally occurring amino acid
  misc_feature (27)..(27): Xaa can be any naturally occurring amino acid
  misc_feature (34)..(34): Xaa can be any naturally occurring amino acid
  misc_feature (66)..(66): Xaa can be any naturally occurring amino acid
  misc_feature (97)..(97): Xaa can be any naturally occurring amino acid
MXRLSEATARMHCCHEVQPKPVKEAFXLLNKSIXRVETPAVNLDQDGRDPDGAVDEGAGGINGHAXSPAPVNGINGYNRRHKSRVWLPKASFKAGVX

SEQ ID NO: 1014645 - protein, 32 aa, Homo sapiens
ATKVPWNIELSDCYTNLYGCSLWHPKTVVVTS

SEQ ID NO: 1014646 - protein, 130 aa, Homo sapiens
  misc_feature (41)..(41): Xaa can be any naturally occurring amino acid
  misc_feature (53)..(53): Xaa can be any naturally occurring amino acid
  misc_feature (65)..(65): Xaa can be any naturally occurring amino acid
RALILFKPPVSEPIPIHRKSPLPRSRKPATNDEASPLSVSXPEVLVPGCIIPXVCTGRRRRIQGXKSLLPLSPPNHWLSHPVFLAHGQQVVSGKWLITWRNTKELLVGTGRQESLLVRGSSLVSGPVLGN

SEQ ID NO: 1014647 - protein, 60 aa, Homo sapiens
  misc_feature (20)..(20): Xaa can be any naturally occurring amino acid
  misc_feature (26)..(26): Xaa can be any naturally occurring amino acid
  misc_feature (45)..(45): Xaa can be any naturally occurring amino acid
RCEGFIPIISNAAEYENIPXRHHEDXLLRQLAQKVPHNLNNPKFXDPHVKTNLLLQAPLV

SEQ ID NO: 1014648 - protein, 134 aa, Homo sapiens
  misc_feature (44)..(44): Xaa can be any naturally occurring amino acid
  misc_feature (64)..(64): Xaa can be any naturally occurring amino acid
  misc_feature (70)..(70): Xaa can be any naturally occurring amino acid
  misc_feature (76)..(76): Xaa can be any naturally occurring amino acid
  misc_feature (101)..(101): Xaa can be any naturally occurring amino acid
PRLMKSPIGEGMTRKDHADLSNQLYPCYAIGPDVQAMNRCVGEXPLTSDDPLYLEFPQKFESNXIAQGPXENRTVXETLDIGWQLLRIFPKEMLKRIPQSXLSEFYPRDSGKAFSWLAFWHCSGALGENHWVSG

SEQ ID NO: 1014649 - protein, 94 aa, Homo sapiens
  misc_feature (24)..(25): Xaa can be any naturally occurring amino acid
  misc_feature (44)..(44): Xaa can be any naturally occurring amino acid
  misc_feature (69)..(69): Xaa can be any naturally occurring amino acid
  misc_feature (77)..(77): Xaa can be any naturally occurring amino acid
MGLWDLTCLLITYTTNAFPGEYIXXVFDNYSANVMVDRKPVNLXLWDTAAQEDYDRLRPLSYPQTDVFXICFSLVQXSLLYENVRAKWFPRSAV

SEQ ID NO: 1014650 - protein, 122 aa, Homo sapiens
QARQPERNMNSPKAEASGKSGPRARPQVARSGLSGTANSSSRPCCPWAGRGQAELGTKAPGQLCAQASHLNAVLPQTRPAATAKLESSLEGEKYASMRSRAIFYTDTSRTPLVSKVFESWKL

SEQ ID NO: 1014651 - protein, 81 aa, Homo sapiens
  misc_feature (26)..(26): Xaa can be any naturally occurring amino acid
  misc_feature (32)..(32): Xaa can be any naturally occurring amino acid
  misc_feature (38)..(38): Xaa can be any naturally occurring amino acid
  misc_feature (45)..(45): Xaa can be any naturally occurring amino acid
  misc_feature (51)..(51): Xaa can be any naturally occurring amino acid
  misc_feature (79)..(79): Xaa can be any naturally occurring amino acid
  misc_feature (81)..(81): Xaa can be any naturally occurring amino acid
PKSSILPLPSTHTFKKRINQGGEDQXECFFGXSTGIIXQNNGVSXKRHRQXSKIDVRIWVLPDTEVGLTLQVTGDDRIXQX

SEQ ID NO: 1014652 - protein, 82 aa, Homo sapiens
  misc_feature (1)..(1): Xaa can be any naturally occurring amino acid
  misc_feature (16)..(16): Xaa can be any naturally occurring amino acid
  misc_feature (23)..(23): Xaa can be any naturally occurring amino acid
XRHRSLGVPWGGPGPXWNVSAKXGPGSASGPPVTLWVGGCDSRSIAILDKHGHFKFSVIKNQPKTFSLMAHVSMSRNISTMR

SEQ ID NO: 1014653 - protein, 97 aa, Homo sapiens
MESCSVTQAGMEAGPLCIRLLVAAITKSHTLSALNNINFISYSSGGQKAKIKVRVGLVSSEGHKGGICLKPLSLVYETAIFSPCLYMVFISVCVYVL

SEQ ID NO: 1014654 - protein, 134 aa, Homo sapiens
  misc_feature (1)..(2): Xaa can be any naturally occurring amino acid
  misc_feature (43)..(44): Xaa can be any naturally occurring amino acid
  misc_feature (54)..(54): Xaa can be any naturally occurring amino acid
  misc_feature (113)..(113): Xaa can be any naturally occurring amino acid
XXRAEDCFSSLLQGLVTEPAALTHAAEGGILFLCYLLLFTCSXXEAGKKKCSEXRNSGSGFWKALTFMAVEEDSQSPGCPRWAFTGAGIAANSVAASLMSWSAILNGGGVPGXGLVATLAEPSGLGWQQRSFIR

SEQ ID NO: 1014655 - protein, 110 aa, Homo sapiens
  misc_feature (20)..(20): Xaa can be any naturally occurring amino acid
  misc_feature (57)..(58): Xaa can be any naturally occurring amino acid
  misc_feature (64)..(65): Xaa can be any naturally occurring amino acid
  misc_feature (71)..(71): Xaa can be any naturally occurring amino acid
  misc_feature (83)..(84): Xaa can be any naturally occurring amino acid
WVKKPLPAARVEIQNRSQTXGLEDEHQMLTESPDPEEEAEEEEEFLDPLTTPREQCXXLEKCVXXRERLEXCDERVSSRSHTXXDCTEELFDFLHARDHCVAHKLFNNLK

SEQ ID NO: 1014656 - protein, 72 aa, Homo sapiens
  misc_feature (38)..(38): Xaa can be any naturally occurring amino acid
  misc_feature (51)..(51): Xaa can be any naturally occurring amino acid
  misc_feature (70)..(70): Xaa can be any naturally occurring amino acid
RNVPEIPVYPAFPAPPQYALPTYEIPVKMPEPEPPPPXLPAWRNPAFDNKXYTSFLSVYVTECRNSGLFXLV

SEQ ID NO: 1014657 - protein, 96 aa, Homo sapiens
  misc_feature (77)..(77): Xaa can be any naturally occurring amino acid
  misc_feature (83)..(83): Xaa can be any naturally occurring amino acid
  misc_feature (96)..(96): Xaa can be any naturally occurring amino acid
RKLYGTSPLFGHHFVLENPGTIKVADPVYLLRQYMGTACPGILDRLLKMFPKMTTLDRMVFQNSDLYIFFQICDFHXFRLLDXWCLNASMSQCKKX

SEQ ID NO: 1014658 - protein, 91 aa, Homo sapiens
  misc_feature (9)..(9): Xaa can be any naturally occurring amino acid
  misc_feature (21)..(21): Xaa can be any naturally occurring amino acid
  misc_feature (36)..(36): Xaa can be any naturally occurring amino acid
  misc_feature (80)..(80): Xaa can be any naturally occurring amino acid
ICRCKPERXPLLSWGRLEATXTWLQGRIRGLLGPSXPRQCPQIRMWKPLRKSGALAIMSSQSAKPSLPSPSKSRLLNDLXAHKHHLLLIQL

SEQ ID NO: 1014659 - protein, 59 aa, Homo sapiens
  misc_feature (20)..(20): Xaa can be any naturally occurring amino acid
  misc_feature (37)..(37): Xaa can be any naturally occurring amino acid
PVNFKLLSHCLLVTLAAHLXAEFTPAVHAFPGTSSWXSVEHRVGPSKLPFKLGASVAVP

SEQ ID NO: 1014660 - protein, 99 aa, Homo sapiens
  misc_feature (56)..(56): Xaa can be any naturally occurring amino acid
  misc_feature (69)..(69): Xaa can be any naturally occurring amino acid
  misc_feature (88)..(88): Xaa can be any naturally occurring amino acid
  misc_feature (93)..(93): Xaa can be any naturally occurring amino acid
  misc_feature (98)..(98): Xaa can be any naturally occurring amino acid
LEKLPKFTGKPTIMSFIQLMEVNPSILIVSFMVMKLPKMCMKPIAAPIIHSAIQGXNGTIFALWTDCFXKNIYHAWVQKIIWELYPGXFMTFXQKIKXF

SEQ ID NO: 1014661 - protein, 87 aa, Homo sapiens
  misc_feature (10)..(10): Xaa can be any naturally occurring amino acid
  misc_feature (38)..(38): Xaa can be any naturally occurring amino acid
  misc_feature (66)..(66): Xaa can be any naturally occurring amino acid
  misc_feature (76)..(76): Xaa can be any naturally occurring amino acid
  misc_feature (78)..(78): Xaa can be any naturally occurring amino acid
MPVFIRVPEXVQELPLTSPVDDFRQPRYSSGGNFETPXKKSTCKGKSRKVQREQSKITMRQTTQLXASPVIELEEXWXREFPPIHFR

SEQ ID NO: 1014662 - protein, 110 aa, Homo sapiens
  misc_feature (12)..(12): Xaa can be any naturally occurring amino acid
  misc_feature (28)..(28): Xaa can be any naturally occurring amino acid
  misc_feature (44)..(44): Xaa can be any naturally occurring amino acid
  misc_feature (49)..(49): Xaa can be any naturally occurring amino acid
  misc_feature (63)..(63): Xaa can be any naturally occurring amino acid
  misc_feature (68)..(68): Xaa can be any naturally occurring amino acid
  misc_feature (74)..(74): Xaa can be any naturally occurring amino acid
  misc_feature (97)..(97): Xaa can be any naturally occurring amino acid
NLNPTWKRFSLXVQHFSGGNPSTPIQVXCPDYDSDASHDLIGTXHTSLXQLQAVPAEFECIHXEKQQXKKSYKXSGTIRVKICRVETEYSFLDYVDXEAVQINFTVGVDF

SEQ ID NO: 1014663 - protein, 73 aa, Homo sapiens
  misc_feature (3)..(3): Xaa can be any naturally occurring amino acid
  misc_feature (11)..(11): Xaa can be any naturally occurring amino acid
  misc_feature (38)..(38): Xaa can be any naturally occurring amino acid
  misc_feature (40)..(40): Xaa can be any naturally occurring amino acid
VVXQQSPNSAXLCADSPLCSQSYCCQTELQGEDVGACXAXTYSCGSGVGIFLRVRECQVLFLAGKTKGCFYSP

SEQ ID NO: 1014664 - protein, 119 aa, Homo sapiens
  misc_feature (9)..(9): Xaa can be any naturally occurring amino acid
  misc_feature (37)..(37): Xaa can be any naturally occurring amino acid
  misc_feature (50)..(50): Xaa can be any naturally occurring amino acid
  misc_feature (62)..(63): Xaa can be any naturally occurring amino acid
  misc_feature (77)..(77): Xaa can be any naturally occurring amino acid
  misc_feature (109)..(109): Xaa can be any naturally occurring amino acid
MWKETPGVXKLSSLPAQPLWNNRLPKLFTPPLHRLYXKTLEKGRKEERQXIWMNSSKNLKIXXFLERTSNSSISSVXVIDEPIIEEPSRLQESVMEASRTNIDESAMPXTTTSGSLSEK

SEQ ID NO: 1014665 - protein, 115 aa, Homo sapiens
  misc_feature (8)..(8): Xaa can be any naturally occurring amino acid
  misc_feature (34)..(34): Xaa can be any naturally occurring amino acid
  misc_feature (44)..(44): Xaa can be any naturally occurring amino acid
  misc_feature (46)..(46): Xaa can be any naturally occurring amino acid
  misc_feature (113)..(113): Xaa can be any naturally occurring amino acid
HPLEDHAXNHGGHILTWCQDPETREGSPLGGCSXSSPPLWVIQXGXRLRGSFYSHFYPASASRVAGTKGAHHHAWLIFVFLVETGFHHVGQDGLDLLTSWIRPPSAFPKCWDXRC

SEQ ID NO: 1014666 - protein, 120 aa, Homo sapiens
  misc_feature (45)..(45): Xaa can be any naturally occurring amino acid
  misc_feature (120)..(120): Xaa can be any naturally occurring amino acid
LNSKPIFLVPSSKNGSIKPARDNLANHPTMPFGPRNCLMNIQCSXLFKKFCKGEEEDEECSDQPLEVDNNQVGAIIKAHPFTTTREGAEELTIDHSMVIWHLKQTGKVKKLDKWMPHELX

SEQ ID NO: 1014667 - protein, 44 aa, Homo sapiens
  misc_feature (6)..(6): Xaa can be any naturally occurring amino acid
  misc_feature (22)..(22): Xaa can be any naturally occurring amino acid
AAVPPXAPLPCPGSPPPPRPRXVAQDAPSCINSFPSSASSSRST

SEQ ID NO: 1014668 - protein, 69 aa, Homo sapiens
  misc_feature (7)..(7): Xaa can be any naturally occurring amino acid
  misc_feature (17)..(17): Xaa can be any naturally occurring amino acid
  misc_feature (31)..(31): Xaa can be any naturally occurring amino acid
  misc_feature (40)..(40): Xaa can be any naturally occurring amino acid
  misc_feature (44)..(44): Xaa can be any naturally occurring amino acid
  misc_feature (50)..(50): Xaa can be any naturally occurring amino acid
  misc_feature (52)..(52): Xaa can be any naturally occurring amino acid
  misc_feature (56)..(56): Xaa can be any naturally occurring amino acid
NIALEAXEIRPRGPKFXKNMPKIGQAAVVQXLENPSTFGXPEVXQITLKXKXFKDXAMAKQGENHCHHT

SEQ ID NO: 1014669 - protein, 122 aa, Homo sapiens
  misc_feature (44)..(45): Xaa can be any naturally occurring amino acid
  misc_feature (90)..(90): Xaa can be any naturally occurring amino acid
  misc_feature (107)..(107): Xaa can be any naturally occurring amino acid
VDLVKALDRDTVLCSGELPFFKGKIRRDPLKSKDTEEDHFHVDXXDHRARCPMMKRLGLFNIQHCKKLSSWVLLMKYLGNATAIFFLPDXGKLQHLGKWNSPTDIIXKFLGKLKTEGLASLH

SEQ ID NO: 1014670 - protein, 75 aa, Homo sapiens
  misc_feature (12)..(12): Xaa can be any naturally occurring amino acid
  misc_feature (18)..(18): Xaa can be any naturally occurring amino acid
  misc_feature (24)..(24): Xaa can be any naturally occurring amino acid
  misc_feature (37)..(37): Xaa can be any naturally occurring amino acid
  misc_feature (43)..(43): Xaa can be any naturally occurring amino acid
  misc_feature (50)..(50): Xaa can be any naturally occurring amino acid
  misc_feature (69)..(69): Xaa can be any naturally occurring amino acid
SSSDALTSYITXAAIPTXRRRRSXRDCRSLSCFDDFXQGCFRXFLFTFLXLLLVQDLQLLLIQKKCMCXELYFLL

SEQ ID NO: 1014671 - protein, 107 aa, Homo sapiens
  misc_feature (1)..(1): Xaa can be any naturally occurring amino acid
  misc_feature (24)..(25): Xaa can be any naturally occurring amino acid
  misc_feature (64)..(64): Xaa can be any naturally occurring amino acid
  misc_feature (86)..(86): Xaa can be any naturally occurring amino acid
  misc_feature (101)..(101): Xaa can be any naturally occurring amino acid
XRHRALTMPLANRTRFSSPFLARXXVGLTGGGMMVVGTGTSLALSSLLSLLLFAGMQMYSRQLXLHRVASPSRAACLVRVSSCSRXLPFNNLENLCLWAKXFPSKDL

SEQ ID NO: 1014672 - protein, 57 aa, Homo sapiens
  misc_feature (19)..(19): Xaa can be any naturally occurring amino acid
GGESELRRKPCPAAWGSQXCLLHGDCRNLWWGREFQFGRVLTALMQTLPAAKAVSGD

SEQ ID NO: 1014673 - protein, 48 aa, Homo sapiens
  misc_feature (44)..(44): Xaa can be any naturally occurring amino acid
MACLSVSLFSYPLYVKKPHFAWSYRDAVNCPSECFSNLQTIYIXLVCS

SEQ ID NO: 1014674 - protein, 58 aa, Homo sapiens
  misc_feature (6)..(6): Xaa can be any naturally occurring amino acid
  misc_feature (45)..(45): Xaa can be any naturally occurring amino acid
  misc_feature (51)..(51): Xaa can be any naturally occurring amino acid
MPGQEXRTLNGSQMLLVLPVLSWLPHGGALSLAEASRAKFPGTLXVAHRRXQIPRVAE

SEQ ID NO: 1014675 - protein, 36 aa, Homo sapiens
TAVYYCTRGDYDFWSGHYRPLGQPTYYFDYWSQGTL

SEQ ID NO: 1014676 - protein, 32 aa, Homo sapiens
TAVYYCARRLGSGGYYLKPTWGQGTLVTVSSG

SEQ ID NO: 1014677 - protein, 34 aa, Homo sapiens
TAVYYCATNSLLYSGSYFAFDIWGQGTMVTVSSG

SEQ ID NO: 1014678 - protein, 33 aa, Homo sapiens
TAVYYCARTLYFDSSGPGNDAFDIWGQGTMVTV

SEQ ID NO: 1014679 - protein, 35 aa, Homo sapiens
TAVYYCAKGGVPDIVVVPAAIRFDYWGQGTLVTVS

SEQ ID NO: 1014680 - protein, 35 aa, Homo sapiens
TAVYYCARVVGLRYFDWSIGGAFDIWGQGTMVTVS

SEQ ID NO: 1014681 - protein, 31 aa, Homo sapiens
TAVYYCARLSITMVRGVINPYWFDPWGQGTL

SEQ ID NO: 1014682 - protein, 41 aa, Homo sapiens
TAVYYCARHQVSMHYYDSSGYYWPTSYYYYYGMDVWGQGTT

SEQ ID NO: 1014683 - protein, 32 aa, Homo sapiens
TAVYYCARDGYYDILTGYYKTGDAFDIWGQGT

SEQ ID NO: 1014684 - protein, 117 aa, Homo sapiens
  misc_feature (34)..(34): Xaa can be any naturally occurring amino acid
  misc_feature (47)..(47): Xaa can be any naturally occurring amino acid
  misc_feature (53)..(53): Xaa can be any naturally occurring amino acid
  misc_feature (59)..(60): Xaa can be any naturally occurring amino acid
  misc_feature (66)..(66): Xaa can be any naturally occurring amino acid
  misc_feature (102)..(102): Xaa can be any naturally occurring amino acid
VVLNQLCVPHEKTPASDRVTNRCTESLPNRRPCXSALEVDQTYVPKXFNAETXTFHADXXTLSEKXRQIKKQTALVELVKHKPKATKEQLKAVMDGFRSFCXEVAARLDDKETCFWP

SEQ ID NO: 1014685 - protein, 34 aa, Homo sapiens
TAVYYCARDRGYYDSSGCTNWSDPWGQGTLVTVS

SEQ ID NO: 1014686 - protein, 30 aa, Homo sapiens
TAVYYCAKGSPHIAAAGIGPFDPWGQGTLV

SEQ ID NO: 1014687 - protein, 129 aa, Homo sapiens
  misc_feature (22)..(22): Xaa can be any naturally occurring amino acid
  misc_feature (42)..(42): Xaa can be any naturally occurring amino acid
  misc_feature (47)..(47): Xaa can be any naturally occurring amino acid
  misc_feature (53)..(53): Xaa can be any naturally occurring amino acid
  misc_feature (60)..(60): Xaa can be any naturally occurring amino acid
  misc_feature (69)..(69): Xaa can be any naturally occurring amino acid
  misc_feature (92)..(92): Xaa can be any naturally occurring amino acid
  misc_feature (119)..(119): Xaa can be any naturally occurring amino acid
SPAAAKGIPQRDAAGPRTASHXTKDMFPGPYPRTPEERAAAXKKYNXRVEDYXPYPDDGXGYGDYPKLXDRSQHERDPWYSWDQPGLEVELXVNRCTGHLDMLQQGTVWDTSPTLFFWXCHVFGSFLVF

SEQ ID NO: 1014688 - protein, 30 aa, Homo sapiens
TAVYYCARDECSGGSCVYDYWGQGTLVTVS

SEQ ID NO: 1014689 - protein, 79 aa, Homo sapiens
  misc_feature (11)..(11): Xaa can be any naturally occurring amino acid
  misc_feature (24)..(24): Xaa can be any naturally occurring amino acid
  misc_feature (30)..(30): Xaa can be any naturally occurring amino acid
  misc_feature (55)..(55): Xaa can be any naturally occurring amino acid
  misc_feature (76)..(76): Xaa can be any naturally occurring amino acid
FGTGLKELVLXGADTAANKQNRHXFVDAYXDYIIQYISGFLIPMLFMRAFIRSVXEKSFCSFSLMNYKQWSLEIQXMIG

SEQ ID NO: 1014690 - protein, 34 aa, Homo sapiens
TAVYYCARDLDDIVVVVAANDKRFDYWGQGTLVT

SEQ ID NO: 1014691 - protein, 34 aa, Homo sapiens
TAVYYCAKGTYYYDSSGYYFAPRRSYYFDYWGQG

SEQ ID NO: 1014692 - protein, 36 aa, Homo sapiens
TAVYYYARQNRYCSSTSCYDPRDLYFDYWGQGTLVT

SEQ ID NO: 1014693 - protein, 32 aa, Homo sapiens
TAVYYCAGSYSSGWGHHDAFVIWGQGTMVTVS

SEQ ID NO: 1014694 - protein, 30 aa, Homo sapiens
TAVYYCARDRTHYGSGKNWFDPWGQGTLVT

SEQ ID NO: 1014695 - protein, 32 aa, Homo sapiens
TAVYYCARHLHTVTTFNWYFDLWGRGTLVTVS

SEQ ID NO: 1014696 - protein, 30 aa, Homo sapiens
TAVYYCAGEVVPAAETNNWFDPWGQGTLVT

SEQ ID NO: 1014697 - protein, 33 aa, Homo sapiens
TAVYYCARGDIDLYYDILTGYTKWGQGTLVTVS

SEQ ID NO: 1014698 - protein, 33 aa, Homo sapiens
TAVYYCAGGLGGANVLMVYAFDYWGQGTLVTVS

SEQ ID NO: 1014699 - protein, 34 aa, Homo sapiens
TAVYYCVRLLGDYVWGSYRLNAFDIWGQGTMVTV

SEQ ID NO: 1014700 - protein, 35 aa, Homo sapiens
TAVYYCARGEYYDILTVYYKTGDAFGIWGQGTMVT

SEQ ID NO: 1014701 - protein, 31 aa, Homo sapiens
TAVYYCARETWWDIVLKGPLKDDWFDPWGQG

SEQ ID NO: 1014702 - protein, 35 aa, Homo sapiens
TAVYYCARVPLLHCSSTSCYYYYYMDVWGKGTTVT

SEQ ID NO: 1014703 - protein, 36 aa, Homo sapiens
TAVYYCAGEVVPRYYDYVWGSYPDAFDIWGQGTMVT

SEQ ID NO: 1014704 - protein, 36 aa, Homo sapiens
GRVLLCEIRSPESSPSHGSGIKVGWFGLVRPLGPGN

SEQ ID NO: 1014705 - protein, 31 aa, Homo sapiens
TAVYYCTARGWELPRRYFDLWGRGTLVTVSP

SEQ ID NO: 1014706 - protein, 30 aa, Homo sapiens
TAVYYCARDSGSGSSWGWFDPWGQGTLVTV

SEQ ID NO: 1014707 - protein, 30 aa, Homo sapiens
TAVYYCAKSPYYYDSSGYWENWGQGTLVTV

SEQ ID NO: 1014708 - protein, 31 aa, Homo sapiens
TAVYYCAIGNYYDSSGYGIDYWGQGTLVTVS

SEQ ID NO: 1014709 - protein, 112 aa, Homo sapiens
ILSGKLSSSVMGEQQKRLANSCISQTKLKAPPTSPLIVIVIYKFDCTMLQTPGTPDWLGEPSCVMVKISLTFWKEAGRCPVFRPFPGLVKLRSAQIGSCDTSIPSPQPNLNL

SEQ ID NO: 1014710 - protein, 74 aa, Homo sapiens
DPNAIFLSFQHLLRGKGLLDCWRQTSLPQPEQLSKLLKWQQGFRAKIPGLLNQTSKTLTKNTRIPEQIHELLNR

SEQ ID NO: 1014711 - protein, 420 aa, Homo sapiens
RRFSFCFSPEPEAEAEAAPGPRPCERLLNRVAALFPVLRPGGFQAHYRDEDGDLVAFSSDEELTMAMSYVKDDIFRIYIKEKKECRRDQRPSCAQEVPRNMVHPNVICDGCNGPVVGTRYKCSVCPDYDLCSACEGKGLHREHGKLAFPSPIGHFSEGFSHSRWLRKLKHGHFGWPAWDMGTPGNWSPRPPQAGDAHPGPATESASGPSEDPSVNFLKNVGESVAAALSPLGIEVDIDVEHGGKRSRLTPTSAGSSSTEEKCSSQPSSCCSDPSKPDRDVEGTAQSLTEQMNKIALESGGQHEEQMESDNCSGGDDDWTHLSSKEVDPSTGELQSLQMPESEGPSSLDPSQEGPTGLKEAALYPHLPPEADPRLIESLSQMLSMGFSDEGGWLTRLLQTKNYDIGAALDTIQYSKHPPPL

SEQ ID NO: 1014712 - protein, 224 aa, Homo sapiens
SFGTVIQEVKTSNVAREAALGAGFSDKTPAHTVTMACISSNQAMTTAVGLIASGQCDVVVAGGVELMSDVPIRHSRNMRKMMLDLNKAKTLGQRLSLLSKFRLNFLSPELPAVAEFSTNETMGHSADRLAAAFAVSRMEQDEYALRSHSLAKKAQDEGHLSDIVPFKVPGKDTVTKDNGIRPSSLEQMAKLKPAFIRPYGTVTAANSSFLTDGASAMLIMSEDR

SEQ ID NO: 1014713 - protein, 147 aa, Homo sapiens
  misc_feature (6)..(6): Xaa can be any naturally occurring amino acid
  misc_feature (120)..(120): Xaa can be any naturally occurring amino acid
  misc_feature (132)..(132): Xaa can be any naturally occurring amino acid
  misc_feature (135)..(135): Xaa can be any naturally occurring amino acid
VKIWRXIRDHYPRPVVKFYWVQAEIIAMATDLAEFIGAAIGFKLILGVSLLQGAVLTGIATFLILMLQRRGQKPLEKVIGGLLLFVAAAYIVELIFSQPNLAPGVKGMVIPSLPTSEAVXPVQQAVLRGDDXGRXLILFGTPSLTQH

SEQ ID NO: 1014714 - protein, 102 aa, Homo sapiens
  misc_feature (43)..(43): Xaa can be any naturally occurring amino acid
  misc_feature (45)..(45): Xaa can be any naturally occurring amino acid
  misc_feature (56)..(56): Xaa can be any naturally occurring amino acid
  misc_feature (61)..(61): Xaa can be any naturally occurring amino acid
  misc_feature (69)..(69): Xaa can be any naturally occurring amino acid
FAGRPYGAYRTFCVPGTNYFCSSHIAITLPLPATADLRLVTGXSXWKKHPFISESXVALAXPPQYRGAXGGRVNVPHHVAQLSWPGHLPPQKQCAWVILECR

SEQ ID NO: 1014715 - protein, 62 aa, Homo sapiens
  misc_feature (6)..(6): Xaa can be any naturally occurring amino acid
  misc_feature (44)..(44): Xaa can be any naturally occurring amino acid
  misc_feature (56)..(56): Xaa can be any naturally occurring amino acid
GAGHHXCGLLDGGEEIRLPSPCGRVPCCSRNLEGAVRPGLGAPXCGRRGPQRLGGXSGNTVS

SEQ ID NO: 1014716 - protein, 79 aa, Homo sapiens
  misc_feature (30)..(30): Xaa can be any naturally occurring amino acid
  misc_feature (37)..(37): Xaa can be any naturally occurring amino acid
  misc_feature (44)..(44): Xaa can be any naturally occurring amino acid
  misc_feature (66)..(66): Xaa can be any naturally occurring amino acid
  misc_feature (71)..(71): Xaa can be any naturally occurring amino acid
GFMDRISYQDIGVIPAPTNRIRVDVFINLXAIPKIFXSYFCRLXPLRSTMELCLPFLVKEQNRGPXDNAGXSPWRIQHE

SEQ ID NO: 1014717 - protein, 38 aa, Homo sapiens
LYLHMNSLRAEDTAIYYCATPFGEVDFWGRGTLVTVST

SEQ ID NO: 1014718 - protein, 45 aa, Homo sapiens
VFLLINSLSPDDTAVYYCARGPFTTDLYGRYFDTWGQGILVTVSS

SEQ ID NO: 1014719 - protein, 57 aa, Homo sapiens
PAPVKDRFVISRDDSKKTVSLQMDSLKIEDTAVYFCATELLPGLDHWGQGALVTVAS

SEQ ID NO: 1014720 - protein, 210 aa, Homo sapiens
HRAFLNLACSLMYYPCIPLYVTRDLFRCISIVHTYWLICHLLSLIYRPLPGWALTWHLATGFELPCAAFRSGPIPLVYTFNHIVNFFPLPSRSCSIVPRASSLWGLHYATRPTVVNSNNCGWSILCLLLVAAANEPRRPKAPRAPYPRVSTITDGRHPRDRGICHLSQKPAMATDLEAASHRCRTLGDLGVCALHATVDLSPSSSTVVSI

SEQ ID NO: 1014721 - protein, 31 aa, Homo sapiens
DLALNYYGSGSPHLQGAFDVWGQGTMVTVSS

SEQ ID NO: 1014722 - protein, 31 aa, Homo sapiens
GHKSPGYYYGSGRYSVHFDPWGQGTLVTVSP

SEQ ID NO: 1014723 - protein, 68 aa, Homo sapiens
FANSNDKDDQVLNCHLAVKVLSPEDGKADIVRAAQDFCQLVAQKQRRPKDLDVDMLVYSVQMVVLILI

SEQ ID NO: 1014724 - protein, 33 aa, Homo sapiens
DARYYCARAWEVRIDHRYFFDLWGQGTLVTVSS

SEQ ID NO: 1014725 - protein, 35 aa, Homo sapiens
TAIYYCASPLYPPKGPIVATTTDYWGQGTLLTVSS

SEQ ID NO: 1014726 - protein, 31 aa, Homo sapiens
MAKAKRGRAVTHDLWGDPRVMSTPSRHSKGA

SEQ ID NO: 1014727 - protein, 133 aa, Homo sapiens
HAASRSQADDMRVEGAFPVTMLPGDGVGPELMHAVKEVFKAASVPVEFQEHHLSEVQNMASEEKLEQVLSSMKENKVAIIGKIHTPMEYKGELASYDMRLRRKLDLFANVIHVKSLPGVQDSTQQSRSRDHSR

SEQ ID NO: 1014728 - protein, 94 aa, Homo sapiens [sequence omitted]

SEQ ID NO: 1014729 - protein, 347 aa, Homo sapiens
RDGERHRETVSCGSLLAQGVDHRGVARWMSVLGSLSCLLYQRLSVTADIVVAVSGCVCHRSVCLTSWRDYIGADPFMAVVWQSRRLYSSSQVAVFRMSRPDAGNRGLYSASFGVAYECVLCISPDGVCVGLTCLRPCVMFSRAVACDSRCVVSVLVRVGWFGYCALFSYAGLLLLASYVRCGVLCDVCAWCYRGGRSNYTLPCAVALCGGAISRVGAAVAGVYLWRRCGLMRITRRVWRSGKAVMRGSLLADTCGRCVGPSFMRCDVVCRRLYCVLSGPAVPVWGCHVLFSPECRFVVVRVSVVSCVVVVVWAGARSWVRVFFSLGVRGEACCGVPWMRSMCLAQGR

SEQ ID NO: 1014730 - protein, 511 aa, Homo sapiens
MASFLAFLLLNFRVCLLLLQLLMPHSAQFSVLGPSGPILAMVGEDADLPCHLFPTMSAETMELKWVSSSLRQVVNVYADGKEVEDRQSAPYRGRTSILRDGITAGKAALRIHNVTASDSGKYLCYFQDGDFYEKALVELKVAALGSDLHVDVKGYKDGGIHLECRSTGWYPQPQIQWSNNKGENIPTVEAPVVADGVGLYAVAASVIMRGSSGEGVSCTIRSSLLGLEKTASISIADPFFRSAQRWIAALARTLPVLLLLLGGAGYFLWQQQEEKKTQFRKKKREQELREMAWSTMKQEQSTRVKLLEELRWRSIQYASRGERHSAYNEWKKALFKPADVILDPKTANPILLVSEDQRSVQRAKEPQDLPDNPERFNWHYCVLGCESFISGRHYWEVEVGDRKEWHIGVCSKNVQRKGWVKMTPENGFWTMGLTDGNKYRTLTEPRTNLKLPKPPKKVGVFLDYETGDISFYNAVDGSHIHTFLDVSFSEALYPVFRILTLEPTALSICPA

SEQ ID NO: 1014731 - protein, 372 aa, Homo sapiens
MSGPRAGFYRQELNKTVWEVPQRLQGLRPVGSGAYGSVCSAYDARLRQKVAVKKLSRPFQSLIHARRTYRELRLLKHLKHENVIGLLDVFTPATSIEDFSEVYLVTTLMGADLNNIVKCQAGAHQGARLALDEHVQFLVYQLLRGLKYIHSAGIIHRDLKPSNVAVNEDCELRILDFGLARQADEEMTGYVATRWYRAPEIMLNWMHYNQTVDIWSVGCIMAELLQGKALFPGSDYIDQLKRIMEVVGTPSPEVLAKISSEHARTYIQSLPPMPQKDLSSIFRGANPLAIDLLGRMLVLDSDQRVSAAEALAHAYFSQYHDPEDEPEAEPYDESVEAKERTLEEWKELTYQEVLSFKPPEPPKPPGSLEIEQ

SEQ ID NO: 1014732 - protein, 32 aa, Homo sapiens
LSVLLCQQFIPFSERGSTLGLHLRFGDQVNRC

SEQ ID NO: 1014733 - protein, 79 aa, Homo sapiens
APARCDPRSRVVRAPPIFGATRGRPFAEKHNLVVPKKPALGKIIIACWELWLPPRGPPQHTKAQGVFAPPTPRRSGFSH

SEQ ID NO: 1014734 - protein, 32 aa, Homo sapiens
ALYLCASSQDEREGQGYNEKLFFGSGTQLSVL

SEQ ID NO: 1014735 - protein, 30 aa, Homo sapiens
ALYLCASSQLTSGGSSDEQFFGPGTRLTVL

SEQ ID NO: 1014736 - protein, 174 aa, Homo sapiens
HERRGSRSSPSADQQGAQDREEEAATAPAPTSRGHRTEKRKPQQPQRRPAAGTGQRRGSGCSSSANQQGAQDREEEAAKAPVPDQQLSQDREEEAAAAPAPTSSGHRTEKRKRPGPSADQQRAQDREEEAQQPQCRPAAAQDREEEAQQPQRRPAAAQDREEEVRKWKKRVDLS

SEQ ID NO: 1014737 - protein, 133 aa, Homo sapiens
MAGSLAGMVSTIVTYPTDLIKTRLIMQNILEPSYRGLLHAFSTIYQQEGFLALYRGVSLTVVGILATPEPLLFSFPGIPPGIYVLKPVFSQDSSSFSLALFCRCSPVLCWLPSCLHEPGEVLSRSLLAPFLFT

SEQ ID NO: 1014738 - protein, 101 aa, Homo sapiens
TGKTETTKDLAKALAIQCVVFNCSDGLDCKMMGRFFSGLAQSGAWCCFDEFNRIDIEVLSVIAQQLITIRNAKAAKLSRFMFEGREIKLVMTCAAFITMNP

SEQ ID NO: 1014739 - protein, 30 aa, Homo sapiens
LEDSAKYFCALGDALLPWGILPGSDSDKLT

SEQ ID NO: 1014740 - protein, 1171 aa, Homo sapiens [sequence omitted]

SEQ ID NO: 1014741 - protein, 101 aa, Homo sapiens
GAGLLKTSETLSLTCGVYGGTVSGYYWSWIRQPPGRGPELIGEVDQGGNGNYNPSVRGRVSMSLDTSKNQFSLQLTSLTAADSGVYYCARYSDTWHKYVQY

SEQ ID NO: 1014742 - protein, 482 aa, Homo sapiens
AGLDGRVLYWPRGRVWGGSSSLNAMVYVRGHAEDYERWQRQGARGWDYAHCLPYFRKAQGHELGASRYRGADGPLRVSRGKTNHPLHCAFLEATQQAGYPLTEDMNGFQQEGFGWMDMTIHEGKRWSAACAYLHPALSRTNLKAEAETLVSRVLFEGTRAVGVEYVKNGQSHRAYASKEVILSGGAINSPQLLMLSGIGNADDLKKLGIPVVCHLPGVGQNLQDHLEIYIQQACTRPITLHSAQKPLRKVCIGLEWLWKFTGEGATAHLETGGFIRSQPGVPHPDIQFHFLPSQVIDHGRVPTQQEAYQVHVGPMRGTSVGWLKLRSANPQDHPVIQPNYLSTETDIEDFRLCVKLTREIFAQEALAPFRGKELQPGSHIQSDKEIDAFVRAKADSAYHPSCTCKMGQPSDPTAVVDPQTRVLGVENLRVVDASIMPSMVSGNLNAPTIMIAEKAADIIKGQPALWDKDVPVYKPRTLATQR

SEQ ID NO: 1014743 - protein, 452 aa, Homo sapiens
MDDIFTQCREGNAVAVRLWLDNTENDLNQGDDHGFSPLHWACREGRSAVVEMLIMRGARINVMNRGDDTPLHLAASHGHRDIVQKLLQYKADINAVNEHGNVPLHYACFWGQDQVAEDLVANGALVSICNKYGEMPVDKAKAPLRELLRERAEKMGQNLNRIPYKDTFWKGTTRTRPRNGTLNKHSGIDFKQLNFLAKLNENHSGELWKGRWQSNDIVVKVLKVRDWSTRKSRDFNEECPRLRIFSHPNVLPVLGACQAPPAPHPTLITHWMPYGSLYNVLHEGTNFVVDQSQAVKFALDMARGMAFLHTLEPLIPRHALNSRSVMIDEDMTARISMADVKFSFQCPGRMYAPAWVAPEALQKKPEDTNRRSADMWSFAVLLWELVTREVPFADLSNMEIGMKVALEGLRPTIPPGISPHVCKLMKICMNEDPAKRSKFDMIVPILEKMQDK

SEQ ID NO: 1014744 - protein, 30 aa, Homo sapiens
ERDEGSYYCACDTEGISSGGIRTWDTRQMF

SEQ ID NO: 1014745 - protein, 32 aa, Homo sapiens
LKTVPLTTVPFQGSSCDGGPLRWWVLDTDKLT

SEQ ID NO: 1014746 - protein, 30 aa, Homo sapiens
LEDSAKYFCALGAFSYLTYLLGDIIPDKLT

SEQ ID NO: 1014747 - protein, 30 aa, Homo sapiens
LEDSAKYFCALGDPPFLILGDTVGATDKLT

SEQ ID NO: 1014748 - protein, 31 aa, Homo sapiens
LEDSAKYFCALGELPRYVRRDWGSKYTDKLT

SEQ ID NO: 1014749 - protein, 31 aa, Homo sapiens
RRFSKVLLCSWVEFREIFVLGDTAVYTDKLT

SEQ ID NO: 1014750 - protein, 33 aa, Homo sapiens
LEDSAKYFCALGEPSPFPTRLLGDGLTAYTDKL

SEQ ID NO: 1014751 - protein, 31 aa, Homo sapiens
TEDSATYYCAFKVLAYKVLHLGWRWCIDKLT

SEQ ID NO: 1014752 - protein, 109 aa, Homo sapiens
QLLQQLGLAFQQVGVIRRARRLPADAVGIVEAQRPGRQHQQPVAQAAGLHRIVGDQQHGVLRQQFGGQALDLGAGNGVQRGKGFVHQHDRLVFVERAGDGGALAHAAGQ

SEQ ID NO: 1014753 - protein, 66 aa, Homo sapiens
QHNPCFYTQHNLCPNNQHNLCSHNEHNFCPYNQHNLHSTDHHILCPYKQHNLGSYHQHNSLPLQPG

SEQ ID NO: 1014754 - protein, 86 aa, Homo sapiens; identical to SEQ ID NO: 884960

SEQ ID NO: 1014755 - protein, 126 aa, Homo sapiens
  misc_feature (119)..(119): Xaa can be any naturally occurring amino acid
GCIQPAASSLRKVLLHLLKHPSVTQEVRCDESNRLDTHHYLSQRRQAVDYFILILQGRVEVEIGKEGLKCENGAYTFYGVSALTVTSSAHQSPVSSLQPIRHELEAPPKVTGRIHLCIXPYYNEEG

SEQ ID NO: 1014756 - protein, 263 aa, Homo sapiens
MWELRSASFWRAIFAEFFATLFYVFFGLGSSLRWAPGPLHVLQVALAFGLALATLVQTVGHISGAHVNPAVTFAFLVGSQMSLLRAFCYIAAQLLGAVAGAAVLYSVTPPAVRGNLALNTLHAGVSVGQATTVEIFLTLQFVLCIFATYDERRNGRMGSVALAVGFSLTLGHLFGMYYTGAGMNPARSFAPAILTRNFSNHWVYWVGPIIGGGLGSLLYDFLLFPRLKSVSERLSILKGARPSDSNGQPEGTGEPVELNTQAL

SEQ ID NO: 1014757 - protein, 51 aa, Homo sapiens
  misc_feature (30)..(30): Xaa can be any naturally occurring amino acid
MSKRFRQSSHLTTHKIIHTGEKPYKCEECXKLSTDSFTLLHIREFTLERNP

SEQ ID NO: 1014758 - protein, 339 aa, Homo sapiens
LWGAFFVLYLLLLCLPIWGPFGGFSPALLIGGPHAACLYIWRVPVFFHLALVAATHRVVPHIGRRVSCAPRGAPPPASRPFRGQSPHGGVSHCASPLSPEIVPLGAADLRVWDPNPPLWFIPGKPREEGGYSRPSSPVVSAVGAHRGPPLGPSRPLGEFLEVYQNMVGFDWENSPLHTFSFWCTHGWKGPPQEGPPVGPPPKHLKSVVAFWGMAFLPRVTPSNVFAVSRAHRQSAMVCPPPPVTEMGATPSVHTREASTPHCAPRFSHTPAFPWRSPSPGAPPPQVSLGVPHGVFPPLGCTHRLDAFWSHACVVVFFLGVQGCPTLLLRHSAFTCARLG

SEQ ID NO: 1014759 - protein, 83 aa, Homo sapiens
  misc_feature (47)..(47): Xaa can be any naturally occurring amino acid
  misc_feature (66)..(66): Xaa can be any naturally occurring amino acid
  misc_feature (80)..(80): Xaa can be any naturally occurring amino acid
GRSQLSENGPASYKMSTVHEILCKLSLGGDHSTPPSVYGSDRAYTIXDAERDAVNIDTDIKTKGVXEVTIDNIVHTPSNXQRQ

SEQ ID NO: 1014760 - protein, 149 aa, Homo sapiens
RERYTKIVEIPFNSTNKYQLSIHKNPNTAEPRHLLVMKGAPERILDRCSSILIHGKEQPLDEELKDAFQNAYLELGGLGERVLGFCHLFLPDEQFPEGFQFDTDDVNFPLDNLCFVGLISMIDPPRAAVPDAVGKCRSAGIKVIMVTGD

SEQ ID NO: 1014761 - protein, 140 aa, Homo sapiens
  misc_feature (72)..(72): Xaa can be any naturally occurring amino acid
SVGNSRKKFLFSLFPAYLMPVSNTGAQCLQCLCIVRVTLFHFPTNSSSPSETTSAWTLLSISLLTFWSKPFXKSLGSSKLSHIFLSSSEPSKPLQPLPVTHFRSCFHIFGYLYSSTPLYWYQLIELVCSHTANKDIPETG

SEQ ID NO: 1014762 - protein, 118 aa, Homo sapiens
  misc_feature (53)..(53): Xaa can be any naturally occurring amino acid
  misc_feature (106)..(106): Xaa can be any naturally occurring amino acid
GEEEDEGEEEDEEEEEEDDEGPALKRAAEEEDEAAPKREKTENGVSVGPPDNXVGLGGLSGSGGGGGGRQVQTLYTWLPALGPSNRDDTLFSLPSPLISVSPDTAXSTHTLTLLHLLT

SEQ ID NO: 1014763 - protein, 104 aa, Homo sapiens
  misc_feature (20)..(20): Xaa can be any naturally occurring amino acid
TARGDYPLEAVRMQHLIARXAEAVIYHLQLFEELRRLVPITSDPTEVTAVGDVEASFMCCSGAIIALNKSGRSDHQVDRFRPRSPHHCCAPFNPQDSSIRFYLY

SEQ ID NO: 1014764 - protein, 121 aa, Homo sapiens
  misc_feature (115)..(115): Xaa can be any naturally occurring amino acid
PRVRGTRGFLGIKESDPSKLQHNTTICRSDTVMEKRTFRVPLGKGRRCVVGGDVFYEWQRCQGTTQRETYFIYSPQLKTEKSGSIGAADSPENWEKVWQQLEAADNRLLLLTAGXPQREEM

SEQ ID NO: 1014765 - protein, 122 aa, Homo sapiens
VYEVYRKGLIDHQTYLELSEQECEWEEITISSSDGVVMSMIIDRRSGRQYDIDDVIAKNLIDRSVLDQYRAGTLSITEFADMLSGNGGGFRSRSSSGGILLLLPHQPRRLQDQLASWSDPLR

SEQ ID NO: 1014766 - protein, 103 aa, Homo sapiens
  misc_feature (93)..(93): Xaa can be any naturally occurring amino acid
VGSDELAPCRRVADMGGVDLENAGGVGRGKRQSVSCTGGEDAQDMNSSVRCVTHMDIYVGDNLSLIYEVYEGLGGGGENIKAAICVSLSNIIXVGGTIIESSR

SEQ ID NO: 1014767 - protein, 650 aa, Homo sapiens
  misc_feature (316)..(317): Xaa can be any naturally occurring amino acid
  misc_feature (510)..(510): Xaa can be any naturally occurring amino acid
MRCFVDGKDFIPEGIDIGEPLTDCLKDVDLIPPFNRMLLEVTFGKLYAWAVQNIECLVDASAKFKELGIQAGSLQTITNENHRTELGTIRKPTFLLVMLSMLTLQHSANNLDLLLNSGTLALAQTALRLIGPSCDSVEEDMNASAQGASATVLEETRKETAPVQLPVSGPELAAMMKIGTRVMRGVDWKWGDQDRPPPGLGRVIGELGEDGWIRVQWDTGSTNSYRMGKEGNYDLKLAELPAPAQPSAEDSDTEDDSEAEQTERNIHPTAMMFTSTINLLQTLCLSAGVHAHIMQSEATKTLCGLLQMLVYREQHXXWCTLGFVQRLALTLKVCGTLSSLQWITLLMEVVDGHAPFTATSLQRQILAVHLLQAVLPSWDKTERARDMKCLMEKLFDFLGSLLTMCSSDCRYSEVGGRLPSLYPGEERCSAITQRWVAISLPCVLVKSRVCHHSEVGGRLPSLYPGEERCSAVTQRWVVASLPCVLAKSRRVPHSEVGGLFPSLCPGEERXSVVTQRGVTISLPCDPGEELVQQLLPWFPPQSQKMRRRRVCPQASLTATHSSTLAEEVVALLHTLHYPDQWNGLINKYINSPCRSITHSFAEGLPKGPVRDYFPDSENPEVGGLMAVLAVVGGIDGRLCLGGQVVHDDPA

SEQ ID NO: 1014768 - protein, 102 aa, Homo sapiens
EFRVPRNTIWVIFKNFGASFPKVKERSCAPGQYCMAKEFCDLNFLLHNYWAKKIDIAHIIEGACTIWSPATSRSSTRSGVRYSLFEEGSYFHPLRCHLAVVV

SEQ ID NO: 1014769 - protein, 36 aa, Homo sapiens
  misc_feature (3)..(3): Xaa can be any naturally occurring amino acid
DLXTTNDDFLEMIPPAVTPKLTLRINVQPQRTESQN

SEQ ID NO: 1014770 - protein, 78 aa, Homo sapiens
MLVAVPGTYPPPCRTREQSTKHKKRPQRTTSNVCAMCAQTQIQEYREAYNMIAQHRDGLIDKEDVHDMLASVEKTPTD

SEQ ID NO: 1014771 - protein, 52 aa, Homo sapiens
  misc_feature (35)..(35): Xaa can be any naturally occurring amino acid
MIPHGEIPDTSAHDSEVPYNWLQPAFQDTVSASPXLSPCFSEMLCFFANGRF

SEQ ID NO: 1014772 - protein, 80 aa, Homo sapiens
TPLTDRCYLCLMGALQLDLGGAPAGPAGTGKTETTKDLAKALAIQCVVFNCSDGLDYKMMGRFFSGLAQSGAWGCFDEFN

SEQ ID NO: 1014773 - protein, 110 aa, Homo sapiens
  misc_feature (32)..(32): Xaa can be any naturally occurring amino acid
  misc_feature (105)..(105): Xaa can be any naturally occurring amino acid
FPWDVPRQRELIWLDMYSIWYMWLTRRLQKVXLLCRKGIPSSLRDRVWEHLSNSKDLLEQTPGKCDELERSPGDPMLVYVIEKDYTSSSLTGYVCSRGGMKTALXYSEAT

SEQ ID NO: 1014774 - protein, 127 aa, Homo sapiens
PSPHPSPCSLPPPHLIQEWHDYKLRWDPADYENVTSIRIPSELIWRPDIVLYNKESSTGPWWAGVARACPCPDRELHQGPAWPSGLCQPHACQPRPRRKKQEKEEAGAMEKLVWVEEGRVPPGQQRG

SEQ ID NO: 1014775 - protein, 77 aa, Homo sapiens
TPLTDRCYLTMTQALEARLGGSPFGPAGTGKTESVKALGHQLGRFVLVFNCDETFDFQAMGRIFVGLCQVGAWGCFD

SEQ ID NO: 1014776 - protein, 99 aa, Homo sapiens
  misc_feature (5)..(5): Xaa can be any naturally occurring amino acid
  misc_feature (20)..(20): Xaa can be any naturally occurring amino acid
  misc_feature (47)..(47): Xaa can be any naturally occurring amino acid
  misc_feature (57)..(57): Xaa can be any naturally occurring amino acid
  misc_feature (61)..(61): Xaa can be any naturally occurring amino acid
ASSPXPSFYCSFPTRMSGDXRPPQITGLCPFGPREILVGDEEKRTLXRFSHSGEYKXTAPXPEGCSPWSVAALESGVVFSIAHGLSHTPGDVSGEGLIS

SEQ ID NO: 1014777 - protein, 55 aa, Homo sapiens
PAGTGKTETTKDLAKALAVQCVVFNCSDGLDYLAMGKFFKGLASSGAWGCFDEFN

SEQ ID NO: 1014778 - protein, 37 aa, Homo sapiens
VTPEDTAVYYCARDYFVDSGRFKIDYWGQGTRLTVSS

SEQ ID NO: 1014779 - protein, 82 aa, Homo sapiens
RLEHLTLVCENMAPGAVCSPGESKELGVAQMVWGNNLALRDVEVTCAPSLWRLSGATEMWSGADGLAPGLGAPECGALWRSM

SEQ ID NO: 1014780 - protein, 40 aa, Homo sapiens
SLRGEDTALYYCVRYGFDSTDGYFMAYDLWGQGTLVTVSS

SEQ ID NO: 1014781 - protein, 49 aa, Homo sapiens
AFLQMVSLRTEDTAIYFCTRAPGYYDGSGYSGHDDLDLWGQGTMVTVSS

SEQ ID NO: 1014782 - protein, 34 aa, Homo sapiens
TSVYFCATSLPRGLWGGRTRNEQFFGPGTRLTVL

SEQ ID NO: 1014783 - protein, 30 aa, Homo sapiens
TSVYFCASSPGLAGGPNEQYFGPGTRLTVV

SEQ ID NO: 1014784 - protein, 56 aa, Homo sapiens
  misc_feature (50)..(50): Xaa can be any naturally occurring amino acid
RPHEPDLSAALKDTRAQYEKLAAMNMQNAEGFFEEPGFTVLTESAAKNPXPCAPPT

SEQ ID NO: 1014785 - protein, 520 aa, Homo sapiens
MEAERLKQKEQERKIIELEKQKEEAQRRAQERDKQWLEHVQQEDEHQRPRKLHEEEKLKREESVKKKDGEEKGKQEAQDKLGRLFHQHQEPAKPAVQAPWSTAEKGPLTISAQENVKVVYYRALYPFESRSHDEITIQPGDIVMVDESQTGEPGWLGGELKGKTGWFPANYAEKIPENEVPAPVKPVTDSTSAPAPKLALRETPAPLAVTSSEPSTTPNNWADFSSTWPTSTNEKPETDNWDAWAAQPSLTVPSAGQLRQRSAFTPATATGSSPSPVLGQGEKVEGLQAQALYPWRAKKDNHLNFNKNDVITVLEQQDMWWFGEVQGQKGWFPKSYVKLISGPIRKSTSMDSGSSESPASLKRVASPAAKPVVSGEEIAQVIASYTATGPEQLTLAPGQLILIRKKNPGGWWEGELQARGKKRQIGWFPANYVKLLSPGTSKITPTEPPKSTALAAVCQVIGMYDYTAQNDDELAFNKGQIINVLNKEDPDWWKGEVNGQVGLFPSNYVKLTTDMDPSQQ

SEQ ID NO: 1014786 - protein, 55 aa, Homo sapiens
PAGTGKTETVKDLAKSLGKHCVVFNCFEDLDYKIVRKFFFGLVQSGALGCFDEFN

SEQ ID NO: 1014787 - protein, 107 aa, Homo sapiens
GAQATSYDASQKRSRKPTNQVDDGEPQTSTRGLPGSTNYLPLTPMVKLLWRPRMNGVGVRYPSHAPRGSAPGDLTLREERRPPGGRTSIMTHPRSTTTCAGNHRRRR

SEQ ID NO: 1014788 - protein, 344 aa, Homo sapiens
SGVVFVVLNGGPPVVSHTVVALVVRVGVPVVCPAFPGGCKCIVAAVQGDVLGGVHRAAASQGFFFCLVEGGDGSYLVCHPSCVAGYFPREVWGGTTPGGWFPGVLFVNQQRYPADGGGVVGGPRVAASVVGGPPPSWGCPFLVSPADAPRRVMHSAPPCGAPPRTRTRLSAGCVRPTPHAPLCVGELSPSLWRVCCNTGAPHSVCESCVGRHTDRRAREESVSTALSLSLDEHTTGRVCVCVHTALVCLCVCGRHTAHDDSSVRVAAHSHCVRAHPPHSHTERERRERERESVWGLLERRPPLRDATHVCAHTERGVTHTLVSLSVSLCCVVSLSLCPTRVSLV

SEQ ID NO: 1014789 - protein, 104 aa, Homo sapiens
  misc_feature (50)..(50): Xaa can be any naturally occurring amino acid
  misc_feature (59)..(59): Xaa can be any naturally occurring amino acid
  misc_feature (70)..(70): Xaa can be any naturally occurring amino acid
QRICVVLGAWITRAAFISGKVDIVDITDPHIDHIYMVYMFQYDSTHEIFXDTDRGENGXLDINGNPTPSXRRDILQHHVARCCAEYVVESLCLTHERCAHGGGA

SEQ ID NO: 1014790 - protein, 46 aa, Homo sapiens
TKLKRKRRQISRSSQKTKNHSCSSRSSRSRRANGHRLSRRIEIEVG

SEQ ID NO: 1014791 - protein, 33 aa, Homo sapiens
DRSEVTSLYWYEARVTVSHYSQSTNIVTLIRTP

SEQ ID NO: 1014792 - protein, 79 aa, Homo sapiens
KRHLLQDDAWFCNWISVQGPGANGDEFRFPCYRWVEGDRILSLPEGTARTVVDDPQGLFKKHREEELAERRKLYRWGNW

SEQ ID NO: 1014793 - protein, 39 aa, Homo sapiens
  misc_feature (8)..(8): Xaa can be any naturally occurring amino acid
  misc_feature (32)..(32): Xaa can be any naturally occurring amino acid
  misc_feature (34)..(34): Xaa can be any naturally occurring amino acid
AEGVENGXEATAGEGNPLVTSSATSLRLVAGXVXSARSQ

SEQ ID NO: 1014794 - protein, 42 aa, Homo sapiens
  misc_feature (7)..(8): Xaa can be any naturally occurring amino acid
  misc_feature (29)..(29): Xaa can be any naturally occurring amino acid
RYTHMLXXTTLECTHVPRTQYFLTESSSXPPGPGPSMILKSA

SEQ ID NO: 1014795 - protein, 146 aa, Homo sapiens
NWVRQRPNIAVWDGKLEVTSGMWQGCEVQEDCLARITQSVSFPTFLAIDSRATMWEGRPTKTVPCEPSLKFRFKMPRQFWKSGGRDEMNGCSVEDEDFGKAPETPRSMGLPGDDHMAYQHRERFIVVRGPRWAHLRQAFLGRNGAE

SEQ ID NO: 1014796 - protein, 66 aa, Homo sapiens
GWLGVVGLRGCHGARGQVCSASVQGSGRPDNGLALLVAAAAGAGALAARAAGVGAGRYCISYHCLQ

SEQ ID NO: 1014797 - protein, 100 aa, Homo sapiens
MWKFPGGLSEPGEDIGDTAVREVFEETGVKSEFRSLLSIRQQHRSPGRFGMSDMYLICRLQPRSFTINFCQQECLKCEWMDLESLARTKHTTPITSRVAR

SEQ ID NO: 1014798 - protein, 444 aa, Homo sapiens [sequence omitted]

SEQ ID NO: 1014799 - protein, 50 aa, Homo sapiens
PDELVAWEGCGSLVPLPMLSSSNSNNLLVALPPPQPRGIKPGTRGRGRTK

SEQ ID NO: 1014800 - protein, 75 aa, Homo sapiens
PEIPVCEKGCQPPPGLHHGHHTGGNTVFFVSGMTVDYTCDPGYLLVGNKSIHCMPSGNWSPSAPRCEETCQHVRQ

SEQ ID NO: 1014801 - protein, 331 aa, Homo sapiens
RLRANIDPTLFLIRTFSNVISSIVFGDRFDYKDRELLSLFRIMLVIVPVHVNSTGQLYEMFSSVMKQLPGPQQQAFQLLQGLEDFIAKKVEHNTPLDPNSPRDFIDSFLIRMQEEEKNPNTEFYLEKLVMTSLNLFIGGTETVSTTLRYGFLLLIKHPGVEAKVHEEIDRVIGKNRQPKFEDRAKMPYMEAMIHEIQRFGDVIPMIWPGRVKKDTKFRDFFLPKGTEVYPMLGSVLRDPIFLSKPQDFNPQHFTELEGAPKKSDAFVPFSIGQPNCFGEGLARMELFLFFTTVMQNFRLKSSQSPKDIDVSPKHVGFPRFPRNYTMSFLPR

SEQ ID NO: 1014802 - protein, 37 aa, Homo sapiens
MVVKVHSITKKTGPQCRGGGDVQASPTPSGAQGIPFT

SEQ ID NO: 1014803 - protein, 34 aa, Homo sapiens
  misc_feature (29)..(29): Xaa can be any naturally occurring amino acid
ILELAGNGARNNKKTRIIPRNLQLAIRNXGGTEQ

SEQ ID NO: 1014804 - protein, 39 aa, Homo sapiens
MRGHYLDIEKHVDRAALKTHAGLPLTYSCSNFLTDPHIQ

SEQ ID NO: 1014805 - protein, 100 aa, Homo sapiens
GKTETTKDLDRPLGTMVYVFNCSEQMDYKSCGNIYKGLAQTGAWGCFDEFNRISVEVLYVIAVQVKCVQDAIRAKKKKFNFLGEIISLVPTVGIFITMNP

SEQ ID NO: 1014806 - protein, 101 aa, Homo sapiens
GKTESTKDLGRAIGIMVYVFNCSEQMDYQSCGNIYKGLAQTGAWACFDEFNRITVEVLSVVAVQVKSVQDAIRDKKDTFNFMGEIISCVPTVGIFITMNPG

SEQ ID NO: 1014807 - protein, 101 aa, Homo sapiens
ARRKRQRTWGKALAIQTVVFNCSDLLDFMAMGKFFKGLASAGAWACFDEFNRIDIEVLSVVAQQITTIQKAQQQRVERFMFEGVEIPLVPSYAVFITMNPG

SEQ ID NO: 1014808 - protein, 33 aa, Homo sapiens
GVSTWALPVFLISHKSSNKLRIHLIKQAWCLGD

SEQ ID NO: 1014809 - protein, 237 aa, Homo sapiens
  misc_feature (1)..(1): Xaa can be any naturally occurring amino acid
XDFVWTRGAVLLEHRFEHVEMWNSLFGYDVSFSVETHGYDLLTEILTFLIDHSLKSGNEWWSQDHRGVWTHITLFNIHQLMNKVSEDHDFSHYRKKWSQCQKHPMDMEFVFELKRDLVENSAVAHEYVSEVEKHSSQTDFAKFLGVSTELRFDIADKLSVGFDYKVEVEKLTSHKDFSRGFGGRYVVEKDKWDKAALGYDYKGETQKHESQRDYAKGFGGQYGIQKDRVDKSAVGFN

SEQ ID NO: 1014810 - protein, 44 aa, Homo sapiens
  misc_feature (25)..(25): Xaa can be any naturally occurring amino acid
  misc_feature (36)..(36): Xaa can be any naturally occurring amino acid
DPQEQVPPDLRMAAIRRPSGILRSXEACDGEEEAVXPNQELLEA

SEQ ID NO: 1014811 - protein, 84 aa, Homo sapiens
MYKNVVTYRGAKVYVLGAIRWGLEGLIFILIFLIEYHDPFQFIHTTPSSVPCFAMSQVYCPPQCICRLDWLHDIYYTTIHHRLL

SEQ ID NO: 1014812 - protein, 295 aa, Homo sapiens
SFQKIKKMKNILLLILCVFLAKSQGVKKMRRVSSVHVVIEPLRKKREEAPRLRTAPTPISGGGYRARPAKEAANQKKVEKKAPDAGGCLHAEPDLGVLCPKGCELQEALLKKERQRRNSVDELKKKVEDVSQKSSSSFQKMYLLKELWKKRKKKVKEKEKVVNEYSSEMEKNKLKKDENVKRKIPNKLRVLRSILENLRSKIQKLESDVSAQMEYCRTPWTVSCNIPVVSGKECEEIIRKGGETSEMYLIQPDSSVKPYRVYCDMNTENGGWTVIQNRQDGSVDFGRKWDPYKQG

SEQ ID NO: 1014813 - protein, 181 aa, Homo sapiens
MLEAVFTLTQTWGCCVLEDVSCKRLCYEQERPMRNSVDELNAKVEGVSQTSSSSFEEMYLVEEVWEKRQKQVKDNENVVNEYSSELEKHQLYIDETVNSNIPTNLRVLRSILENLRSKIQKLESDVSAQMEYCRTPCTVSCNIPVVSGKECEEIIRKGGEDLKCISFNLTVLSNRIEYTVT

SEQ ID NO: 1014814 - protein, 274 aa, Homo sapiens
  misc_feature (78)..(78): Xaa can be any naturally occurring amino acid
MYEKEREKEAPSRRPAPAPSSGGGYRGSLQPKKLALKKKKKKKKLKLVGCLQADPKVGVLCPKGCQLQPGLVQKERPXKKSVEGGERRRREELRERFSYYSLVNVFAERTVEKKAEEVKDNENVVNEYSSELEKHQLYIDETVNSNIPTNLRVLRSILENLRSKIQKLESDVSAQMEYCRTPCTVSCNIPVVSGKECEEIIRKGGETSEMYLIQPDSSVKPYRVYCDMNTENGGWTVIQNRQDGSVDFGRKWDPYKQGFGNVATTQMGKILWPT

SEQ ID NO: 1014815 - protein, 149 aa, Homo sapiens
  misc_feature (18)..(18): Xaa can be any naturally occurring amino acid
  misc_feature (22)..(22): Xaa can be any naturally occurring amino acid
  misc_feature (84)..(84): Xaa can be any naturally occurring amino acid
  misc_feature (96)..(96): Xaa can be any naturally occurring amino acid
  misc_feature (102)..(102): Xaa can be any naturally occurring amino acid
MMYERKFQEHNVQGCCHXQKSXNLRIGGYCCGEAGLVFILIFLIVFHDPFLFIHYYTIICAMFWDVPGVLCTPVVSAVGVGCVXSFIPPSTTVFFXALFSGXCCGPAVIVSVIRAGEHAVVNGHGPVLVHQLGCSIHEGITGCSSVFVH

SEQ ID NO: 1014816 - protein, 40 aa, Homo sapiens
CRAPPSSVSVPSYRSRALLASLSASHDPPYASFTLLPVPS

SEQ ID NO: 1014817 - protein, 66 aa, Homo sapiens
AMGWDPGNSAIMAGKEDEFEDQAFFPTELVPIPYNFGSSEWDTILDHKVMGIFFNPEYSFKTLRQT

SEQ ID NO: 1014818 - protein, 78 aa, Homo sapiens
QFQFIQVAGRSGDKIFIGNVNNSGLKINLFDTPLETQYVRLEPIICHRGCTLRFELLGCELSGCTEPLGLKDNTIPNK

SEQ ID NO: 1014819 - protein, 39 aa, Homo sapiens
TRSRTYLLLRAFEKDRFTGIATREELARETGTPESRIQI

SEQ ID NO: 1014820 - protein, 104 aa, Homo sapiens
MRKRVCALMITGSWMIGSINSCAHTVYALRIPYCKSRAINHFFCDVPAMLTLACTDTWVYECTVFLSTTIFLVFPFICIACSYGRILLAVYHMHSAEGRKKAYS

SEQ ID NO: 1014821 - protein, 111 aa, Homo sapiens
ICNPLRYPIIMSRHVCVQMAAISWVTGCLTALLVTSCALQIPLCGNVIDHFTCEILAVLKLACVSSLLVDMVMLVVSILLLPIPMLLICISYGFILSTILRIGSTEGRNKA

SEQ ID NO: 1014822 - protein, 165 aa, Homo sapiens [sequence omitted]

SEQ ID NO: 1014823 - protein, 35 aa, Homo sapiens
NSVTVADTAVYYCARGKYGEGTRRWGQGTLVTVSS

SEQ ID NO: 1014824 - protein, 30 aa, Homo sapiens
NSVTAADTAVYYCVSGYYFWGQGTLVTVSS

SEQ ID NO: 1014825 - protein, 56 aa, Homo sapiens
YKCEECGKSFILSSHLTTHKIIHTGEKPYKCKECGKAFNQSSTLMKHKIIHTGEKP

SEQ ID NO: 1014826 - protein, 59 aa, Homo sapiens [sequence omitted]

SEQ ID NO: 1014827 - protein, 33 aa, Homo sapiens
VVSEIPGKGGAGVWNCRGPWSAAAFFVYIRRSS

SEQ ID NO: 1014828 - protein, 142 aa, Homo sapiens
VFCLCIACSLSVRSRCDLLGGCLVCFASFHKLASTIVDMHSGSAIGGPLPPFGGFSARGVGYSLNMARSLSTFKCVPPRSLCWRTAPPYCLVPAPYEQFPRLPGARAKNPCGCFSHFPARWFSFPPIRVLVEPLWSRAFYRE

SEQ ID NO: 1014829 - protein, 94 aa, Homo sapiens
NENRMEESKALFRTIITYPWFQHSSVILFLNKKDLLEDKILHSHLVDYFPEFDGPQRDAQAAREFILKMFVDLNPDSDKIIYSHFTCATDTENI

SEQ ID NO: 1014830 - protein, 247 aa, Homo sapiens
  misc_feature (36)..(36): Xaa can be any naturally occurring amino acid
  misc_feature (51)..(51): Xaa can be any naturally occurring amino acid
  misc_feature (59)..(59): Xaa can be any naturally occurring amino acid
  misc_feature (112)..(112): Xaa can be any naturally occurring amino acid
  misc_feature (201)..(201): Xaa can be any naturally occurring amino acid
MSGAPRCPTCAWGDPGPVSFSGVRSTPLYPTFHVLXRFSGQNISPGLFGSXFLARPDGXFFIPATYYVAFFLCMTDPFSWVPRDLLLKEETNRFWVSTSLVCPRSSHLISPXDIKYRALFLLRNPKGGYPPALFFVNNEEGSVLLPPRSGHTRHFYISAAKQICARVIIDLYYATEAHHSGVHSSCVRLIPLTAACVVLPXGVNTYFSAPDGERQRTRGCDAHTSRRSQHLSPRQGSPFVHHHDMPR

SEQ ID NO: 1014831 - protein, 180 aa, Homo sapiens
IAPVFVLMEQITLKKMRKIVGWSNKDGDGIFSPGGAISNMYSIMAARYKYFPEVKTKGMAAVPKLVLFTSEHSHYSIKKAGAALGFGTDNVILIKCNERGKIIPADLEAKILDAKQKGYVPLYVNATAGTTVYGAFDPIQEIADICEKYNLWLHVDAAWGGGLLMSRKHRHKLSGIERAN

SEQ ID NO: 1014832 - protein, 104 aa, Homo sapiens
FVFTSFTSFLALLVLASFFLSATFFVSPFPFVSSVSCLAVLVVLPLSLVFLSSGRLYVFFVTSVSAFALDFLFLSRLFSALVFPVCPLLCVSSSLWLYFLLRCF

SEQ ID NO: 1014833 - protein, 119 aa, Homo sapiens
MRAKRTTTLLAVAKFVVTPGKELEKVAVEGNASPSVKGGGVGVAVEVRGDHLGPSVAQDALEGAPDACFTTFLMSSDLAGFSRRQGRPTTETLAVGTRKAMPVSFPFSSGMTFPTALAA

SEQ ID NO: 1014834 - protein, 225 aa, Homo sapiens
HSEPLRERPVPAAPACLALPGLLGAGWGACRPALYGPSLCAPPSLRGSAEDGGRSGSCTRLPRAQPPLRWQPAGSSEQEAQGGWSVGPGLGERHHGPRPRAIWTASASAFEVVGGLFVRQAALALGLEVVFTALMPLNLFPGDPGSIRPGPEPGCQASRVIKGGLGPFIEVEPETGECSASAAPPAGQAGREVGPAGHDHRVGKPEDGKERALRAPVRGPWLRPF

SEQ ID NO: 1014835 - protein, 86 aa, Homo sapiens
FFPPRGGWPFSPPCPPGVWALWPPPPPGAQGGGGGPPWGGGGSPPFPPPPGGSPPPACAFAPLGGGGALGPPPPFFPPQNTPFSPP

SEQ ID NO: 1014836 - protein, 103 aa, Homo sapiens
PRAPTGCEAAEVAGGGQAAAGAAMRGEAVAGAGTVRTEGALAASAELRGAAQHPATLADSPAPSRVGQPDDRPESLGFGNETDGHKSAIYLELTMCQSHTLSH

SEQ ID NO: 1014837 - protein, 1134 aa, Homo sapiens
AQFFRFDGWLINIENSLSLAAVGNMPPFLRYLTTQLHRQVPGGLVLWYDSVVQSGQLKWQDELNQHNRVFFDSCDGFFTNYNWREEHLERMLGQAGERRADVYVGVDVFARGNVVGGRFDTDKVGGGFRPRASGPVPPLGPHFLMDLPFPSAPQRNDSSCSSQSGDPVALRNRCPAPAKLCPQLKPLSRLFLQSDNVFLCGCYQTEARRSPAVRSSAGLGLLSQLRSLIFPVREACGEHRGLQRLSLRLRGEDGGGAQGLGIGRCHDEGAFSGKAGHTSTEEGAGPGRCPWRGMRRALPASGLSVLPVPRAPGMFSALNLALNEEINPKLKSLFTARDSDNRMRGVPEDNGTAQPQPVGAQPLPPCPCSSADRLSRALFWRACGTTGVMPSSLQSLELIRKHGFSVALFAPGWVYECLEKKDFFQNQDKFWGRLERYLPTHSICSLPFVTSFCLGMGARRVCYGQEEAVGPWYHLSAQEIQPLFGEHRLGGDGRGWVRTHCCLEDAWHGGSSLLVRGVIPPEVGNVAVRLFSLQAPVPPKIYLSMVYKLEGPTDVTVALELTTGDAGSCHIGGISVLNETSSRHSLRPLRVPPTKLARWVGRCGRQLSGGWVQHCYEVSLRGCLLLDLLVCFSRPPGSREEESFTCRLGEIQVVDAASLLAPLPQVQAVTISHIRWQPSASEREGPPALLQLSCTLHWSFLLSQVRCFRIHCWGGMSDDSPGRELPRPEMPMFLGLAFATQYRIVDLLVEAAGPGQDRRMEFLVEPVPKEGFRVPQAEWGRAVLLYSAPAGADAKAGWSPGLGLRPLPGCLPLACAGPAKCPQWQRGPGPGAGVGDPGLSAVAFWWGAMETGNQAVGSQRWSLRGEWRAFCFCLVPPHGTWFPGENERRGEVENRTFHKGYFLIGCKMLMPRMMIFFPADETIRKGLRLWQVGFGAGAETFLSMRTSYSSSWGGAACGMAGEDALENRPPSVEGPFPWGVGILGQPALASCLHVGQPQLLRVSWRWQFTVLLSVRSSPERFQQPLALRRLFRAVGMQGSGSEAVCAVALPLPSERPWALDKPPFRLGEQVSPGRKQHLPPAPAQPQPECRSCRTRGGFSSYSVPSRPPFSASSKHREDLQADPLSSSQHRCVGA

SEQ ID NO: 1014838 - protein, 217 aa, Homo sapiens
AAHHVAGVAVAVHADVLVRGLGVDLLHPFEQVAGHGFVGRQQAAGNEVAFQQGGQRVFAEVLHTEGFAVFERTGGAHGVQAAEQLSEAIELVEIARFRGPAATPGEQGEAKTGVFEQAFAVVDHRRDDRDVAVGQFEGEAVFFEDGLVGPALRAVELGDQGFAVFDAHLIDTVFVAVERQDPGVTEKADAFHGVEHQVGGECFKRVGHADSCGRQAA

SEQ ID NO: 1014839 - protein, 114 aa, Homo sapiens
HSVLFSCCSPLRVFLALLLVVCFVFVLLVVVSQSGFRVFVWLPRFLPLQGGGFFKGPKGIYSCPPFVVPPVVRTVWYPLVVVCPSSPVFSPFPLCAPPFLHPLARSSRDTLVFL

SEQ ID NO: 1014840 - protein, 231 aa, Homo sapiens
QLSGGDPGFAPPSVPPRLLPPTGLPTLAKVTSTLGILEGLRTTVHAIISTHKTVDGPPGKLWRDAPGSPDIIPASTGAPQAVGPRSSLTDGKLTGMTFRVPPAHVSVVDLTCRLETCPNDDLQKVVNRRLEGPLQGILGYPEPPVVSSDFTATPPPPPLTLGLALPYDPFVKLISWYDHEFGYRHRVVDLTGPPGLPGVRPLDPPPPPRAPEEERDPHCWGVPATLSPPPH

SEQ ID NO: 1014841 - protein, 383 aa, Homo sapiens
LSVQSRGYKCGYEYVLFNETRFSSTLRTTSGCDNVSYIVDSTPMGKMPVGTGKGCRTGKLVNRTGISHHHLPGAEIPPKSSGAMLALSYVGGGPLAIFTTMEKAVGIILQGGAIKESSISDPLVLMPPVFVMGVNHEKVMTTAVKIISNASCTNQAGLAPRGQGHRMDNFGIVEGLMSTDQCHHCTPRRRVDGPVRETVAVMAAGLYQNIIPGSTGSCQGVVGKGHALSCNGKLTWHGLPCPNGDVSVVDCLATRKTGPYDDIQNVREQAIRKAPKGYGEQHWHQGEQLNSTGSPVPHIERGAGKPQRQHGGPKYRREHNNVRNRRGGQAAQFTDKPGNAKRNRRTRRADDTHNHDCDKQRRPLPQTRRLDREKSYEQQIKRR

SEQ ID NO: 1014842 - protein, 275 aa, Homo sapiens
SVYIGLHVPRMIPPIGKFHGSVKAENGEAVIDGDPITIFQERDPSNHHRWQAMTEADDTSWMLHCGVFTHHGRRLVASFCMGGDAQHTGSVSLSDSTVCMTCPPSDVVSTGGVQSRWKDTLIGRNKAVQSNRVECKWLVFVENPKQNMGSKKNPRVSRPQGSHTPSREQHTFFEGKFQVEATRVHVLNLTPSTKVRRNLAAKITERLSPKAPKEKLIPITHLCHTFSLFGRAATSFGPKKGGPLWFGGCPHHPWVVEIGVHRWVREPLGKSPGCA

SEQ ID NO: 1014843 - protein, 237 aa, Homo sapiens
MSRERGWQPSLPSLWQQVPSRCPHRLLMLIFSPRALKVNLDLTSLLDNEDKKSKNKRGVLPKHATNIMRSWLFQHLMHPYPTEDEKRQIAAQTNLTLLQVNNWFINARRRILQPMLDASNPDPAPKAKKIKSQHRPTQRFWPNSIAAGVLQQQGGAPGTNPDGSINLDNLQSLSSDSATMAMQQAMMAAHDDSLDGTEEEDEDEMEEEEEEELEEEVDELQTTNVSDLGLEHSDSLE

SEQ ID NO: 1014844 - protein, 197 aa, Homo sapiens
MAPKKPEPKKEAAKPMNVKMLDFETFLPILAPAPAPAPAPAPAPAQHISRNKEQGTYEDFPEAPKEPAFDPKSVKVEGLRVFDKESNGTVIDFTADQIEEFKEAFMGAELRHVLATLGEKSLFDRTPTGEMKITYMTEAEVEQLLAGQEDGQCGDVLRALGQNPTANGCINYEAFVKHIMNAEVLRVLGKPKPEESG

SEQ ID NO: 1014845 - protein, 38 aa, Homo sapiens
WRTSTRNISSEEKASWTRPEKQETLDGHMVVRSHARVS

SEQ ID NO: 1014846 - protein, 161 aa, Homo sapiens [sequence omitted]

SEQ ID NO: 1014847 - protein, 39 aa, Homo sapiens
TYEQLVALENKFKATRYLSVCERLNLAVSLSLTETQVKI

SEQ ID NO: 1014848 - protein, 184 aa, Homo sapiens; identical to SEQ ID NO: 843745

SEQ ID NO: 1014849 - protein, 338 aa, Homo sapiens
EFRKTLETDTVTGKSGEKIDYSTTPRIDEWRDKGYRLVEDGFAEAGTPVYDDNDDVEQIFIVKLDHDTAPVGPNDPHEPETPINPNDPNGPKWPAKDSYTKQYTSTVHFVDENGNKLHDYNVQTSNWTRTLIVDKATGEILNPDEAWHSDIDKYSDVKVDPIKGYYTDRNSVPGEVAQQQDIVNTVVYKQIGKIVPVDPSGNPIPDAPTPQYRNNPNDPTKVIVTNTPEIPGMTPEVPSVTPENPGEDTPIVYNKVETPTPKTVDVTPETPKTVDVTSETPKATPVKTAPQVEKVKAPELPQTGEKQNKALTAVGASIMTGLLGILAFAKKKKDDKEI

SEQ ID NO: 1014850 - protein, 271 aa, Homo sapiens
LFGLCLFCVVVVGCAVSCLRIRLVLSFVVSFCCVCLCLVGVSVFGCAVGLFGLRVLCCGLGGVVGAVWVWVVLVWCVWFCLWLCAVCSGVSAAACAARWVLCVCGRRSPAGGAVSAPPKRGVRIFSTRLGGRPPSFIVCGGVGPNIGHTQFGSRGSCCKRVGNATRWYGSGGYFVRGEKVNSPPPPRTSVVGVDAQTCCNNAPSKCLFCGLIRNSAAPRGPTKVETVYSSTTGLRHQKKRGVEATEKRHIVVCVVRKYLLRGGNSTDERRL

SEQ ID NO: 1014851 - protein, 34 aa, Homo sapiens
HSDLKPENSLCQHPNQVSPVKICDFGLGNRLHGT

SEQ ID NO: 1014852 - protein, 46 aa, Homo sapiens
KLGDFGSASHVADNDITPYLVSRFYRAPEIIIGKSYDYGIDMWSIG

SEQ ID NO: 1014853 - protein, 1124 aa, Homo sapiens
MAPESHILASNTMETHILASNTMDSQMLASNTMDSQMLASNTMDSQMLASSTMDSQMLATSSMDSQMLASNTMDSQMLASNTMDSQMLASSTMDSQMLATSSMDSQMLATSSMDSQMLATSTMDSQMLATSSMDSQMLATSSMDSQMLATSSMDSQMLATSSMDSQMLATSTMDSQMLATSTMDSQMLATSSMDSQMLASGTMDSQMLASGTMDAQMLASGTMDAQMLASSTQDSAMLGSKSPDPYRLAQDPYRLAQDPYRLGHDPYRLGHDAYRLGQDPYRLGHDPYRLTPDPYRMSPRPYRIAPRSYRIAPRPYRLAPRPLMLASRRSMMMSYAAERSMMSSYERSMMSYERSMMSPMAERSMMSAYERSMMSAYERSMMSPMAERSMMSAYERSMMSAYERSMMSPMADRSMMSMGADRSMMSSYSAADRSMMSSYSAADRSMMSSYTADRSMMSMAADSYTDSYTDTYTEAYMVPPLPPEEPPTMPPLPPEEPPMTPPLPPEEPPEGPALPTEQSALTAENTWPTEVPSLPSEESVSQPEPPVSQSEISEPSAVPTDYSVSASDPSVLVSEAAVTVPEPPPEPESSITLTPVESAVVAEEHEVVPERPVTCMVSETPAMSAEPTVLASEPPVMSETAETFDSMRASGHVASEVSTSLLVPAVTTPVLAESILEPPAMAAPESSAMAVLESSAVTVLESSTVTVLESSTVTVLEPSVVTVPEPPVVAEPDSVTIPVPVVSALEPSVPVLEPAVSVLQPSMIVSEPSVSVQESTVTVSEPAVTVSEQTQVIPTEVAIESTPMILESSIMSSHVMKGINLSSGDQILAPEIGMQEIALHSGEEPHAEEHLKGDFYESEHGINIDLNINSHLIAKEMEHNTVCAAGTSPVGEIGEEKILPTSETKQRTVLDTYPGVSEADAGETLSSTGPFALEPDATGTSKGIEFTTASTLSLVNKYDVDLSLTTQDTEHDMVIISTSPSGGSEADIEGPLPAKDIHLDLPSNNNLVSKDTEEPLPVKESDQTIAALLSPKESSGGEKEVPPPPKETLPDSGFSANIEDINEADLVRPLLPKDMERLTSLRAGIEGPLLASDVGRDRSAASPVVSSMPERASESSSEEKDDYE

SEQ ID NO: 1014854 - protein, 54 aa, Homo sapiens
SRGQRRKMAQENPKMHNSEISKRLGAEWKLLTDAEKRPFIDEAKRLRAVHMKDY

SEQ ID NO: 1014855 - protein, 50 aa, Homo sapiens
MSSKDGLSEKSIGGSRARGVNSPEPSEKIPLWTEERGGLWKWWKIRSYRY

SEQ ID NO: 1014856 - protein, 40 aa, Homo sapiens
LFSADLAASIVIGLMRLQPRPGLQFSSRAQRCTGQRSYRY

SEQ ID NO: 1014857 - protein, 40 aa, Homo sapiens
CFCLLIRTAAAEELHHGVWTEVDSPCRNIKRECIRPNPFP

SEQ ID NO: 1014858 - protein, 377 aa, Homo sapiens
EFLGIVKGDDDSARGIVAQNMTTAEIETFGSDAVIMATGGPGIIFGKTTNSMINTGSAASIVYQQGAIYANGEFIQIHPTAIPGDDKLRLMSESARGEGGRIWTYKDGKPWYFLEEKYPDYGNLVPRDMPTREIFDVCINQKLGINGENMVYLDLSHKDPHELDVKLGGIIEIYEKFTGDDPRKVPMKIFPAVHYSMGGLYVDYDQMTNIKGLFAAGECDFSQHGGNRLGANSLLSAIYGGTVAGPNAIDYISNIDRSYTDMDESIFEKRKAEEQERFDKLLAMRGTENAYKLHRELGEIMTANVTVVRENEKLLETDKKIVELMKRYEDIDMEDTQTWSNQAVFFTRQLWNMLVLARVITIGAYNRNESRAAHYKP

SEQ ID NO: 1014859 - protein, 173 aa, Homo sapiens
  misc_feature (173)..(173): Xaa can be any naturally occurring amino acid
MGTTKRCLGQPPEKKSANGARVWVHPGGSPGESSPPPGGINYRVVGDPHNVRFSRGGHNMLPLFAVLFPPANIPAGVFPTSREDTSHGPALLCFNTQLGAPRRPVRVFRSPLPSLRHGIVSKTGLGIYSPEEGGPPPGRGGEKISRVGTTPFLAPHWAAPTKRSSPAPLGVLX

SEQ ID NO: 1014860 - protein, 157 aa, Homo sapiens
ICHPLDYPVIMNPCFCGFLVLLSFFLSLLDSQLHNWIALQITCFKDVEIPNFFCDPSQHPTLACCDTFTNDIVMYFLAAIFGFLPISGTFSSYYKIVSSILRVSSSSGKYKAFSTCGSHLSVVCLFYGTGFGGDLSSDMSSYPRKGAVASVMYTVVT

SEQ ID NO: 1014861 - protein, 210 aa, Homo sapiens
SEEAHRGNILFGRPGSGLSDPRAPPPSAEVDPHEIQVVYLRAPGGEIGAKFCLAPQIGPPGLSPKKVGDDHAQATGDWKGLRITSEKLTLQTDRPQIEVVPSASALIIQALKGPTQRPERNQKNHETPVGIITFDEIVNHCSTDAAPILSPRNSLGHLKEDPGGCPDQMGCNVDGPHPHDIIDDINRWCFGKPQTQFSPKGNISNKGSFD

SEQ ID NO: 1014862 - protein, 67 aa, Homo sapiens
  misc_feature (2)..(2): Xaa can be any naturally occurring amino acid
  misc_feature (24)..(24): Xaa can be any naturally occurring amino acid
  misc_feature (53)..(53): Xaa can be any naturally occurring amino acid
PXQLLAWTDAGNWVRELQEEPDRXLLAGSPQVLKGTSLEKGSWDVAKCEARFXGILTVPGYKFLATL

SEQ ID NO: 1014863 - protein, 52 aa, Homo sapiens
  misc_feature (28)..(28): Xaa can be any naturally occurring amino acid
  misc_feature (35)..(35): Xaa can be any naturally occurring amino acid
GQHLGTLGCWTNFFQHVRTDGRGPSQAXLEGSSPXRGTVGGLRKHHIKVLRL

SEQ ID NO: 1014864 - protein, 111 aa, Homo sapiens
  misc_feature (41)..(41): Xaa can be any naturally occurring amino acid
  misc_feature (55)..(55): Xaa can be any naturally occurring amino acid
FFLIKKKKKERKKIPHLLKSLSLENFWFPADWMSFCCGCVXLSVYFNGFISLSSXVIDFKTEQKHKQTSLNHCPKTQEAQQREPPENCSQSSSPKEAWGHCKPQKQALHQN

SEQ ID NO: 1014865 - protein, 109 aa, Homo sapiens
MRPVMYLGDVRIIRPQNALVSSVGLYYVVLTHDAPYICCKVTTPQPLVVFCSHPRFKKPLTGTQIGALSDTGEKSHFGDERQKTLLAEWRAPCEIGAAVCTIDGKTCPL

SEQ ID NO: 1014866 - protein, 203 aa, Homo sapiens
  misc_feature (158)..(158): Xaa can be any naturally occurring amino acid
  misc_feature (172)..(172): Xaa can be any naturally occurring amino acid
IFLYNKFIFKFFIFLCLCDMFRCLQLLVVYIKVEIDMEKSSPTPSGTGKMTVVRKHRLACGTGVTVDTGVGCFFTSSHYANRDAETFRCLCRKRCQRLLKSQRGGVKKSCISVPHKTAVSGFSSCERNIRALGTVAGRSLRVAPSFSTWALPPTHHSXDHSPDDHNCQDSQXSHNAHDGDGGLGRWLPSQGEGLRQRLMLYMA

SEQ ID NO: 1014867 - protein, 146 aa, Homo sapiens
SRPMRRAESVSTPPTEVVQKSRINMRGCPPRKSCKSRCPHNSCPLAPPQDSGPPLGSLFSPTKKDLWWNDTLATRATPGVRLARRAPLRASYPRGEARGPPFTDSRATAPRSFERVVALFLGPLSPLEFTPSMAPLSRDLPTRTTE

SEQ ID NO: 1014868 - protein, 68 aa, Homo sapiens
YRDIAGVRKKGVGIRTVFRKTRNPIGRGTVGRRSSHDPWGPQMNFYGNCKAAFLRTHKILRGPHALSR

SEQ ID NO: 1014869 - protein, 1065 aa, Homo sapiens
  misc_feature (712)..(712): Xaa can be any naturally occurring amino acid
  misc_feature (714)..(714): Xaa can be any naturally occurring amino acid
  misc_feature (738)..(738): Xaa can be any naturally occurring amino acid
MESNFKKIALTACSLVNKVFGDFVIESLFCQVASLSCNKLLVCVLYLRYLIKSKELKMIDRNLASWMVYTSTYRDVIFGGYELHWLYKASLCICVTFCIFRELLSHIFGITILLLKSELELWNRIVKTILKSMWYLIGYYSQLISLIEKSQRDFESGMYECDTCLPLPVLPYAVYAKPERVLKYTLVSALRCLDFPGVYPPVLICLRILRMSISINCNISFHVMRKNKDFFEIVNLSGFNFGVGKGYTKIKDELLSILIPEVFFLSGKRYFGDKVRFVEELQERGLEYPLSTVNILCNPSTFNRTEEINIDKILLMKDFIWISLVFLLMSFFCSRIQSKMPHCMESPDLCQFLSFLLSFVTMTLDLFGFDVKDETEVTDFWGKNTTEITLITSDWGSIIYNWLNLTDDLVQVVSVQVSVFFPFRYYSLDASHQVQLTLKERGELGSTFQREENVNLWKYIKATVIILGEMLRSHGNKVPLLNFSILMDLVCSYYYFGVLMVIFFIFLIPSTVEIFCEEDLCILHVFSFFHLYHYETTDINFILWVVIHNYPCCCLLIFDYYLFYIFIKYRPGCLTLLGSSNPLVLASQSAGITGVSHCAGHSLFCCSCCSSFFFFFWLLSPFDTSLSYLFFKSMFFLSLITRYFRLILHFACLRSRINHFSKEASGRIVKEVTGGKCEEFGKMIDSRPSDVDTFLALSTDVGFCIHVTPVLXKXFVSKFPRFREPDIKCLNTGHNPEXKFDKNLIYSQVSTHKHLLFFLGVFDNFFKVKRPLKYYQYSELTFDILHCPLRLLFFYTGFHSLPSRDLFHIFPGCFIDGEFLKIALLSIIDNKLHVFKMYCLIISDTFCNPSFSKELRQQRGLLEPRCLSCSCSDLWSCYALQPGRHRRLLKEGIPMKTITTIKIVNLSITPKSFLMSLFPLSCLFLLPFSLQEILDLFITVDYFAFFENFFVNTLCSFFNCSVLVCCVGISQFFGLPVGGHGKTAKAVCFQLFDCYKIKLLNFVYKSLYGYTPLFLLGKCLIGECLDHVVDVCLTFKETPCFPQWLYHFTLPPAMFGGFQFCQYVG

SEQ ID NO: 1014870 - protein, 196 aa, Homo sapiens
QHVPFSVLFSPVYSGFLIFRTHHTNLAHSNTHCSRPRKVFVTPPNRRDSHKDSRYKHPCMRVAPHRERVGKYSRGPHTFLGPTLLPPPKILGPPTGVLFSPPIKNILVDRTIAHQGPHGCDFGKGASEEFTTWRYLTPFQAPYTTAPQILKVGGLLALLPWIHPKRLTREPTPEHQKIVTPGETPFEHTTMGIITI

SEQ ID NO: 1014871 - protein, 108 aa, Homo sapiens
MVADFPLLTCAVLFPELTRIVFVGLPARYGVSIRPLLGIGRPPVLLCLLSLPLCGTSSSRPLALSLWDGAIHSPPPPCLLDEHSYSFRLPTRSMAHRIYSVYKDRLEQ

SEQ ID NO: 1014872 - protein, 110 aa, Homo sapiens
EGVSLLSPRLECNGAGSAHCNLCLPRVQGILLPQPPEELGLQAPATHPANFLFPVEMGFHHVGQAGFELLTSVDLPASASQSAGITGVSHWHTALSAFSNGPVWMGFTLI

SEQ ID NO: 1014873 - protein, 70 aa, Homo sapiens
MRHAESLRPERLSGDPYKKILGTAPSVGCNVDGPPPHDIIDDIHRGAVDAPPSYSPKGNLSIKDQFDHWW

SEQ ID NO: 1014874 - protein, 31 aa, Homo sapiens
MLVMAPRTVLLLLSGPWLTETWAGSHSMRYF

SEQ ID NO: 1014875 - protein, 70 aa, Homo sapiens
  misc_feature (70)..(70): Xaa can be any naturally occurring amino acid
LRLQGAMFTPLHYSQGDNKNLSRREPRGRSCSEPRSCHCTPPAWVTEQDSSQKKVYYSALIISFRFWVKX

SEQ ID NO: 1014876 - protein, 597 aa, Homo sapiens [sequence omitted]

SEQ ID NO: 1014877 - protein, 67 aa, Homo sapiens
TWGTEHREPAFPFQPGSITEVCITFDQADLTIKLPDGHEFKFPNRLNMEAINYMAADGDFKIKVRGL

SEQ ID NO: 1014878 - protein, 55 aa, Homo sapiens
IISMRLRLHLKQLRSRASALGDSLRTAKAKAVKMLAESDTNSTSGDPVEKKDETP

SEQ ID NO: 1014879 - protein, 161 aa, Homo sapiens
MLVSPPVRLAICGGLSARVISVGRLCARGCPGDAPQGASLLGRGPRRLPGDPRVLPIPAMLTPLVGASRAAWSSCPCGGGVGVPTPAVPSFCAAFPMGHRRAPFLTPSTHISLPWVFASQVGPKEVFLDPPGPRDFPISSRVGFFLAIVDPPEWETPHLGA

SEQ ID NO: 1014880 - protein, 48 aa, Homo sapiens
ENTKKVIQYLAYVASSPKGRKEPGVPASVSTVSYGELERQLLQANPIL

SEQ ID NO: 1014881 - protein, 67 aa, Homo sapiens
APLLRHWELQVPIPPPDAMETLVCALGLDIGLVGFLVGIVLIIMGTYVSSVPGNDPSERNDLWETPC

SEQ ID NO: 1014882 - protein, 40 aa, Homo sapiens
  misc_feature (31)..(31): Xaa can be any naturally occurring amino acid
DDSEEEKAAAPPRRLYLKSKFFPSPRPSESXYHPYPECTS

SEQ ID NO: 1014883 - protein, 167 aa, Homo sapiens
TDPNNDTHQHHHHGDPNPNTHWNTDPNPNTHHHHHYGDPNPYTHRHTDPNIDTHQHHHYGDPNTNTHRHTDPNHDTHHHHHYGDPNPNTHRHTDPNPDTHHHHHHGDPNPNTHRHTDPNPDTHHHHHHGDPNPNTHRHTDPNIDTHHHQHYGDPNPNTNRHTEYNPD

SEQ ID NO: 1014884 - protein, 68 aa, Homo sapiens
AEEEKMLLSLEMRQNQTEPRHPATLEGNKSEPANNSIFVLPTSKQHAIQGLPGIGDTLPIPYMPFEML

SEQ ID NO: 1014885 - protein, 86 aa, Homo sapiens
QQYCQLDFFNDHHRDHLTQYSQLDFFNDRHRDHLTQYSQLHFFHHHHRDHLQQYCQLDFFHHHHRDHLQQYCQLDFFNDHHRDHLT

SEQ ID NO: 1014886 - protein, 39 aa, Homo sapiens
ASSKPYRSKSRPRVANSAQCTRGTTRFSPTRARRTPHAH

SEQ ID NO: 1014887 - protein, 255 aa, Homo sapiens
MMLSPDQAADSDHPSSAHSDPESLGGTDTKVLGSVSDLEPVEEAEGDGKGGSRAALYPHPQQLSREEKRRRRRATAKYRSAHATRERIRVEAFNLAFAELRKLLPTLPPDKKLSKIEILRLAICYISYLNHVLDVYGGVRRGGPPVPRPRNATDPDGPRRSGGGGCGGPARRPPRETAGEEARYLFSLVSRATREGFRRRQVGLSGEPGGSQGGFSRPGEPRGDTRDEPLLGLPKGCGFNPLETLSSPTFIRHKS

SEQ ID NO: 1014888 - protein, 38 aa, Homo sapiens
RGNLNTRLRKLDEQQEFSAIILATAGLQRMGWHNRVGQ

SEQ ID NO: 1014889 - protein, 113 aa, Homo sapiens
IRRSGLELYAEWKHVNEDSQEKKILLSPERVHEIFKRISDEECFVLGIEPRYARPESMIVTVLPVPPLSVRPAVVMQGSARNQVSGSRALPLSWRARCLKGGRPVGRDGDDLV

SEQ ID NO: 1014890 - protein, 31 aa, Homo sapiens
NRHLPVIRQNDEHKAKEERTPDICSLGLLGN

SEQ ID NO: 1014891 - protein, 97 aa, Homo sapiens
ANGFIDDRNEHPAVANNRLADSTFNAIRYFCISSSFELLGCFFGRCTTDGIQFDLDQLARRILCIGFFERKLVGRTCFIQLVLRHQDVAFTITDYIS

SEQ ID NO: 1014892 - protein, 72 aa, Homo sapiens
  misc_feature (46)..(46): Xaa can be any naturally occurring amino acid
  misc_feature (58)..(58): Xaa can be any naturally occurring amino acid
  misc_feature (72)..(72): Xaa can be any naturally occurring amino acid
IRHRREVPAVTLPPGPWPGRMIPEPVLVGILTDQPSPIRKPGWAGXNFAGLSQDHQQXIQPPGLGLLLVLHX

SEQ ID NO: 1014893 - protein, 102 aa, Homo sapiens
  misc_feature (51)..(51): Xaa can be any naturally occurring amino acid
CKTGPQRGHERVAGLLPQGRACKTQQRLLCTALRRREEAPSSTGPRLRRSXLGEGTIGHHLPASSFSISKVIITEKQQKILTPQNHVFPYENLFGQAWCSCL

SEQ ID NO: 1014894 - protein, 104 aa, Homo sapiens
MARGPKNKGMPCPTRGLLQRQVDVRRGVKRRKRFQKAGLCNTGQGGQTFAQTLLWAALPSPPTRGSEQTAVVKRAPRRKHWGAPPLGRRPQGKARVRPRAAPRC

SEQ ID NO: 1014895 - protein, 523 aa, Homo sapiens
VFLLIQLSCYFSSGSCGKVLVWPTEYSHWINMKTILEELVQRGHEVTVLTSSASTLVNASKSSAIKLEVYPTSLTKNYLEDSLLKILDRWIYGVSKNTFWSYFSQLQELCWAYYDYSNKLCKDAVLNKKLMMKLQESRFDVIPGDPVFPCGELLSELLNIPFVYRSRISRGYTIEKNGGGFLFPPSYVPVVMSELIDQMIFMERIKNMIHMLYFDFWFQIYDLKKWDQFYSEVLGRPTTLFETMGKAEMWLIRTYWDFEFPRPFLPNVDFVGGLHCKPAKPLPKELEEFVQSSGENGIVVFSLGSMISNMSEESANMIASALAQIPQKVLWRFDGKKPNTLGSNTRLYKWLPQNDLLGHPKTKAFITHGGTNGIYEAIYHGIPMVGIPLFADQDDNIAHMKAKGAALSVDIRTMSSRDLLNALKSVINDPVYKENAMKLSRIHHDQPMKPLDRAVFWIEFVMRHKGAKHLRVAAHNLTWIQYHSLDVIAFLLAWVATVIFIITKFCLFCFRKLAKKGKKKKRD

SEQ ID NO: 1014896 - protein, 108 aa, Homo sapiens
PQLKPPRRNHLCCQSPEGATQRALLALCQVVKAAPCFLKREEAIFGPPFVTSSLNASSFRTGFSPFRQVRFLRRNPVSKIFKGVSLQPLISLVLMVFNFPFLFLGFGF

SEQ ID NO: 1014897 - protein, 116 aa, Homo sapiens
  misc_feature (103)..(103): Xaa can be any naturally occurring amino acid
DGVSLSRPGWSAVAQSQLTATSASQVKTTLMPQAPEQLGPQAHAIMPGQPSVLFSRDGVLLCHTGWSRTPDLRRSAASASQSAGITDVNHHAGPQSFLQRAPXHPNPKPEACESLS

SEQ ID NO: 1014898 - protein, 127 aa, Homo sapiens
ARPPTSPPLQRGLAELRTRAALLKVSLSQHPRRPASDAGARVSGHLSVSIPSASQDSATQQLPLRPQPEGTCGQDAGRRRGAQRPRRASPSLRSETRASRPQEPPAASPGVWDLKFLEKGVQLFKVN

SEQ ID NO: 1014899 - protein, 105 aa, Homo sapiens
  misc_feature (92)..(92): Xaa can be any naturally occurring amino acid
SLLSPRLECNGTISAHCNLRLPGSSDSPVSAAQVAGITSTYHHAQLIFVFLVEMGFHHVGQASLKLLTSGDPLTSASQSAGITGVSTAPSLXFMLDHNMISPDPY

SEQ ID NO: 1014900 - protein, 91 aa, Homo sapiens
KASETRLDTEQKRGPVACFERNTYPGIATRERLAQAIGIPEPRVQIWFQNERSRQLRQHRRESRPWPGICGPQEGRQTRTAVTGSYSDLLL

SEQ ID NO: 1014901 - protein, 105 aa, Homo sapiens
  misc_feature (78)..(78): Xaa can be any naturally occurring amino acid
LGRLRQKNGLRPGGGGCSEPRLRHCTPAWATRLKLHLGEKKNELNTRDGNAGNERERSYRMHHQSLLRGEARTLMRMXLSAFLPVPRMVGAGLCLLQSMPCHPPC

SEQ ID NO: 1014902 - protein, 41 aa, Homo sapiens
  misc_feature (2)..(2): Xaa can be any naturally occurring amino acid
  misc_feature (14)..(15): Xaa can be any naturally occurring amino acid
  misc_feature (29)..(29): Xaa can be any naturally occurring amino acid
  misc_feature (34)..(34): Xaa can be any naturally occurring amino acid
PXPPRGPSIPAAPXXRPAPLLSTPAPEAXAVIGXWGCETPT

SEQ ID NO: 1014903 - protein, 355 aa, Homo sapiens; identical to SEQ ID NO: 752177

SEQ ID NO: 1014904 - protein, 100 aa, Homo sapiens
  misc_feature (72)..(72): Xaa can be any naturally occurring amino acid
AAREDGTALTYWGDSLDDSLTRLFIRRQEEALTVSMFWVVFGVQHVQQLYLLACMLHVSLTSEISTRECVFXYYNEQRFSLRTGKIKNVHPLTGEIPYWS

SEQ ID NO: 1014905 - protein, 137 aa, Homo sapiens
LKSSCMQSVDKCFLPGVISAEICHKAPVSRSFDKGYITCLISGNVYHKAPCSKAQTIVTSPGWAVERSVAIPCRQSLEKGYITWVISAEIMSKRSCRLNLDRNYITWVISAEICENSRVGRARQVLHHLGYQCRYKS

SEQ ID NO: 1014906 - protein, 70 aa, Homo sapiens
  misc_feature (16)..(16): Xaa can be any naturally occurring amino acid
  misc_feature (26)..(26): Xaa can be any naturally occurring amino acid
  misc_feature (38)..(38): Xaa can be any naturally occurring amino acid
  misc_feature (42)..(42): Xaa can be any naturally occurring amino acid
RELSGANVLAEYYWLXRRLLGAPGNXSPAPGCAALLPXSPLXPGHREASKASSITVPGPELTGLPKVLWD

SEQ ID NO: 1014907 - protein, 37 aa, Homo sapiens
TAVYYCAKETLGPKKAYCGGDCYDNDYYYYGMDVWGQ

SEQ ID NO: 1014908 - protein, 47 aa, Homo sapiens
TAVYYCARESTPYYYYGSGSYYNQPFFTVPTLYYYYYMDVWGKGTTV

SEQ ID NO: 1014909 - protein, 47 aa, Homo sapiens
TAVYYCTRDHIVVVPAATTPTYYDYVWGSYRYYYYYYMDVWGKGTTV

SEQ ID NO: 1014910 - protein, 33 aa, Homo sapiens
TAVYYCAVESLVVVAAPQPGSERADNYYYYGMD

SEQ ID NO: 1014911 - protein, 36 aa, Homo sapiens
TAVYYCARRPGAKQRAYCSGGSCPYYYYGMDVWGQG

SEQ ID NO: 1014912 - protein, 67 aa, Homo sapiens
  misc_feature (3)..(3): Xaa can be any naturally occurring amino acid
  misc_feature (32)..(32): Xaa can be any naturally occurring amino acid
  misc_feature (57)..(57): Xaa can be any naturally occurring amino acid
ASXLSDTWSVEKIPHHPPGSNGLGERAAGPTXIADSLERADMEPDHSALSAARTLFXDVEERGPEHC

SEQ ID NO: 1014913 - protein, 107 aa, Homo sapiens
MALAPPMARVRPLFDHLCGTPSRVARGHSCEAPPTGMAHLLRPSGLSSTIYQDRLKKLLFSHHPPTGLKPRGKMWDVVRQGWRGQKGAPAGPGTPAPTEKTPRGPKK

SEQ ID NO: 1014914 - protein, 101 aa, Homo sapiens
  misc_feature (12)..(12): Xaa can be any naturally occurring amino acid
  misc_feature (16)..(16): Xaa can be any naturally occurring amino acid
  misc_feature (50)..(50): Xaa can be any naturally occurring amino acid
  misc_feature (88)..(88): Xaa can be any naturally occurring amino acid
  misc_feature (100)..(100): Xaa can be any naturally occurring amino acid
ESHFVAQARVRXRDLXSPQPPSPGFKRFSCLSLLSRWGYRCPPPHPANFXFSAETGLRHVGQAGLELTSSDLPTLATQSAGIIGVSTXTWPLSLIISRLXI

SEQ ID NO: 1014915 - protein, 130 aa, Homo sapiens
  misc_feature (100)..(100): Xaa can be any naturally occurring amino acid
TARLFMRQGLILSLRLECSVMIMAHCSLDLSGSSDPCISTSRVATTTGMPHYAWIIVPFFFLVETGSHSVAQASLKLLDSSDPSNSASQSAGITDVSHNXQHGLSFSDPDQRTGLICPKTNLGKVEAVLS

SEQ ID NO: 1014916 - protein, 125 aa, Homo sapiens
  misc_feature (19)..(19): Xaa can be any naturally occurring amino acid
  misc_feature (29)..(29): Xaa can be any naturally occurring amino acid
  misc_feature (82)..(82): Xaa can be any naturally occurring amino acid
  misc_feature (95)..(95): Xaa can be any naturally occurring amino acid
  misc_feature (103)..(103): Xaa can be any naturally occurring amino acid
  misc_feature (116)..(116): Xaa can be any naturally occurring amino acid
VGSFSLQLLSHHLAEYGAXMGLRGGSVCXMVRGQTWAGLEKAPQVPTPVSRISSLTPRLQALPDLKVVLHQGLTHSCPGACXPPAAIYGAQAVCXKECLWASXELPSAPPWPLFCXHWCPKSAAG

SEQ ID NO: 1014917 - protein, 164 aa, Homo sapiens
MHPRPPRSAPRRWITFLSTRRLTSLTFTDNPSESSGANTPTGRQGFPTLFSTPPLPAAGDPPRSFLRGETCPRGRTHHPLSCESVAGTPFFPDTLLFVASISLGTTLQWTHRRAANGVHPPADSKGLLFSPFFPTNGGAVSCLSSSTTHAGVHQLRATDETSLG

SEQ ID NO: 1014918 - protein, 116 aa, Homo sapiens
MLVGVGCVGIMMWFELVRDDGVEGMVFVDGASYGEVKGDSLGLGGRARRGGRLVERARTTDASRSCAVSGSGVSWRAALVWRRDRACRGGRVTTVARCRVSLWLLTCASWRAFVVG

SEQ ID NO: 1014919 - protein, 600 aa, Homo sapiens [sequence omitted]

SEQ ID NO: 1014920 - protein, 57 aa, Homo sapiens
RQSRIEMWTHYINYKVHFGEKIGSGFTGARKKTAFLLAPVKPEQGGRLSSFYYHEAG

SEQ ID NO: 1014921 - protein, 112 aa, Homo sapiens
MTFEYRAFWHNDYTIKYPLFGTHSLESSCSRVVHLEVRVPYWFLAVLTGSLHPDLNEGLLVGYGEETPEVFRRCCLEVGFFLGVTGKLVTPIGSLEQVPVFNPKWKTPPSFC

SEQ ID NO: 1014922 - protein, 65 aa, Homo sapiens
MYPESVSHTTHLASVKYDEFVLPQCAECCCVLRGYLCEASYDPPQERSRRNDKKIILQSPNNSRK

SEQ ID NO: 1014923 - protein, 429 aa, Homo sapiens
ERTVTNNPRTQDLTAKLRKAVAEGQQAGHHFLTFILEQPPVICIRLRQTTPTHRSRQGCRYNVHAMLLPNSSHPGLPIVPRLHSGTSMAATHGTSCRTACYPCMHAPTAHAGSKRYPGYDGWHHVTIKHTRRTNDWDYDHTRFVILMLDQGSWHTCQHVKVEREHISVDDRICGICSPAHTPKGQSHIMAVNTLTVHRHSSQLEVAPRQSPHEHQKILAWDTCTAQTRISASRSVATMGPQLHFTVGPPFAWHHAEQQDATLTVHPQNNNPAANSMGEVNHKEHPRPRDENAHYSKDKRTGKLEKRQETPEKERPGVNVEPSDRRPECEHGAPPWNDTMATTGKRKNILPSHTTICGTTTDPNHRMMHKTHGPVSNNPTLHREQPETPGTRAPGLYNRKLGDGARLDTQTTGVNIPTVGGAHSGANNAV

SEQ ID NO: 1014924 - protein, 78 aa, Homo sapiens
  misc_feature (41)..(41): Xaa can be any naturally occurring amino acid
APVRAAIYSLVCYCCVLQFLLLPRRLLRFFSPQLFERHILXLLTTGIMINADITTNFTAAFEDPTFCNGVIDKLTIVA

SEQ ID NO: 1014925 - protein, 105 aa, Homo sapiens
SAQKLKPVLEKWLMEAELRNQEGQQNLMEFVGGEPSKKRKRRTSFTPQAIEALNAYFEKNPLPTGQEITEIAKELNYDREVVRVWFCNRRQTLKNTSKLNVFQIP

SEQ ID NO: 1014926 - protein, 42 aa, Homo sapiens
  misc_feature (18)..(18): Xaa can be any naturally occurring amino acid
  misc_feature (22)..(22): Xaa can be any naturally occurring amino acid
  misc_feature (28)..(28): Xaa can be any naturally occurring amino acid
PGVPGSLRQDARGEAAEXARRXGEQGAXRHGHRAQEGGRRGP

SEQ ID NO: 1014927 - protein, 231 aa, Homo sapiens
MKEKNYRNTWKIHEPQGKTNKPESFNASQSSRSRNAGSLTRRWAKRNGQTVSPPPPPPPPPNKTLPSPPPPPPKGLLTPPGPPKPPPPPPPPPTPVNKGPPGKHLAKPVALASPGPAYGSGVAHACPQPPVPGQATTRPLSGRLVVDANLEASRAPIHKLDAALGFDGGNGSIDIFGNHVTTVQQAASHVFTMARVTFHHLVGWLKTSIGDLCYRKLFMVGFLSRNDRGIF

SEQ ID NO: 1014928 - protein, 257 aa, Homo sapiens
CNTRWGRKRGEDPCGKKRPSPSLVENGLPPARALCARETTPGGVWSPPPHREGGKRAPPPLGQNTRRSSPAECNPRGPRGPPNERAPNARPFRPALRIDSAVAPRPPFGGIWGPHPRRPPTGGPFTRCDRPAPPWVRTAGTLCPQRLHQRSSVRSRTCWQYPPAASSPGRRVHLLPWPPELVLPVDVIATRARFVIILELVVRGTVAIRGPFLDGDPSDAQAPALKNESNQGGFGRTIKPGPRQCMGRYDATTTHVA

SEQ ID NO: 1014929 - protein, 54 aa, Homo sapiens
MMSTGSPPKLLAVTRFVTFSKTSPREPPRLSSPPRNPPARGHVWVFLLSGTLSD

SEQ ID NO: 1014930 - protein, 191 aa, Homo sapiens
  misc_feature (35)..(35): Xaa can be any naturally occurring amino acid
  misc_feature (140)..(140): Xaa can be any naturally occurring amino acid
MREAQLPGSVGEGYEVLCRLASYPTDAKMMSTGSXSKLLAATVALSLGPKAAAGSAPGCHDHPGTHQPGATCGCSCYPALCLTSHKGAFPRTSQYYPQPLQVFDGRQGERFLLLKFIPYLIPGCFEVQFHDLLNVISYSXFQIFQHILILIAFVISLPSGGITVLDSELHHAAECAGHSCGVFFGQCTSVY

SEQ ID NO: 1014931 - protein, 107 aa, Homo sapiens
  misc_feature (8)..(8): Xaa can be any naturally occurring amino acid
  misc_feature (29)..(29): Xaa can be any naturally occurring amino acid
  misc_feature (31)..(31): Xaa can be any naturally occurring amino acid
  misc_feature (84)..(84): Xaa can be any naturally occurring amino acid
  misc_feature (103)..(103): Xaa can be any naturally occurring amino acid
VTLEPNKXLRPGDTVTITCSSYRGYPEAXVXWQEGKGVPLTGNRDHVSDGQPSRACLMCTSVLRVVLGAEWHLQLPGAQPRACXRMRTALVTITGQAYDIPPXGPCG

SEQ ID NO: 1014932 - protein, 127 aa, Homo sapiens
ILHGPWDVRRSAAHKSLLARGYQAAVASACLGVALSRVGDNPGSLARIGNLGKPRGVHRVRAQVLGQLLPETTSGLLASVRKPSWAHSQSQKQLSLGPKAGNVQPPSRIVCLPATIQTVQHSCLSHI

SEQ ID NO: 1014933 - protein, 78 aa, Homo sapiens
  misc_feature (34)..(34): Xaa can be any naturally occurring amino acid
  misc_feature (42)..(42): Xaa can be any naturally occurring amino acid
  misc_feature (57)..(57): Xaa can be any naturally occurring amino acid
  misc_feature (62)..(62): Xaa can be any naturally occurring amino acid
MHRDVKPSNILVNSRGEIQSSVTLGSAGSSSNSXANSFVGTXSYMSPERLQGTHYSXQSDIXSMGTVSGRDGGWEVSH

SEQ ID NO: 1014934 - protein, 30 aa, Homo sapiens
VDKCEEGINRTTRESCRDCRTLNVTPATAV

SEQ ID NO: 1014935 - protein, 52 aa, Homo sapiens
APLILNLNDEADEDEERRRRHFPTHLTKLLNQKTLFSEWRTELSVRKLYQSL

SEQ ID NO: 1014936 - protein, 55 aa, Homo sapiens
MVSELTESRSAGNLPYGQNGCCDTACGGVMVSERTCIPFLPGILKYGKFRAYFAS

SEQ ID NO: 1014937 - protein, 101 aa, Homo sapiens
QYSGTGQQRPERASLQFLRNLHGPGQCPVNDHGLLSTNATDVNNALGYDEPASTAKASFWRCQERRLLLFSEWQLAGRHAAAIEERPCRKPSGQASRIFVV

SEQ ID NO: 1014938 - protein, 116 aa, Homo sapiens
TYWIFVPQETHFLVGYAFQCHRATHPMLSLILSRELPGTDSQGSSPVFWADRWVGNRRGENDRPKLLPWGSPTRTWVLPGKTCAYVKTNGPRPRPPACEASISVKGGWKRPLLPHF

SEQ ID NO: 1014939 - protein, 68 aa, Homo sapiens
ASSGLADHYRTEAVSRLGWAWVASDSLPSLKKGSRVGNGWGQEEFCQVIFTVILNHSLFVPAFETFGS

SEQ ID NO: 1014940 - protein, 96 aa, Homo sapiens
  misc_feature (34)..(35): Xaa can be any naturally occurring amino acid
  misc_feature (64)..(64): Xaa can be any naturally occurring amino acid
  misc_feature (66)..(66): Xaa can be any naturally occurring amino acid
  misc_feature (72)..(72): Xaa can be any naturally occurring amino acid
  misc_feature (83)..(83): Xaa can be any naturally occurring amino acid
  misc_feature (92)..(92): Xaa can be any naturally occurring amino acid
YCHCFLRCDVRPVLQVVVLPLLFCLQIEPGEAVXXFFTNRLVHRGPSADPLSVVAGSVGPPVSXGXHVSKDXILYGRREPRDXPGNVGFPAXPGHT

SEQ ID NO: 1014941 - protein, 205 aa, Homo sapiens
MLAFVETLAGKTITPVVGPSGSFVAVLALALALEGPPPAPPRLDFAGLPLAAGPPLSASPLPPPAPLPLVLRPPGGLPRPEPPLPGPARPLAVAPRAPLAPVPTTLPAPAGLPPSTRRCCSLPATPGGRWAPPVFLPPSLTNNLPCHWVLPSPAGGGCRISRCQHPALDAAPIHPSAGGQTQSLTHENHVPGPQHPPASRPGLPS

SEQ ID NO: 1014942 - protein, 220 aa, Homo sapiens
  misc_feature (1)..(1): Xaa can be any naturally occurring amino acid
  misc_feature (77)..(77): Xaa can be any naturally occurring amino acid
XTGLPPRRVDGLDQLGSSRRFASHLSDGAPGAGWTLSEMSVRSQQRVRAMRSSCSSHAKINLCWSGGMPSLFGFFLXFSMVLLGSTSSVMVLPVRVFTKICIPPLRRSTRCRVDSFWMLWLERVRAMLPAVFQQRSTSAGQEGCLPCVGSLPCCSQWCDWAPLPESWSYQLGSSEDLHPTSKTEHQVQGGLFLDVVVREGAAIFQLFSSKDQPLLVRRDA

SEQ ID NO: 1014943 - protein, 281 aa, Homo sapiens
VWSQWSTLDIWSLAGVMTVLEGLARGSGWWVAWGQVSECGVVRPMGICADMGDIKLCGPMGLSQWLEENGGARHSSLVTFWLQDVACWLDERELVGQGLIPGPGQRRVYSGSSGGTVDVTPSLARVHALMSLSLPQVPPLSPKLSPGDTNGWVYGGSEGAWAVWQGNAHEHAFSMSRGGIVHLARPRDDVTPKCVDHPSSGGGWPGRTLLASAWPVRYRGPGFPGQMNTAGNDGAIGGCLPMGCCRQRNGVPGTGWGVGYPQGPGSHDHGGPLRFGARQRT

SEQ ID NO: 1014944 - protein, 164 aa, Homo sapiens
MGTTPLSTLSRAERSPKHHTCNGIPARQPPRGVILYELAKTHLESIGSPPVSSTHRTFRVQTFLPFTLVASVLHEVRMHDSFAEDPSQLEDPLTPPEVEAPVTPLRAMSRPKIPTIKERHFPPLIHATTVVSLLGNTLEDGAPPRLRPTHHPEKSPPLHLGPAP

SEQ ID NO: 1014945 - protein, 58 aa, Homo sapiens
  misc_feature (19)..(19): Xaa can be any naturally occurring amino acid
  misc_feature (41)..(41): Xaa can be any naturally occurring amino acid
  misc_feature (45)..(45): Xaa can be any naturally occurring amino acid
  misc_feature (48)..(48): Xaa can be any naturally occurring amino acid
GSLLNITELNLPEVEMIKXQVDQEVEFLSTSIDQIKVEQTXFVEXKVXPSEDTCHPQV

SEQ ID NO: 1014946 - protein, 117 aa, Homo sapiens
  misc_feature (10)..(11): Xaa can be any naturally occurring amino acid
  misc_feature (21)..(22): Xaa can be any naturally occurring amino acid
  misc_feature (33)..(33): Xaa can be any naturally occurring amino acid
  misc_feature (70)..(70): Xaa can be any naturally occurring amino acid
  misc_feature (72)..(72): Xaa can be any naturally occurring amino acid
TVTTEQYRSXXSKTTTRTPIXXTQSCYSAFTQXKAKSGYGPRHLHLHIYCSTIHNNQDTESTYMPINLNXDXLTRDVVHIHHGILCGHKDGNTDTGVYLKVEGRRERARKITIGYWA

SEQ ID NO: 1014947 - protein, 107 aa, Homo sapiens
  misc_feature (89)..(89): Xaa can be any naturally occurring amino acid
NAHQVMLRLQKCGLRTGSCKVTPGTCEKCRFLSPSPGLLSQFLVDAQTLWVTPIHIRIENHQWRSKKTSHESRGLLLILVLQLISETDXTPASCEGTAFLVDDEESE

SEQ ID NO: 1014948 - protein, 293 aa, Homo sapiens
  misc_feature (14)..(15): Xaa can be any naturally occurring amino acid
GPRGRPSSVDSAAXXPPLTLRRAVPSEPRRDSVDAAHTPEKPEDGACTGHSATPAQHSVHTTSEPRELCLHCRRRPERTLLHAGSAEGEEHLPEGGRAVASRQMDGQTDTGETGSAGVSRAGQMGQDPAPCALHSQDDRTPWNMKNAGRQTPEAQPLTGQGGRQREAHSRPPEPHLIEGIEIKAQQRAAHDGQLKKINPPIRVRVPVTGGGFGCRGGFSVRFLLISEPATPLKPDIGQDSQDGRSEGNTRPVDILRPRACRRVPAWGVSRATLVLLRLCGLPGAWLSLRAQAL

SEQ ID NO: 1014949 - protein, 102 aa, Homo sapiens
  misc_feature (65)..(65): Xaa can be any naturally occurring amino acid
  misc_feature (99)..(99): Xaa can be any naturally occurring amino acid
RNSAHHPHLPVGQAGSFCGGRGRATAQWRGVARPHTPSTMFYQPRQIKGHRDPGPRDTDPSREGXCRPVTVPPVHGHRENCPGPGFGESGSPPSAPASXFPS

SEQ ID NO: 1014950 - protein, 120 aa, Homo sapiens
  misc_feature (73)..(73): Xaa can be any naturally occurring amino acid
PVCCVVEHYENAIEYDCKEEHAEFVLVRKDMLFNQLIEMALLSLGYSHSSAAQAKGLIQVGKWNPVPLSYVTXAPDATVADMLQDVYHVVTLKIQLHSCPKLGRLASRTMVEHHSEECSE

SEQ ID NO: 1014951 - protein, 155 aa, Homo sapiens
  misc_feature (23)..(23): Xaa can be any naturally occurring amino acid
MGSHQRVRLYRAVLCIHIPQSSXWEETIPVAIDVSLCLFLKSPRHTKRRECLGRTGSGTSCFTQVGGVGAACPELPSPSRARPAHPAQSSQVARGSIDALTRLVKRMWGWGGLWMVFGMSVCGQLGSACPRACSRQCPTGGEATVPRCSMYTWPA

SEQ ID NO: 1014952 - protein, 103 aa, Homo sapiens
GTWPLPASGSSSHWLLVRHQLLLRMRGPRRASRGTMEARCGLVVREQACGASSPGLLALGPGSPSSLWSMRHWQRTASPAPSGAVRPPARGDVAAAWLFCFLP

SEQ ID NO: 1014953 - protein, 100 aa, Homo sapiens
  misc_feature (30)..(30): Xaa can be any naturally occurring amino acid
  misc_feature (57)..(57): Xaa can be any naturally occurring amino acid
FCYSDMAQSQRRKGPLVSAVCTSSVRRQDXRSMKRAGQKTPTLAGRHVPLKIKKEAXWEQCSSYVRPGHFLFTGDYKTFVLSSLDVDAILASARLHPGTD

SEQ ID NO: 1014954 - protein, 353 aa, Homo sapiens
MCFSHQVCCLEFFFSQVGSDLCVYMCRVCTCFRERACSPPVGAPEGPSCVAFSLCWWGPHTDGGVVQVLLVMSLCLVGCLCSARWGIVSFYECFSRCGLRHPCGFLPHGVYIVVFWGVLYIVLALPLCLIVGWLLFGAHPTNVGGGYTGGVCDTLWEARVSRSVSPYALAVSPFGREAPTGAALVVFVVCPLAPRGVRTDAGVCAPRVFLLCAQQVSVGCSSLLCSPVVTCAHGTHRGHTCVARVCSTHHISTHPPVCLEPHTWGPHFPALHLTVYEARVSEMTTTHCGDPHHWGHLRVSFVRVSTAVWLLERGDCSENVSLVFCCVFMVHVWSTCPQVCAPLSLSTSTHHAS

SEQ ID NO: 1014955 - protein, 96 aa, Homo sapiens
TRDNPDDASATATWPSPKAQGPLVSAVCTSSVRRQDSRSMKRAGQKTPTLAGRHVPLKIKKEAIWEQCSSYVRPGHFLFTGDYKTFVLSSLDVDAI

SEQ ID NO: 1014956 - protein, 68 aa, Homo sapiens
  misc_feature (39)..(40): Xaa can be any naturally occurring amino acid
  misc_feature (50)..(50): Xaa can be any naturally occurring amino acid
  misc_feature (66)..(66): Xaa can be any naturally occurring amino acid
LSTSRNSGSSWLVAAAETHGTHDVATATTVSGLGRGKAXXPAAHQQRHPXARLAQHVALEDLALRXGA

SEQ ID NO: 1014957 - protein, 116 aa, Homo sapiens
  misc_feature (20)..(20): Xaa can be any naturally occurring amino acid
  misc_feature (23)..(25): Xaa can be any naturally occurring amino acid
  misc_feature (34)..(34): Xaa can be any naturally occurring amino acid
  misc_feature (51)..(51): Xaa can be any naturally occurring amino acid
  misc_feature (56)..(56): Xaa can be any naturally occurring amino acid
  misc_feature (62)..(62): Xaa can be any naturally occurring amino acid
  misc_feature (80)..(80): Xaa can be any naturally occurring amino acid
  misc_feature (114)..(114): Xaa can be any naturally occurring amino acid
MLCVGQGRHPYWRGRASHWXLWXXXGTMRQPAPXGEHVPPQQRSSREWPGXALLLXFLVSFXVFFSTHGTGDKIGSLVRXKNYARKPTAPLVGLALNLPGLYIFCRTHQEAICXKV

SEQ ID NO: 1014958 - protein, 93 aa, Homo sapiens
  misc_feature (35)..(35): Xaa can be any naturally occurring amino acid
  misc_feature (45)..(45): Xaa can be any naturally occurring amino acid
  misc_feature (80)..(80): Xaa can be any naturally occurring amino acid
  misc_feature (83)..(83): Xaa can be any naturally occurring amino acid
PQAPCPPSSLFSSDNEDSSYSSDDEDPAFCCRPAXPTPCPPSCPXEPCAPSSALNGMPTLLPVQGHGGWHRALRPQQQQXIQXKRKEALSFSK

SEQ ID NO: 1014959 - protein, 143 aa, Homo sapiens
  misc_feature (57)..(57): Xaa can be any naturally occurring amino acid
  misc_feature (64)..(65): Xaa can be any naturally occurring amino acid
  misc_feature (80)..(80): Xaa can be any naturally occurring amino acid
  misc_feature (83)..(83): Xaa can be any naturally occurring amino acid
  misc_feature (120)..(121): Xaa can be any naturally occurring amino acid
SFFQKQNPKLVFIETKKVHGFSGPAMLTGVWISWERVQVDQQSRLGTCPACPAAEVXLVAGLAXXALVAVAEAHRGHGHXPSXRRCRHRPTLSPRLASASPRPSCVSTSCSRKRSGPAAXXRPGAWPPTAPRGRAGPSGTIGR

SEQ ID NO: 1014960 - protein, 116 aa, Homo sapiens
PDKRARRLIRAHGNIDALKAAGRQTGSGAPHGSARTAQQATADIQQIAHTELTVTVMVQHAAKQAAGDTAMLLHLLLFLPERLAERAGIGLAATEALGKEGHHDRGEDMQQMAGAA

SEQ ID NO: 1014961 - protein, 117 aa, Homo sapiens
MAPKLAAELALAVPPGPIMGPGKVCGNLERAFWWYLAQKVNGILDQGSPKSPSSSQVSSSNSMSSQLQGPDTASSPIPMRVLASARASASAAAASRASKASSAASMNCAVQSRGSLF

SEQ ID NO: 1014962 - protein, 43 aa, Homo sapiens
MHWIGPKEVKTSVSLPKKCPPKLTLYPGCHGTGQRYTRPKERK

SEQ ID NO: 1014963 - protein, 298 aa, Homo sapiens
PCPVALLHLEGSPNPSVARPPEYNLGPPSAASLSSGEHLRWAYGLNKAKTSARPKAPPPSGGSPRGATNAPPSGGKGVTPPPNPVVRPPTRNGAGPHICAVPTIWRQECLFALINPLPRRLTNMGASLHSFPGGSTPSIGLLPLVHSSGAPPRSLCIQGDTPRRFLPPPGRGIDLGLSEPMLPPPAVFIALGAPPPPWSRTQATDQRRTKRQHNSRAYTSERPDPASPGRRERAYRLTRGPLPFTKTTLSMTAGAQNSPTGRQVERHSLTHLLLEQTVMPPPPHERAGPDPSQLPPTM

SEQ ID NO: 1014964 - protein, 229 aa, Homo sapiens
  misc_feature (111)..(111): Xaa can be any naturally occurring amino acid
  misc_feature (188)..(189): Xaa can be any naturally occurring amino acid
  misc_feature (191)..(191): Xaa can be any naturally occurring amino acid
  misc_feature (194)..(194): Xaa can be any naturally occurring amino acid
VPNLPAAKPESGGMDRELSALSGIENAISVQQDSVIFIWDWNEPNLPGRDIFLQLLLQPSYFLAKWEMLTPVLLTGLQGSLKVDKVAGSSKGGPRKFGRSGKASTMASRAXSSIATSSSVRMKCSRKCCPCQEIKPRGLATIKWKILLTWACFHCFLSSCGQSEAPAVQCHPYCDVDAHVNEANLSFXXSXGAXHQKPSPPLCVPRRIIAPLSPAAAAVRPLTRGPGRH

SEQ ID NO: 1014965 - protein, 116 aa, Homo sapiens
LVPSLCGPIYPIGTIPPTLVGCPWHLRCGVPTWAALVDGARMPPRGVFPPGGTLVPCLRWLETPVDGNPFSVQGSPWGQLGSQTPQGFLHISISAPPGEVCEGTPRVVTHLFSGTK

SEQ ID NO: 1014966 - protein, 254 aa, Homo sapiens
MPFLRLCSHPSWCSLPGYGYRALVFSPRPVLLTSVAFHLSLAWVSLSSFFVSVVNICRRAEVRIPGGIFERGSPSSRVGGNPLLFAWPTKRAPHWLPSFCKGPCAFNNTSLKRVLFYRATKVSLRRAALMPLFPGCRSLYRAEHLLSGGPHSRECDGPRASLWEKPSPMGLFFLETKGLLRLGFPRPCAALAQWTTLWGTFVGSILVLSRLPLWGVFARPLGAYFFRSRFGDNSRIKNMIAHTLTLVKVELPLL

SEQ ID NO: 1014967 - protein, 320 aa, Homo sapiens
SGIPGISAVLPVHVPWGLCELARLIGFLLLVAKDLFKQCSNSSGRLYRLPSAETMKDTSLRRLSCVTKSAASSFYSIIVSVFISIYIDTTTSTEQLFFPGSDDVVLEACKDFWDGADIYPLSGSDKKKLLDFYQRFFLSGYCSAFAYKPMNCALSSQLNGKCIELVQVPGQSSIFTMCELPSTIPIKQNARRSSWSSDEGIGEVLEKEDCMQALSGQIFMGMVSSQYQARLDIVRLIDGLVNACIRFVYFSLEDELKSKVFAEKMGLETGWNCHISLTPNGDMPGSEIPPSSPSHAGSLHDDLNQVYRDDAEGLLLMEEE

SEQ ID NO: 1014968 - protein, 69 aa, Homo sapiens
MRNRFLLTSWAALVLTMVQTQDYPHVIYEDYGTAAHDIGDTTNRSNAIPSTDVTDTTGRAHLSAYAAGG

SEQ ID NO: 1014969 - protein, 69 aa, Homo sapiens
  misc_feature (21)..(21): Xaa can be any naturally occurring amino acid
GYTDSNVKRHTCRFQAQQVLXKCHSTRNFEPKRWGRKAKTPSWHFFGVLGHDTSSGLLLLNFYRDKRYP

SEQ ID NO: 1014970 - protein, 80 aa, Homo sapiens
  misc_feature (51)..(51): Xaa can be any naturally occurring amino acid
  misc_feature (57)..(57): Xaa can be any naturally occurring amino acid
  misc_feature (71)..(71): Xaa can be any naturally occurring amino acid
MANMRMAKKRSSPICRSGTMAFMMDLSTTCKPGARTGQVRKQRGQGRARNXVGAGTXQQEPSRDSKVLSSXCFQGQRLEL

SEQ ID NO: 1014971 - protein, 64 aa, Homo sapiens
AKQRTPYGYARLLYRSKTVEKRTNSGNDLEMPFWRDQAEATFNQTGKLRITVRYTVNRHGQVKQ

SEQ ID NO: 1014972 - protein, 49 aa, Homo sapiens
LITCAAGHYSISTRSSKKQPLQTSRSAAQTSLPAHVFTHTIFAVRLEHS

SEQ ID NO: 1014973 - protein, 59 aa, Homo sapiens
KCINIYLVHMVFQALGGYLNCWQYPSPVSQNEENVEGFMMEEVARLTTSNLKTIYCEGP

SEQ ID NO: 1014974 - protein, 50 aa, Homo sapiens
MLSDYSYGNRPLSGGSTHDKVPILTNTQAIIALSGKQPIASSATSVPPIC

SEQ ID NO: 1014975 - protein, 47 aa, Homo sapiens
MTCYDGVASVLLQLSSTELTYGRLLPQSYYLVTPDTYLLDNAIWPRG

SEQ ID NO: 1014976 - protein, 31 aa, Homo sapiens
MSASHIASDDLPESISWMLRVHLRVILDAAL

SEQ ID NO: 1014977 - protein, 51 aa, Homo sapiens
VLIKCHMQVVLLNLNMLSSSSSCNCVGIVNRNGSTTDMAFAYHDIGVYVSW

SEQ ID NO: 1014978 - protein, 53 aa, Homo sapiens
QDTGAYHIIPWSSITTFANFVRGIGSVVDKYDVDRHEDADKANQALKDAEGIN

SEQ ID NO: 1014979 - protein, 131 aa, Homo sapiens
RRSFLVYHAREPARLGEASYARAVAKFVLYQNRQRVGVIAKSLGFVRRSSTSVGSTGWWSVLPSLTVTGSIKGPAWSFQLVPLKTPGGSTKQFTLPTKTRTPRHFSGHHLKPLGTPSRSRTSGYLAPPKAD

SEQ ID NO: 1014980 - protein, 56 aa, Homo sapiens
MRDGQGLGARGMTDEIFEGPFEECMRMPDNWREGLIDSRKAVERLNLLITEKPRPL

SEQ ID NO: 1014981 - protein, 61 aa, Homo sapiens
NEVPESSSMLSNIPEHQSVSAVKEITQPSTLTLLYQSQNGAHLLNFDGVGEVTWNRTRNPT

SEQ ID NO: 1014982 - protein, 53 aa, Homo sapiens
FAALSDTTGPENVDESVSYSSHLLGAESLIVLLTVMTNVGVTLQMMNSDGSTI

SEQ ID NO: 1014983 - protein, 43 aa, Homo sapiens
MPSRFKTLHVVAGRKCDAVIVSDISRNFDVDIDEIRGGQFNAF

SEQ ID NO: 1014984 - protein, 60 aa, Homo sapiens
TRRVLSYLRFHVCVIHTYSYLLDRSLIVLSTAAYTYAHYADEFMTDVNVRRVRFADRLGF

SEQ ID NO: 1014985 - protein, 55 aa, Homo sapiens
HHQVLRNCDNNEGFPQETNYKGSMYASLTFVTIKITRTNKESQTLILPRKAVKGF

SEQ ID NO: 1014986 - protein, 58 aa, Homo sapiens
LFVEDRGASYAEADAEIDEAFYAIAEDEILDVNRIRLMSQPLRVRDFPWLTHSSEKLR

SEQ ID NO: 1014987 - protein, 50 aa, Homo sapiens
TTKLHDGYTVNWQLGLYVAQFSCSSYRGTVNTVYDKFGMTLYWILTLMDS

SEQ ID NO: 1014988 - protein, 60 aa, Homo sapiens
EIKAHKAPLTAPTDKPIAGDTPHLLSCRAVSTFGYAYATSRWQSKCYHYANSTRHYKRQR

SEQ ID NO: 1014989 - protein, 49 aa, Homo sapiens
YSTSVCMFEASIRRQRFFEVQMAAWYDISHVVNVLRSLKVRIYIALVKL

SEQ ID NO: 1014990 - protein, 51 aa, Homo sapiens
VVVRRFTDVVRCWTPRRLVKPVYDPVMIADHRVLCRCSYTCVDIAMLIRCS

SEQ ID NO: 1014991 - protein, 51 aa, Homo sapiens
KGDNLWVDMSGALPGAIRRSVLRDTKLVCNFQELTRIGFRLGSMRHNCPSV

SEQ ID NO: 1014992 - protein, 85 aa, Homo sapiens
GLTSLVNSQYPSNVHAANHFRSFQRFVTWYFTDGRNHWLFRCITPSSALSKAPTLTLIIVHRTAHINQPAQPTLVLCCCIVCVCK

SEQ ID NO: 1014993 - protein, 52 aa, Homo sapiens
GIKAHRCGTLMSGKLYIYPSKFQYVSNIMFARTSCMVGFLLLLCVVDILWMD

SEQ ID NO: 1014994 - protein, 71 aa, Homo sapiens
  misc_feature (45)..(45): Xaa can be any naturally occurring amino acid
GACSKAWTLATALAVLTARVYCTCPNHTDEKAETQGQQPGSQRSXGTRRHFSTSGGGTTVRGDGCDACAGK

SEQ ID NO: 1014995 - protein, 37 aa, Homo sapiens
RSTYRPRRRRSVPPPELIGPMLEPGDEEPQQEEPPTE

SEQ ID NO: 1014996 - protein, 59 aa, Homo sapiens
  misc_feature (18)..(18): Xaa can be any naturally occurring amino acid
  misc_feature (38)..(38): Xaa can be any naturally occurring amino acid
FFEVKQTTEPNFPEILLXAINKYGVSLINPKTKDILTXHPFTKISNWSSGNTYFHITIG

SEQ ID NO: 1014997 - protein, 84 aa, Homo sapiens
  misc_feature (24)..(24): Xaa can be any naturally occurring amino acid
  misc_feature (44)..(45): Xaa can be any naturally occurring amino acid
  misc_feature (55)..(55): Xaa can be any naturally occurring amino acid
  misc_feature (61)..(61): Xaa can be any naturally occurring amino acid
  misc_feature (69)..(69): Xaa can be any naturally occurring amino acid
  misc_feature (78)..(78): Xaa can be any naturally occurring amino acid
PSRLSSGATQICLSLWRKNSAGSXFPWPQPPAHKGHGLFKRTLXXSPAAAPGAGXGTAPRXACLPPAAXPARTGLGEXAAGCGA

SEQ ID NO: 1014998 - protein, 39 aa, Homo sapiens
GDLELHLSGRTLPHPQIPWEEMLSLTASEPLLATVPASL

SEQ ID NO: 1014999 - protein, 72 aa, Homo sapiens
EGDVDTGRDAVVGEWTEGLSVKHCLEDSRVNPMLVKAWAIDGKSVASSYREQRLRERGTLFPGLESLCREIK

SEQ ID NO: 1015000 - protein, 69 aa, Homo sapiens
  misc_feature (15)..(15): Xaa can be any naturally occurring amino acid
  misc_feature (23)..(23): Xaa can be any naturally occurring amino acid
  misc_feature (39)..(39): Xaa can be any naturally occurring amino acid
MAPVSAHAARIGGLXSGGRRRSXSKSPKPSKSARSPLAXRSRSHSCSRSGDEIGLTHQLGGLSQGSRNQ

SEQ ID NO: 1015001 - protein, 171 aa, Homo sapiens
  misc_feature (30)..(30): Xaa can be any naturally occurring amino acid
MGIMTLRMYKNNYWGRRPRAYVSGCSFWNXEGWSLHNILWLPDPQKEEIIEKMQGDDETVVTEHLGEDENQAHAHEESGLLGGAPHATFPHDADGKAGCQAAQAHAQAGAQLEEALVEADVVIQGVGDEDCLLQAVDGDDASHDHWELAFLICSGRMTDMAAMPVPLLAVH

SEQ ID NO: 1015002 - protein, 95 aa, Homo sapiens
WCCHVLIANCLVIIDISAFTRASSMLGAGPDAWVLTLAWQSGFAIGIVVVTAGVVGVTAQHAPTISWCMILILICLAEVLGLYGLIVALILSTYM

SEQ ID NO: 1015003 - protein, 182 aa, Homo sapiens
  misc_feature (104)..(104): Xaa can be any naturally occurring amino acid
  misc_feature (123)..(123): Xaa can be any naturally occurring amino acid
  misc_feature (143)..(143): Xaa can be any naturally occurring amino acid
  misc_feature (148)..(150): Xaa can be any naturally occurring amino acid
  misc_feature (170)..(170): Xaa can be any naturally occurring amino acid
INMELLKVANGYLSVPRLCCHPGYRHTCHRRTPLRKSGPACSHWGIPLLAGEYIIRCSEIPKLPAVSLLIGGVWFNLTAQDYVIQFAQGDVRLCLSGFRALDIXASSTCVDPRRRFLGGVCDXFDRGDMKSGARVGLARARPXERTWXXXVPQAQYPGAAQVDACAPGSXIALLSKNPIFPL

SEQ ID NO: 1015004 - protein, 76 aa, Homo sapiens
  misc_feature (5)..(5): Xaa can be any naturally occurring amino acid
  misc_feature (13)..(13): Xaa can be any naturally occurring amino acid
  misc_feature (62)..(62): Xaa can be any naturally occurring amino acid
SGPTXASDAAVTXSSAYCPSQCLLSAPRPTVAKPLETVMPARTLAWSLAFTGAFSELAQGVXSMDSVGALPNLPPF

SEQ ID NO: 1015005 - protein, 86 aa, Homo sapiens
  misc_feature (12)..(12): Xaa can be any naturally occurring amino acid
  misc_feature (14)..(14): Xaa can be any naturally occurring amino acid
  misc_feature (58)..(58): Xaa can be any naturally occurring amino acid
MFLDVAYEAACXLXEEGVLNPETTVVAIFPSPMMYAGPTEVQWHCRDGWLQGANFYIXGRDPAGKPHPETGKDLYEPSHGAKVLTI

SEQ ID NO: 1015006 - protein, 119 aa, Homo sapiens
  misc_feature (50)..(51): Xaa can be any naturally occurring amino acid
  misc_feature (70)..(70): Xaa can be any naturally occurring amino acid
  misc_feature (74)..(74): Xaa can be any naturally occurring amino acid
  misc_feature (76)..(76): Xaa can be any naturally occurring amino acid
  misc_feature (88)..(88): Xaa can be any naturally occurring amino acid
  misc_feature (90)..(90): Xaa can be any naturally occurring amino acid
  misc_feature (112)..(112): Xaa can be any naturally occurring amino acid
  misc_feature (118)..(118): Xaa can be any naturally occurring amino acid
MGTSLSPNDPWPLNPLSNPADHAPATSVGAGHCACGPAAAEATEAAAPVXXPGPFAWPLIGKRGGGCAAXTSRXAXWRGLRRRFPDPXCXCPIVVLEMERAIHQALVQAMGXFPNRVXS

SEQ ID NO: 1015007 - protein, 43 aa, Homo sapiens
GWAWQLVLHCRPPTVPVPRPAGPNVAPSPPPEAPPNRPAHFVN

SEQ ID NO: 1015008 - protein, 70 aa, Homo sapiens
  misc_feature (5)..(6): Xaa can be any naturally occurring amino acid
  misc_feature (13)..(13): Xaa can be any naturally occurring amino acid
  misc_feature (28)..(28): Xaa can be any naturally occurring amino acid
  misc_feature (69)..(69): Xaa can be any naturally occurring amino acid
AGLRXXMAPMLNXLVLKPHFHKDWQRRXATWFNQPARKIRRRKARQAKARRIRPAPRSVPIRPIVRCPXV

SEQ ID NO: 1015009 - protein, 56 aa, Homo sapiens
SSVTDLIVQDGQEAPSNVYSCSMDGMVLVWNVSTLQVTKPFQRDEVPDVHQTARRS

SEQ ID NO: 1015010 - protein, 126 aa, Homo sapiens
MPDPAKSAPAPKKGSKKAVTKAQKKDGKKRKRSRKESYSVYVYKVLKQVHPDTGISSKAMGIMNSFVNDIFERIAGEASRLAHYNKRSTITSREIQTAVRLLLPGELAKHAVSEGTKAVTKYTSSK

SEQ ID NO: 1015011 - protein, 126 aa, Homo sapiens; identical to SEQ ID NO: 737452

SEQ ID NO: 1015012 - protein, 106 aa, Homo sapiens
MRIVVLVERNKVVLMKLVSAPNRQQPAPSILSRCVSYDGNYGRMYVVVRSGPPPVSVISRPGWSTPPAWMYCFPPSLSVVFFPSLTRNCLSLHNNCRRTVIPTRDI

SEQ ID NO: 1015013 - protein, 275 aa, Homo sapiens
MLRRAYLNNCLNRATALSRRCCSFPGHTPWATPVVGPRAHLKIQGIPGPHVPVSAPWWGISQPGSFKVPPKVPSNMGTQFGVHNIDPAAKGFPCVRGHTTPLWVIGPSLGCRPLGGIFMALDMTTGLLGGCHFLWCHTNAPLLGHASFQWGPPPQSKAALGVAPPPLARALSDDGNPSECLIALDSEDTAPPLCPPRPGTPPRFSPNRTHRPSALFPPRQRGTPLFSPPSDGKALLLRFTPRRAFYYLGLPPSNWASRFASCEKHPRGGRVEASN

SEQ ID NO: 1015014 - protein, 136 aa, Homo sapiens
  misc_feature (7)..(7): Xaa can be any naturally occurring amino acid
  misc_feature (21)..(21): Xaa can be any naturally occurring amino acid
  misc_feature (61)..(61): Xaa can be any naturally occurring amino acid
  misc_feature (71)..(71): Xaa can be any naturally occurring amino acid
  misc_feature (109)..(110): Xaa can be any naturally occurring amino acid
  misc_feature (113)..(114): Xaa can be any naturally occurring amino acid
  misc_feature (127)..(127): Xaa can be any naturally occurring amino acid
  misc_feature (135)..(135): Xaa can be any naturally occurring amino acid
MEFAGEXPCPFLPLSPFPVPXLHLKGKSARGVSQHRHHRCAVSPGACSGALSALGQFLRLXSAGLGMRGCXRARPPAADARGGAGQRLRTADCEVRVRGREGSEVRGRXXGRXXLGGYSLSSTRSAXLLEHSQAXR

SEQ ID NO: 1015015 - protein, 114 aa, Homo sapiens
  misc_feature (46)..(46): Xaa can be any naturally occurring amino acid
  misc_feature (55)..(55): Xaa can be any naturally occurring amino acid
KSFQRLMKKAQKLLLSPGMIANLVRDGCACIPPSLLVGPIPFFLSXSRKPGRNLXTIPIPWDGVMPSLETNEPPSGHDSEEPLSYFIGITRKTVTKHIMFATGIYLGFVFYSIS

SEQ ID NO: 1015016 - protein, 59 aa, Homo sapiens
  misc_feature (24)..(24): Xaa can be any naturally occurring amino acid
  misc_feature (46)..(46): Xaa can be any naturally occurring amino acid
  misc_feature (55)..(55): Xaa can be any naturally occurring amino acid
LSSRSFRRLASSALSSPSHGQKSXSASSASVDSTPAAAAAPAAQAXAPRLPSLRXLLVL

SEQ ID NO: 1015017 - protein, 135 aa, Homo sapiens
  misc_feature (43)..(43): Xaa can be any naturally occurring amino acid
  misc_feature (47)..(47): Xaa can be any naturally occurring amino acid
  misc_feature (49)..(49): Xaa can be any naturally occurring amino acid
  misc_feature (87)..(87): Xaa can be any naturally occurring amino acid
  misc_feature (123)..(125): Xaa can be any naturally occurring amino acid
ALCPSPQPAAQATIGSPLSQGFREHHAHKPSWRDGSTNTSAGXVSRXSXASLPISPAMVTRSCRRCCAIKSCTRRTTAGSRSKLPTXYVRHARSVEFASASISTSWTLREVSVATVSRQGGVXXXTRARIRRPPP

SEQ ID NO: 1015018 - protein, 63 aa, Homo sapiens
  misc_feature (63)..(63): Xaa can be any naturally occurring amino acid
NQVGEKRSRKAAHNASDTCAAVSFHVGRRAPFSQAASPITPRSGVRQNLAQRMRSASRTHRGX

SEQ ID NO: 1015019 - protein, 127 aa, Homo sapiens
  misc_feature (3)..(3): Xaa can be any naturally occurring amino acid
  misc_feature (34)..(34): Xaa can be any naturally occurring amino acid
  misc_feature (37)..(37): Xaa can be any naturally occurring amino acid
  misc_feature (52)..(52): Xaa can be any naturally occurring amino acid
  misc_feature (61)..(61): Xaa can be any naturally occurring amino acid
  misc_feature (104)..(104): Xaa can be any naturally occurring amino acid
RIXPPPPYPPPKISHCTQTGSMASIRKSTTPCMXRTXQVVEQDVPEEEDRAXEKGIGTPQXDVAKDSWAAELENSSKENEVIEVKSMGESQSKKLQGGYECKYXPYSTQNLNEFTEHVDMQHSNVNS

SEQ ID NO: 1015020 - protein, 74 aa, Homo sapiens
  misc_feature (56)..(56): Xaa can be any naturally occurring amino acid
  misc_feature (62)..(62): Xaa can be any naturally occurring amino acid
MALAAPRSYHPHPGNVCINCPFDLHIIKSGYKYHCRTASELLLWAHTCRAALLCKXSASAAXSQPAASIKVANT

SEQ ID NO: 1015021 - protein, 65 aa, Homo sapiens
  misc_feature (52)..(52): Xaa can be any naturally occurring amino acid
  misc_feature (62)..(62): Xaa can be any naturally occurring amino acid
YDLPSGQRFCLGQLNLEQRSESVRRTRSKIGFGILLSKEPDGVWAYNRGGTXIFVNSPELVXPAV

SEQ ID NO: 1015022 - protein, 315 aa, Homo sapiens
STKTPAQRRQHSKVKRRTVPSAPEEKTKGWGGVENDVQDSQIFGYSTCPFSTLTGTSKGFCRRSLYTMPWQTMKLPSSEPDAKSGYRGWKATARRAFLWCLSILYGLVEKSRSNHTTLLSKLPQMTLSPAGCTARLDTHLQLGISFLVSSWRTGGKGGRCAGTPPTGRAGQGGRPLAAPVRGCGGTDSGCGDGSTGESPPGCGLGWPAPRPGSPHARARSPAVTGFPWQMRSAGLLWRSSSEASSQRAGCKGGSSGGTKRSTADLCCPPPAGPPELGSAAAPSPPRLRHQADSGAGVPGTLFIHAPTGTVSHSGS

SEQ ID NO: 1015023 - protein, 73 aa, Homo sapiens
  misc_feature (42)..(42): Xaa can be any naturally occurring amino acid
LGRGGGRGGLLRWSPRGPERRDKQSAVWYSRCRAFNLRAGCXVFSARGARPRGYRSRVGTNRLFGETTPEPPA

SEQ ID NO: 1015024 - protein, 110 aa, Homo sapiens
  misc_feature (3)..(3): Xaa can be any naturally occurring amino acid
  misc_feature (34)..(34): Xaa can be any naturally occurring amino acid
  misc_feature (38)..(39): Xaa can be any naturally occurring amino acid
  misc_feature (45)..(45): Xaa can be any naturally occurring amino acid
  misc_feature (77)..(77): Xaa can be any naturally occurring amino acid
GCXLKRCSEPERYCLARLMADAYAACVPAFHGVXEREXXYLQLQXLLDGFDGPCVLDCKMGVRTYLEEELTKARERXKLRKDMYKKMLAVDPEAPTEEEHAQRRSTKPRY

SEQ ID NO: 1015025 - protein, 46 aa, Homo sapiens
  misc_feature (6)..(7): Xaa can be any naturally occurring amino acid
  misc_feature (17)..(18): Xaa can be any naturally occurring amino acid
IPEAVXXSDHQHCCPQXXTCVAEGQCQRGSEIVAGLEKMPARRVSL

SEQ ID NO: 1015026 - protein, 98 aa, Homo sapiens
FLKKIEYIYTVSPHLTSIGRVFETVTLSNVYSRSLNNIGYNIDEGQTSVSLYIVLLKVTVSKNLSMTLNEDFVYIQMDSLSESLDIDYNVNSNHHVIS

SEQ ID NO: 1015027 - protein, 161 aa, Homo sapiens
  misc_feature (26)..(26): Xaa can be any naturally occurring amino acid
  misc_feature (35)..(35): Xaa can be any naturally occurring amino acid
  misc_feature (54)..(55): Xaa can be any naturally occurring amino acid
  misc_feature (138)..(138): Xaa can be any naturally occurring amino acid
MPARRFPFIPPQRHRLQPSTPAARWXTLLPEPGWXLGLLPVAPCCVLRGSQHCXXAGYTCNVKARSCEKEVVSAQPATFLAPSPHVGVKDVECGEGHFCHDNQTCCRDNRQAWACCPYRQASVVLIGATAVLLASAAXQGVPSVCAGRPRAWERPFEGTQP

SEQ ID NO: 1015028 - protein, 107 aa, Homo sapiens
  misc_feature (12)..(12): Xaa can be any naturally occurring amino acid
  misc_feature (19)..(19): Xaa can be any naturally occurring amino acid
  misc_feature (104)..(104): Xaa can be any naturally occurring amino acid
KLKSHDWLSARXGARKPVXDQSKSQNLKNREADSVAFHLWAKAKEAWQTTGVSLRVRKLKNWEADVQGQEASRRQKDEGQKTQQVCFILAALVSDLDWGPPKIXWWV

SEQ ID NO: 1015029 - protein, 202 aa, Homo sapiens
  misc_feature (81)..(81): Xaa can be any naturally occurring amino acid
  misc_feature (110)..(110): Xaa can be any naturally occurring amino acid
  misc_feature (132)..(132): Xaa can be any naturally occurring amino acid
  misc_feature (151)..(152): Xaa can be any naturally occurring amino acid
  misc_feature (177)..(178): Xaa can be any naturally occurring amino acid
  misc_feature (187)..(187): Xaa can be any naturally occurring amino acid
  misc_feature (197)..(197): Xaa can be any naturally occurring amino acid
WAWIARENSHAPTESTLAHTFLQRLKFSPKAFPRLVTSLVENLSPRASPQPKWSLPGWRRRLQASELSRNWTLLGLRSGLXLPPPRRPASEQGPEGCRAIRSGPLRPPPXQGRLRARGCNRGDGSLESTHGXLDEVSREHELLEEPMRVVXXGACPGLGPSALLQAAGGDRVPEPIXXATPRQRAGXRDLRHAVVAXGGTRS

SEQ ID NO: 1015030 - protein, 62 aa, Homo sapiens
  misc_feature (1)..(1): Xaa can be any naturally occurring amino acid
  misc_feature (8)..(8): Xaa can be any naturally occurring amino acid
  misc_feature (31)..(31): Xaa can be any naturally occurring amino acid
  misc_feature (54)..(54): Xaa can be any naturally occurring amino acid
XGHWCGPXDGAHSALCRRRPCWLGLPWAHRXKFWVEQNRLNKPTALQPRGAHLXPPQLWLPP

SEQ ID NO: 1015031 - protein, 52 aa, Homo sapiens
  misc_feature (6)..(6): Xaa can be any naturally occurring amino acid
  misc_feature (38)..(38): Xaa can be any naturally occurring amino acid
QLKQVXEEPSPQLPADRLSPEFVDFTAQCLRKNPAEVXSYLELMEHPFFTLH

SEQ ID NO: 1015032 - protein, 138 aa, Homo sapiens
  misc_feature (2)..(2): Xaa can be any naturally occurring amino acid
  misc_feature (11)..(11): Xaa can be any naturally occurring amino acid
  misc_feature (23)..(23): Xaa can be any naturally occurring amino acid
  misc_feature (49)..(49): Xaa can be any naturally occurring amino acid
  misc_feature (76)..(76): Xaa can be any naturally occurring amino acid
  misc_feature (89)..(89): Xaa can be any naturally occurring amino acid
  misc_feature (95)..(95): Xaa can be any naturally occurring amino acid
FXSSTPAWMFXKNVYLGKLGVLXVRRKSTCGKPLLEYHVPGLCGCYSVXCASPAVGIAPAWSACVSNLICPHSDFXPHDSAFTVGSSLXVPPLFXKAVKEENQRQTLWTVKEKGREFPGNSLTQGCKPVYYIYIFPLN

SEQ ID NO: 1015033 - protein, 49 aa, Homo sapiens
  misc_feature (16)..(16): Xaa can be any naturally occurring amino acid
  misc_feature (27)..(27): Xaa can be any naturally occurring amino acid
PVGRVQKCSVKATTQXGLGQARRLYLXAVLEYLTAEILELAGNAARDNK

SEQ ID NO: 1015034 - protein, 52 aa, Homo sapiens
  misc_feature (10)..(10): Xaa can be any naturally occurring amino acid
  misc_feature (33)..(33): Xaa can be any naturally occurring amino acid
  misc_feature (49)..(49): Xaa can be any naturally occurring amino acid
PGLQKEKVQXEEPIPQEPQWSLPSKELPASLVXGLQPLPAHQENGFSTXGPS

SEQ ID NO: 1015035 - protein, 106 aa, Homo sapiens
  misc_feature (22)..(22): Xaa can be any naturally occurring amino acid
  misc_feature (31)..(31): Xaa can be any naturally occurring amino acid
  misc_feature (36)..(36): Xaa can be any naturally occurring amino acid
  misc_feature (38)..(38): Xaa can be any naturally occurring amino acid
QEIKQRIPKPTIGSMEGNLRWXSKKCLLKPXPMGKXPXPKPCGITAKAVLKRKLYSNKCLHQKKRKISNNNLMMHLKELEKQEHTKHKISRRKLDHLNNKDQRRTK

SEQ ID NO: 1015036 - protein, 126 aa, Homo sapiens
  misc_feature (6)..(6): Xaa can be any naturally occurring amino acid
  misc_feature (21)..(21): Xaa can be any naturally occurring amino acid
  misc_feature (25)..(25): Xaa can be any naturally occurring amino acid
  misc_feature (36)..(36): Xaa can be any naturally occurring amino acid
  misc_feature (82)..(82): Xaa can be any naturally occurring amino acid
  misc_feature (92)..(92): Xaa can be any naturally occurring amino acid
  misc_feature (101)..(101): Xaa can be any naturally occurring amino acid
KLGNLXWKPKPNWKINDERAXVEEXSPPSLAAPQPXQGLEDEGEGQQDADGADQVPGLARAVAGAAAGGAVGLVAHERCAQXVATWPSSSKXCPPRELRRXRVQVEQQVGEPHGRAQVVEEVPTAE

SEQ ID NO: 1015037 - protein, 111 aa, Homo sapiens
  misc_feature (9)..(9): Xaa can be any naturally occurring amino acid
  misc_feature (13)..(13): Xaa can be any naturally occurring amino acid
  misc_feature (43)..(43): Xaa can be any naturally occurring amino acid
  misc_feature (53)..(53): Xaa can be any naturally occurring amino acid
  misc_feature (83)..(83): Xaa can be any naturally occurring amino acid
  misc_feature (93)..(94): Xaa can be any naturally occurring amino acid
PSLCSMIRXAAAXRSLADAAAEGGPGAWGPEPSAHVPDHGGGXRAAYAHVLAXLPPGAVSAPAEPPAAAAAAGATVAAELISXCRPQGPPCLXXAPPPSHVPPSPAPNPRC

SEQ ID NO: 1015038 - protein, 44 aa, Homo sapiens
MCDPKKTPAKEKEAVRAPEKELPSLRVCVGGRGCWFQCIKSWTA

SEQ ID NO: 1015039 - protein, 157 aa, Homo sapiens
  misc_feature (34)..(34): Xaa can be any naturally occurring amino acid
  misc_feature (68)..(69): Xaa can be any naturally occurring amino acid
  misc_feature (114)..(115): Xaa can be any naturally occurring amino acid
  misc_feature (123)..(123): Xaa can be any naturally occurring amino acid
  misc_feature (137)..(137): Xaa can be any naturally occurring amino acid
  misc_feature (143)..(143): Xaa can be any naturally occurring amino acid
HALTPGADGGDASGLPSVDGRSRYDINPLRVYIXQGDSNLRTSFGPSPEPSCVLRLLSASGSAWTDGXXVPASKRDPASWEWPRRRTWTSKSAAPPRRGHEQSQTEAKGSAEGXXLEPAGRGXRRCAVGVHWELTPXSHVAGXKRRRGRRSGRSSGR

SEQ ID NO: 1015040 - protein, 80 aa, Homo sapiens
  misc_feature (10)..(10): Xaa can be any naturally occurring amino acid
AFDVLGFPAXLVSYQGPHLHSEATKLEAREPCTGSLTPADVAFTVSYSTFEWEADIAKLEDFTFTHTHTIPLEQSEDRVR

SEQ ID NO: 1015041 - protein, 110 aa, Homo sapiens
MASSRCYNCSSVVILCQEQLQRYPEPFPPHWRYAFTGSEPSPVDPSPPGPPILQSPHRTSRAHGQPIFRDIPSSRPHSNASSLQSQFHVSSSYEGICSHWYLLIIICPRT

SEQ ID NO: 1015042 - protein, 164 aa, Homo sapiens
  misc_feature (60)..(60): Xaa can be any naturally occurring amino acid
  misc_feature (67)..(67): Xaa can be any naturally occurring amino acid
  misc_feature (71)..(71): Xaa can be any naturally occurring amino acid
  misc_feature (76)..(78): Xaa can be any naturally occurring amino acid
  misc_feature (111)..(111): Xaa can be any naturally occurring amino acid
  misc_feature (118)..(118): Xaa can be any naturally occurring amino acid
  misc_feature (125)..(125): Xaa can be any naturally occurring amino acid
  misc_feature (159)..(159): Xaa can be any naturally occurring amino acid
QRTFPILHHVSSQSRALELAQWWLPHHRLGRQAVIWESPRAESGPCGRVGVLRFWSTEFXSPAYVFXSGKXKEKLXXXVPLAFLVGWPGSVSVWPKGGANRTEKGAHTDSXTHSSSPXLRGWRRXRVLCGFGLSWWLNRMAAVLLTVLGSLECTPKEGXISSDE

SEQ ID NO: 1015043 - protein, 148 aa, Homo sapiens
FDAEMVPYCGKEFRVRAVIDTMIDEKTGKITETQKSLRIFGGGDLPIEVFQLQNKLPAHDSSLVAVKSGSSESPKMGGPVATAKDANGQGFDAHRRSIDVQRLPVRRTSSQIAKKAPNGAPRIWVSQLYLTAAFAYGEGGIDDAFRQK

SEQ ID NO: 1015044 - protein, 52 aa, Homo sapiens
PDSRLTKLEAEYRGGPHAASLEGRPELPAPGLRMLYPWLQACQMMPEALSLA

SEQ ID NO: 1015045 - protein, 107 aa, Homo sapiens
  misc_feature (7)..(8): Xaa can be any naturally occurring amino acid
  misc_feature (11)..(11): Xaa can be any naturally occurring amino acid
  misc_feature (52)..(52): Xaa can be any naturally occurring amino acid
  misc_feature (56)..(56): Xaa can be any naturally occurring amino acid
  misc_feature (61)..(61): Xaa can be any naturally occurring amino acid
  misc_feature (75)..(75): Xaa can be any naturally occurring amino acid
FGEFPAXXQRXGLKLVSAGFQTAEELLEVKPSELSKEVGISKAEALETLQIXTGEXVSQIXQDMLVTSESHKKCXALELLEQEHTQGFIITFCSALDDILGGGVPLN

SEQ ID NO: 1015046 - protein, 119 aa, Homo sapiens
  misc_feature (27)..(27): Xaa can be any naturally occurring amino acid
  misc_feature (91)..(91): Xaa can be any naturally occurring amino acid
MVLVVISDWEELLHLRPLNPGGQTVPXRLWQLCRVKNHLVMAEVPGRNNVGNFIYNVCPLQQTSTPTPTTAGFNSALAENLQSSETKQPQXSGQAHVSQIPLELLLCWLLLAFLLHDFF

SEQ ID NO: 1015047 - protein, 43 aa, Homo sapiens
  misc_feature (2)..(2): Xaa can be any naturally occurring amino acid
  misc_feature (43)..(43): Xaa can be any naturally occurring amino acid
VXAPITDLKLYASAFSERYLGMPSKEESTYQAASVLHNVHGLX

SEQ ID NO: 1015048 - protein, 138 aa, Homo sapiens
  misc_feature (12)..(12): Xaa can be any naturally occurring amino acid
  misc_feature (19)..(19): Xaa can be any naturally occurring amino acid
  misc_feature (39)..(39): Xaa can be any naturally occurring amino acid
  misc_feature (41)..(41): Xaa can be any naturally occurring amino acid
  misc_feature (83)..(83): Xaa can be any naturally occurring amino acid
  misc_feature (108)..(108): Xaa can be any naturally occurring amino acid
PAPVRWGWGPKXNLKRPIXPVRFEKVLRPLRMVLKAQSXCXLYYQVLEPHPEALFLWAASKEGSWRGRWMGSLDMGQDKAWKXKGFSKTRSLKVTFLQGFAKTCRSLXMVPCFHPLAIFYGIRTQMGLLFSFVCSHGV

SEQ ID NO: 1015049 - protein, 57 aa, Homo sapiens
VIVRAERHHVRFLNVPGGGYRGPRKDIWTPLSPTRPLQQASQALSSGVQTVVHSRYH

SEQ ID NO: 1015050 - protein, 37 aa, Homo sapiens
  misc_feature (33)..(33): Xaa can be any naturally occurring amino acid
VDYTELGLQKLKESGKQHSFTLSLIIIISVSSXDSCN

SEQ ID NO: 1015051 - protein, 65 aa, Homo sapiens
  misc_feature (24)..(24): Xaa can be any naturally occurring amino acid
NEFLNGHVKKYAGGVAEYRASEGXDSGGPFIGDVDIPSETSRGDRSTVPMWEQLSQELSKEQQSE

SEQ ID NO: 1015052 - protein, 58 aa, Homo sapiens
VTTVGPSRDGTISEDTIRASLISAVSDTWDADEGGHDRAQAELNDLTHRRRPYNGSQT

SEQ ID NO: 1015053 - protein, 46 aa, Homo sapiens
LTFYDIAMTPGWLVLAIAMVRFDMAKDTQRFIYKYSEDTSIFPDIC

SEQ ID NO: 1015054 - protein, 56 aa, Homo sapiens
GQQAHQPSEKQNDAREFVRPVRPAENAPLANRIIRAQGPRIHPDETVAQVDKVTGK

SEQ ID NO: 1015055 - protein, 57 aa, Homo sapiens
DKAASGYRKKLLEHKEIDGRLRSKGQFKDLPSSIKGLKYFRPVRDLADCGKTYSYLE

SEQ ID NO: 1015056 - protein, 36 aa, Homo sapiens
GAETAAARKAKNQPDQEGEVCSTAKLHALRGTDQVM

SEQ ID NO: 1015057 - protein, 75 aa, Homo sapiens
DFAGHDNAVQPVQGLHLPPAALHRRRNEILVLEVPASEMQQVTVLVGITPCHASTLTQALQRRHVVNCPPLTGGT

SEQ ID NO: 1015058 - protein, 51 aa, Homo sapiens
KKERPVHRPGSGQRWPAQQVCPESAEGSSHNTQQALVPSSASWEQFSFQPL

SEQ ID NO: 1015059 - protein, 58 aa, Homo sapiens
CKCKPIRSYTEGPNFRNNYNYVIVAKVKEIKTKCHDVTAVVEVKEIKSSLVTSTDTVT

SEQ ID NO: 1015060 - protein, 99 aa, Homo sapiens
IDEKGQVCLPVIRAENWKPATTTDHVIQCLIALVNDPQPEHPLLADLAEEYSKDRKKFCKNAEEFTKKYGESDLWTKICHDWFQPAVTRDPVQCIQTPR

SEQ ID NO: 1015061 - protein, 54 aa, Homo sapiens
TTSPTSESGPNQQFIQQMVQALAGANAHSCRFQRSDFSTILDQFTALGFLTREA

SEQ ID NO: 1015062 - protein, 48 aa, Homo sapiens
HEQDIVQYNTYMRHTSQQQQQTHQYQQRRQQEAYAAPDRGVPPLPEED

SEQ ID NO: 1015063 - protein, 53 aa, Homo sapiens
DGMDDIISQESSLDMEGNYKKAQRNERESIRQRLALGSFFDDAQEFIPPVAKG

SEQ ID NO: 1015064 - protein, 49 aa, Homo sapiens
GFLAPGARSNIQYRSLPRPAKSSSMSVTGGAGLDLALLAAGFTQGFLEP

SEQ ID NO: 1015065 - protein, 42 aa, Homo sapiens
TVKSLSQCVLRLPRLIRLNNVKLALDADDMHANVMKKKSLSK

SEQ ID NO: 1015066 - protein, 53 aa, Homo sapiens
SCRSWKRGVRELESELEAEQKRNESGEGHEESELRIKELTYQTEEDRKTCCGC

SEQ ID NO: 1015067 - protein, 76 aa, Homo sapiens
MQPVQAPASFGGAQTGKAEGMSRYKQAAGLKNAGETFSEGDDHLVRTDESVRTYRDVQGRGNHVLERPGVRAVTKD

SEQ ID NO: 1015068 - protein, 48 aa, Homo sapiens
MASRKKVPALLPPLQLHAAQGKGKGKGGSGDQAVRSQIDACVLRYQHY

SEQ ID NO: 1015069 - protein, 49 aa, Homo sapiens
RQQEIEEKLIEEETARERRIVAKRVEEELKKEDEFNGSLQVESQTIMKA

SEQ ID NO: 1015070 - protein, 101 aa, Homo sapiens
  misc_feature (22)..(22): Xaa can be any naturally occurring amino acid
  misc_feature (25)..(25): Xaa can be any naturally occurring amino acid
  misc_feature (28)..(28): Xaa can be any naturally occurring amino acid
  misc_feature (56)..(56): Xaa can be any naturally occurring amino acid
  misc_feature (80)..(80): Xaa can be any naturally occurring amino acid
  misc_feature (92)..(92): Xaa can be any naturally occurring amino acid
  misc_feature (95)..(95): Xaa can be any naturally occurring amino acid
SWDKDVYPEPPRRHAGSAQSHXLHXESXRPHRGPTRDPRERIYRAGNGKEQGITTXTGSTAACQTSLSSREEDIMFMYEXEIQWKRGLQSRXRNXSRFMPG

SEQ ID NO: 1015071 - protein, 49 aa, Homo sapiens
  misc_feature (34)..(34): Xaa can be any naturally occurring amino acid
MNKDAQMRAAINQKLIETGERERLKELLRAKLIXCGWKDQLKAHCKEVI

SEQ ID NO: 1015072 - protein, 155 aa, Homo sapiens
  misc_feature (7)..(7): Xaa can be any naturally occurring amino acid
  misc_feature (13)..(13): Xaa can be any naturally occurring amino acid
  misc_feature (27)..(27): Xaa can be any naturally occurring amino acid
  misc_feature (73)..(73): Xaa can be any naturally occurring amino acid
  misc_feature (127)..(127): Xaa can be any naturally occurring amino acid
  misc_feature (133)..(133): Xaa can be any naturally occurring amino acid
  misc_feature (144)..(144): Xaa can be any naturally occurring amino acid
  misc_feature (147)..(148): Xaa can be any naturally occurring amino acid
KRNHRHXAAPDEXGGQSRCRGSAHPTXKRPCPASVNRPSQVPPGPSVTSLRNTWRLLPERARVSTEPAEASCXLPSCRAGSTTAEAQHLQGPAWGPPMPGLFQLRSAHGSHGAAAKAMVQSKCLPRXCQARTXLQGATAHAGLXLLXXAPQGGGR

SEQ ID NO: 1015073 - protein, 74 aa, Homo sapiens
  misc_feature (1)..(1): Xaa can be any naturally occurring amino acid
  misc_feature (7)..(7): Xaa can be any naturally occurring amino acid
  misc_feature (38)..(38): Xaa can be any naturally occurring amino acid
XEILKCXGKGLVAACLKSGMWKTLPMQLTLPYVASSLXRDCATALQPGRQIKDPVSKKKKKKNLIGIQNHTTIH

SEQ ID NO: 1015074 - protein, 57 aa, Homo sapiens
HLQCNMVANSGSYQLRDSLSCERYCCFLTENGRNQLPPRCPVQIAYLERLSWVHGSR

SEQ ID NO: 1015075 - protein, 53 aa, Homo sapiens
LCEGVWLFAKGDLALQIESIAVYHTLAAAGSSSEGHGSFSKLALFQWSIICVV

SEQ ID NO: 1015076 - protein, 45 aa, Homo sapiens
QALTCNLGIVTHFLNALGLFTSYHLSVHLSSLLRLRMLVFNSLHF

SEQ ID NO: 1015077 - protein, 37 aa, Homo sapiens
AITIVWSGAGPASRLLPSLGPRTTEPPDPHAVCLSEA

SEQ ID NO: 1015078 - protein, 57 aa, Homo sapiens
AVSGAAQGALSCDQSLKFKDEAWLPCSGFVTYLEGKHNAFTGRVCPFLLGVLTCILC

SEQ ID NO: 1015079 - protein, 34 aa, Homo sapiens
SKQKIVEVLLVCNLGTWLKKLITAKCLCFVPLAV

SEQ ID NO: 1015080 - protein, 47 aa, Homo sapiens
TWYGMCKWFAGDDVPEPCSFLLRAPRHRAAKKAKARGSHWGDEPRAS

SEQ ID NO: 1015081 - protein, 44 aa, Homo sapiens
VTVTRLELGRFCLCAATQASASSRRLQELDSTIGLQRYNHDETQ

SEQ ID NO: 1015082 - protein, 81 aa, Homo sapiens
ATVGYRNKNVRQKTWRPNHPQAFVGSVREGQGFAFRGKLKYSKVTGIATEERGQRHWISFTDRYQISEHLFWLGRKHGGSR

SEQ ID NO: 1015083 - protein, 101 aa, Homo sapiens
PAATSASHQALRYLRLKYLSYFRICPRKPFRLGWSLSLLPLLTELLEVNRRLRLGLPMPSKSKVPIRGLCLGGRPHLGIFLFLHQWSFLAPLRSKRGGGGL

SEQ ID NO: 1015084 - protein, 61 aa, Homo sapiens
  misc_feature (13)..(13): Xaa can be any naturally occurring amino acid
  misc_feature (24)..(24): Xaa can be any naturally occurring amino acid
SEMSGRGKQGGKXRARLSRARRAXAAVPRGRVHRLLRKGNYSERVGRRLVYLAAVLEYLTA

SEQ ID NO: 1015085 - protein, 111 aa, Homo sapiens
  misc_feature (3)..(3): Xaa can be any naturally occurring amino acid
  misc_feature (15)..(15): Xaa can be any naturally occurring amino acid
  misc_feature (21)..(21): Xaa can be any naturally occurring amino acid
  misc_feature (40)..(40): Xaa can be any naturally occurring amino acid
  misc_feature (83)..(83): Xaa can be any naturally occurring amino acid
ERXLSPSPSACTAVXEPSPGXLDVTIMYKGRTVLQKVVGXPSCTFLYGPPDPAVRATDPQAPQPLHPSLPAASELLTPPSSTXESSSKVSEALAWGAVSRGSLGAPGLPGT

SEQ ID NO: 1015086 - protein, 87 aa, Homo sapiens
LHATCFAALVKGAAQPEKERSRETVACVLSVAIVLLSDKEAPSTPCDLELEVEGLGVLLPEPSALSPSSPFDSLQIGTQNSLELLED

SEQ ID NO: 1015087 - protein, 30 aa, Homo sapiens
MAARNPNKDPENSRAFKVLIAAQYSGGSGT

SEQ ID NO: 1015088 - protein, 65 aa, Homo sapiens
MGKVRVGVTGFGRIGRLATRLAFTSGKVEIFAIKYPSITSTQWLHVPIYSPMANSMAPQGLEREL

SEQ ID NO: 1015089 - protein, 49 aa, Homo sapiens
ATEDPGVAMGAARQLFTDCKNKPYPKSRFCRGVPKAKIRNFDLERKKAK

SEQ ID NO: 1015090 - protein, 73 aa, Homo sapiens
LRRSLAAWRTPGILAPAGGTTRRVLRGSRGLPFPDKLRIPCIGTLLLELDKLADICSCISEMSVTDSDSLGTN

SEQ ID NO: 1015091 - protein, 57 aa, Homo sapiens
LLPLLKLSQSEGFKGQEGSVERCPQPQKRDPHVTHFRAETLRLRDSPISSESVPGEQ

SEQ ID NO: 1015092 - protein, 44 aa, Homo sapiens
QYAYQDLSVSWLVAEGEQRPCLDIEEVVEEYDEVGAGGAAVKEQ

SEQ ID NO: 1015093 - protein, 35 aa, Homo sapiens
ELGHLHCSLLLHKIHEESIDQENFNLQDLSRYTYC

SEQ ID NO: 1015094 - protein, 47 aa, Homo sapiens
MSLVTAKHGRIALQKITEMNQKNCVGVSEAYEDDPNGLLSDELNCQA

SEQ ID NO: 1015095 - protein, 67 aa, Homo sapiens
DWFVSVPIDSLGLITEFFGLSCSRHTVPNVAAGQSTLFRPGHDGGPATGTMSSVVWNKLTRSILLDL

SEQ ID NO: 1015096 - protein, 54 aa, Homo sapiens
MLSFSLTLSEVQGSLYEEIHIYEEIRLEQSPHRSRSRGALNDPFKAYSRSKLVF

SEQ ID NO: 1015097 - protein, 48 aa, Homo sapiens
VNRKGAIVIARHAHEQPEQCSGAFVEVCRVAYVSLTYCRKIGRDCRCY

SEQ ID NO: 1015098 - protein, 34 aa, Homo sapiens
TAKNYFKKALKDMGYGTGLATPGGKTFYLPIIVS

SEQ ID NO: 1015099 - protein, 72 aa, Homo sapiens
EAAAGAMFGREGGKKKPLNSPRSRPRRMDEEVKDFKQKQKEAQKKLEELKAKPAGKAPCTSVLVSAIVALLL

SEQ ID NO: 1015100 - protein, 36 aa, Homo sapiens
MPQLCSHSLRFTSQFGLFIGSYDIKELFQSLRSIWS

SEQ ID NO: 1015101 - protein, 49 aa, Homo sapiens
MLFSIATTTTTTKDSENNSNKDDVGPYEKRDKLYEILRGPHEAEPVASY

SEQ ID NO: 1015102 - protein, 59 aa, Homo sapiens
NRITQAPACWSVLGGTDLGVYRWLTPGNPSTLGKPRLGGSLEGQELKTILGNMARPRLY

SEQ ID NO: 1015103 - protein, 49 aa, Homo sapiens
PSRQVTEAVKVALTSGTHIDCAMCTDEMSGVHQRAQEQCELELLIVTAL

SEQ ID NO: 1015104 - protein, 51 aa, Homo sapiens
RHTRSPCLGYGRRNRMWTMSLDYEDDEGGDSSWGDGLSPAQRMSGLLCLHP

SEQ ID NO: 1015105 - protein, 136 aa, Homo sapiens
PGKHILCGTPGSSDDKAVEGKYNYNDEINTRKFLSGCSYRNKGVQDLSLLQLELSAASQKGWLSYTVLWGGSCLFWFFVLFCFVFSEMESHSCCPGRSAVARSWFTATSTSHVQADSPASASPVDGDYRCPATTPS

SEQ ID NO: 1015106 - protein, 41 aa, Homo sapiens
WYHHTGRMERSAHTFYTELVCSEQHPPAHRAPLSPGQPESS

SEQ ID NO: 1015107 - protein, 45 aa, Homo sapiens
KTAQAIKGYAYTKSHEILKDVTLQKRVYLTSYMVALAVYTDQHGT

SEQ ID NO: 1015108 - protein, 45 aa, Homo sapiens
REAFWLERRYNPRVSGKSQALFQVTQWLTSLETPEEEESEEELTK

SEQ ID NO: 1015109 - protein, 56 aa, Homo sapiens
  misc_feature (8)..(8): Xaa can be any naturally occurring amino acid
  misc_feature (24)..(24): Xaa can be any naturally occurring amino acid
MGALLLLXLLGLAVLVHKHYGPRXKCCSGKAPEPQPQGFDNQAFLPDHKANWAPVP

SEQ ID NO: 1015110 - protein, 51 aa, Homo sapiens
RELKTIFQQSDFSTFQKISTLLCKGRTVIVKGPRGTLRRDFNHINVDLSPL

SEQ ID NO: 1015111 - protein, 83 aa, Homo sapiens
TLRLCSQDDQSGETAAPQVSYTRDIMLFGSWSTYDMQINDIALQASITLTLKYTKYLPHSSGRYAAKRFSELSVHCGSSSLTS

SEQ ID NO: 1015112 - protein, 42 aa, Homo sapiens
PIPETMAPMGLEPEGVHSRGNLELDFFTSFIDMNLSESLLPW

SEQ ID NO: 1015113 - protein, 31 aa, Homo sapiens
QAASTSTYNGPSSVGSFIGTTSDAPCPPCYR

SEQ ID NO: 1015114 - protein, 38 aa, Homo sapiens
  misc_feature (33)..(33): Xaa can be any naturally occurring amino acid
CPCNLPAGIRHQVNRQSSGRPTAPNPVAAFPPXSSSAL

SEQ ID NO: 1015115 - protein, 40 aa, Homo sapiens
DGDCACSSCKGVIDYAVKIRVSLTEPLWSQMVLALQNPFE

SEQ ID NO: 1015116 - protein, 46 aa, Homo sapiens
MNAPYLYALEVNEQTTTSEEKMVIDVLPPGRRKKLSTELGQNVPHV

SEQ ID NO: 1015117 - protein, 69 aa, Homo sapiens
  misc_feature (13)..(13): Xaa can be any naturally occurring amino acid
  misc_feature (22)..(22): Xaa can be any naturally occurring amino acid
  misc_feature (32)..(32): Xaa can be any naturally occurring amino acid
  misc_feature (35)..(35): Xaa can be any naturally occurring amino acid
  misc_feature (60)..(60): Xaa can be any naturally occurring amino acid
  misc_feature (62)..(62): Xaa can be any naturally occurring amino acid
  misc_feature (67)..(67): Xaa can be any naturally occurring amino acid
IPARIGRARVPQXWKAGLILLXPLEEFILRHXDFXPVKLLSEGVRIRTPQRGSWISLQEXIXGESTXVN

SEQ ID NO: 1015118 - protein, 70 aa, Homo sapiens
KSGPQKSSIFCPNVPIILVGEEEGSSDDEHTRRELAKMKQEPVKLEEGRDMANRICAFGYMSVQQRQRWS

SEQ ID NO: 1015119 - protein, 53 aa, Homo sapiens
MVKETPQAAGKISSYAFSCRLPGEHRGTPDFPSFADFQSFEMSHSQGERFSLQ

SEQ ID NO: 1015120 - protein, 63 aa, Homo sapiens
MTETAFGSAYKTNGHVSYRWATLQGFSHQADGTSPKHHPNFVRCIIPNHERRAGKLDPHLVLD

SEQ ID NO: 1015121 - protein, 64 aa, Homo sapiens
IVSATSPEEKNVPVCRLPAKSCCSLPKDEDYKQEQQKKAEVERKDLTEHADLKMKGTLPTRNSK

SEQ ID NO: 1015122 - protein, 41 aa, Homo sapiens
MNVDLRGQGLRLSLRVHACEGCRGFYRRTIRLKLVYDKCDP

SEQ ID NO: 1015123 - protein, 48 aa, Homo sapiens
STLQPLQVGLQLVRYNNVFHNSNFHRAHTTGSLLAFHLHSFRLLLAEA

SEQ ID NO: 1015124 - protein, 70 aa, Homo sapiens
WCRMAAPAVVTGIVDKPYQSLASAEVSFMPGFAFLTWGGKAKVDEFRFVATWCQMYMRSCSLSPGAPDLS

SEQ ID NO: 1015125 - protein, 42 aa, Homo sapiens
MPSHFYTRHTYTLIPYYVIIEPSAYLFKPIALAVRLTVNITA

SEQ ID NO: 1015126 - protein, 41 aa, Homo sapiens
IPENRNGLKNNLPNFYFFKMISISPPPEMYTSLETPKLHQS

SEQ ID NO: 1015127 - protein, 35 aa, Homo sapiens
EDEDVEGDEDDEKSVRKKKNFDFMKEDLRLGLGCR

SEQ ID NO: 1015128 - protein, 95 aa, Homo sapiens
MTMRLLEIRLTYIYNTDQSKDSLVDVPFPNSYQYIAAVDYNPRDNLLYVWNNYHVVKYSLDFGPLDSRSGKFNLLWYSLGKYLLFVLSKFILCFY

SEQ ID NO: 1015129 - protein, 44 aa, Homo sapiens
ARGEAEAGYPLVINHALPHYLTLLDQGLDPELALLDTLLLLMAI

SEQ ID NO: 1015130 - protein, 357 aa, Homo sapiens
RTGSHRRAHAPERGRENAAQVSSPRARHQRDRPAPPDRSRAGSSRPGTAGASCLRGSDLGLPRGLAPRRRECAAAVAAQWVAGVSSSSSLSASDGSRGDARKGLGGPEAAASPDRLTALGGVHDCNPSAWVIETNEGTLRLYLATSEQASGKQQECDATNHEVAWRLLQRCNKRVVALAKPRFRILTEHTVIGFDKPSLCITIKPLETGDWLSRDGRGESLLFGCPLLTRMCVCPYLEDPSLVTPEVKAMWIVELNSYLFDRTELGSQDGDNQLTALRPVGDEKAVANQYGVGQIPRYNRLEFNAKVDARISKAVARYTTGEPEIGSSIRNENHRKSELRHWYRTRAKGNWGARKRN

SEQ ID NO: 1015131 - protein, 80 aa, Homo sapiens
ERDHLSFEQELTPSPLLEEQEVQLCVSTRLGSFEFFSSRRPSVVIRVALRIIREGSLDSATEVRTMPSHMSTEDKFLLVV

SEQ ID NO: 1015132 - protein, 46 aa, Homo sapiens
DLGQLQSPQNWSLLSRQDLRASGGKPPAPLENAYLSSSLTKRRSLP

SEQ ID NO: 1015133 - protein, 145 aa, Homo sapiens
  misc_feature (20)..(20): Xaa can be any naturally occurring amino acid
  misc_feature (52)..(52): Xaa can be any naturally occurring amino acid
  misc_feature (64)..(64): Xaa can be any naturally occurring amino acid
  misc_feature (90)..(90): Xaa can be any naturally occurring amino acid
  misc_feature (100)..(100): Xaa can be any naturally occurring amino acid
  misc_feature (127)..(127): Xaa can be any naturally occurring amino acid
  misc_feature (140)..(140): Xaa can be any naturally occurring amino acid
LQEFGTRLPGAWERWQQGCXKEALYRRNLVESELQPPPQVRSHGRGSQESGXRPDTGKSRHSHXPDKQTISGQSVLDSPSSGPPARQKPXWLRVLGTMPXSQYVPLTQGLAGPWRILFAQPRGCPGXGRPPEQGRVAWGXPEGPL

SEQ ID NO: 1015134 - protein, 68 aa, Homo sapiens
RRPSSSSSSSSSTFRSSNSSNNSSNNSSNSSTLKGLHFSASPLTIDCYFFLWQLARFLVPHMRVFTLE

SEQ ID NO: 1015135 - protein, 119 aa, Homo sapiens
LTFLGRFPLGCSSILQDYIFLGFRGPAWAYGSGFSPSFPVRETLLSDKTMPPAQDSFGFRAQEGIPSLDSPLFCYFIGNLEPTWSNNCILLRSWQLVTIQNGLLGTEITQSPWNQPGSQ

SEQ ID NO: 1015136 - protein, 45 aa, Homo sapiens
PRPYLLFSLTSEIESRDEGRLNTKTQKSLSQFNLLMNKQSQSKAY

SEQ ID NO: 1015137 - protein, 83 aa, Homo sapiens
ETHSINGEVRKISLWGQARWLTLYLLMPVSQHFGRRDGLITRSRDRDILANTVNPVSTKTQRLAGRGGVAVVQLLGSLRQEMA

SEQ ID NO: 1015138 - protein, 70 aa, Homo sapiens
QKKRKRRRRKSSRTATAFHPSREEKKKIQIQTAMTFLGDARHIIRIQARFDYYFAFQALHVPQSLSCHLY

SEQ ID NO: 1015139 - protein, 83 aa, Homo sapiens
QDQGERENPMGELRIRKLCLNICIGGEWRQTDASSQGFGAPHRADPCVFQARYTVRSFGIRGMEGFLFTAQCRAQAQNFGEAL

SEQ ID NO: 1015140 - protein, 57 aa, Homo sapiens
ARGEREVEERLQKEQEKFSVYWNEPKLDGGLGGTPKLAKLGTSGPGPSEAKNYFSQI

SEQ ID NO: 1015141 - protein, 71 aa, Homo sapiens
VEQHSTNVISVLKSSAQNLPLHGTGRFILEKDPIAPVNFGNPSSSKILPCFSKEIPIGETPIDPCLGNPQQ

SEQ ID NO: 1015142 - protein, 48 aa, Homo sapiens
IGSKTRRRDCLKAPGIIPRISVREPMQTCIKACGELGAQFVVVTVTYY

SEQ ID NO: 1015143 - protein, 67 aa, Homo sapiens
KVELQELNDHRTHRSAFWQQIDLCELRELKAKESRWGLYEEEMRDCATGGTANTTKPHTLRERDNHA

SEQ ID NO: 1015144 - protein, 55 aa, Homo sapiens
APPQLVRMMCAVLSGITCKESNARAISRLKVIVRSHLMMRHGYICEFESLMTTEL

SEQ ID NO: 1015145 - protein, 48 aa, Homo sapiens
VKVKKFNEARDPAKYFIRDEFLRISTSSGDWRHYFYPHFTSRCGHLEH

SEQ ID NO: 1015146 - protein, 43 aa, Homo sapiens
MTAEEMASDELRKLRNAMTQEAIREHHMAKMATPPLTFQVQQL

SEQ ID NO: 1015147 - protein, 125 aa, Homo sapiens
CVMPPSTVQWLVCDVQSEAHRPFSLDGQFIALTLGSQPCSWELEEHFEILRDHTLSPSLPTEAEGTGKKPGQARSYCATSVVAFLNWESWLAPGRGAISDYTQAAFLLSLYFRFIPLLASPYVKK

SEQ ID NO: 1015148 - protein, 93 aa, Homo sapiens
RICANKYMVKVVARWLPYPGAAPPLHVIRITRCCPVLELTGSKQACGVPLEAQGTVARVHIGQVIMSIRTRSRQGHVIGPRRPSQVSGAKGPI

SEQ ID NO: 1015149 - protein, 49 aa, Homo sapiens
CAEEDHWPCGIGCVQYSYESYEYCTQDSDVLRNPKMQHKKVYRPDTNEM

SEQ ID NO: 1015150 - protein, 60 aa, Homo sapiens
SEAPVFLLRPARRPKNPLRVFKLARKVSPGAILSSQCSPKKQAQAAGSKKADEKKEGEDY

SEQ ID NO: 1015151 - protein, 61 aa, Homo sapiens
QPKALRTKWFLLPLSVGKIRNRRSHSCEEDHATLVNQESEQSDDDLLPLSSPHGNPIGDKP

SEQ ID NO: 1015152 - protein, 41 aa, Homo sapiens
MISNVHCGADMWLQQMQQIRMSLRGKAVCLWQTHMRRHQAL

SEQ ID NO: 1015153 - protein, 66 aa, Homo sapiens
EEKHAVNSMWSKMNVESMEVKHWQHHSCFPWPKRFFDKFENMKDPDAIMGNNKVKAMEEGHDIHLE

SEQ ID NO: 1015154 - protein, 58 aa, Homo sapiens
MSKLKPPCPRKPKGKAVKGRLNLPMCDAETSGLESWEGGKPYQDSCKTLGPLTWLPYL

SEQ ID NO: 1015155 - protein, 69 aa, Homo sapiens
MARGPRSISSGCSSKHWMLDNDRCVCSRPSTVPTGERVSPLIIFWGQTEYALTEMSKKIACAVHKMMAG

SEQ ID NO: 1015156 - protein, 36 aa, Homo sapiens
ISTILFGAAYTCLEAGHQLERKPTQQAPVKIEPGVD

SEQ ID NO: 1015157 - protein, 81 aa, Homo sapiens
PLQSLQQRTWLIHWSLFVSSFTPKVAINIIDLSLYHATISQCNSDNCVTQSSVFDYSSHNNKVVGTSAGLKASKVFTGASN

SEQ ID NO: 1015158 - protein, 68 aa, Homo sapiens
QSHLDQNSDDITIEEYGEFYKSLTTDSRDHSAVSIFQLRTVDSEPFLLSHASPFDLFEQKKDISMYFE

SEQ ID NO: 1015159 - protein, 150 aa, Homo sapiens
  misc_feature (94)..(94): Xaa can be any naturally occurring amino acid
  misc_feature (148)..(148): Xaa can be any naturally occurring amino acid
MHGVVHTNLGPAQRSSQGPGRKMVCSFPLLLSLSSRALNPWQHKFFNHGNVQASRPWQVSVGCSSQHQKVVSRKKKSPSFPHHHPSVGWFHHLXSHPHTSNAAGACWALVLVFEGDHHNISVPCATVKQTSTPLRARPPCSCCQATAXNE

SEQ ID NO: 1015160 - protein, 30 aa, Homo sapiens
MGLGGRAKDALPNSGDPQEDPLTTVESMRA

SEQ ID NO: 1015161 - protein, 56 aa, Homo sapiens
DSFGEVACACRDCIPETMAEGDNRSTNLLAAETAGWEDQLHEWREVMLIADKVLRW

SEQ ID NO: 1015162 - protein, 86 aa, Homo sapiens
MAVGKTSALTKGGKKGAKKEVGVIHFLERLVLFKHLYVQYRNIGRRSSPGPGTKLHLMSQGRVFSESADLQIDELHLEIQRITRCS

SEQ ID NO: 1015163 - protein, 73 aa, Homo sapiens
IQRIRHEVTPITVVKQGFEPPSFVGWFLGWDDDYWSVDPLDRPWLSWLPEEGQAHPMYPFSAFGLSFLKRPYE

SEQ ID NO: 1015164 - protein, 48 aa, Homo sapiens
  misc_feature (45)..(46): Xaa can be any naturally occurring amino acid
MGGQFHPGMLTREPRSPWALLLRPGPAAVARGASAEKRDEAAAIXXAV

SEQ ID NO: 1015165 - protein, 32 aa, Homo sapiens
MNDGVYGSFASKLSEDLNTIPEVHKKYKEDEP

SEQ ID NO: 1015166 - protein, 50 aa, Homo sapiens
MPKTFPTALAASAGSLTNKVAPSYPYFAGLRAPKHSPRSEEVRGTMSVQL

SEQ ID NO: 1015167 - protein, 122 aa, Homo sapiens
  misc_feature (79)..(79): Xaa can be any naturally occurring amino acid
  misc_feature (87)..(87): Xaa can be any naturally occurring amino acid
  misc_feature (91)..(91): Xaa can be any naturally occurring amino acid
  misc_feature (104)..(104): Xaa can be any naturally occurring amino acid
  misc_feature (110)..(110): Xaa can be any naturally occurring amino acid
  misc_feature (117)..(118): Xaa can be any naturally occurring amino acid
GNHSSTQYPDVNHAKVKLQGKEVGVYEALKDDSWLKGEFVTLCSSVALCPSRLGKLSSAMSAAKAICDHVRDIWFGTPXEKFVAMGXNPDXNSYGGPDDLLHSXPGCNPXLRPGKFXXSPPN

SEQ ID NO: 1015168 - protein, 49 aa, Homo sapiens
TVLQTAAPGPSTCCIDSMEVLSSCPCGIDSNGKPADAVYGQKEIHSKVM

SEQ ID NO: 1015169 - protein, 56 aa, Homo sapiens
  misc_feature (33)..(33): Xaa can be any naturally occurring amino acid
GAGCGSSLPDGLVLSLYALHVKAARPGTGLPRXCTWAPHQLFARLLLQVGQGFRAG

SEQ ID NO: 1015170 - protein, 66 aa, Homo sapiens
  misc_feature (29)..(29): Xaa can be any naturally occurring amino acid
  misc_feature (46)..(46): Xaa can be any naturally occurring amino acid
  misc_feature (63)..(63): Xaa can be any naturally occurring amino acid
DYTVFDRDNNRVGFATAARLYVPKASARXTETEESPRAGGPCHAAXPTHTHTLARPLSWAPLXTRG

SEQ ID NO: 1015171 - protein, 73 aa, Homo sapiens
  misc_feature (5)..(5): Xaa can be any naturally occurring amino acid
  misc_feature (15)..(15): Xaa can be any naturally occurring amino acid
  misc_feature (60)..(61): Xaa can be any naturally occurring amino acid
LLELXPTASVPSASXLAEWASAPSGHHQIPLFPRPRMGPHGQTCARPMCIPPSYADLGKXXEIFSTKDLVLGW

SEQ ID NO: 1015172 - protein, 166 aa, Homo sapiens
  misc_feature (9)..(9): Xaa can be any naturally occurring amino acid
  misc_feature (17)..(17): Xaa can be any naturally occurring amino acid
  misc_feature (20)..(20): Xaa can be any naturally occurring amino acid
  misc_feature (95)..(95): Xaa can be any naturally occurring amino acid
  misc_feature (100)..(100): Xaa can be any naturally occurring amino acid
  misc_feature (144)..(144): Xaa can be any naturally occurring amino acid
PNRLNCCLXNPAGLERXVIXITRIFFARHRYFRFVLVINTSMLTMASLTGFSVKLSLTAGVPVNVNSQTHQMPLYRWQSGVTVKVVLRGKAGDLXTEIIXERDFVICRQYRGGISYRGTDRNVTFVFRVLQNRGLTDSKEIFDXIAVSIKSGFVLGVESLGKCQRR

SEQ ID NO: 1015173 - protein, 64 aa, Homo sapiens
  misc_feature (33)..(33): Xaa can be any naturally occurring amino acid
VALTVFHPLLDVTPFCIQPIIFLLDLIDLLSVXLQLLHADLASLRAGRPFCSGARFRQLLRFRA

SEQ ID NO: 1015174 - protein, 33 aa, Homo sapiens
  misc_feature (24)..(24): Xaa can be any naturally occurring amino acid
MWKSRLGSSQQVALDAVRQRVVRXWKQRPSTST

SEQ ID NO: 1015175 - protein, 59 aa, Homo sapiens
  misc_feature (28)..(28): Xaa can be any naturally occurring amino acid
  misc_feature (32)..(32): Xaa can be any naturally occurring amino acid
  misc_feature (36)..(36): Xaa can be any naturally occurring amino acid
PASRHSPYGLCSVCTWLTEISLVQPNKXGGSXALGXQPAGKDQGTTQQGDPRCPAPTMH

SEQ ID NO: 1015176 - protein, 164 aa, Homo sapiens
  misc_feature (8)..(10): Xaa can be any naturally occurring amino acid
  misc_feature (21)..(21): Xaa can be any naturally occurring amino acid
  misc_feature (31)..(31): Xaa can be any naturally occurring amino acid
  misc_feature (44)..(44): Xaa can be any naturally occurring amino acid
  misc_feature (61)..(61): Xaa can be any naturally occurring amino acid
  misc_feature (63)..(63): Xaa can be any naturally occurring amino acid
YREFGPRXXXSAHCKREEALXTDSNCTHDAXTTCVVVGDGAVGXTCLLICYTTNAFPKDEXPXVFDNYSAQTVSTGRTVNLNLWDTAGQEEYDRLRTLSYPQTNVFVICFSIASPPSYENVRHKWHPEVCHHIALMLPILLVGHQEGPEKPSLDTLNGGLKEQG

SEQ ID NO: 1015177 - protein, 200 aa, Homo sapiens
  misc_feature (65)..(65): Xaa can be any naturally occurring amino acid
MLVVKEVKTISSSDASAQTCTSFLSPKAWDQGERDRNEPSHEEQLEERKYSPRRLEEFQYTSSLXPPQKRKKSSIKKTEKKKEFPLRPEIKTKKSSLEGVLRDSELIYPGASINFISRAMAKLGPFSWQPALSRTGDGEIQGEDIRRAPQAQGSPWVPSVLGWDAQGRIHHHPTVLLPWAQEAALNTSEGPSSCDEGREP

SEQ ID NO: 1015178 - protein, 47 aa, Homo sapiens
  misc_feature (7)..(7): Xaa can be any naturally occurring amino acid
  misc_feature (28)..(28): Xaa can be any naturally occurring amino acid
  misc_feature (35)..(35): Xaa can be any naturally occurring amino acid
PAEGDGXKPQWRLGRMGRPAGWVNILLXCGGPADXRGLVRAVQFTET

SEQ ID NO: 1015179 - protein, 30 aa, Homo sapiens
MRAGTRWPAGAARRLLLWGKRAEGEGGGGG

SEQ ID NO: 1015180 - protein, 56 aa, Homo sapiens
  misc_feature (9)..(9): Xaa can be any naturally occurring amino acid
  misc_feature (51)..(51): Xaa can be any naturally occurring amino acid
RLPSRKPEXPAGKDWLAVIFVTQAGWRRSLSCFGNSFREIRESRIKHFDLXIEIQS

SEQ ID NO: 1015181 - protein, 134 aa, Homo sapiens
  misc_feature (4)..(4): Xaa can be any naturally occurring amino acid
  misc_feature (11)..(11): Xaa can be any naturally occurring amino acid
  misc_feature (14)..(14): Xaa can be any naturally occurring amino acid
  misc_feature (72)..(72): Xaa can be any naturally occurring amino acid
  misc_feature (86)..(86): Xaa can be any naturally occurring amino acid
GQRXKANAYKXPQXVPGAPGRTESTINFILLKSRPFCDPEAAPPRPQASPNLLAASMGPANAGCCWCPERLXPQEGSGLRTRGASXLVWVWIRAACLEEEASKAVRGVLLEEAKAGQNPPSHGDDHVCQRLALV

SEQ ID NO: 1015182 - protein, 85 aa, Homo sapiens
  misc_feature (5)..(5): Xaa can be any naturally occurring amino acid
  misc_feature (45)..(46): Xaa can be any naturally occurring amino acid
  misc_feature (69)..(69): Xaa can be any naturally occurring amino acid
  misc_feature (80)..(80): Xaa can be any naturally occurring amino acid
AKPAXITFLSINMKKSYNGLHQRVFKELKLLTLCSISSQIGPPEXXLTTDEKSISVVLRAPEKWKRNPXEDLPVSNATNXLQSEV

SEQ ID NO: 1015183 - protein, 140 aa, Homo sapiens
  misc_feature (4)..(4): Xaa can be any naturally occurring amino acid
  misc_feature (46)..(46): Xaa can be any naturally occurring amino acid
  misc_feature (99)..(99): Xaa can be any naturally occurring amino acid
  misc_feature (108)..(108): Xaa can be any naturally occurring amino acid
  misc_feature (120)..(120): Xaa can be any naturally occurring amino acid
WLGXINHPFARKIPKAPPQVSLSFLGGSGLNFTAHDYVIQITSKIXSASACPVSRPWMSLRLQGPSGSSVTSSGDVCGLFDRGDMKSSPGWAWRALATXERTSDGEYXAGSSSPGDAQVXHAQRVVAEVLLPSKNPLFPL

SEQ ID NO: 1015184 - protein, 106 aa, Homo sapiens
  misc_feature (12)..(12): Xaa can be any naturally occurring amino acid
  misc_feature (20)..(20): Xaa can be any naturally occurring amino acid
GAPNQPPYCIFXPPICHLVXLHILSSCVLSDRSCLRVTAGPTSLDLDVNVQRTLDNNLATEAYERRIKRLEQEKLELSRKLQESTQTVQALQYSTVDGPLTASKDL

SEQ ID NO: 1015185 - protein, 129 aa, Homo sapiens
  misc_feature (7)..(7): Xaa can be any naturally occurring amino acid
  misc_feature (21)..(21): Xaa can be any naturally occurring amino acid
  misc_feature (23)..(23): Xaa can be any naturally occurring amino acid
  misc_feature (33)..(33): Xaa can be any naturally occurring amino acid
  misc_feature (52)..(53): Xaa can be any naturally occurring amino acid
  misc_feature (128)..(128): Xaa can be any naturally occurring amino acid
QPSASLXLRAWWLKTVSLAEXRXREKLLEQAGXHRCFSASTLSYPLAHWPSXXSPGLYVSSFPVFLCLMLCVLLFESSLEEELSCMSGGMLVSAVLPVSKFSGGSLIECGKVAPLDGYKCRLLNFPMXF

SEQ ID NO: 1015186 - protein, 56 aa, Homo sapiens
  misc_feature (32)..(32): Xaa can be any naturally occurring amino acid
MTAPLILLHQRPNGNRPLLSLVILVSQAGLGXLVGGVGEVYYILGMTERLPPPNAT

SEQ ID NO: 1015187 - protein, 39 aa, Homo sapiens
LFQPVAKNHESRQWSTATAAAAPAARMKAGKTASGAREV

SEQ ID NO: 1015188 - protein, 57 aa, Homo sapiens
  misc_feature (45)..(45): Xaa can be any naturally occurring amino acid
PSAYAQQAAGGPELQGSQLPPGLAFPRGQMKAFSPVSPLEETACXITAWASPGAKPL

SEQ ID NO: 1015189 - protein, 99 aa, Homo sapiens
  misc_feature (4)..(4): Xaa can be any naturally occurring amino acid
  misc_feature (14)..(14): Xaa can be any naturally occurring amino acid
  misc_feature (44)..(44): Xaa can be any naturally occurring amino acid
  misc_feature (54)..(54): Xaa can be any naturally occurring amino acid
  misc_feature (58)..(58): Xaa can be any naturally occurring amino acid
  misc_feature (88)..(89): Xaa can be any naturally occurring amino acid
GAFXHGTPTFGTNXICRVPKSKLEVGRIIELHTLWLSWLLWLEXARSTLDSGLXRFLXVTPPPSWEQRAVPQARVGATVSMGKVAVYXXVICKNKIFKS

SEQ ID NO: 1015190 - protein, 68 aa, Homo sapiens
AACCEWSLRVIRGVERGAGSSARAQRALVDMPRKIEEIKDFCSQPDEGCQICQDQENEGTWDVNSLTQ

SEQ ID NO: 1015191 - protein, 72 aa, Homo sapiens
IKAAGLNVEPFWLACLQGPRNVKLGAHLHVGAVASPALVLTTGGPPLISLTEEEVTKKSQSLYNGFALLPLI

SEQ ID NO: 1015192 - protein, 103 aa, Homo sapiens
QPPTGPGRTQSQTNGLQPQNDRADRRTDSRTIGGLPNLRTELRIFALGPDLPHPKRPQPLCALAPLSPVAATASPPLSATVRASNDSPHSPHPRPPTDHRCIR

SEQ ID NO: 1015193 - protein, 84 aa, Homo sapiens
SKEFGTRAKVRELELSYDAEQKKHDEALKALANEAPCQGKSYKRQFEEAAAGQHDLAKYSQAQHELDDAEERQNGGTEAKKLRH

SEQ ID NO: 1015194 - protein, 57 aa, Homo sapiens
MESAGIHETTYNSIMKGDIDIRKACMQQCLIWRHHYGPWIADRCRGITALAPSTMRL

SEQ ID NO: 1015195 - protein, 42 aa, Homo sapiens
LLVDYTCSIPFQEFTSKSPRSQGPGIRHAHCSSNARLATLTE

SEQ ID NO: 1015196 - protein, 63 aa, Homo sapiens
MSAMHPIPKGQGFSISKNYSGDALHEIPVKKVKVAELYTYENDVRLDGVKGGMGTDSTCVCLI

SEQ ID NO: 1015197 - protein, 45 aa, Homo sapiens
MISMGFLGFYRVSTPYIYSRYSRGHTSIIALRYHNHRYPTVVKCL

SEQ ID NO: 1015198 - protein, 89 aa, Homo sapiens
ERAAGLGEGPGPAAMALEGRNEMCEGLALRPPAGLLRLVSGTDFRGCGAKLVLSQPISRGSRALCASGHHRVVSPLLCSVSLGPQETML

SEQ ID NO: 1015199 - protein, 66 aa, Homo sapiens
MSGGSADYNSREHSGPEGIGPRWCHREQLDEIVDNLMNDLKESLLVASMLTVLRGLRYSAESYYSL

SEQ ID NO: 1015200 - protein, 50 aa, Homo sapiens
NAAGGGTRARCSTKQAHVVLQRLFMFDKPDQESKRLQLYRQIVMASSAGR

SEQ ID NO: 1015201 - protein, 33 aa, Homo sapiens
MALRSQFWGFSVYRNPRYKVRSPLNQLRAGSKT

SEQ ID NO: 1015202 - protein, 40 aa, Homo sapiens
SELNISPLFEYCDYEYRESMSCYVLVMIWIITQKLSLKTR

SEQ ID NO: 1015203 - protein, 53 aa, Homo sapiens
DSSTSVAETPDIMLFWEVEHHYFQIIDIFLQEFIAVMRVFPGTFLTVQAVFAN

SEQ ID NO: 1015204 - protein, 56 aa, Homo sapiens
MPSCGPNHCLGLPTSPKAKYGALAVFSRFKTLSPPQWVEECKVFQVRWRRRTSCQA

SEQ ID NO: 1015205 - protein, 49 aa, Homo sapiens
IRAEMSRSVALAVLGVTTSFWAWRAIPATPKVQGLLNGIQQGMEGKFPE

SEQ ID NO: 1015206 - protein, 41 aa, Homo sapiens
MRLGDSSRPPRAVHARLTVKRLLYSLIHTDHDSTWVQPSSG

SEQ ID NO: 1015207 - protein, 55 aa, Homo sapiens
MADIQTERPYQKQPTIFQTKKRVLLEKLARELRGTSRHRSWLKQPRAFRTSLQNP

SEQ ID NO: 1015208 - protein, 38 aa, Homo sapiens
KNNPAVKKVLYLQSLPLANPRAFKNNSISSHHRYHQVL

SEQ ID NO: 1015209 - protein, 63 aa, Homo sapiens
VQREWPAGGGDRGKVAATKQAQRVSSNVFSILTSQIQEFKEAFNSIDQNLDASSASKPQETTP

SEQ ID NO: 1015210 - protein, 69 aa, Homo sapiens
ALANISGRLSGMANAFRTVYQLNGLAATEKHPARVIYQMPPPPFLVCYESSSTSHKRMENRAPYYKEGS

SEQ ID NO: 1015211 - protein, 43 aa, Homo sapiens
QNYHQDSEAAINRQSQTVERRTPSVRFTFPGSYYFDRDEVALK

SEQ ID NO: 1015212 - protein, 52 aa, Homo sapiens
EGRRIPNLLEDKAQLLPGQIETCLTQREWCRSNSLQRLSFRKAVARDADSVD

SEQ ID NO: 1015213 - protein, 102 aa, Homo sapiens
SHPHRRSSYPSGKALRPTGPGPGSWCYFLLRPGLMSRAVIPSSFNSGPHPGSNIAAYGEDSSRSAFTFIQQSKAHRFCKKSLHGKVHEGATMANKSSFLALG

SEQ ID NO: 1015214 - protein, 56 aa, Homo sapiens
MTAVEVRGGVHIDSYHVITRTINLPPYTLGAVYEAIFGKAKGEVYAARYKAWEGGE

SEQ ID NO: 1015215 - protein, 72 aa, Homo sapiens
IGNERFAVLRHSTSLLHWYGSAGIHETPYTSIMSVTLISQDLYATTVSSGGTLCTWYADRCRGIMLWLLDHE

SEQ ID NO: 1015216 - protein, 54 aa, Homo sapiens
DLRHDTAVTCAGYTSASCSHAPHEILCGGPASRCSRYCGGGITPVMQHLTQLAE

SEQ ID NO: 1015217 - protein, 87 aa, Homo sapiens
YEHETMPLSKGSPPSLFQKEEKEEPQGGTAWCRAPIPTFMDVKCPRLLLNSHGLLAIHNGSLVCGCSTVSATYRGKQATEMSSEKQH

SEQ ID NO: 1015218 - protein, 98 aa, Homo sapiens
YGVVLDSRRTLRGTLKLSGALNVLQIRREDVLKVLAAGPHLGGTNFDFQNGQYIFKGKVMALFIILRDLVKLFCACQCSIKPSDAVYTQICTLSEFSH

SEQ ID NO: 1015219 - protein, 75 aa, Homo sapiens
DTCDRDQDHPTPQKQMRSRLFFFRGHLQRRSASLTDFSRPTTPQKRDEDLQERKVPFPSNSLFGVFRLVRISILS

SEQ ID NO: 1015220 - protein, 44 aa, Homo sapiens
HLTTDTLPTIYPISIAIEIEPGAIDIVPQGKDEKYTTHNIARLT

SEQ ID NO: 1015221 - protein, 36 aa, Homo sapiens
GPAMVVLRFIMESGAKAARCRVLELRGQRLKCHVGY

SEQ ID NO: 1015222 - protein, 40 aa, Homo sapiens
MSVARSWVCRKTYVTPRRPFEKSRLDQELKKIGEYGLRTN

SEQ ID NO: 1015223 - protein, 58 aa, Homo sapiens
DVNTALQEVLEDCPHPRWPSTWSRDVPKALDRRQAIFVCFIHLYDAIDCKLVRPLSDT

SEQ ID NO: 1015224 - protein, 51 aa, Homo sapiens
DDEGNVIVLKASQEDAHVVRRCCSKAYHLQKSTFGKFGYLSKAKKRFNWIP

SEQ ID NO: 1015225 - protein, 75 aa, Homo sapiens
GPSLATYQVRTEAKNQLLGDIGNKVSEHCRPKCYEEEQTFSYWKVIDKNYQNLLKGTYAGAVQCLSSSDQTLADL

SEQ ID NO: 1015226 - protein, 42 aa, Homo sapiens
ARSLFHRPSHRKSDIYVCIDLLCAHMMHAHGMTFANGRTSVE

SEQ ID NO: 1015227 - protein, 66 aa, Homo sapiens
VDVLLDQADNEGRDVHTCCGPDMRCDQHASVVDGLGQASLKTLASGVSLESLSQPRCISSSAYQHL

SEQ ID NO: 1015228 - protein, 35 aa, Homo sapiens
  misc_feature (22)..(22): Xaa can be any naturally occurring amino acid
GTRIAIMNDTVTIRTRKFMTNXLLQRKQMVSRCTI

SEQ ID NO: 1015229 - protein, 92 aa, Homo sapiens
KQAEALLTAPRSLRDPAASGAGWTGIGAQSGLAVQLPVLRYSQGGQQAGLGTDSEALSLGLCCIVSLVHECDHPSSCSSVTSTLCYLDKWVM

SEQ ID NO: 1015230 - protein, 65 aa, Homo sapiens
LHEPRRPPDVHSRFLLVQVHYGTLKDQLIYNLYRRTDPQNKITVVGVGLWHGCASVSNEGLADEL

SEQ ID NO: 1015231 - protein, 43 aa, Homo sapiens
GTRETFLPMLQHISKNKDKGTYEDLVEEDEGIRKEGNGNVMGA

SEQ ID NO: 1015232 - protein, 37 aa, Homo sapiens
ERLKVINKLLVPERHGVISQRRDRLTMHSCGAGDCGD

SEQ ID NO: 1015233 - protein, 35 aa, Homo sapiens
ARVHIASIPCFHVSSHLYSHHDHKGTGIMHAAIHA

SEQ ID NO: 1015234 - protein, 44 aa, Homo sapiens
PPYYQTTLAKPCYRNKVYGDRIEPWRNRYSTAVKMKIHYQAYYS

SEQ ID NO: 1015235 - protein, 31 aa, Homo sapiens
ESNKTTMPPRSPSLRRRQPSQRQHQHQPLTT

SEQ ID NO: 1015236 - protein, 54 aa, Homo sapiens
HEKMAGEKVEKPDTKREENPKAKEGGCGWQVKKGNLKAKKPKKGEAPLQRNTCP

SEQ ID NO: 1015237 - protein, 33 aa, Homo sapiens
ARDATLSVPSVGRDTDETYCIDNEGLYDICLPH

SEQ ID NO: 1015238 - protein, 59 aa, Homo sapiens
GCLAQHCMGLITYVDSIRYFGTRRIGGAENLFEDGQGYLKEEGYPGRPNEGFIALVGKG

SEQ ID NO: 1015239 - protein, 40 aa, Homo sapiens
MRVRIHTYDVRMYTYMHMCTAHEYAAIYTLCSVQAFVLLG

SEQ ID NO: 1015240 - protein, 69 aa, Homo sapiens
ERTSRRPPETEMGAEPATPQPPLKKRARADPIRDSDEALKKRREVKVRDLGIKTTAVLGLYPVTRQMHP

SEQ ID NO: 1015241 - protein, 38 aa, Homo sapiens
PPAWMTSTKAAARAVTRRAEKMSFKGKPSTIFVLALRM

SEQ ID NO: 1015242 - protein, 84 aa, Homo sapiens
SGDDVPENGHLEKGKGKRREEQVKASDLRWLKGENVFGVCHIFESFNDTFVHVTDLSGRETIFRVTGGMKERKPRMNPTIAAIL

SEQ ID NO: 1015243 - protein, 48 aa, Homo sapiens
ESHVSVSSAKIVKPNCEKPDEFEIRISQALLSRDELDLKAEAKELKYY

SEQ ID NO: 1015244 - protein, 67 aa, Homo sapiens
HEVMEEVPHDCPGADSAGRQKGLHVRDAQPAAVRFWSGGHCDAGSRARSGDGWRRVKHRGVENFLEK

SEQ ID NO: 1015245 - protein, 48 aa, Homo sapiens
MVSHWFLVPTSLRWRDTISVMIAMWLPFPVHPVTLIVVGPGCYHGIRY

SEQ ID NO: 1015246 - protein, 84 aa, Homo sapiens
IAIMNDTVTIRTRKFMTNRYFRGNKWSLMSFTREATIPETGILGKTKPKMYQNHTDVHLVIWDSDLIWWWQATGFGMIYDSLDY

SEQ ID NO: 1015247 - protein, 58 aa, Homo sapiens
HEAELKVKRLRKKFALKTLRKARRKLIYEKAKHYHKEYRQMYRNENSGMASMKGKAWQ

SEQ ID NO: 1015248 - protein, 70 aa, Homo sapiens
  misc_feature (15)..(15): Xaa can be any naturally occurring amino acid
  misc_feature (45)..(45): Xaa can be any naturally occurring amino acid
  misc_feature (52)..(52): Xaa can be any naturally occurring amino acid
VQNVKLDFFFHCSQXNGNLQDLKVGDDVEFEVSSDRRTGVPIAVXLVKINKXSSLKNEMNGQGVFYLIKP

SEQ ID NO: 1015249 - protein, 30 aa, Homo sapiens
APRLQRMAFQEFFVGELEDERAEGCLGSYG

SEQ ID NO: 1015250 - protein, 51 aa, Homo sapiens
AACQLRISQHEAQIKSLTEYLQNVDKKKDSGGSVDALSEELVQLRAQEKVH

SEQ ID NO: 1015251 - protein, 33 aa, Homo sapiens
EEIAFLEKLTRGNPRAQAQIQGQHVQIDVDVSS

SEQ ID NO: 1015252 - protein, 56 aa, Homo sapiens
MEAYEQGQKGPLKLKGVAELGSDHAEEEKEGQRQSETPGAMGRAKDEEESGRPGKR

SEQ ID NO: 1015253 - protein, 43 aa, Homo sapiens
AEPGVVGQMIEAAGRAPVATWVVYILTIGLPVFLGNPDSCLFS

SEQ ID NO: 1015254 - protein, 43 aa, Homo sapiens
MNDTVTIRTEKLMTNRLLQRKQMVIDVLHPGKATLPYDKKFGK

SEQ ID NO: 1015255 - protein, 52 aa, Homo sapiens
GQQQLQHGHPGGNQTNRLQEALNLFKSILKTDGCDHLCDPVPQQGKICSLRS

SEQ ID NO: 1015256 - protein, 67 aa, Homo sapiens
AAVPPPLWREERREPRRCTNISAAQSEECKMFACAKSPATPSLIRAGSRVGITDQFHASVVISDQTL

SEQ ID NO: 1015257 - protein, 49 aa, Homo sapiens
PGKPRRSLSPGLQRGGRTMPGVTVKDVNQQEFVRTLAAFLKKVPEGESP

SEQ ID NO: 1015258 - protein, 46 aa, Homo sapiens
MEPLRMRAKLRKKRIQAVSAKEERGCRGQGTASCFTGEATGAETRN

SEQ ID NO: 1015259 - protein, 51 aa, Homo sapiens
FKPNQTRTYDREAFKKRAACLILSELSRRTRSFLVSSNRYPDHVDLSQEEE

SEQ ID NO: 1015260 - protein, 38 aa, Homo sapiens
RDPPWCCLCRQDNVKAAWVKVGAHVAIMSGALESSPFL

SEQ ID NO: 1015261 - protein, 86 aa, Homo sapiens
EKKVKKSDFGEWQLSLCVPTSGDCGLGTREGTRTGAEFKQTMKTQRCKIPCNWKKQFCAECKYQFQALGECYLHTALRQNWSLSEP

SEQ ID NO: 1015262 - protein, 49 aa, Homo sapiens
MEIEPGAIDIVPQGKDEIYTHAYYGQAYPLYLLHNDLPGITFEGAQASP

SEQ ID NO: 1015263 - protein, 49 aa, Homo sapiens
MVNSVSTKAQGLPGIVVGASKPDLGGKQSLLSLEEVRSKSRTTYAWSSS

SEQ ID NO: 1015264 - protein, 44 aa, Homo sapiens
SRGGFEDASLGFGGRDNNPFEFWLPVENVSVKGPAKKEGPLLRG

SEQ ID NO: 1015265 - protein, 53 aa, Homo sapiens
VTSSLNPAWQSLTHRRDAQEGKATWKSNYFLDHPLLDDYPKCFMWEQTMWLQA

SEQ ID NO: 1015266 - protein, 34 aa, Homo sapiens
GLWKDKQDQQNIPDWMRLEKDRFSVTGVKALFPE

SEQ ID NO: 1015267 - protein, 89 aa, Homo sapiens
ARKAEALGAVQDSSLTCNQPPWPREGIAAGGVMTLILLTRGLEDCLITMACTWIRECQSLAKRKLSCVLINCMSYVCQVGEALSDTITY

SEQ ID NO: 1015268 - protein, 33 aa, Homo sapiens
MKGKGTWDKGLKVIVSRSEVDMLKVRCEFKREY

SEQ ID NO: 1015269 - protein, 73 aa, Homo sapiens
MTKKRREQWSCQKGPRHVQPYSLHYCSQCVPKDKAIKNFVIEHSGGAAVGTFLKQRLRCLCASKLYVSYILCE

SEQ ID NO: 1015270 - protein, 31 aa, Homo sapiens
VLLHQTLQIWKLVWKEAKPDELMDSKLRYVF

SEQ ID NO: 1015271 - protein, 37 aa, Homo sapiens
DTFPLRKEEMVLKAELSQTCTPDMMVLFLAFLSIVYM

SEQ ID NO: 1015272 - protein, 30 aa, Homo sapiens
MQFACTTIDAMMKTPGHEPNDQTHLWRLDD

SEQ ID NO: 1015273 - protein, 30 aa, Homo sapiens
MVQRVRAQPGHPSQQMQIVPSQSTHRQYIA

SEQ ID NO: 1015274 - protein, 126 aa, Homo sapiens
MGEILRQLHVQDRTFILASKSNIKKVLDGQNRKYHMIRRRQEELMAAFLKDQESYDNRLLMEMTCKEWPYFMYEPTKELNRDTEKRTEGRRITLIAEEPTRNYASCMTSEISLCIQVDCRCITVTL

SEQ ID NO: 1015275 - protein, 43 aa, Homo sapiens
RVLLFDPTERFLPEEEKLTEQERSKRFEKVILITAITQSKLTS

SEQ ID NO: 1015276 - protein, 62 aa, Homo sapiens
VTSSLNPAWQSLTDRRYAQGRQGDLGRSNYFPEDSSNYLMIIRNCSFVGADNFASNRSADPI

SEQ ID NO: 1015277 - protein, 98 aa, Homo sapiens
LRSHYLHFLIPVEDYLSVYYNVIGAVTLWKLRDNHADISTDYPRNIPMNPMCIERFADKKAHDHEGSDLKIPVASNRRFCLGTANFRSATSLYQAGRL

SEQ ID NO: 1015278 - protein, 58 aa, Homo sapiens
FWVNNDIKAEIKKFFETNENKDTTYQNLWDAAKAVLRGKFIALNTTPEVRRLNYTYIT

SEQ ID NO: 1015279 - protein, 43 aa, Homo sapiens
AAPRLNSLSEGHINCTEHRVWLLRDIYLALNITNGEAVAVQLD

SEQ ID NO: 1015280 - protein, 34 aa, Homo sapiens
GGQELALDEALIQDQADDEECRKSEGDGIIMVGG

SEQ ID NO: 1015281 - protein, 71 aa, Homo sapiens
KKGEGEAGTFIHMVEHEEEREEGRCHILLKTSISRELIHYHENSKGQSTYMIQSPPSGPLSMLGSTIHMRI

SEQ ID NO: 1015282 - protein, 34 aa, Homo sapiens
DPPEVPRSLHRWLCPPSSTTREMTPNEIKCAVHV

SEQ ID NO: 1015283 - protein, 36 aa, Homo sapiens
MGISRDNCTSAAKTVVKRKPYHKKRKNSWGRQLSTP

SEQ ID NO: 1015284 - protein, 30 aa, Homo sapiens
GSEEAKVQLPSVVPNPGSSANKPVIQQSSL

SEQ ID NO: 1015285 - protein, 34 aa, Homo sapiens
LQQFADNDVSRFKAVKARFANQYIQDKSTNEMWK

SEQ ID NO: 1015286 - protein, 41 aa, Homo sapiens
MYRTANSTWRGWQAKAGNFYVPPEPTLGVLSSEFRGITGVS

SEQ ID NO: 1015287 - protein, 56 aa, Homo sapiens
TKDAYKKYIKDYMKSVKGKLEDQRPDRVNPFMTGAAEQIKHILLISKTTSLYWRNM

SEQ ID NO: 1015288 - protein, 36 aa, Homo sapiens
AIAEALARLDHKYAPACYAQTCTVAYTWSRLGKVNE

SEQ ID NO: 1015289 - protein, 34 aa, Homo sapiens
  misc_feature (14)..(14): Xaa can be any naturally occurring amino acid
PDRANTAGRQNTGXVTRGGTIARGEYAQSLVRDY

SEQ ID NO: 1015290 - protein, 31 aa, Homo sapiens
HEEQEQEEEDEDEEEEDEDEDITMAILSLMR

SEQ ID NO: 1015291 - protein, 32 aa, Homo sapiens
EGPRGPPGPRGGARENRVPPPCLGCPGRFRLG

SEQ ID NO: 1015292 - protein, 44 aa, Homo sapiens
GAYTKMQIYVKALTGTDHHPEWVNPLDTIENVKANDPGYGRSSS

SEQ ID NO: 1015293 - protein, 61 aa, Homo sapiens
DKQTLHSEQPLQVARWTQIITADSEDPKYIITVKQFAKFVVDLSDQVALLTLKRYESGRGE

SEQ ID NO: 1015294 - protein, 50 aa, Homo sapiens
AGTSLDYLNGRSSLRRGYLPFVTICWNVKLSVTLKRSCAMSPWILQNEMA

SEQ ID NO: 1015295 - protein, 35 aa, Homo sapiens
LVGQWVQPQRVSQSRAWRRLTRKPKGQGISFPGKG

SEQ ID NO: 1015296 - protein, 96 aa, Homo sapiens
MADIQTERAYQKQPTIFQTGGGSCWENLARRSSRGTTRHRSGLKTPKEAIEGTYIDKKMPFTGNVSFEADLSACDQMRCRDIVSRDYFTTSQYTAR

SEQ ID NO: 1015297 - protein, 31 aa, Homo sapiens
VASITVIPKSGSTHHHHHQLHATIADNHRCK

SEQ ID NO: 1015298 - protein, 38 aa, Homo sapiens
DLPSRKPAKYDDIKEGGEAAVRRAPQRAIPWATISNKV

SEQ ID NO: 1015299 - protein, 50 aa, Homo sapiens
LMKVGQDASSAGSTRTKDPTRRAELEARTSGKKFDNKPLCKTKIQVLAQT

SEQ ID NO: 1015300 - protein, 33 aa, Homo sapiens
GSLVGGNWKMNGRKRSLGELIGTLNAAKVPNDT

SEQ ID NO: 1015301 - protein, 67 aa, Homo sapiens
NGPLQFLHNEQQEPFLVWVNQEDTFRVISMEKGGPHEGGFSPLVSRAEKIEEIFKKAGQPLCGTSPW

SEQ ID NO: 1015302 - protein, 149 aa, Homo sapiens
MAPPAREGETLWSQATCGAPNTAGPKRVSTTTAPYRDKGVSPPVGTAGSNTIGPNLQREHLVTIGHKCCISSGSHSEDTDTSPLRLVHERSWFSEKQGRDGDLLLLGAPQRGFLSTLSGPCGMRGIPADDAFGRIDAGRPVYVNNSGPA

SEQ ID NO: 1015303 - protein, 55 aa, Homo sapiens
MCKNKRTKVSLLPRCPDEDSHFDLGGKGKVDEFRFVAIMVSDEFEQLSLSLELPD

SEQ ID NO: 1015304 - protein, 34 aa, Homo sapiens
MASRKAGPGARCAATKKAQRGSSNVFSMFETSPR

SEQ ID NO: 1015305 - protein, 51 aa, Homo sapiens
GGSISFWASCPPSDPFVKPKIRQKENQKKFIRHQSDPKLSKLKRNWRNPEA

SEQ ID NO: 1015306 - protein, 45 aa, Homo sapiens
HRGTETPALRTLLISGDVACVHKEDLLEIRDMFLGNKVQLLSVLC

SEQ ID NO: 1015307 - protein, 52 aa, Homo sapiens
KGRRDLLGGRRALTKLGELTMQLIRGRSSLRVLKWTETEIEMLRAAVKDFGT

SEQ ID NO: 1015308 - protein, 46 aa, Homo sapiens
GVTVEVRGSNGAFYKGFIKTLRRLPTVFGKQFEQNAGSFNEVRYHT

SEQ ID NO: 1015309 - protein, 51 aa, Homo sapiens
SVASGLQFPGFNPQPVTKDLTTKSPAPKKMLEMETGVIKVVKCHSHHPATY

SEQ ID NO: 1015310 - protein, 43 aa, Homo sapiens
VVPANRETEAGEWLEPGVKAAVSHVHTTVLHVLQPEQQSETLS

SEQ ID NO: 1015311 - protein, 68 aa, Homo sapiens
KQNSARGFGSSGLSPRLSMFLQRLSRFSSVIRSAVSVHLRGTIGVKAVAFIKDLDPLQNSLWQIRDTI

SEQ ID NO: 1015312 - protein, 45 aa, Homo sapiens
MTVGFPRDSFTNILHLIRQRIRVMRAPGASSGSSEYGPSEGQARA

SEQ ID NO: 1015313 - protein, 81 aa, Homo sapiens
LLLVLNLEPYPDMGLEDEQKMLTESGDPEEEEEEEEDLVDPLTTVREPLRALEKCLSPGALELFISFLPLIKKEEISRGAF

SEQ ID NO: 1015314 - protein, 31 aa, Homo sapiens
MAACDPRHGRYLTVAAVFKGPHVHEGGWLGK

SEQ ID NO: 1015315 - protein, 34 aa, Homo sapiens
STQDSASCYYTCPVSTNGGVLLSRRSLPRRLNDR

SEQ ID NO: 1015316 - protein, 44 aa, Homo sapiens
AFLKNALDKEPVLVVSFVVGGLPDNSSPFRPYFKDFHDQQGHAL

SEQ ID NO: 1015317 - protein, 44 aa, Homo sapiens
PKNSARGDSLTLTIEYYSRLKPHSYNNYITRRLALIELSPHSGL

SEQ ID NO: 1015318 - protein, 103 aa, Homo sapiens
GLGHGSWHHSFITMPSLTTPIQHSVGSSGQGNQAGERNKGYPFRKRGSQILPALQINMIVYLGNPIVLSPKSPELIATSASLRIQNQCAKSQHSIHITTVGQY

SEQ ID NO: 1015319 - protein, 79 aa, Homo sapiens
RRASLFSGLPFGLRTQDRVKTFPPPGRKLNTEDGNVLMIITEDKVFKGRNPAPHHQWAIRVVKPSAASTWWTPVLKFWS

SEQ ID NO: 1015320 - protein, 62 aa, Homo sapiens
ASPKTTPPVRLNSFGVYSKKEKLSISNYVDEFFISVIQGFYNESQFKIALKLSNSKILSYTP

SEQ ID NO: 1015321 - protein, 45 aa, Homo sapiens
MLRQNLQCLVDRALGKRGCESASFQAQSTRNMRLHMTSAPARQFS

SEQ ID NO: 1015322 - protein, 54 aa, Homo sapiens
STSCVATPSTKHCFESYSESDADCPTCLPENRKAWVLFRAQGQKRGLHDQFRIS

SEQ ID NO: 1015323 - protein, 40 aa, Homo sapiens
MCRTIVKAKKQAAEANKNASILLKDSILKVKRESRKQALL

SEQ ID NO: 1015324 - protein, 49 aa, Homo sapiens
EPSQHSSSSLCLYEIKQFLECSPEPRVTSSSFEEVSIEGLKQFRLANGL

SEQ ID NO: 1015325 - protein, 95 aa, Homo sapiens
VKTTPKKPKMEKEKELIINIVVIGQRRIRASPPTNWPSDLIKCGGIDKKNHVKKFEKEAAEMGKGSFKYAWVLDKLKAEVNVVHIDISLWEFEPA

SEQ ID NO: 1015326 - protein, 107 aa, Homo sapiens
MKSYFRLDTPIYFYYSDLSVPHCHRRGPGRRGRMIVIQLHVDNCILNAETLVCIKEPRAYTFRDYSAILYLTRDCDGGNFDVTSLDAKTVTSDVQPQFGRPWDSFST

SEQ ID NO: 1015327 - protein, 134 aa, Homo sapiens
QVDIDYQKLHDALFKWQTKPKLDHPMGDLVTHEGEGVPRHDSKEKKPGDAVLDELKDFLWGMPSRSPDAHKGPLPPWLIAIQPILTTPIDPNLKIPGLNSPIPESCSFGYHAGGWGKTPVDETGKTLYGEGLEP

SEQ ID NO: 1015328 - protein, 51 aa, Homo sapiens
PSGGRSESKAEAQKRKDEAEVQVNRQLVAPWGPQGRKHGVPNVGDYLVQIL

SEQ ID NO: 1015329 - protein, 80 aa, Homo sapiens
NSARGWCDSGRGGARRGARILVAVPGLNHHHVEQKNKGPRPKKAPQRATSHVFAMFDPSQIQGFKEAFNMFDQNRDWFHR

SEQ ID NO: 1015330 - protein, 47 aa, Homo sapiens
HEAQDQGEKENPMRNCASARLCLNICVGESGDRLTRAAMVFEQLTGH

SEQ ID NO: 1015331 - protein, 34 aa, Homo sapiens
ENASTKNLTGLSSGTVEKPRLHDSSSECEPKPVP

SEQ ID NO: 1015332 - protein, 75 aa, Homo sapiens
GTSPSEFYRSGKYDLDFKSPDDPSRYITPDQLADLYKSFVQNYPVVSIEILFDQDDWGAWQKFTASAGIQVVGDD

SEQ ID NO: 1015333 - protein, 84 aa, Homo sapiens
LLDRWQEYSFQNVRMYVSWVGRYSPRCLLNSHYHLQILIEKVMTNLRAKNGGSHIYSQQFSRLRTVDNLGRSENQLNKMRTYVQ

SEQ ID NO: 1015334 - protein, 87 aa, Homo sapiens
RYDIEAKCLHNTREIKDLKLKVMDLRGKFKRPPLRGVPFSAEAILRALLGSKKRVSMDLRANLKSFERGDTPRGPLWRWLTWENVPP

SEQ ID NO: 1015335 - protein, 42 aa, Homo sapiens
EVDEQMLNVQNKTSSYFVEMDPNNVKTAACDIHLVAKGGVTY

SEQ ID NO: 1015336 - protein, 59 aa, Homo sapiens
GYEKTIHMQQHKASPAKIQERTMMRNNDKRRATTNALTDVVNNMIQARIRNAIETRFKS

SEQ ID NO: 1015337 - protein, 119 aa, Homo sapiens
SWATVHFLRSSESGSSDTSRLTMPPKFDPNEVKVVYLRCTGARSAHIRLGPKIGTLVCLQKKVGDDIAKATGDWKGLRITVKLTIQNRQAQIEVVPSELSPESSSPQGDTGRQEKQKKI

SEQ ID NO: 1015338 - protein, 119 aa, Homo sapiens
HELVSVTKEGLELPEDEEEKKKMEESKAKFENLCKLMKEILDKKVEKVTISNRLVSSPCCIVTSTYCLDSTALDGSLGPRHFETTLQLGYIIAKKHLEINPYHPIVGPFGRRLRQTKRQ

SEQ ID NO: 1015339 - protein, 54 aa, Homo sapiens
ARDGVETILRDTHIHYKCRVYSCRFYQHIFPEVEDVVMVNVRSIAEMGAYDSLW

SEQ ID NO: 1015340 - protein, 54 aa, Homo sapiens
GTRDFKAKKRELEEIVQPIISKLYGGGGPPPTGEERIHTEKDEFVGHTDSTRAI

SEQ ID NO: 1015341 - protein, 99 aa, Homo sapiens
GRSLVDPKILARAKGDKIGKKKDPNAPKRPPSAFFLFCSENRPKIKIEHPGLSIGDTAKKLGEMWSEQSAKDKQPYEQKAAKLKVEFERVFCIPCQGKL

SEQ ID NO: 1015342 - protein, 69 aa, Homo sapiens
VFLPALCRKRGRPTKRPPVLRAGVNTVTTFGRNKKAQLVVIAHDVEAIRAIYIDRYDEAAVTGVACPGS

SEQ ID NO: 1015343 - protein, 128 aa, Homo sapiens
HLRDSKRPRSLVLYSCLGLQDVPRDPSYFLVLEPLGTSRSCIEEVKLYKNAREREKYDNMAELFAVVKTMQALEKAYIKDCVTPNEYTAACSRLLGPVTKLPSDSSKASEIQLHLIEFCRKFRLGLPT

SEQ ID NO: 1015344 - protein, 44 aa, Homo sapiens
DNLEPNHFTPNKRIGDETFKTSAQIDDSTRKEKIEKIITTHNIA

SEQ ID NO: 1015345 - protein, 104 aa, Homo sapiens
GTSEHPGLSIGDVAKKLGGDVDNTAADDKQPYEKKAAKVKEKYEKDIAAYRAKGKPDAAKKGVVKAEKSKKKKEEEDDEEDEEDEEEEEEEEDEMKKKMMMMNK

SEQ ID NO: 1015346 - protein, 54 aa, Homo sapiens
EIKLLAMRSKPDKVLLMEEDDMALEMSVMQEAQKRLISQVQREGFIENIIPLSS

SEQ ID NO: 1015347 - protein, 37 aa, Homo sapiens
GSTSHVNTAFCLTHQHRHWVHVLQLQPLAVTSSLSDR

SEQ ID NO: 1015348 - protein, 83 aa, Homo sapiens
MKSCGEDGFHIQVRLHPFHVMHINKTSCAGLTGSKQVYEVPLKAQGTLARVHIGHGNPGPIGTKVQDKGHFIWASQAKAKVPG

SEQ ID NO: 1015349 - protein, 31 aa, Homo sapiens
MFIVEQTCGSADAADRMSFAEAVSDGRHMMR

SEQ ID NO: 1015350 - protein, 68 aa, Homo sapiens
DSYVGDEAQSKRGILTLKYPIEHGIITNWDDMEKIWHHTFYNELRVAPEDTPPCSQRPDDPKATGEMT

SEQ ID NO: 1015351 - protein, 129 aa, Homo sapiens
MALRLMDASSSLWPPLKCIGDPSYSGGALLRRKLLTVRHGNLLMRKLLSAIMAWGDHVGLQQGAFQVDVVVTQSLVDSSQHLLGHILAALQVMVPIREDLRLHDGHNAILLAETGITGQNIGIFHEGEG

SEQ ID NO: 1015352 - protein, 71 aa, Homo sapiens
NVKKVKMAEPGPGSREYSRCKVHSWNVMPLGARTADHMTKDIFLGPDAEDQQKNDTAAAKKYNMRLKTTNL

SEQ ID NO: 1015353 - protein, 33 aa, Homo sapiens
ENESGKERERENESENKKRDREEDEEDAYERKK

SEQ ID NO: 1015354 - protein, 33 aa, Homo sapiens
DTNIYGGYHIYDIFATYDDVDKGETHTFGKHDT

SEQ ID NO: 1015355 - protein, 45 aa, Homo sapiens
TFSLRAFFPGRHNAPIPYCYSRVVLTRHVSDSDFSIPDDLRPRLT

SEQ ID NO: 1015356 - protein, 102 aa, Homo sapiens
ARAQWKKTALMTKEKTLIFKPIYNANFHAIQGFLSVGAINVTYAQKPKLLKWYCYNGSICEDVTLMKLTPLCLHSFLLAAEDRLRTISAKDSVAKDGRHKQY

SEQ ID NO: 1015357 - protein, 33 aa, Homo sapiens
HESRLRAGDGHCASASAREKSYERPDGHGITIG

SEQ ID NO: 1015358 - protein, 38 aa, Homo sapiens
DGRTLSDYNIQKESTLHLVSAYEVALLSLLSTSLPRNT

SEQ ID NO: 1015359 - protein, 30 aa, Homo sapiens
KPTPPYYQTTLGQPSTQLTYRREHFETLSA

SEQ ID NO: 1015360 - protein, 88 aa, Homo sapiens
DPAEEILLILRKPGAQWGDDSEWLTLPVDQKCEHRLWKARLSGYEEALRIFQNIKDDRSPQWSTFLGLIKNLVTDSTAVVHLKGLELT

SEQ ID NO: 1015361 - protein, 110 aa, Homo sapiens
PLLPSALSSPLRIATSPPGPKRIAPNQGTKPSGLPQGKAPQPPKQGKGPGPKAPGLPRLPPAPPAPPGQPAPPRPPSGPGSAFPHGHALPLLHPPGGRSKTRYLPLSPTH

SEQ ID NO: 1015362 - protein, 63 aa, Homo sapiens
HEYVAIQECYPCMLLAVPQALFWTLGMCVTHNVPIYEGYVVPHAIMRLDLAGRDITDYIMKIL

SEQ ID NO: 1015363 - protein, 31 aa, Homo sapiens
RGSHIVFKPCVAIPDGPRDAREQGGLEGQII

SEQ ID NO: 1015364 - protein, 38 aa, Homo sapiens
TPATRSPQPTLTLAHSPTHAHSHAHTRRDHTPSHSHSR

SEQ ID NO: 1015365 - protein, 33 aa, Homo sapiens
EKQDGSPAAVLEPPDENSARDLDLVVSIQTGKT

SEQ ID NO: 1015366 - protein, 72 aa, Homo sapiens
NTRTPLITPAIMTLAHEYDFISTLAETNRTPFGPCRRGSALVSGFNIEYAAALRPILHSRIHTHYYITPHHY

SEQ ID NO: 1015367 - protein, 99 aa, Homo sapiens
EALEQLQIQQFHSQIAAQTSASVLAEELHNSDLQTKDKQITQTEDSLASESDRLTSKEEELKDIQNMNFLLQAEVQTLQALQMSRLLLTMNLAIRKGHN

SEQ ID NO: 1015368 - protein, 65 aa, Homo sapiens
DIQEDCHHRLWPVELICGQGAGWGSCNVHAPGAALGFSKVLNDTCVHSLSQCALGRLLGMLDLGQ

SEQ ID NO: 1015369 - protein, 38 aa, Homo sapiens
LEVMNPAENFRVLVKQKKGQLLEDAAIQLINHIGTGFW

SEQ ID NO: 1015370 - protein, 38 aa, Homo sapiens
HCLLVTLAATSPPEFTPPVHASLDRFLASLAPLLTSKY

SEQ ID NO: 1015371 - protein, 60 aa, Homo sapiens
EGGGPGGKGGRPPRQGPTVVLPTVFSMFEQGQIQGFKGGFSCIGQNRDGIICKAGLRETY

SEQ ID NO: 1015372 - protein, 50 aa, Homo sapiens
MARGPKKHLKRVAAPKHWMLDKLTGVFAPRPSTGPHKLRRVPPPNNFPRT

SEQ ID NO: 1015373 - protein, 60 aa, Homo sapiens
QNHNSKKAIINITTSSSTTSSNSSSRHHRQYLQIGNRPPAKIEALIYVEKEPPGQGGPTL

SEQ ID NO: 1015374 - protein, 63 aa, Homo sapiens
MTVAFKDIKLWRKLLKGIPDLYDDAAIFGGKKINFTWAGKTPHSLCRENPCLRLFMNYFLPQM

SEQ ID NO: 1015375 - protein, 96 aa, Homo sapiens
RHENSSHEYRILVLLLMINTLYSAWYTTGLCINSKMAKPAHSSYVLQQLNNQREWGFLCDCCIAIDDIYFQAHKAVLAGCRSYLAVFLDPQPKYAH

SEQ ID NO: 1015376 - protein, 52 aa, Homo sapiens
EERTFVVGERVTLADITVVCTLLELYKQVLEAFFPPALSQYQPKKGHTTERE

SEQ ID NO: 1015377 - protein, 45 aa, Homo sapiens
GSDIVFKPCVAILDGPPCCPGKTGRPRSSNYFLRSSTYWMIIPNV

SEQ ID NO: 1015378 - protein, 80 aa, Homo sapiens
EVRTLVVFLQFFGTRFTTAETCIFRFITEEAVLMSPWIFQNEMATAASFSSLEKSYELPDGQVITIGNERFRCPETLFQP

SEQ ID NO: 1015379 - protein, 59 aa, Homo sapiens
DLALMQDKVRELQNQEQRLSGPGGGLDNALLALQRPTAAQVLQAGVAEVTSGTPPLHDQ

SEQ ID NO: 1015380 - protein, 39 aa, Homo sapiens
VEPPTKMQIFVKPLREDHHLEAEPSDTIENVKARIQDRR

SEQ ID NO: 1015381 - protein, 47 aa, Homo sapiens
LLKLMSTVDPKLNHVAPGLVSPSLKSDTSSKEIEEAMRRVRDAQASF

SEQ ID NO: 1015382 - protein, 50 aa, Homo sapiens
MSRLLNGQDQDQQLLLWNGLPHMSQDTRLVHSHLGPLRSADTLIGNCTPY

SEQ ID NO: 1015383 - protein, 75 aa, Homo sapiens
SRQHGWTSTRLPVEQLNRRRQKNEVQGQAFDIFVLGAEEMAASAPKELGKVIRMLGQTPPLEELQEMIDEVDEDG

SEQ ID NO: 1015384 - protein, 99 aa, Homo sapiens
VTSSLNPAWQSLTHRRDAQGRHADLEVQLFPKIIQTIRMIIRNVSLWEPDNVGSKEMQQIRYVPSGEGLGSLGQEHHVGKASRGTGNTDFGNLGLYPGY

SEQ ID NO: 1015385 - protein, 90 aa, Homo sapiens
SGKGPSFAEAKENPLPQGSVDYNNQKRGKRESQTSIPDYFMTGITNINNELQWYKIENILCNLISDPVEYSSLVSTGSESMRRRLALAAP

SEQ ID NO: 1015386 - protein, 36 aa, Homo sapiens
LPRKLRLRWGEDINFIRRLSTASGSAAPNTRPAHMS

SEQ ID NO: 1015387 - protein, 83 aa, Homo sapiens
NPTGPQAPGLRGQSRPRPQGNCLGPPFYSVKFVFIPPLGFAEGVGAESGAGQRVFFPGQEGRRVTTLGLGTPGILWGAVLGGG

SEQ ID NO: 1015388 - protein, 86 aa, Homo sapiens
NSLPGDILLVPYHEVSSISVIPSSAPEIVPPPTRSRQRLAGSAKGLRVSDLETKEGATRYLRRVCPPVRRSELGWYTDSVERLRDV

SEQ ID NO: 1015389 - protein, 42 aa, Homo sapiens
AEVICEMVRYSLDRRTPRIMQSRGSIFVFTLRTIVKLLRPSR

SEQ ID NO: 1015390 - protein, 42 aa, Homo sapiens
RCRETTLKPNGKERLISTLSSLDTEIRAKPTITGHLIYKCGS

SEQ ID NO: 1015391 - protein, 61 aa, Homo sapiens
LACTLAKTAFDEAIPELDTLNEDSYKDSHPHHAVAESNLTLWASASQGKDVMRPKGLKLNP

SEQ ID NO: 1015392 - protein, 53 aa, Homo sapiens
ELLRWKLKGKAIHRKGYKTAHDKTVSKLVFWFFMLSPGSCYRGGLSHIQDSEK

SEQ ID NO: 1015393 - protein, 57 aa, Homo sapiens
ICKADPEGDLLQLGKVSVPEEELDAMLKRARAHNLTVFLTLFGRRSMAHPRGRTLSA

SEQ ID NO: 1015394 - protein, 82 aa, Homo sapiens
MEFTEAEEQYQDATAEEEGEFEEEAEEEVAYEPSVNWGKQGSSVNSFIHFQAVLLAATVPLAVLPVHILLYRDHALEDFRES

SEQ ID NO: 1015395 - protein, 91 aa, Homo sapiens
IPDPETMDPMGLEPEAFIESNLNEIIDSFDDMNLSESSSGIYGYGMSEAPSIQQQAVLPVSRFTDVIAQAKLGLEAVNISMIGVSRGRRHR

SEQ ID NO: 1015396 - protein, 36 aa, Homo sapiens
SSYNMVIPEDNQTNRLQEALNLFKSILDLTCGLRTI

SEQ ID NO: 1015397 - protein, 102 aa, Homo sapiens
LAPKQQLVLPQFLASPSTMFPLVKSALNRLPSSEAFQQTMPSQTTQNRTPDFHDKYGNPVLASGATFCIVHMQYVDQSGIEWPSPCWRVPKDGGIVLPPWCI

SEQ ID NO: 1015398 - protein, 91 aa, Homo sapiens
SYARQNLKGDLPPSLGKVSVPEEETGTQRLQEGKGPTKLHTVLLTVFGEDGYNGDRPPGAILSHLPIFNPGANGVVNRIAEEVLSTRESTY

SEQ ID NO: 1015399 - protein, 66 aa, Homo sapiens
EPELERPGAAAGRALRDLKCPLRHKEFMTVQALVEEGSDGDQRESVQQDQKRQFSQKRRKISANRF

SEQ ID NO: 1015400 - protein, 178 aa, Homo sapiens
  misc_feature (160)..(160): Xaa can be any naturally occurring amino acid
  misc_feature (166)..(166): Xaa can be any naturally occurring amino acid
GARWWRTRKLLRRRGSVAWIESERETMNVDKTELCGVSAHLVTKVPRSVSLCQPSRPEQRPCRNLISETKKALLVQRSKAPRHLGKAKSQMETESQQAEDGLKDPNKILPRGPGASCVKKTSPKSEPQWKNSQEPAKLRQAGYSWWLGLWPSSCGEKARXHIPENXWTLGRIGFRHVG

SEQ ID NO: 1015401 - protein, 69 aa, Homo sapiens
KEGKVLGGALRFIGYPPGLKRHDFIFTSNVKTGLQGCTFLRAQTDNPQCRSEVDSNEYLSIAIQSNHSG

SEQ ID NO: 1015402 - protein, 38 aa, Homo sapiens
KQPPIKKAFKLNNHYLKNPKQLTELLKTNWPSITYSRL

SEQ ID NO: 1015403 - protein, 35 aa, Homo sapiens
QFLVGMVTTLLEPSATMPWLKGWKRTPKDGNHSRP

SEQ ID NO: 1015404 - protein, 59 aa, Homo sapiens
VQREWPAGRRGPGQGGSTTQAQRGSSNVFFHVLNKPRYKEFKEASAVSPDRIASSAGSL

SEQ ID NO: 1015405 - protein, 34 aa, Homo sapiens
MAKSALFTVRNNESCPKCGAELVIRSGNTVRSWM

SEQ ID NO: 1015406 - protein, 46 aa, Homo sapiens
PLTILGGSSSHQSCMVHSWHCGRLSTVAMCAPSGKVSEQGAPWSGL

SEQ ID NO: 1015407 - protein, 45 aa, Homo sapiens
EESLFSPRKGKRREKISLSALSLQLNKASNSLTVLYSAHGIFGHE

SEQ ID NO: 1015408 - protein, 39 aa, Homo sapiens
ATTSISYTSNSDDHLLKTSSCLTSSPAFNRPRALHQMSC

SEQ ID NO: 1015409 - protein, 36 aa, Homo sapiens
APVTLGRRSSGRQEEFMNCLLLDTVVDWYDMMTAGL

SEQ ID NO: 1015410 - protein, 67 aa, Homo sapiens
NLCAMRAKWRKKRIPRLEAQKKEDEAEVQVNRSLLHRGGTRAKHWMSDAWMLVQVVGLHATRLELSQ

SEQ ID NO: 1015411 - protein, 43 aa, Homo sapiens
TKYGKEKKRIEKIGKLEDKNITLEEKDNSNIQVGEAGKRQARN

SEQ ID NO: 1015412 - protein, 74 aa, Homo sapiens
GRILGLLEAYLKTRTFLVGERVTMADNTIVCNLLWLFKQVLEPSFRPAFPHNQRWFLNCNYNSPIPAVLASETV

SEQ ID NO: 1015413 - protein, 66 aa, Homo sapiens
EVPPFSSVLILCASRRAFSSRYCWARASRGSQPSVVRRAHYEEGPGDLPFSVKQSSLLAKMCLYLD

SEQ ID NO: 1015414 - protein, 48 aa, Homo sapiens
AQDQGEKENPMRELRIRILTSQHHVLGRVWDRLTRAAKVLEQLTGADP

SEQ ID NO: 1015415 - protein, 40 aa, Homo sapiens
EEAETVGPGEKKAAGKGRSPKRPLYFERSYTVTPLGDREL

SEQ ID NO: 1015416 - protein, 40 aa, Homo sapiens
EQIALKGAKKQLQKLKRGFGLKKEQDTSAHLERIKKNMTD

SEQ ID NO: 1015417 - protein, 57 aa, Homo sapiens
MAMSFEWPWQYRFPPFSTLQRMLDTRQTQLAAWCSLGLSFCRLAQTVQHDGDGSSGE

SEQ ID NO: 1015418 - protein, 35 aa, Homo sapiens
EKLMLQEMRSQKWDCASSLCVTWGIIPEATFTSGV

SEQ ID NO: 1015419 - protein, 103 aa, Homo sapiens
IDPEDDVRDNILKYDEEGGGEEDPDFDLSQLQQPDTGGLHAIKPVGIRRMDVQPIPAEPSIRSDITVHTMEDIGSPFMRDLMRRPLPHDTTTDLTDQCLAYRA

SEQ ID NO: 1015420 - protein, 105 aa, Homo sapiens
STPPATTNFPAPPTRARLSRPDSGILASRIPLQSYSQVISRGQAPLAPTHTPLFPPTGGLTGKVREDTEGATTVATVGPSVPLRITVTSFLRGGIRSQGQIPYFT

SEQ ID NO: 1015421 - protein, 63 aa, Homo sapiens
LKPRSVLTSQVVVGPNITLPEGSVISLHPPDAEEDEDDAELPDDYRGAQGKEKVKVNVTFSRE

SEQ ID NO: 1015422 - protein, 98 aa, Homo sapiens
LEEELRTMDQALKSLMASEEEKFGDLEEELKIVTTTLNPWRPGGQVFTKEDKYEEEIKLFEETLRERLDPRRCTPTCLWTRLRDITISRVLGRSHGER

SEQ ID NO: 1015423 - protein, 84 aa, Homo sapiens
PTVCCVRQWEVVKSSDYCEYLRPPIDSYSTLDFGKFNEISEVGYQHGRTVFDIWGRSGVLYEDLAAQQGPTKSPRVGLYISTVF

SEQ ID NO: 1015424 - protein, 36 aa, Homo sapiens
KATRRCFLIKLCELIFASLVRKKRKEHEDSGRKMMQ

SEQ ID NO: 1015425 - protein, 50 aa, Homo sapiens
MLEGDKLKVEPGDPWGPGDPPPYSVQRVVQRTLGYRAPVATSPNNSKPRR

SEQ ID NO: 1015426 - protein, 110 aa, Homo sapiens
MADIQTERAYQKQPTIFQNKKRVLLENWQGEAPRYYRYIWSGVHVTQVRLLMAPTFTRKCPFTGNVFHMGADSVCCGTNMSVQSTVLSRVYLTHPQHNLLWSPQDILTHL

SEQ ID NO: 1015427 - protein, 41 aa, Homo sapiens
MAGIDDFYTSARGQQLPPWGNFAKATFDAISKASRYLTPDL

SEQ ID NO: 1015428 - protein, 35 aa, Homo sapiens
VKCDPRHGKYMSSAVSCTVVDVVPKDVNSAIATIK

SEQ ID NO: 1015429 - protein, 932 aa, Homo sapiens
MKQLPAATVRLLSSSQIITSVVSVVKELIENSLDAGATSVDVKLENYGFDKIEVRDNGEGIKAVDAPVMAMKYYTSKINSHEDLENLTTYGFRGEALGSICCIAEVLITTRTAADNFSTQYVLDGSGHILSQKPSHLGQGTTVTALRLFKNLPVRKQFYSTAKKCKDEIKKIQDLLMSFGILKPDLRIVFVHNKAVIWQKSRVSDHKMALMSVLGTAVMNNMESFQYHSEESQIYLSGFLPKCDADHSFTSLSTPERSFIFINSRPVHQKDILKLIRHHYNLKCLKESTRLYPVFFLKIDVPTADVDVNLTPDKSQVLLQNKESVLIALENLMTTCYGPLPSTNSYENNKTDVSAADIVLSKTAETDVLFNKVESSGKNYSNVDTSVIPFQNDMHNDESGKNTDDCLNHQISIGDFGYGHCSSEISNIDKNTKNAFQDISMSNVSWENSQTEYSKTCFISSVKHTQSENGNKDHIDESGENEEEAGLENSSEISADEWSRGNILKNSVGENIEPVKILVPEKSLPCKVSNNNYPIPEQMNLNEDSCNKKSNVIDNKSGKVTAYDLLSNRVIKKPMSASALFVQDHRPQFLIENPKTSLEDATLQIEELWKTLSEEEKLKYEEKATKDLERYNSQMKRAIEQESQMSLKDGRKKIKPTSAWNLAQKHKLKTSLSNQPKLDELLQSQIEKRRSQNIKMVQIPFSMKNLKINFKKQNKVDLEEKDEPCLIHNLRFPDAWLMTSKTEVMLLNPYRVEEALLFKRLLENHKLPAEPLEKPIMLTESLFNGSHYLDVLYKMTADDQRYSGSTYLSDPRLTANGFKIKLIPGVSITENYLEIEGMANCLPFYGVADLKEILNAILNRNAKEVYECRPRKVISYLEGEAVRLSRQLPMYLSKEDIQDIIYRMKHQFGNEIKECVHGRPFFHHLTYLPETT

SEQ ID NO: 1015430 - protein, 189 aa, Homo sapiens; identical to SEQ ID NO: 933832

SEQ ID NO: 1015431 - protein, 374 aa, Homo sapiens
MSGESMNFSDVFDSSEDYFVSVNTSYYSVDSEMLLCSLQEVRQFSRLFVPIAYSLICVFGLLGNILVVITFAFYKKARSMTDVYLLNMAIADILFVLTLPFWAVSHATGAWVFSNATCKLLKGIYAINFNCGMLLLTCISMDRYIAIVQATKSFRLRSRTLPRTKIICLVVWGLSVIISSSTFVFNQKYNTQGSDVCEPKYQTVSEPIRWKLLMLGLELLFGFFIPLMFMIFCYTFIVKTLVQAQNSKRHKAIRVIIAVVLVFLACQIPHNMVLLVTAANLGKMNRSCQSEKLIGYTKTVTEVLAFLHCCLNPVLYAFIGQKFRNYFLKILKDLWCVRRKYKSSGFSCAGRYSENISRQTSETADNDNASSFTM

SEQ ID NO: 1015432 - protein, 354 aa, Homo sapiens
MSRLLHAEEWAEVKELGDHHRQPQPHHLPQPPPPPQPPATLQAREHPVYPPELSLLDSTDPRAWLAPTLQGICTARAAQYLLHSPELGASEAAAPRDEVDGRGELVRRSSGGASSSKSPGPVKVREQLCKLKGGVVVDELGCSRQRAPSSKQVNGVQKQRRLAANARERRRMHGLNHAFDQLRNVIPSFNNDKKLSKYETLQMAQIYINALSELLQTPSGGEQPPPPPASCKSDHHHLRTAASYEGGAGNATAAGAQQASGGSQRPTPPGSCRTRFSAPASAGGYSVQLDALHFSTFEDSALTAMMAQKNLSPSLPGSILQPVQEENSKTSPRSHRSDGEFSPHSHYSDSDEAS

SEQ ID NO: 1015433 - protein, 150 aa, Homo sapiens
GGRAVPGLTAIHEGVEPACLLGLYKSHWLAFRAGLLAAPAAVNRPAEVHGSPPASLCPCPSVKFQTGLPAMALPKPSDGTLPAEVQGRGQRRRLVWTPSQSKALQACFERNPYPGITTRERLAQAIGIPEPRVQILFQNERSCQLRQHWH

SEQ ID NO: 1015434 - protein, 312 aa, Homo sapiens
MSISNITVYMPSVLTLVGIPGLESVQCWIGIPFCAIYLIAMIGNSLLLSIIKSERSLHEPLYIFLGMLGATDIALASSIMPKMLGIFWFNVPEIYFDSCLLQMWFIHTLQGIESGILVAMALDRYVAICYPLRHANIFTHQLVIQIGTMVVLRAAILVAPCLVLIKCRFQFYHTTVISHSYCEHMAIVKLAAANVQVNKIYGLFVAFTVAGFDLTFITLSYIQIFITVFRLPQKEARFKAFNTCIAHICVFLQFYLLAFFSFFTHRFGSHIPPYIHILFSSIYLLVPPFLNPLVYGAKTTQIRIHVVKMFCS

SEQ ID NO: 1015435 - protein, 189 aa, Homo sapiens; identical to SEQ ID NO: 933833

SEQ ID NO: 1015436 - protein, 125 aa, Homo sapiens [sequence omitted]

SEQ ID NO: 1015437 - protein, 774 aa, Homo sapiens
TPQVIGGVAWSEGLAGVAWSEAPWRGVLRPAEGVDGMRRREGHGTDSEMGQGPVRESQSSDPPALQFRISEYKPLNMAGVEQPPSPELRQEGVTEYEDGGAPAGDGEAGPQQAEDHPQNPPEDPNQDPPEDDSTCQCQACGPHQAAGPDLGSSNDGCPQLFQERSVIVENSSGSTSASELLKPMKKRKRREYQSPSEEESEPEAMEKQEEGKDPEGQPTASTPESEEWSSSQPATGEKKECWSWESYLEEQKAITAPVSLFQDSQAVTHNKNGFKLGMKLEGIDPQHPSMYFILTVAEVCGYRLRLHFDGYSECHDFWVNANSPDIHPAGWFEKTGHKLQLPKGYKEEEFSWSQYMCSTRAQAAPKHMFVSQSHSPPPLGFQVGMKLEAVDRMNPSLVCVASVTDVVDSRFLVHFDNWDDTYDYWCDPSSPYIHPVGWCQKQGKPLTPPQDYPDPDNFCWEKYLEETGASAVPTWAFKVRPPHSFLVNMKLEAVDRRNPALIRVASVEDVEDHRIKIHFDGWSHGYDFWIDADHPDIHPAGWCSKTGHPLQPPLGPREPSSASPGGCPPLSYRSLPHTRTSKYSFHHRKCPTPGCDGSGHVTGKFTAHHCLSGCPLAERNQSRLKAELSDPEASARKKNLSGFSPRKKPRHHGRIGRPPKYRKIPQEDFQTLTPDVVHQSLFMSALSAHPDRSLSVCWEQHCKLLPGVAGISASTVAKWTIDEVFGFVQTLTGCEDQARLFKDEVRCKCRVGDRAGVTVLKTAGSRCPPQRHFC

SEQ ID NO: 1015438 - protein, 310 aa, Homo sapiens
MWYNNSAGPFLLTGFLGSEAVHYRISMSFFVIYFSILFGNGTLLVLIWNDHSLHEPMYYFLAMLADTDLGMTFTTMPTVLGVLLLDQREIAHAACFTQSFIHSLAIVESGILLVLAYDCFIAIRTPLRYNCILTNSRVMNIGLGVLMRGFMSILPIILSLYCYPYCGSRALLHTFCLHQDVIKLACADITFNHIYPIIQTSLTVFLDALIIIFSYILILKTVMGIASGQEEAKSLNTCVSHISCVLVFHITVMGLSFIHRFGKHAPHVVPITMSYVHFLFPPFVNPIIYSIKTKQIQRSIIRLFSGQSRA

SEQ ID NO: 1015439 - protein, 312 aa, Homo sapiens
MWPNITAAPFLLTGFPGLEAAHHWISIPFFAVYVCILLGNGMLLYLIKHDHSLHEPMYYFLTMLAGTDLMVTLTTMPTVMGILWVNHREISSVGCFLQAYFIHSLSVVESGSLLAMAYDRFIAIRNPLRYASIFTNTRVIALGVGVFLRGFVSILPVILRLFSFSYCKSHVITRAFCLHQEIMRLACADITFNRLYPVILISLTIFLDSLIILFSYILILNTVIGIASGEERAKALNTCISHISCVLIFYVTVMGLTFIYRFGKNVPEVVHIIMSDIYFLFPPLMNPVIYSIKTKQIQYGIIRLLSKHRFSR

SEQ ID NO: 1015440 - protein, 83 aa, Homo sapiens
MATTALLPLAKLVSPEGEGSSALIQPPAGSVAEEDKGHKHTHNLSLGFLSEKGGGAEATKAAARAFLKGLSSGPGLGPGSGED

SEQ ID NO: 1015441 - protein, 59 aa, Homo sapiens
  misc_feature (7)..(7): Xaa can be any naturally occurring amino acid
  misc_feature (50)..(50): Xaa can be any naturally occurring amino acid
  misc_feature (53)..(53): Xaa can be any naturally occurring amino acid
GILDGCXNGRCVRVPEASPAVLRRLPLDMTRMACVDINECDEAEAASPLXCNXRCLNTD

SEQ ID NO: 1015442 - protein, 36 aa, Homo sapiens
  misc_feature (36)..(36): Xaa can be any naturally occurring amino acid
MLSYFSLSRVFLYNFTSSYSSGLFPGLLFPAWLGSX

SEQ ID NO: 1015443 - protein, 71 aa, Homo sapiens
  misc_feature (4)..(4): Xaa can be any naturally occurring amino acid
  misc_feature (17)..(17): Xaa can be any naturally occurring amino acid
SSHXGCTQLLGTLLLEXPTLNENACNLRGPTAPQNPARRGKSREGIPSPRQPMLAETNSAPNLHRVSHDPS

SEQ ID NO: 1015444 - protein, 123 aa, Homo sapiens
MVGTRLAGFCKYQHAFHIRRLHVLEYCVRGRTIRGNLGDTRVGLRKKKMFVVAQTHKHGPRDGANRATEGESSTPLATGPGAHFSVREWGHHINTSRRENSYSPDTVGKELLPKKLLVHKPSV

SEQ ID NO: 1015445 - protein, 130 aa, Homo sapiens
  misc_feature (11)..(11): Xaa can be any naturally occurring amino acid
KPPTHRAYRTXSGEGRWPWQQYSPNPRHPLNGATDRYPCDGVQLRDISGLFLPLQLNPCTLGRQCPTSRESTRVSPQPKRTRRLLGLASGSIHKRGATEPQACTHKGNPRQALKFVTHPRGSPCPLQPGE

SEQ ID NO: 1015446 - protein, 58 aa, Homo sapiens
DQFTSKLHRVKIQTVAAKQGESDPDEERNKAESCRTSGYHQIEASIVRLLNLDRRCRT

SEQ ID NO: 1015447 - protein, 72 aa, Homo sapiens
GIATVRPLRSSMNQGRAGAQRGGGAREQATQEVLEPVHLPAPGLLSGNQCPLCCTISHERLGTPFFQFRPPW

SEQ ID NO: 1015448 - protein, 69 aa, Homo sapiens
PGVAWAPPARCYRYCKNKPVPKSRFCRGVPDATIRIFDLERKKAKWMSFRFVHMVSDDMAVALKFELPI

SEQ ID NO: 1015449 - protein, 71 aa, Homo sapiens
EVPPWTGEVNPAQRDGGASGGALGTPLIDLPPKRQAEGASNCPSEPSKISLFGEDRQDEAKRLAITVPSKD

SEQ ID NO: 1015450 - protein, 62 aa, Homo sapiens
SRATGPSAQTGGREASPQQRQSELGRPAATTSLAPRLHTSVCGQSQHSLPCGWPWGILLGSE

SEQ ID NO: 1015451 - protein, 30 aa, Homo sapiens
MAFAPFLSQFFPFDVGYQNYYKGLLLFGAN

SEQ ID NO: 1015452 - protein, 35 aa, Homo sapiens
  misc_feature (24)..(24): Xaa can be any naturally occurring amino acid
  misc_feature (35)..(35): Xaa can be any naturally occurring amino acid
FGTGGTWVYPAGAHSISLCSGSSXYFWLIRPKGAX

SEQ ID NO: 1015453 - protein, 33 aa, Homo sapiens
FGTAQEEITATVKVNLPFGRPRVLQKNVDHCLL

SEQ ID NO: 1015454 - protein, 136 aa, Homo sapiens
  misc_feature (119)..(119): Xaa can be any naturally occurring amino acid
  misc_feature (121)..(121): Xaa can be any naturally occurring amino acid
  misc_feature (129)..(129): Xaa can be any naturally occurring amino acid
  misc_feature (133)..(133): Xaa can be any naturally occurring amino acid
NPKTEMLYRRRKGFQQSIVIRVRLNMHAFEIYIDLNANSQLKLCCKVKVHPQKDRAFSGDQQKCGCIYISGDRNYDRSGAAAAFLLTSCMPLFRSDCSLPGNGFSMGNPNPFHRGGIRXLXLFFKMEHXGEGXGIM

SEQ ID NO: 1015455 - protein, 116 aa, Homo sapiens
  misc_feature (15)..(15): Xaa can be any naturally occurring amino acid
  misc_feature (19)..(19): Xaa can be any naturally occurring amino acid
  misc_feature (29)..(29): Xaa can be any naturally occurring amino acid
  misc_feature (41)..(41): Xaa can be any naturally occurring amino acid
  misc_feature (66)..(66): Xaa can be any naturally occurring amino acid
  misc_feature (79)..(79): Xaa can be any naturally occurring amino acid
  misc_feature (81)..(81): Xaa can be any naturally occurring amino acid
  misc_feature (101)..(101): Xaa can be any naturally occurring amino acid
RGKPQGPPEAQNLCXVGQXWYNHTFILVXHSPKFEALLKGXPISHWLPLNLNKIYSPVPWLMPAAXPALWEAEAGGWLXAXSLRPACATWRDPVSTELKIXHAAVIPATWEAEARR

SEQ ID NO: 1015456 - protein, 37 aa, Homo sapiens
MVIKVLLAPLVLLVLGALLVLLALLEKMVALDILVQL

SEQ ID NO: 1015457 - protein, 91 aa, Homo sapiens
  misc_feature (1)..(1): Xaa can be any naturally occurring amino acid
  misc_feature (36)..(36): Xaa can be any naturally occurring amino acid
XFVKRDKQFPPRGKQPMTMITEFKYRLTIGKFGPSXPQEFGHEPFEKLPNQDRVQVARGYNPQYFGRPKVEGSLESQEFKTSLGNIVSPCI

SEQ ID NO: 1015458 - protein, 38 aa, Homo sapiens
VWAGAGFFARSDFGSSSGSGNGRDVEKWPKTSTLVERN

SEQ ID NO: 1015459 - protein, 140 aa, Homo sapiens
  misc_feature (3)..(3): Xaa can be any naturally occurring amino acid
LLXPLTFKSFRVTSLKLANIASCCPKEKPKCPSLRIDVLPNKRPNCYLLIYLTKSCSVAPGCSALARSWFIEALNSLGSSNPPTSVSQVARTTGTSPCLQSQLLKRLRQEKRLNPGGRDCSEPRSCHCTPVWVTGRLRPQ

SEQ ID NO: 1015460 - protein, 69 aa, Homo sapiens
  misc_feature (43)..(43): Xaa can be any naturally occurring amino acid
  misc_feature (54)..(54): Xaa can be any naturally occurring amino acid
  misc_feature (63)..(63): Xaa can be any naturally occurring amino acid
LLKSQELPSPQAEKSLPKLRLEIIDKDSKTRRLDIRDHCPLRXCEHHLEPPSLXYVPSYPIKXHWLWHG

SEQ ID NO: 1015461 - protein, 74 aa, Homo sapiens
MPSSWRQLGPNVLLFLCTTVIGICTHYPAEVSQPGLSGDPRLHPGRLTAAGDRQQERSAVGIAQHVAMEMKRHH

SEQ ID NO: 1015462 - protein, 46 aa, Homo sapiens
MAELQQLRVQEAVESMVKSLERESILQIQGLMFPAAHFCEDSHASM

SEQ ID NO: 1015463 - protein, 88 aa, Homo sapiens
SRNASSRFCRASIPGTLVLDAQGPLNKALELFRRTEASNYKELGFQGWPYRSNPYHLGPGQERRGLISCSHIEFALSVSLSVESAGGS

SEQ ID NO: 1015464 - protein, 33 aa, Homo sapiens
LARLEGGPHFILADEDPRSRRRSPYTLPGAMGL

SEQ ID NO: 1015465 - protein, 53 aa, Homo sapiens
RVTHEEPLWLELPSVLSPEDRCLLPLFPSQSKQEAVLLWEMVLYNWLYFPMAL

SEQ ID NO: 1015466 - protein, 79 aa, Homo sapiens
  misc_feature (1)..(1): Xaa can be any naturally occurring amino acid
  misc_feature (9)..(9): Xaa can be any naturally occurring amino acid
  misc_feature (24)..(24): Xaa can be any naturally occurring amino acid
XGNEEGLLXGATLAQEKNLPKRQXSNLPPNERSSQAETALPYLKAAELASGGGSSPKVRAKKGLLSSWDYGCTPPYIPG

SEQ ID NO: 1015467 - protein, 70 aa, Homo sapiens
  misc_feature (7)..(8): Xaa can be any naturally occurring amino acid
  misc_feature (30)..(30): Xaa can be any naturally occurring amino acid
QHYPHRXXGGVHQYRLQPLKGQESRLRRDXPRASGFGQTELNEPIAASFQLPLEPEAEHIAEERGVQGAR

SEQ ID NO: 1015468 - protein, 41 aa, Homo sapiens
  misc_feature (21)..(21): Xaa can be any naturally occurring amino acid
EQDALPSSEDDDDDDDSSSEXKETDNTKPNRMPVAPYWTSP

SEQ ID NO: 1015469 - protein, 120 aa, Homo sapiens
  misc_feature (76)..(77): Xaa can be any naturally occurring amino acid
  misc_feature (97)..(97): Xaa can be any naturally occurring amino acid
FKIQSQNCFIVTHIFNNKKKCRKWLKYRIEKKSQVVQLVLLTSGRRACSHISTAAAVLQRPFADTPWHTCTPRGSXXAALLAGGHLHSLHLQEPVQXQETPVVQEQLGPFRAAVRLEISS

SEQ ID NO: 1015470 - protein, 63 aa, Homo sapiens
  misc_feature (45)..(45): Xaa can be any naturally occurring amino acid
WPKSWSGSTGALDQGTEFEEAQSSGLFGARPQAAGEGAKEEVLLXGLGELGQALLLPPALAGF

SEQ ID NO: 1015471 - protein, 103 aa, Homo sapiens
  misc_feature (3)..(3): Xaa can be any naturally occurring amino acid
  misc_feature (11)..(11): Xaa can be any naturally occurring amino acid
  misc_feature (18)..(18): Xaa can be any naturally occurring amino acid
  misc_feature (40)..(40): Xaa can be any naturally occurring amino acid
  misc_feature (98)..(99): Xaa can be any naturally occurring amino acid
ALXGPLGYKNXKKQPTGXEQGGLRGRSCKREGGDPEEKGXEPAQEVPVRKGWCAPNMVRRYTQLPIRDQDQQDRTRLPLDLRTLMRPRPLALLPSPLXXHLVP

SEQ ID NO: 1015472 - protein, 82 aa, Homo sapiens
  misc_feature (3)..(3): Xaa can be any naturally occurring amino acid
  misc_feature (6)..(6): Xaa can be any naturally occurring amino acid
  misc_feature (14)..(14): Xaa can be any naturally occurring amino acid
  misc_feature (18)..(18): Xaa can be any naturally occurring amino acid
  misc_feature (45)..(45): Xaa can be any naturally occurring amino acid
  misc_feature (47)..(47): Xaa can be any naturally occurring amino acid
  misc_feature (49)..(49): Xaa can be any naturally occurring amino acid
  misc_feature (54)..(54): Xaa can be any naturally occurring amino acid
  misc_feature (57)..(57): Xaa can be any naturally occurring amino acid
  misc_feature (61)..(61): Xaa can be any naturally occurring amino acid
  misc_feature (70)..(72): Xaa can be any naturally occurring amino acid
RPXTPXIALNLGGXGCQXAEIALLHSSLGNRERPCLKKQQQQKVXVXIXAIIGXFLXEPKXNLRGGTIPXXXVKTRIGSWFE

SEQ ID NO: 1015473 - protein, 136 aa, Homo sapiens
  misc_feature (40)..(40): Xaa can be any naturally occurring amino acid
  misc_feature (55)..(55): Xaa can be any naturally occurring amino acid
  misc_feature (63)..(63): Xaa can be any naturally occurring amino acid
  misc_feature (80)..(80): Xaa can be any naturally occurring amino acid
  misc_feature (105)..(105): Xaa can be any naturally occurring amino acid
  misc_feature (107)..(107): Xaa can be any naturally occurring amino acid
  misc_feature (116)..(116): Xaa can be any naturally occurring amino acid
  misc_feature (123)..(123): Xaa can be any naturally occurring amino acid
  misc_feature (132)..(132): Xaa can be any naturally occurring amino acid
ARAGRWPEQPGRVLELPKVGSCAEAGEGSRGSPQGPGWAXSPKTEKEKGSSWRNXPGEAKARXQEQESVQPPGPARPQSXPQGKGPQPPEPQQAGEASLLLWTMXSXPRTLDGVEXVEIYPEXELFLRVFFXFFQS

SEQ ID NO: 1015474 - protein, 79 aa, Homo sapiens
  misc_feature (9)..(9): Xaa can be any naturally occurring amino acid
  misc_feature (51)..(51): Xaa can be any naturally occurring amino acid
  misc_feature (58)..(58): Xaa can be any naturally occurring amino acid
  misc_feature (72)..(72): Xaa can be any naturally occurring amino acid
  misc_feature (74)..(74): Xaa can be any naturally occurring amino acid
ARGHHGQCXSWGPVQPCEAPRIPGALPTEVQELLKDRDPKEIEWDDLGPAXLPDHVRXGEPEVTSPSSLSSXDXAPRAF

SEQ ID NO: 1015475 - protein, 87 aa, Homo sapiens
  misc_feature (30)..(30): Xaa can be any naturally occurring amino acid
PFLFNINRAVKGKMKPAITLVFVKVDLKKXTVKFLVGPWRLKRWLGTVALCNPQHFGGPRREDHLKIETSLDNTTTQQDPVSTKIKN

SEQ ID NO: 1015476 - protein, 52 aa, Homo sapiens
  misc_feature (36)..(36): Xaa can be any naturally occurring amino acid
PPPKSIGSPCRKVAATSNETRGSATLRAASQPALGXKSDSSWGLLPPIALRL

SEQ ID NO: 1015477 - protein, 91 aa, Homo sapiens
  misc_feature (40)..(40): Xaa can be any naturally occurring amino acid
GEDLTIMSEGKEEQVKSPVEGSRQRGKLVQGDSPFFKTIXSCETYSLSQEQHEKDPPPGFNYFPQGSSQNMWELWELQDEIWVGTQSQTMS

SEQ ID NO: 1015478 - protein, 62 aa, Homo sapiens
  misc_feature (24)..(24): Xaa can be any naturally occurring amino acid
  misc_feature (48)..(48): Xaa can be any naturally occurring amino acid
  misc_feature (52)..(52): Xaa can be any naturally occurring amino acid
ILNLGGRQHFAQLVASAPRRGDDXRVLRLLVHFLQAQGPGPLAEVHRXCEAXAERASRGERS

SEQ ID NO: 1015479 - protein, 105 aa, Homo sapiens
  misc_feature (81)..(82): Xaa can be any naturally occurring amino acid
  misc_feature (98)..(98): Xaa can be any naturally occurring amino acid
LGAAARVLGQPQQPQTRQPLQVEELSQAGDRFLRRYSSLRRWHRLTGSRVEMLLTLSVITSRLGISWQMEIICEAVPQQFXXATLCSSEALARVRTIXPRQLHGG

SEQ ID NO: 1015480 - protein, 41 aa, Homo sapiens
MQPRSAELILGLLKSSRNEDSQLNPPYINNQNRKGIKEDKS

SEQ ID NO: 1015481 - protein, 46 aa, Homo sapiens
  misc_feature (24)..(24): Xaa can be any naturally occurring amino acid
  misc_feature (40)..(40): Xaa can be any naturally occurring amino acid
NGLRTTEEALHASHGFMWYTWPLXSGHLDPCPSHWDGINXCRPEKK

SEQ ID NO: 1015482 - protein, 57 aa, Homo sapiens
  misc_feature (9)..(9): Xaa can be any naturally occurring amino acid
  misc_feature (28)..(28): Xaa can be any naturally occurring amino acid
ARFASQPSXVWIKGSQHEVPEPAAAFAXNWELVEKGSVSDPTPDLLNQKLWGWGQHF

SEQ ID NO: 1015483 - protein, 124 aa, Homo sapiens
  misc_feature (19)..(19): Xaa can be any naturally occurring amino acid
  misc_feature (42)..(42): Xaa can be any naturally occurring amino acid
  misc_feature (45)..(45): Xaa can be any naturally occurring amino acid
  misc_feature (53)..(53): Xaa can be any naturally occurring amino acid
  misc_feature (71)..(71): Xaa can be any naturally occurring amino acid
  misc_feature (116)..(116): Xaa can be any naturally occurring amino acid
  misc_feature (121)..(121): Xaa can be any naturally occurring amino acid
MSLSMRDPVIPGTSMAYHXFLPHRAPDFAMSAVLGHQPPFFXLLXLPPRRACXSRCRAPCQADHGSIGGGXETGIPFSSLGPRLHLRPLNTMRPRCATAPTPSRCRSRTAAVCSTXALPSXAAV

SEQ ID NO: 1015484 - protein, 73 aa, Homo sapiens
CEGQPVTSRLAVICGTSSCHMGISKDPIFVPGVWGPYFSAMVPGFWLNEGGQSVTGKLKTTWYKAMLLFQNYK

SEQ ID NO: 1015485 - protein, 133 aa, Homo sapiens
  misc_feature (4)..(4): Xaa can be any naturally occurring amino acid
  misc_feature (37)..(37): Xaa can be any naturally occurring amino acid
  misc_feature (44)..(44): Xaa can be any naturally occurring amino acid
  misc_feature (46)..(46): Xaa can be any naturally occurring amino acid
  misc_feature (56)..(56): Xaa can be any naturally occurring amino acid
  misc_feature (64)..(64): Xaa can be any naturally occurring amino acid
  misc_feature (76)..(76): Xaa can be any naturally occurring amino acid
  misc_feature (118)..(118): Xaa can be any naturally occurring amino acid
QPSXLQRYFPCSLHVWSPASSFMKGGALCGLVYLFAXSATSRAXAXRSSGWHPVAXRAPSGCWXAAALGLLAHFLXGRCAALLGRLRTLLRGPETKPPGRRSRERRAGASSCPGEGRXVPILVSIIKVLVTEK

SEQ ID NO: 1015486 - protein, 136 aa, Homo sapiens
  misc_feature (2)..(2): Xaa can be any naturally occurring amino acid
EXALHPSHPDPVTVTGHVTESSCMAQPGTDATSRERTHSFADHSGTIDDREPLANAIKSDSAVIGGLIAVVIFILLCITAIAVRIYQQKRLYKRSEAKRSENVDSAEAVPEKLSLILQNGSSMENPERVLLLDWQL

SEQ ID NO: 1015487 - protein, 111 aa, Homo sapiens
RKVRSRNSNSLPLKKMSSLSEYAFRMSRLSARLFGEVTRPTNSKSMKVVKLFSELPLAKKKETYDLGYQSEVSFFLGIQIHHTYAGTSWQTLRFLGTLQRMRHQGFYGMSQ

SEQ ID NO: 1015488 - protein, 90 aa, Homo sapiens
  misc_feature (16)..(16): Xaa can be any naturally occurring amino acid
  misc_feature (44)..(44): Xaa can be any naturally occurring amino acid
PSDFINDATDVNDALXDVTRFYREPRPALQEEAAALLQMATRRXHALAIEKAVQEASGGHRDLRGGRGPPVNEPTSASWSPARRPEYDVA

SEQ ID NO: 1015489 - protein, 91 aa, Homo sapiens
  misc_feature (38)..(38): Xaa can be any naturally occurring amino acid
  misc_feature (42)..(42): Xaa can be any naturally occurring amino acid
  misc_feature (86)..(86): Xaa can be any naturally occurring amino acid
  misc_feature (89)..(89): Xaa can be any naturally occurring amino acid
EKDCGQDRRAPGVQPCRLVTMTSVVKTVYSLQPPSALXACHXYDTQTRATSKSLLPVRSKEVDVSKQLHSGGPENDVTKITKLETXRIXAN

SEQ ID NO: 1015490 - protein, 55 aa, Homo sapiens
  misc_feature (9)..(9): Xaa can be any naturally occurring amino acid
  misc_feature (11)..(11): Xaa can be any naturally occurring amino acid
MRKKRLANXEXSRWSVLVPDRLTYLSPELFSPNLCKAQNATEPLLFSPLPMAGTG

SEQ ID NO: 1015491 - protein, 66 aa, Homo sapiens
  misc_feature (34)..(34): Xaa can be any naturally occurring amino acid
  misc_feature (45)..(46): Xaa can be any naturally occurring amino acid
SWERPLSARPWQTVYHLSQSWAPKPKGPASSRLXGTKASPGALGXXFTLSFPPPGPRHDPQVTLRC

SEQ ID NO: 1015492 - protein, 109 aa, Homo sapiens
  misc_feature (7)..(7): Xaa can be any naturally occurring amino acid
  misc_feature (25)..(25): Xaa can be any naturally occurring amino acid
  misc_feature (64)..(64): Xaa can be any naturally occurring amino acid
  misc_feature (70)..(70): Xaa can be any naturally occurring amino acid
GSYKHLXGPDTVLKNTQSTLNSTGXNCMRPLILGLPSASAIPKTARPTPPAPQPTRCDDGEYEXLYFMMXHFHLMDSKYIFSSYDFLNTIFFSLAYFIERIQYLIHMTC

SEQ ID NO: 1015493 - protein, 190 aa, Homo sapiens
  misc_feature (157)..(157): Xaa can be any naturally occurring amino acid
  misc_feature (183)..(183): Xaa can be any naturally occurring amino acid
MWAELELPPQRGQLLETAVMWYDDRYAGESSLEPRSALISKALGLELRGLESTLQASLALAQAKVTIETGSIWANGDSKGRVIGFFVEKQPSLMFKSESASVSGELCDSRQCPRLSAECLYLARGLWEGLDQHLVCSYAVCCFPGEDGTSLPINTLXKILSCFFIWSKCLKGKERSPPQLLAXWGAAPGV

SEQ ID NO: 1015494 - protein, 317 aa, Homo sapiens
STLDGPFQGCEVAYRPSIDPYFMLTIIVDYYVCFSSLFNGDAVLTLTRIHDRYCTWHPSLISMDVGFLPTHMHAPYTLRTVGIQALIVTSKSGDTLLGWSTPKLCMPSPLAHANRRQSGSLRHMGSEAQLTFKFDMTQAMLTSGVTLHTVHLETRSVSNMLVVLASLSSTDRVRVPSLRREEGAFTPSPPPLSSAYLQSVSEVSALLVPPGMGTWGRGMDFLTGEATQTCGSWSVRGGRNAGPSPPKQPVPCWPHCELDVVSGCGLGLPTEGPLSAATAKGGGFSLQLLCFSAAICHNTQNDSDISHPHLFSVRPCC

SEQ ID NO: 1015495 - protein, 190 aa, Homo sapiens
PVVKIGVYTHASHVLPIGALSLCALNPSVVQRVTKPATVQPYSCDRLLFFRTNQRKSSQWYPHSTSALNALKGMGPFCIRHIASMQGAYIAGVSSPMVLRLEWTTFLGGPTARQHARSVAPRQPHGTGGRPATGSDVGPSYTCAVLTDPMAMRHVQRCNTYINSYISEICLCLVILLCVHGTSTSHYYCR

SEQ ID NO: 1015496 - protein, 98 aa, Homo sapiens
  misc_feature (14)..(14): Xaa can be any naturally occurring amino acid
  misc_feature (28)..(28): Xaa can be any naturally occurring amino acid
QYVSTKESWMADYXKDDKDIESAKSEDXMGSSVDPPCFGQTEVKTPKRRQPFVPFALRNHTGCTLWFATLTTTPTRAALSHSGSPGGSSRREREHFLR

SEQ ID NO: 1015497 - protein, 74 aa, Homo sapiens
  misc_feature (8)..(8): Xaa can be any naturally occurring amino acid
  misc_feature (27)..(27): Xaa can be any naturally occurring amino acid
  misc_feature (61)..(61): Xaa can be any naturally occurring amino acid
  misc_feature (64)..(64): Xaa can be any naturally occurring amino acid
  misc_feature (74)..(74): Xaa can be any naturally occurring amino acid
LLSPALSXQAQSSEDGGSVQALYVAGXSAWLQHYTCSSLGCRFPPTIPCTMRQSLDFSSEXRCXKVIEDQTLKX

SEQ ID NO: 1015498 - protein, 68 aa, Homo sapiens
  misc_feature (10)..(10): Xaa can be any naturally occurring amino acid
  misc_feature (32)..(32): Xaa can be any naturally occurring amino acid
  misc_feature (37)..(37): Xaa can be any naturally occurring amino acid
  misc_feature (52)..(52): Xaa can be any naturally occurring amino acid
  misc_feature (54)..(54): Xaa can be any naturally occurring amino acid
RPDGQLLLRXAARTLEKVGDRRSCNDCQQMIXKLGGXTALPPPDHQAQPTRXTXSRFLSLPLSIFPLR

SEQ ID NO: 1015499 - protein, 137 aa, Homo sapiens
  misc_feature (96)..(96): Xaa can be any naturally occurring amino acid
  misc_feature (135)..(135): Xaa can be any naturally occurring amino acid
VVVCVILICKMEILFTPLWVVVRVRIDCVHDSALYTQQKEKSGCYWLNLFDLYFHHHRPLFDVNLLCCEQTLKLGKPGGMGNHWIRHSYAQDVASXPKGTWNRNGLFKFTKPIQGNQDPAFLGLPFSMGLPKVPXGT

SEQ ID NO: 1015500 - protein, 111 aa, Homo sapiens
  misc_feature (20)..(20): Xaa can be any naturally occurring amino acid
  misc_feature (28)..(28): Xaa can be any naturally occurring amino acid
  misc_feature (40)..(40): Xaa can be any naturally occurring amino acid
  misc_feature (100)..(101): Xaa can be any naturally occurring amino acid
  misc_feature (110)..(110): Xaa can be any naturally occurring amino acid
PGSGRSEQARALLEREAEEXRRQLAALXRPSHSQLRPPGXRPVDPRRRTPRRRCLYLSFNPPQPSRGTDRLDLPVTTRSVHRNFEDRERKELGSPEERLXXSSDPDNGSXE

SEQ ID NO: 1015501 - protein, 274 aa, Homo sapiens
MEGAGGGGGGSLDGPGRGRPGAKRQSSALDLGSWIPGTFEEAPKESSNGLVESVPCIIMAQVGQSGPVLHPMVLGPHPHAGSRALAMLPAAGQRTASQGQPPRLHTCPELASVCLDTPPMALGLGTPRAALDTWGSRPARASGSAWGRGRGRGRVRPACLVELSRLPSCCMNLGSHTQLGGPSRPSLSLRHHSFWVGDVVRVIGDLDTVKRLQAGHGEWTDDMAPALGRVGKVVKVFGDGNLRVQSLVSGGPQPSCLVATGRGGCNLDVASAPG

SEQ ID NO: 1015502 - protein, 88 aa, Homo sapiens
  misc_feature (3)..(4): Xaa can be any naturally occurring amino acid
  misc_feature (43)..(43): Xaa can be any naturally occurring amino acid
  misc_feature (56)..(57): Xaa can be any naturally occurring amino acid
RKXXGEERAPLLALVPPPAKVLWKGRAGQTPQDGRDGLVGRRXSRGLGSHPAAAGXXVVFVWLLLSTWSTAPARAIQVTVSNPYHVVI

SEQ ID NO: 1015503 - protein, 101 aa, Homo sapiens
  misc_feature (2)..(2): Xaa can be any naturally occurring amino acid
  misc_feature (11)..(11): Xaa can be any naturally occurring amino acid
  misc_feature (15)..(15): Xaa can be any naturally occurring amino acid
KXETQGPKGAXAFSXSPHVGGKAPGPTALQGWGPLFPSGFPKYRIQAPGTVADACDPQHFGRPRLVESLSSGIQAQPGQHGKTPSLQNIPKKLAGHGGTRL

SEQ ID NO: 1015504 - protein, 45 aa, Homo sapiens
  misc_feature (16)..(16): Xaa can be any naturally occurring amino acid
  misc_feature (18)..(18): Xaa can be any naturally occurring amino acid
  misc_feature (44)..(44): Xaa can be any naturally occurring amino acid
MLEMVPEKRASAGEIXAXRCVEFLANSTNIDSELANVPSTLDLXG

SEQ ID NO: 1015505 - protein, 113 aa, Homo sapiens
  misc_feature (1)..(1): Xaa can be any naturally occurring amino acid
  misc_feature (52)..(52): Xaa can be any naturally occurring amino acid
  misc_feature (64)..(64): Xaa can be any naturally occurring amino acid
  misc_feature (67)..(67): Xaa can be any naturally occurring amino acid
  misc_feature (86)..(86): Xaa can be any naturally occurring amino acid
  misc_feature (104)..(104): Xaa can be any naturally occurring amino acid
  misc_feature (109)..(109): Xaa can be any naturally occurring amino acid
  misc_feature (112)..(112): Xaa can be any naturally occurring amino acid
XPQGPAAGTYAGYNNMYHYPGGGHSDIDLMGGTRAGCGACYATNQNAGQHRXSVGLDPVFLADXADXGTRAYPKRRPGRLLLSCGXCYVNQRLFRGYQGSLLDXQTIGXHYXI

SEQ ID NO: 1015506 - protein, 176 aa, Homo sapiens
  misc_feature (41)..(41): Xaa can be any naturally occurring amino acid
  misc_feature (93)..(93): Xaa can be any naturally occurring amino acid
  misc_feature (129)..(129): Xaa can be any naturally occurring amino acid
  misc_feature (141)..(141): Xaa can be any naturally occurring amino acid
  misc_feature (143)..(143): Xaa can be any naturally occurring amino acid
  misc_feature (145)..(145): Xaa can be any naturally occurring amino acid
  misc_feature (163)..(163): Xaa can be any naturally occurring amino acid
  misc_feature (171)..(171): Xaa can be any naturally occurring amino acid
FFGFGGCGGGGEGEGGNWGVRPWVGGGAEDLRRKSYKSATXLLREVVGVTLVQGLHQEPQSPWVPSLELSPGEEHVTDLLIQIIPEVVQDALXLPVGHPQVQGHGWPVETQTPSHTQQVALASESRSRXVPDERVTRRGKXPXVXPRNLEVSVGRKKCIKPWXPPPTPPCXPGNPW

SEQ ID NO: 1015507 - protein, 34 aa, Homo sapiens
  misc_feature (3)..(3): Xaa can be any naturally occurring amino acid
MSXNGAPGMQEESLQVSWVELHFSNNGNGGSVSS

SEQ ID NO: 1015508 - protein, 146 aa, Homo sapiens
  misc_feature (88)..(88): Xaa can be any naturally occurring amino acid
  misc_feature (97)..(97): Xaa can be any naturally occurring amino acid
  misc_feature (125)..(125): Xaa can be any naturally occurring amino acid
  misc_feature (142)..(142): Xaa can be any naturally occurring amino acid
FHHVGRAGFELLTSSNPPTSASQSAEITDMSHPCLAQRFVLLRKLQINKSLTLGISPNAIPPPLPRPHNRPRCVMFPFLCPSVLVVQXPPMSENMRXLVFCPCDSLLRNDGFPASSMSLQKDMEXIHFLWAGIGISMGVIWXPHFS

SEQ ID NO: 1015509 - protein, 140 aa, Homo sapiens
  misc_feature (106)..(106): Xaa can be any naturally occurring amino acid
  misc_feature (108)..(108): Xaa can be any naturally occurring amino acid
  misc_feature (121)..(121): Xaa can be any naturally occurring amino acid
  misc_feature (123)..(123): Xaa can be any naturally occurring amino acid
MPMLLPHPHQHFLKGLLRAPFRCYHFIFHSSTHLGSGIPCAQPFNSLGTENATLGCCCQMGLKRKIMVYKQPLKGPHRKGLSGLKEAKVCWGLNFYYLGFNSQGAXGXVLGQEGHYSLLGXPXYSRGKGGLARGGFFSGS

SEQ ID NO: 1015510 - protein, 223 aa, Homo sapiens
MVYPLSTRALKAGQGRDRWATRGFPLPALVFEKCELATCTPREPGVAGGDVCSSDSFNEDIAVFAKQVRAEKPLFFLKSRAGQFDDKAIQVLRFHLLELEKVHELCDNFCHRYISCLKGKMPIDLVIDERDGSSNSDHEELSGSSTNLADHNPSSWRDHDDATSTHSAGTPGPSSGGHASQSGENSSEQGDGLHNSVSSLGTVMFDNPDKDKKRQKKRGIFPK

SEQ ID NO: 1015511 - protein, 73 aa, Homo sapiens
  misc_feature (5)..(5): Xaa can be any naturally occurring amino acid
  misc_feature (14)..(16): Xaa can be any naturally occurring amino acid
  misc_feature (71)..(71): Xaa can be any naturally occurring amino acid
LILVXASGSLGPGXXXFAWVPAGAGREIHRPRLISSLLRGLSSPDRPSCVQWLLEESVGTVAWRLGSWPFXAK

SEQ ID NO: 1015512 - protein, 49 aa, Homo sapiens
  misc_feature (6)..(6): Xaa can be any naturally occurring amino acid
  misc_feature (14)..(14): Xaa can be any naturally occurring amino acid
  misc_feature (16)..(16): Xaa can be any naturally occurring amino acid
MNGYRXGRPERQVXLXRRTARRLARQPFEVAVLAEMDDRVDVIRITQPE

SEQ ID NO: 1015513 - protein, 156 aa, Homo sapiens
  misc_feature (1)..(1): Xaa can be any naturally occurring amino acid
  misc_feature (17)..(17): Xaa can be any naturally occurring amino acid
  misc_feature (51)..(51): Xaa can be any naturally occurring amino acid
  misc_feature (94)..(94): Xaa can be any naturally occurring amino acid
  misc_feature (99)..(99): Xaa can be any naturally occurring amino acid
  misc_feature (121)..(121): Xaa can be any naturally occurring amino acid
  misc_feature (130)..(130): Xaa can be any naturally occurring amino acid
  misc_feature (141)..(141): Xaa can be any naturally occurring amino acid
  misc_feature (154)..(154): Xaa can be any naturally occurring amino acid
XLQTLKDRSDHLILKLXHRTVLTDKSGRQWKLKSFQTRDNQGILYEAAPTXTLTCDSGPQKQKFSLKLDAKDGRFFNEQNFFQLGRKPLQVNKXKKLYXTPLLAIPTCMGFGVHQGKYRFXGVTQPGGGXLQSALGFSPKXVLSERFVLQVAFXLL

SEQ ID NO: 1015514 - protein, 74 aa, Homo sapiens
SVRFVIRVKPAREWQGINHWIANGWFLITRIAALHKPNIKRHIVSDQHRIPNPIAETWDDVTFWIGIGTHRIRN

SEQ ID NO: 1015515 - protein, 32 aa, Homo sapiens
MRVQTEMCATMFRQNEFMYYKMRELPEHQPMT

SEQ ID NO: 1015516 - protein, 62 aa, Homo sapiens
GSVKMRTKSDTVNSSKTVTIGKRPIKFWNQTKLDKVFWLHIFENIVIVHAAAFSLAMRAKAN

SEQ ID NO: 1015517 - protein, 64 aa, Homo sapiens
MTCYDPSVVTFTLFEECKQPPTVAVANTSASTTGRGPSVRRPIRIADTAINQTNRLRTPTFRQA

SEQ ID NO: 1015518 - protein, 57 aa, Homo sapiens
PPLAVPCILVNTMPVSIRMKSLKSLACCKRILTRSLLSKTKQGLQCGCILEFCVELI

SEQ ID NO: 1015519 - protein, 51 aa, Homo sapiens
PPEVDMSDLGISNMLDVNGLFTFIPYHTTCPSHNTLTMVPPNIGELEDLES

SEQ ID NO: 1015520 - protein, 50 aa, Homo sapiens
MGAKEETLYELAGYRDLIVTGMSPISRNYRGDMGTLARQNTCPSHPGHGM

SEQ ID NO: 1015521 - protein, 39 aa, Homo sapiens
MIDTVKKFSRFTWHHISDLPLGIPDPSRRSRLNLMNDWD

SEQ ID NO: 1015522 - protein, 103 aa, Homo sapiens
  misc_feature (3)..(3): Xaa can be any naturally occurring amino acid
  misc_feature (57)..(57): Xaa can be any naturally occurring amino acid
MSXRLTVLIDLRGPPTPWATDRYPEPGHTAGGEQQASKGSFICIYSHPPIDPTAALXPPPVRSVAAGDCHRSWNPMVNCACEEVRASFENLMPDLSLLPITSR

SEQ ID NO: 1015523 - protein, 157 aa, Homo sapiens
  misc_feature (7)..(7): Xaa can be any naturally occurring amino acid
  misc_feature (9)..(9): Xaa can be any naturally occurring amino acid
  misc_feature (25)..(26): Xaa can be any naturally occurring amino acid
  misc_feature (64)..(64): Xaa can be any naturally occurring amino acid
  misc_feature (92)..(92): Xaa can be any naturally occurring amino acid
  misc_feature (119)..(119): Xaa can be any naturally occurring amino acid
  misc_feature (127)..(127): Xaa can be any naturally occurring amino acid
  misc_feature (137)..(137): Xaa can be any naturally occurring amino acid
QKTGPRXRXSLGPGQGHAEVRPVKXXGSWSTIPGGTILHLTQQPLRGVTSLRFNQDQSCFCCAXETGVRIYNVEPLMEKGHLDHEQVGSMGXVEMLHRSNLLALVGGGSSPKFSEIFSXDLGTMPGXGNSKEKLVLXFTFHQASAFLLRIPFEQRSV

SEQ ID NO: 1015524 - protein, 78 aa, Homo sapiens
GNNMTKFTTQKVNELLWVNESFKVPDKLMSIMMNREQREQTFKAFQEVERYTSFDWFHEYFEDEQANEDNQTRFHTRS

SEQ ID NO: 1015525 - protein, 110 aa, Homo sapiens
MPKVTTADNNGDLCAKIVYFFQILRNFRNYGKVDALALSPANASPESFINTRLYLISVMIYLISLSSPLYQIFPQKLVRYMKLPPVYRQLTQLLSNFFGQVSHFLFDTIT

SEQ ID NO: 1015526 - protein, 34 aa, Homo sapiens
MGQVQQRVLNVFQDFKEELLSGLMPARRHSHVGS

SEQ ID NO: 1015527 - protein, 140 aa, Homo sapiens
  misc_feature (23)..(23): Xaa can be any naturally occurring amino acid
  misc_feature (26)..(26): Xaa can be any naturally occurring amino acid
  misc_feature (32)..(33): Xaa can be any naturally occurring amino acid
  misc_feature (134)..(134): Xaa can be any naturally occurring amino acid
LLFEPLYHVQNTLIPRFTQGKSXLTXGSARRXXTSCGLYDCDLYFLENYIKPPPVNHTTDRSSAAGPAGSSAPGLCATLRASRPGSWEEGDCVRKCGLYFNLTVAAEALPGSAATLAIQDGCALPEVERPCAPXLERTRD

SEQ ID NO: 1015528 - protein, 60 aa, Homo sapiens
  misc_feature (19)..(19): Xaa can be any naturally occurring amino acid
  misc_feature (39)..(39): Xaa can be any naturally occurring amino acid
LKSCNMKAWKSYSAVDVLXTLEHCGPGPSGAPEMTAGGXNAMTPSVLLRRGCSCACRPLP

SEQ ID NO: 1015529 - protein, 75 aa, Homo sapiens
  misc_feature (10)..(10): Xaa can be any naturally occurring amino acid
  misc_feature (41)..(41): Xaa can be any naturally occurring amino acid
  misc_feature (50)..(50): Xaa can be any naturally occurring amino acid
  misc_feature (55)..(55): Xaa can be any naturally occurring amino acid
KLGSPGPGRXAHILIPVPIPTLSPTLPQVQAGTTHRNERDXMAFPLQPVXGGERXPGEEPVAFGSEQGHEQHLVL

SEQ ID NO: 1015530 - protein, 106 aa, Homo sapiens
  misc_feature (31)..(31): Xaa can be any naturally occurring amino acid
  misc_feature (39)..(39): Xaa can be any naturally occurring amino acid
  misc_feature (52)..(52): Xaa can be any naturally occurring amino acid
  misc_feature (83)..(83): Xaa can be any naturally occurring amino acid
  misc_feature (92)..(92): Xaa can be any naturally occurring amino acid
KIESQKLNFKEKAQARWDPSIMWATYLQDSXGEDCYYYXARLLCVRVPLLGXEPAISEAALKAGAPTSASGLQWPTPPCSGGXLTKGRPRPXDSQIQGDKFETLQG

SEQ ID NO: 1015531 - protein, 111 aa, Homo sapiens
VTLYPSITITIKSNFLALYYSCLPPNNCLADAIISWLSSVTAKSLIIANKSASLCCNVMININEILANSNQINWIFFFEGVHITWDVEVKVVFLNLFKARNVRILVHVFPF

SEQ ID NO: 1015532 - protein, 97 aa, Homo sapiens
LSLAWRGPGWAAVSGGAPQDTHLLKVDSNLGDPGMSLHRGCQAQDPLSPPVPHSLESVPPTPLALGSGDAATSRPGSCMGLGSTCSLRFPQSAEALG

SEQ ID NO: 1015533 - protein, 163 aa, Homo sapiens
MRADACIRCSFQALVTTALTGASKGMQKPLLKYDDSELGPWLHGLARFGSCNKPQLGRSTARHANRGPYAWSLAGTLSSGTPSSLWNTHVSVLCQKMLCAVTVVSEEHDKRNQPARTAAGAWSTSYLRKMHFNQRISLLLNVERHAYVPRRPTLGAWKCCSGD

SEQ ID NO: 1015534 - protein, 33 aa, Homo sapiens
MIVRTISVGLTHGADALLKLVLSCNLTLPLDWY

SEQ ID NO: 1015535 - protein, 94 aa, Homo sapiens
NIKTVARRRNRPQWIRLPKEVYYEANAITYLQDLPSVKRAFIVADPGMVQFGFVGKVLSQLELRQEQVETSIYGSVQPDPTLSQAVELHVNGCF

SEQ ID NO: 1015536 - protein, 42 aa, Homo sapiens
LPALFLVLLVLGFEVQGTKQPQQDEMPSPTFLHPGEGISLPV

SEQ ID NO: 1015537 - protein, 85 aa, Homo sapiens
ALTRGLELTVLSAVAALHRLVVLVGETPLPMALSVAAAMGFTNKGWAVFSEEVWFIGQGQVWPITLTSSLAVLLSTEYTSSTRLS

SEQ ID NO: 1015538 - protein, 80 aa, Homo sapiens
VPSCPFKDLGLSFKSGLHGLVLPPPKAAQQVVIVGGQDHGAPVHQAVVRLQNQQEFRMCCSRSSNTSIRQSWKKLGLASL

SEQ ID NO: 1015539 - protein, 61 aa, Homo sapiens
MVAALCKVSSTVMISKMVSYIIIQTTHHCRINFKWDIKRSQQCLGFFPSVLLHHQKDNPKL

SEQ ID NO: 1015540 - protein, 109 aa, Homo sapiens
PLLDRSHPGLNLINLISMDNKLGPNIMIRFLLVYALTYTDAEDGQKRQISAGQALNMLDGEPNNETRANIMASYEKCGPVPDISPLMTLNHLAGFRLTDQKLMVTSHIL

SEQ ID NO: 1015541 - protein, 117 aa, Homo sapiens
VSCGDGGKPGFVRVRDGRRSGSSCVTGYRFPSPEISGVGQKSHPVTPSLVLVTDSRHWDSVPVICLGDSQMGRRWESEGLWSPEENLGLCDYETAPVDHLTSTSVVILIETFGVFSV

SEQ ID NO: 1015542 - protein, 70 aa, Homo sapiens
ITKANHILAEDAEVVAIANDELWHHAGRAGYAAKTVTTPGAGRKVGISGLGLPDAESLSWVLDLPPYYGG

SEQ ID NO: 1015543 - protein, 98 aa, Homo sapiens
MSFHGACRSTNTLQFSTLLDVHYLADKAGKSPIVEQRLQASVSVVVVIHLLIYLPSVGASFNITSTITRVFWINAALLVLRSKLALQSMLVLVPTTSR

SEQ ID NO: 1015544 - protein, 40 aa, Homo sapiens
  misc_feature (13)..(13): Xaa can be any naturally occurring amino acid
  misc_feature (37)..(37): Xaa can be any naturally occurring amino acid
WKNSRPRLGKRGXPMDDGFVSLDSPSYVLYRDRAEWXNID

SEQ ID NO: 1015545 - protein, 31 aa, Homo sapiens
AVLTESVLKEKSADASESEATDSDYEDALPK

SEQ ID NO: 1015546 - protein, 80 aa, Homo sapiens
  misc_feature (3)..(3): Xaa can be any naturally occurring amino acid
  misc_feature (42)..(42): Xaa can be any naturally occurring amino acid
  misc_feature (46)..(46): Xaa can be any naturally occurring amino acid
NTXMWVKPLAPALCGCVNVLKAERTEACMAAIVVVFRNSFLXWAWXLMPCNPSTLGGRGRSLEVQEFETNLANMVKPCLY

SEQ ID NO: 1015547 - protein, 305 aa, Homo sapiens
QEVPLGACTSGLPLFLRPSPLLPPGLRHGVPLGKLVARLFFESRPPPVWVSCGQPLCWTLYRWIRLRCFLAVSLRTGDGETAVSHARSSFRRAVTQLRSSTYACLAPLATPAVFSHMASPAPPGGLGSPPVATELPMCSPGLALSLSIYPAYLTAKRRVPTHGHAWVLPEKAPCLYGTRKTTCVPACVFVDLLPSSLEPLSEARLSHKSVVPTKVAILLLGHTNNAAGIPPLRNHPFSKRYSPAALNLAETLLLHEGHPLPANIDSHAFPSWTDYQMLDPADGPVGRVSMTESISFFSPNKNQNP

SEQ ID NO: 1015548 - protein, 114 aa, Homo sapiens
  misc_feature (8)..(8): Xaa can be any naturally occurring amino acid
  misc_feature (10)..(10): Xaa can be any naturally occurring amino acid
  misc_feature (88)..(88): Xaa can be any naturally occurring amino acid
  misc_feature (95)..(95): Xaa can be any naturally occurring amino acid
  misc_feature (110)..(110): Xaa can be any naturally occurring amino acid
  misc_feature (114)..(114): Xaa can be any naturally occurring amino acid
MGLWAQAXSXERTGASPVPWRLGLSALRKSLGRDLSLPAVRSPSAPRLVVTAALPPATPVMIAMEPRLRWHYYKPKRRGARSNKGKLXSILSSMXLGSLKYQLGHLSLVXRSAX

SEQ ID NO: 1015549 - protein, 39 aa, Homo sapiens
  misc_feature (36)..(36): Xaa can be any naturally occurring amino acid
GFDLNFHQASLQQVIPLLPLGPLGGSELKGLAQNTXGAF

SEQ ID NO: 1015550 - protein, 68 aa, Homo sapiens
HPFSWLTFILVPKPRKGIGSGWASLEDSLSLSPIIPYPANLPFPNLLKTLRISQNSPIVGHLIHHQSL

SEQ ID NO: 1015551 - protein, 128 aa, Homo sapiens
  misc_feature (17)..(19): Xaa can be any naturally occurring amino acid
  misc_feature (33)..(34): Xaa can be any naturally occurring amino acid
  misc_feature (87)..(87): Xaa can be any naturally occurring amino acid
  misc_feature (119)..(119): Xaa can be any naturally occurring amino acid
VVAHWRSRERSPAAVSXXXVARWMHLRPPSPWXXRPRPPSVVAGASPPDPSPPKTSSNVNLEWPQSQFPTPSEAPPSTSYSLHQGGXWEPSAWHFPQPSGSSAVGQSKFRGCHRGKDRXGSKSNSPPA

SEQ ID NO: 1015552 - protein, 57 aa, Homo sapiens
  misc_feature (51)..(51): Xaa can be any naturally occurring amino acid
NALNTYDMAAHTDVPRLTALTIAFTCSRVKPLVTPLRGTSWNPGGKLLPLXLPPPGR

SEQ ID NO: 1015553 - protein, 72 aa, Homo sapiens
  misc_feature (19)..(19): Xaa can be any naturally occurring amino acid
KVTPRNGDCQWPYWVLGDXGERSGCLHPTPDITVPDLGVANADSALSGHTISPGVTSTTTLHQGSVGFNLSY

SEQ ID NO: 1015554 - protein, 111 aa, Homo sapiens
  misc_feature (52)..(52): Xaa can be any naturally occurring amino acid
  misc_feature (97)..(97): Xaa can be any naturally occurring amino acid
RSYRVIGIRSNAEPRAEVAGDPLRDGIDVRVVLFRQPSSIDSTSLLAPASRXIDDRILVRRVADGRQHVGDLQVDRFVRDIVSRGSGLVVHVGVSGXGGNRIEAEGVGAPV

SEQ ID NO: 1015555 - protein, 108 aa, Homo sapiens
  misc_feature (5)..(6): Xaa can be any naturally occurring amino acid
  misc_feature (67)..(67): Xaa can be any naturally occurring amino acid
  misc_feature (70)..(70): Xaa can be any naturally occurring amino acid
  misc_feature (72)..(72): Xaa can be any naturally occurring amino acid
  misc_feature (77)..(77): Xaa can be any naturally occurring amino acid
MVPTXXGCSCQAVPAGSCRAALSPTSASFLCWSAAKVQRGLSQQGLGMFSAGPGACAHPVGFVEQHXGFXLXFFLWXSKWGCQGVGGETRGAGTRAFSGAFKGQRGFL

SEQ ID NO: 1015556 - protein, 128 aa, Homo sapiens
  misc_feature (6)..(6): Xaa can be any naturally occurring amino acid
  misc_feature (13)..(13): Xaa can be any naturally occurring amino acid
  misc_feature (53)..(53): Xaa can be any naturally occurring amino acid
  misc_feature (114)..(116): Xaa can be any naturally occurring amino acid
  misc_feature (118)..(118): Xaa can be any naturally occurring amino acid
GVATAXFNPPGNXPAAACLRKQKDVSGSNGTVHAAPTDASKSICGAFSSRGNXAPMLLPQFVGKQRRDDDERQHEEYSEYHLLEHDSLLAVAGTLAPILGSEPARVHFLTVRNXXXWXVPRGVRTYAG

SEQ ID NO: 1015557 - protein, 74 aa, Homo sapiens
  misc_feature (51)..(51): Xaa can be any naturally occurring amino acid
  misc_feature (54)..(54): Xaa can be any naturally occurring amino acid
  misc_feature (64)..(64): Xaa can be any naturally occurring amino acid
  misc_feature (68)..(68): Xaa can be any naturally occurring amino acid
KLLCDLPFQVIYRCPWGSPCCENHECRLLLEESFCITMCRGLLPEMLMCSXSLXISGRSDSGKXSSSXFFFLGS

SEQ ID NO: 1015558 - protein, 34 aa, Homo sapiens
KEPGGFSEGLCYLMVPPGARPVVSPGPALLAGGT

SEQ ID NO: 1015559 - protein, 88 aa, Homo sapiens
  misc_feature (10)..(10): Xaa can be any naturally occurring amino acid
  misc_feature (35)..(35): Xaa can be any naturally occurring amino acid
MADALTDAGXAPVTQGDAAGELCRMGACVHDAILXGGVTICVEAMSDAHLMPRRRQKNGTMTHLEFLFEELKSLFREHHKGFPVLNRL

SEQ ID NO: 1015560 - protein, 124 aa, Homo sapiens
ARGSACNPACSRSLQPSSRRRHERMPRHIAGIVRCEERNDRCHFVGGCQASGRCRFGKSQSRFVRCPDAAVMERRIDQPGAQRVDERPRLEPFRFDAVFRHPDSPRALLGDIRTDAFFEADGRP

SEQ ID NO: 1015561 - protein, 73 aa, Homo sapiens
  misc_feature (17)..(17): Xaa can be any naturally occurring amino acid
  misc_feature (57)..(57): Xaa can be any naturally occurring amino acid
  misc_feature (63)..(63): Xaa can be any naturally occurring amino acid
  misc_feature (70)..(70): Xaa can be any naturally occurring amino acid
MDELAGPGRPSLDFPSXPSLGSSDPQMQPHPTELPGPDLLTLRKLGSAERTLCPNDXYMWSAXEHCRGAXGTQ

SEQ ID NO: 1015562 - protein, 109 aa, Homo sapiens
  misc_feature (105)..(105): Xaa can be any naturally occurring amino acid
DTFEAPGEAGPNSGLCLGLALSSGPLRGRYLGELLLPAHSSFRFHSQPLLKVPGEVASVGVRKGIFLTPLPSAGRSMPGVSGPGQGRWGAFGDQKGEMLLPRAYXAVKT

SEQ ID NO: 1015563 - protein, 34 aa, Homo sapiens
GGSIKPMLVLASGDNQGIPIMSSIKLKEEQQITT

SEQ ID NO: 1015564 - protein, 98 aa, Homo sapiens
  misc_feature (2)..(2): Xaa can be any naturally occurring amino acid
  misc_feature (5)..(5): Xaa can be any naturally occurring amino acid
  misc_feature (13)..(13): Xaa can be any naturally occurring amino acid
  misc_feature (38)..(38): Xaa can be any naturally occurring amino acid
  misc_feature (92)..(92): Xaa can be any naturally occurring amino acid
  misc_feature (94)..(96): Xaa can be any naturally occurring amino acid
FXFGXGKYFGAGXLVLQVSENSASAPCDAKHPAVYGFXERELQRGGHQVAHAAFVVVESIAPPVCRLNSELVYSSPKVAAPHAYVPPAPQNXAXXXRP

SEQ ID NO: 1015565 - protein, 71 aa, Homo sapiens
WYPIKTLVETTVNLLTIQMMLLLQRHDGYQPVSQEYPKNEVFLFPRCPRHPYVTPEVVIEKVVPFPFSITK

SEQ ID NO: 1015566 - protein, 39 aa, Homo sapiens
  misc_feature (2)..(2): Xaa can be any naturally occurring amino acid
VXDLLRGLPRVSLANLKPNPGSKKPERRPRGRRRGRECG

SEQ ID NO: 1015567 - protein, 127 aa, Homo sapiens
  misc_feature (64)..(64): Xaa can be any naturally occurring amino acid
  misc_feature (66)..(66): Xaa can be any naturally occurring amino acid
  misc_feature (113)..(113): Xaa can be any naturally occurring amino acid
  misc_feature (120)..(120): Xaa can be any naturally occurring amino acid
  misc_feature (123)..(123): Xaa can be any naturally occurring amino acid
SDVGHGHRSPRLLILVQLKILSGYLLGSRPMGSMDVHFNPCSPISRPVRFLPSSTGPLRQRLGXWXCVSVLLVVIVCTVALTWAANLWVPTTSQSFAFSCSGHPKGSCGPPDXAGDGVLXLVXHQRF

SEQ ID NO: 1015568 - protein, 55 aa, Homo sapiens
MLLREYRQLQEQQSLLPSLSPQPSPLSSKKQPEDNGAPLLLPIKRLGMLGNKLHQ

SEQ ID NO: 1015569 - protein, 51 aa, Homo sapiens
  misc_feature (4)..(4): Xaa can be any naturally occurring amino acid
  misc_feature (23)..(23): Xaa can be any naturally occurring amino acid
  misc_feature (30)..(30): Xaa can be any naturally occurring amino acid
  misc_feature (44)..(44): Xaa can be any naturally occurring amino acid
MVPXVTSALGGGGSPGPRSSSCXSHSPPSXSAGVPPVPSGPPLXFWVMLVL

SEQ ID NO: 1015570 - protein, 101 aa, Homo sapiens
  misc_feature (8)..(8): Xaa can be any naturally occurring amino acid
SHLDTRLXFRNSWAPWLLPSPRPCITLFLHLALGPCLLHLLTQFLQGRVRAFTHGTVQDMMLLREYRQLQGTAVPTYPAFFPPTIRPYSSKKAARGTTGGP

SEQ ID NO: 1015571 - protein, 90 aa, Homo sapiens
  misc_feature (12)..(12): Xaa can be any naturally occurring amino acid
  misc_feature (20)..(20): Xaa can be any naturally occurring amino acid
  misc_feature (39)..(39): Xaa can be any naturally occurring amino acid
  misc_feature (90)..(90): Xaa can be any naturally occurring amino acid
FLKSPKPQNPYXKEASSVPXRSPKPKMGIVEGAPGLCWXSEGRDRDYSNPTRKQIASPRGDPESPKDLQPLDDAFSIPGLIPWDVGSGPX

SEQ ID NO: 1015572 - protein, 74 aa, Homo sapiens
LTNFKSDLFGLATEDGRCPIASEVPWTITEAELRVTLTVEGKSIPCLIDTGATHSTLPSFQGPVSLAPITVVGY

SEQ ID NO: 1015573 - protein, 38 aa, Homo sapiens
  misc_feature (6)..(6): Xaa can be any naturally occurring amino acid
  misc_feature (17)..(17): Xaa can be any naturally occurring amino acid
  misc_feature (29)..(29): Xaa can be any naturally occurring amino acid
SAGPKXPGAELEEESSXSRPCPLSSALGXPTAQSLHAP

SEQ ID NO: 1015574 - protein, 140 aa, Homo sapiens
  misc_feature (47)..(47): Xaa can be any naturally occurring amino acid
  misc_feature (53)..(53): Xaa can be any naturally occurring amino acid
  misc_feature (57)..(57): Xaa can be any naturally occurring amino acid
  misc_feature (59)..(59): Xaa can be any naturally occurring amino acid
  misc_feature (71)..(71): Xaa can be any naturally occurring amino acid
  misc_feature (109)..(109): Xaa can be any naturally occurring amino acid
  misc_feature (122)..(122): Xaa can be any naturally occurring amino acid
  misc_feature (138)..(138): Xaa can be any naturally occurring amino acid
  misc_feature (140)..(140): Xaa can be any naturally occurring amino acid
GLRTDNIRLNQKCGLLGRTHFFGTCKKKVDKTELLHRRLESLKSHHXSLTFSXRGHXAXRSGRPKPLSLLXQIDEKSLPNHFHPQDVLSCFILPSLLFKKACVHLGTGXLIFVFILQNVFRXPKSVAGGPNPGFRDFXSX

SEQ ID NO: 1015575 - protein, 54 aa, Homo sapiens
  misc_feature (25)..(25): Xaa can be any naturally occurring amino acid
MAAGQGGGGGICLRTSGSPPTDATXTTCPAGRELFDDPSYVNVQNLDKARQAVG

SEQ ID NO: 1015576 - protein, 31 aa, Homo sapiens
  misc_feature (20)..(20): Xaa can be any naturally occurring amino acid
DLIKKKFLRSLHVKHDQGMXAAFYDKLDDDG

SEQ ID NO: 1015577 - protein, 50 aa, Homo sapiens
  misc_feature (10)..(10): Xaa can be any naturally occurring amino acid
  misc_feature (46)..(46): Xaa can be any naturally occurring amino acid
MGAIKDKRGXKGKPVTVHQRAMGTAGGLGHPVTEFEAVRDLFTVRXVPSP

SEQ ID NO: 1015578 - protein, 73 aa, Homo sapiens
  misc_feature (7)..(7): Xaa can be any naturally occurring amino acid
  misc_feature (17)..(17): Xaa can be any naturally occurring amino acid
  misc_feature (19)..(19): Xaa can be any naturally occurring amino acid
  misc_feature (25)..(25): Xaa can be any naturally occurring amino acid
  misc_feature (40)..(40): Xaa can be any naturally occurring amino acid
IKGKRTXGPGDPWNTRXPXNPPRTXPTGPKNLSKNFKWNXPDTLHEIPDKEEKNSLLLDLNNQKHNVFHNFPI

SEQ ID NO: 1015579 - protein, 104 aa, Homo sapiens
  misc_feature (15)..(15): Xaa can be any naturally occurring amino acid
MESYMSFPQKVENTXPRSPSILPDSSVPFPIMPALTLRKTKPKEFLKSGLDVVVPCLVIPSTLGGPEQMDCLSLRSLRPSPGQHGKIPSLQKVQKLARHGSARL

SEQ ID NO: 1015580 - protein, 83 aa, Homo sapiens
QGLPLVPGSLSESASRPEARRLCQPVLLLGLCVLKAACLGLAKMPAGCLREEGGMLQWVPGGGRLRPWSTWLSNHYIAVQLAW

SEQ ID NO: 1015581 - protein, 131 aa, Homo sapiens
  misc_feature (109)..(109): Xaa can be any naturally occurring amino acid
TVLLQMFGPCFFNLLVKFVYSQITTVPETMLAQGFQPILSTDTENEIVLPLGSLDQVSRDFYSSSARQGLTSINFRQGSSYGKTDLPPFWQPPLRLREGVSKFSGRGGXRVGRWGLQLWGSWGAQGTSGPK

SEQ ID NO: 1015582 - protein, 103 aa, Homo sapiens
  misc_feature (11)..(11): Xaa can be any naturally occurring amino acid
  misc_feature (16)..(16): Xaa can be any naturally occurring amino acid
  misc_feature (42)..(42): Xaa can be any naturally occurring amino acid
  misc_feature (80)..(80): Xaa can be any naturally occurring amino acid
  misc_feature (95)..(95): Xaa can be any naturally occurring amino acid
MNERCRKYRNXGNEYXPGPRLGRKRQAPPPSSPALASPLPLXQLQLMPPSRSASWFSCLPRAVCWVKGHPHHPRPISVWXSAVPLGCQSLAPLGXPTAAPSLC

SEQ ID NO: 1015583 - protein, 71 aa, Homo sapiens
  misc_feature (10)..(10): Xaa can be any naturally occurring amino acid
  misc_feature (18)..(18): Xaa can be any naturally occurring amino acid
  misc_feature (37)..(37): Xaa can be any naturally occurring amino acid
  misc_feature (40)..(41): Xaa can be any naturally occurring amino acid
GVAAQFALLXRTQVRPVXFWQPGAIFIERHGRSLRPXSAXXLLAPRLAFVSADRGPCLGLGTTLTECCCGM

SEQ ID NO: 1015584 - protein, 71 aa, Homo sapiens
  misc_feature (2)..(2): Xaa can be any naturally occurring amino acid
  misc_feature (5)..(5): Xaa can be any naturally occurring amino acid
  misc_feature (57)..(58): Xaa can be any naturally occurring amino acid
  misc_feature (70)..(70): Xaa can be any naturally occurring amino acid
LXARXPEREQAAREHVAADAVNVRHPECEDVVRAPCLILQGCQIFVVQTFTVTIFAXXVAALAAFFRRIXA

SEQ ID NO: 1015585 - protein, 97 aa, Homo sapiens
  misc_feature (24)..(24): Xaa can be any naturally occurring amino acid
  misc_feature (90)..(90): Xaa can be any naturally occurring amino acid
DHHRDHFRAVILDAAEVDADVAAXRAPHHVAGEDEHHDETAGPAKSMNFLIVSIPFQNTNACSTHSSMKPAHPTADSPREAVAVGHSHTXAIFGEEF

SEQ ID NO: 1015586 - protein, 34 aa, Homo sapiens
  misc_feature (20)..(20): Xaa can be any naturally occurring amino acid
RPQDFQVQSIELSWFQTVGXSALSVEPFSYQGEP

SEQ ID NO: 1015587 - protein, 40 aa, Homo sapiens
  misc_feature (6)..(6): Xaa can be any naturally occurring amino acid
  misc_feature (28)..(28): Xaa can be any naturally occurring amino acid
  misc_feature (35)..(35): Xaa can be any naturally occurring amino acid
MDAQGXKDVLLTAFAYRQGLQELITGNXDKALSSXHEAGS

SEQ ID NO: 1015588 - protein, 43 aa, Homo sapiens
GTRRSLKNLQLDYVDLYLIHFPGVCKASEEVIPKDENGKILFN

SEQ ID NO: 1015589 - protein, 59 aa, Homo sapiens
  misc_feature (52)..(52): Xaa can be any naturally occurring amino acid
AQVLMLLLLWVSGTCGDIVDPQNIQLVNANGSWHINRTALNCNEILNTGSAXFYVTVTV

SEQ ID NO: 1015590 - protein, 32 aa, Homo sapiens
  misc_feature (24)..(24): Xaa can be any naturally occurring amino acid
  misc_feature (26)..(26): Xaa can be any naturally occurring amino acid
MSPNCSRAAGVSCTCAGSCKCKEXNXLQEELL

SEQ ID NO: 1015591 - protein, 46 aa, Homo sapiens
  misc_feature (35)..(35): Xaa can be any naturally occurring amino acid
AERARQTPLPPLSPRPPAPRPFPTPSSASVPGAAXDHYDHEIRGVQ

SEQ ID NO: 1015592 - protein, 122 aa, Homo sapiens
  misc_feature (2)..(2): Xaa can be any naturally occurring amino acid
  misc_feature (67)..(67): Xaa can be any naturally occurring amino acid
  misc_feature (98)..(98): Xaa can be any naturally occurring amino acid
  misc_feature (103)..(104): Xaa can be any naturally occurring amino acid
  misc_feature (106)..(106): Xaa can be any naturally occurring amino acid
NXCSGGLFVGVDDCVAAQGVGACEHVVRHSEHALVGAERLDAELVIVVRRTERREDRQQMLVGRMHXTRVLLPAVVEQCIDVACASFASNQSVNSVTXGPHPXXRXEIGRAQVVRDLPEPIT

SEQ ID NO: 1015593 - protein, 105 aa, Homo sapiens
  misc_feature (7)..(7): Xaa can be any naturally occurring amino acid
  misc_feature (15)..(15): Xaa can be any naturally occurring amino acid
  misc_feature (18)..(18): Xaa can be any naturally occurring amino acid
  misc_feature (30)..(30): Xaa can be any naturally occurring amino acid
ACRREQXHGGQRAAXRDXPCPAMNRLAMLXLFCFGFWFLGQGFTVLPRLECSGATAHCDLDLLDSSDPPASASQVAGITGMSRHTRPSHLGFSVGRFLVLETSKA

SEQ ID NO: 1015594 - protein, 41 aa, Homo sapiens
  misc_feature (39)..(39): Xaa can be any naturally occurring amino acid
SPPCHHLKTPTPNTECHLCLPPRSTVRPVFDSTQLLNAXFP

SEQ ID NO: 1015595 - protein, 38 aa, Homo sapiens
  misc_feature (35)..(35): Xaa can be any naturally occurring amino acid
RLHNALTLCIRGEALHHLKAHGPKPTFPNASGSVXVEL

SEQ ID NO: 1015596 - protein, 32 aa, Homo sapiens
WKIELTHDIITKFLENEDRRSASLHLPKLSIT

SEQ ID NO: 1015597 - protein, 44 aa, Homo sapiens
  misc_feature (30)..(30): Xaa can be any naturally occurring amino acid
DKTNVKAAWGKVGAHAGSRCGALERMFLSXDHQDLLPHFDLSHG

SEQ ID NO: 1015598 - protein, 49 aa, Homo sapiens
  misc_feature (42)..(42): Xaa can be any naturally occurring amino acid
THISKGTLGKFSVPMLKEAWALYGLKSGLKKQELLEALTKHXQDCPEAA

SEQ ID NO: 1015599 - protein, 69 aa, Homo sapiens
  misc_feature (15)..(16): Xaa can be any naturally occurring amino acid
  misc_feature (26)..(26): Xaa can be any naturally occurring amino acid
DVTKFALYTWDSSQXXPFTSKGNFSXGKYSLEFRSMHNPPSSSFPGPSQPCCLLSIHGKYLFLKKKVID

SEQ ID NO: 1015600 - protein, 39 aa, Homo sapiens
  misc_feature (27)..(27): Xaa can be any naturally occurring amino acid
TPEKFYQKLLELEKHIRATIQKTDNSXQAHSLIPIIPPL

SEQ ID NO: 1015601 - protein, 37 aa, Homo sapiens
ETSPGQTPPRCLRGSYLLAALGENSSPGAKDIKKILD

SEQ ID NO: 1015602 - protein, 36 aa, Homo sapiens
  misc_feature (21)..(21): Xaa can be any naturally occurring amino acid
VLQTALSPLLCAALEEGSPPXCRANASGIRRPAWYQ

SEQ ID NO: 1015603 - protein, 36 aa, Homo sapiens
  misc_feature (24)..(24): Xaa can be any naturally occurring amino acid
  misc_feature (34)..(34): Xaa can be any naturally occurring amino acid
GSPGATAWGELKTSGDVEGSAGPXTGWPSGRWSXGM

SEQ ID NO: 1015604 - protein, 39 aa, Homo sapiens
  misc_feature (24)..(24): Xaa can be any naturally occurring amino acid
QIRRCTDDVRPQDCYHGAGEQYRXTSARPASPVPALVPE

SEQ ID NO: 1015605 - protein, 49 aa, Homo sapiens
DILAQGFGSLGLMSPSWSALMEDIEAEALMGTVTRHYREHQKGRPPAPT

SEQ ID NO: 1015606 - protein, 50 aa, Homo sapiens
  misc_feature (40)..(40): Xaa can be any naturally occurring amino acid
LLQLLRPAELTGAAHGSVGTQAVARRMDGDSRDGGGGKDXGSEDYRTCRL

SEQ ID NO: 1015607 - protein, 71 aa, Homo sapiens
  misc_feature (22)..(22): Xaa can be any naturally occurring amino acid
  misc_feature (29)..(29): Xaa can be any naturally occurring amino acid
REKNECPAKGEAPYKTIRSFKXSLTPEQXWGNQPHNSVITTDPSHDMWGLWELQFKKDLGGDTAKPYQGTN

SEQ ID NO: 1015608 - protein, 63 aa, Homo sapiens
LCCVLLTFGSVRADDEVDVDGTVEEDLWVKVEKDQGRMISSTERGEAIQLMIKSSQIRELREK

SEQ ID NO: 1015609 - protein, 92 aa, Homo sapiens
LLPGTLGPAGSSANPVPRPWPCQRGTPAHVGTGQGLSRSHLPTEAQECVDAEPSFRAPFLGPSLPASRSALAHPPYPGVSGLRLENIHFFLD

SEQ ID NO: 1015610 - protein, 57 aa, Homo sapiens
ISHPEGPEERELWATLGGASWGYWPRMSSAISPSSPLLGGLRAPFSEGTTVIQPSQY

SEQ ID NO: 1015611 - protein, 30 aa, Homo sapiens
MSGGANQQFFWMFLVMAPTQSYVRFRIKKL

SEQ ID NO: 1015612 - protein, 42 aa, Homo sapiens
MRGSTVLLQVLQVVYVQLVKFGVGTMDVCAIFLGAPLFKFMV

SEQ ID NO: 1015613 - protein, 80 aa, Homo sapiens
MFSSVTSAVVAKFKSAAYNTFGSPIPNDIAASALIASIPEVESSKPIVCSGGNDKISAARTKISGSGLPLAASLDSTIPT

SEQ ID NO: 1015614 - protein, 127 aa, Homo sapiens
  misc_feature (20)..(20): Xaa can be any naturally occurring amino acid
  misc_feature (30)..(30): Xaa can be any naturally occurring amino acid
  misc_feature (45)..(45): Xaa can be any naturally occurring amino acid
  misc_feature (48)..(48): Xaa can be any naturally occurring amino acid
  misc_feature (54)..(54): Xaa can be any naturally occurring amino acid
  misc_feature (59)..(59): Xaa can be any naturally occurring amino acid
  misc_feature (74)..(74): Xaa can be any naturally occurring amino acid
  misc_feature (77)..(77): Xaa can be any naturally occurring amino acid
  misc_feature (96)..(96): Xaa can be any naturally occurring amino acid
  misc_feature (122)..(122): Xaa can be any naturally occurring amino acid
IDETLGPCPKRKKPARRNPXLNFPKWKLPXLGLGKNPFPSVPFFXLYXFPSQPXLPGRXLDEAPSGGSHLLLPXLGXSFPVGLLGPLCLLCLGGEXAALSPRSCGRLRGREPWLEPPLLFPXGLGFS

SEQ ID NO: 1015615 - protein, 102 aa, Homo sapiens
  misc_feature (16)..(16): Xaa can be any naturally occurring amino acid
  misc_feature (18)..(18): Xaa can be any naturally occurring amino acid
  misc_feature (31)..(31): Xaa can be any naturally occurring amino acid
  misc_feature (43)..(43): Xaa can be any naturally occurring amino acid
  misc_feature (51)..(51): Xaa can be any naturally occurring amino acid
  misc_feature (66)..(66): Xaa can be any naturally occurring amino acid
  misc_feature (71)..(71): Xaa can be any naturally occurring amino acid
  misc_feature (85)..(85): Xaa can be any naturally occurring amino acid
  misc_feature (90)..(90): Xaa can be any naturally occurring amino acid
PGMKNRLGAIEKALRXNXFSLRPSPDPSFFXTPKKMTDYAQEXEGGSLGPXNYYSFASQQQKPEDXTIPSXELAKQVIEYARQLXMIVLXPPGTGWGRARVI

SEQ ID NO: 1015616 - protein, 117 aa, Homo sapiens
  misc_feature (6)..(6): Xaa can be any naturally occurring amino acid
  misc_feature (34)..(34): Xaa can be any naturally occurring amino acid
  misc_feature (100)..(100): Xaa can be any naturally occurring amino acid
LPIQDXQRNARHRLTRRRTPTQQHDERVERNLPXRAGRAPVRTAPSVRSRNRNAMPIGLMMPIRPVKPNRISEIRRLTIIGRSIGRGWAAARRRSRIVEXSAGPRRKLAAGPARRRS

SEQ ID NO: 1015617 - protein, 74 aa, Homo sapiens
  misc_feature (2)..(2): Xaa can be any naturally occurring amino acid
  misc_feature (11)..(11): Xaa can be any naturally occurring amino acid
  misc_feature (21)..(21): Xaa can be any naturally occurring amino acid
  misc_feature (45)..(46): Xaa can be any naturally occurring amino acid
  misc_feature (58)..(58): Xaa can be any naturally occurring amino acid
PXVLVSPARAXRWLAASPGAXFVAGRFVPDDVRRKIALRCRDKRXXTASRHCDATRAXPQGPSPINSPPTTAKK

SEQ ID NO: 1015618 - protein, 109 aa, Homo sapiens
  misc_feature (2)..(2): Xaa can be any naturally occurring amino acid
  misc_feature (22)..(22): Xaa can be any naturally occurring amino acid
  misc_feature (35)..(35): Xaa can be any naturally occurring amino acid
  misc_feature (53)..(53): Xaa can be any naturally occurring amino acid
  misc_feature (55)..(55): Xaa can be any naturally occurring amino acid
PXKKSPLKPSTKKNSPQKKTPXNGKNTPQSPPVWXGNKATIRGNISTRREIPXTXKWGNEACKLPPPNLGSVFTQPLVLNEIRQKCTHRIPIYIKFKTPAKIPSHAVAK

SEQ ID NO: 1015619 - protein, 30 aa, Homo sapiens
MADDAVQRGGPGWWLGWGTAVAYGGFNSGI

SEQ ID NO: 1015620 - protein, 37 aa, Homo sapiens
SLEIQKDTGEFVDLYMQRKYSISNLIIGTKDHSSIQM

SEQ ID NO: 1015621 - protein, 81 aa, Homo sapiens
VPLPAFSATAAAAFRSRFHRGKGIVSYVRYPELTLSTLCCCSKGDDLLLLALRIISYKITENAETYYCQDRDDYIKELVKA

SEQ ID NO: 1015622 - protein, 61 aa, Homo sapiens
RATSTFKGNFYSEKYPLDVYGDENPPFHLVYLDPLNLVLLSIREILIERTTKTRQFREERQ

SEQ ID NO: 1015623 - protein, 53 aa, Homo sapiens
  misc_feature (52)..(52): Xaa can be any naturally occurring amino acid
VAGSHLAAVQNYKVSVQRFEKWQQIESVSIFSSASGCGICRLLFLDLADIKXT

SEQ ID NO: 1015624 - protein, 66 aa, Homo sapiens
GEKGPRQSPARLVAMPRKIEEIKDFLLTARRKDAKSVKIKKNKGQVEVLKFDAADTFNPGIPDKER

SEQ ID NO: 1015625 - protein, 44 aa, Homo sapiens
AASQSAGLGLRRRRVARTQFGCWFQQGTRGYRVHNELSQILRVC

SEQ ID NO: 1015626 - protein, 37 aa, Homo sapiens
  misc_feature (36)..(36): Xaa can be any naturally occurring amino acid
MAPSGMNGLEAPLHKDWQRLATWFNSGRKIADVRPXK

SEQ ID NO: 1015627 - protein, 58 aa, Homo sapiens
KKNALYRRLSIVVLNQLCVLHEKTPVSDRVTNAAQNPCEQATIFQPGVDNILQELYEH

SEQ ID NO: 1015628 - protein, 30 aa, Homo sapiens
ERENMSSAGSGLPFASAGIWHGPDVANGST

SEQ ID NO: 1015629 - protein, 36 aa, Homo sapiens
  misc_feature (34)..(34): Xaa can be any naturally occurring amino acid
SYPLEQKEEPSTHIIQNLNGFMKDECLCKGKFFXPT

SEQ ID NO: 1015630 - protein, 32 aa, Homo sapiens
DNEEEEYFVAQGQQCPARRNGLEEATPQPCCQ

SEQ ID NO: 1015631 - protein, 72 aa, Homo sapiens
IESFQAQRPKEEYQTHIQHVENNKNADNDWFRLESNKEGTGGLENSGISMIYYYCPEISGPELDRQTAKMYR

SEQ ID NO: 1015632 - protein, 53 aa, Homo sapiens
FKDNFDEMDTSREIVQQLIDEYHAATRQTTSSGAPGSVWSPGQGPSSVLLVGP

SEQ ID NO: 1015633 - protein, 49 aa, Homo sapiens
MEGGRPGPYRRHQGTYMHLMPHPHQEGKCTRGGAGRNAARWQGTINFTV

SEQ ID NO: 1015634 - protein, 50 aa, Homo sapiens
ENLVKAPLMKHMRILHVNGFNGDSEKATKVQDIKYNLIEAIDTIVAAMST

SEQ ID NO: 1015635 - protein, 51 aa, Homo sapiens
MDSKNFDDYMKSLVWVYYQAGSQHDQAYHNHRKEWGILTLIAHSTFKTQRS

SEQ ID NO: 1015636 - protein, 58 aa, Homo sapiens
VAEDGRLTSRRLMGTYVANMLCRSVLEAGILYGQWPVRLDHGARVYVPASTCPYLVDC

SEQ ID NO: 1015637 - protein, 54 aa, Homo sapiens
RENRSPKTKILKMVYYPELFVLVSQEPFPNKDMERSFLREDFLSQKEVNRKMTM

SEQ ID NO: 1015638 - protein, 59 aa, Homo sapiens
VLGTALSLLIRAELGQPGDLLGDDHIYDVIVTAHAFVIVFFIVIPIIIGGFATDYSPNN

SEQ ID NO: 1015639 - protein, 54 aa, Homo sapiens
SKRKEEEEEEDDDDDSKEPKSSAQLLEDWGIGETLTTVLRGGLSTLTNYKAFSS

SEQ ID NO: 1015640 - protein, 61 aa, Homo sapiens
IHSIALTIARVPFIIPWYVHVINPCSTTHTSSSNQHTKSTYFKYTPLMHQSGGGRPRQCAI

SEQ ID NO: 1015641 - protein, 66 aa, Homo sapiens
LARTSTRKSSGQSNHQVAIAVHRAVTGPLLARARERTFELGLGSRAWPGSGNHLQCTCHECNDAGL

SEQ ID NO: 1015642 - protein, 83 aa, Homo sapiens
DCLNECCWIVCKSKVKPHDVSSLYLAIIKVFHLEQSLKYQTFSYSPLAVYETLARVGLRTFISSERFNITSVQVVIVLICRCT

SEQ ID NO: 1015643 - protein, 69 aa, Homo sapiens
SSKKKIFKGLIPYDQSGFVSAIPAGSFTTRKQAVGTLVGCQLKGPVPDSVNNKFLGMELVSLELAGAQA

SEQ ID NO: 1015644 - protein, 124 aa, Homo sapiens
MAILLPYSGAPQWISTWLARIFTATPEFAWLSTLLLIPPSLEKPLTINSNSPLATIMAVLLISPDVLVTVFSCSQPSANPSPLLHCFIGMPNPSVVPTRELWCSPPLYLSNPCLGSHGLSGPVP

SEQ ID NO: 1015645 - protein, 68 aa, Homo sapiens
PGPLEPPCSAGQLSPHKDLQLCGILEITSLSPPTEGLHAQGLQGELTQACGYSSELRHLEEPRVDVGE

SEQ ID NO: 1015646 - protein, 68 aa, Homo sapiens
IAASTGTSKYCRLRTRYSITHTSQTTTQLPVMMRYTFNRSGYTITASTHALIPMSLINITLIFYGLDH

SEQ ID NO: 1015647 - protein, 131 aa, Homo sapiens
QPNMVMSSIRTSGVVAKFEAQPDVDYRGDIHFFNHAIPNTFYSIGVTLAAGDANAWFKSVFGQDIPFAEWVNAAAESSVGANGLIFTLIFLVNDAYPDADIRGSFTGIDRPINAADFIRAVLEGIIFSFKG

SEQ ID NO: 1015648 - protein, 93 aa, Homo sapiens
ARAHDPGNEPQTMADGQRVGIAQCLSVPTEKETQQLPVSQGTSHNQRVQENGSTLSGQLCSKSSFQSPHSPLLQGLDEAGIAGQQQVQKAHAR

SEQ ID NO: 1015649 - protein, 57 aa, Homo sapiens
NPTWLGSTTVTHGQLDGSRHHAHRKCPPRNATTYESIMAYLEGQTVAGFQSEIQGQG

SEQ ID NO: 1015650 - protein, 86 aa, Homo sapiens
DPNVLIQQAYQTLVSINHPLVEYSATVAKVGNLSLGATVLIMHSDRDLSYKTRVFEVKYDLLNPEMTELSLGDTYQHSITAQIIII

SEQ ID NO: 1015651 - protein, 72 aa, Homo sapiens
NPKSPPNDLTLPVASFKTAVARVLIVSTTIFIDSPNVLDILIGFTHNTVIDAHCFKCGLVSYCDITHLFKQG

SEQ ID NO: 1015652 - protein, 106 aa, Homo sapiens
QQFCLYILGCVGCSLFDQTNVRCTVLLQRICKVYGPLSLPPPRDIPGSQQSRGPAPQEQQQSPELPLHGLLALFKVPLHELHEATETPESIHLVLNDVEDRGETTF

SEQ ID NO: 1015653 - protein, 63 aa, Homo sapiens
GQRWRSTLKPGDAPRFKKLKSRQKARSDPVACPTLSSTGCPTVGSPISLWITETSQEGHQGRQ

SEQ ID NO: 1015654 - protein, 54 aa, Homo sapiens
NRGEVARDDYDEPIISNYQFNFIQQSKSGDVGNDDNIVRILVDPAESERLQAGL

SEQ ID NO: 1015655 - protein, 95 aa, Homo sapiens
RQKIGFCLIQSMNQFWMSQIHGSFFGDSPESVARQIQIRVRRETGIYLSVGIGDSPVLAKIALDLEAKKAPILMATWHYEDVSQSFGQYLSHRHM

SEQ ID NO: 1015656 - protein, 64 aa, Homo sapiens
MRFVIRASLDDAAKTVGVDFIGGYSALVQKGFANGDLALIKSLPRGLTETMIYVISSRRILAHP

SEQ ID NO: 1015657 - protein, 64 aa, Homo sapiens
NTAVVLYGDHYGISNTDAKYLAPILGKDESQWSDLDNANLQRVPFMIHVPGMTDGYIDHTFGGK

SEQ ID NO: 1015658 - protein, 89 aa, Homo sapiens
SLDYTINWIFSDNDGRVQQLFHPQRAHNLVLTLNRKQLYLDWDTHLPLVKALLLQILSSIIDDCFDVVASHLRALGWLILLAYFQGNSG

SEQ ID NO: 1015659 - protein, 65 aa, Homo sapiens
GQKIFFRGLDNSLKITSIKASVGFLCRVFYEEAYELKSLDDFNTVEESIRGQLPAGGYYQTSIAF

SEQ ID NO: 1015660 - protein, 61 aa, Homo sapiens
EHVVRRGIGGSVTDDVDEPRPSEIGSVLGPISPSTRCRTRRDGSGEGRVVLFDWAVRDYTL

SEQ ID NO: 1015661 - protein, 106 aa, Homo sapiens
MRNPYPLWIMSRFIINFMNYADDDIHSDVSLDDPNTLIIEYALNVKYVSVPYSLREFVEVHKSNRSFDDLDENPEDFFVSGEPNCYDEGRSRNRTYMIIIGNPQSE

SEQ ID NO: 1015662 - protein, 116 aa, Homo sapiens
VKDATPAVPHSVDDGRTPAQHDSDSRLGPVGERHTAVNRRSKVVDAPIEEGLSHAAPAHGEAPEGVGQHLHSRRPPRPDQADIAYPPARQLAVGDAPPDPPVDAESFGQLDVTRRA

SEQ ID NO: 1015663 - protein, 170 aa, Homo sapiens
PGPWGSICPAAFAHALQSGTVPARSGRTMAGGAALALMIFGMMGVMVAALDGGFDLSDALAENENKKPTAIPKKPSDGDEFELGDDVVDEENEEKRKKKKKKKMKNENAKKDSSSGRFYDAEFEEEFKVEKEKEEVMVEEEKGKKGKRPTPQACIPGIVRARCEWLEVRM

SEQ ID NO: 1015664 - protein, 42 aa, Homo sapiens
  misc_feature (39)..(39): Xaa can be any naturally occurring amino acid
GGVSAIPGFRRRSTHRPPGAIGKKVHQAVQGARACRYAXPQR

SEQ ID NO: 1015665 - protein, 69 aa, Homo sapiens
  misc_feature (20)..(20): Xaa can be any naturally occurring amino acid
PPVSLKGQTSLKFKKRERGXPPKRSQFSPGAVASHPVIPNILGNPKVGRSRDQEIKTHSDPNIVKPHLY

SEQ ID NO: 1015666 - protein, 106 aa, Homo sapiens
  misc_feature (60)..(60): Xaa can be any naturally occurring amino acid
  misc_feature (90)..(90): Xaa can be any naturally occurring amino acid
  misc_feature (97)..(97): Xaa can be any naturally occurring amino acid
  misc_feature (99)..(99): Xaa can be any naturally occurring amino acid
MAWNPCQSLTTSSFDDVGVLQKKLVPFLTELNMHLAQGIREAERMILGKVEQLQAWLQAXLTCPHQRGDLGRYMGNVLNLQQRLGAPAKXFPSVKNXVXACFHFPP

SEQ ID NO: 1015667 - protein, 41 aa, Homo sapiens
  misc_feature (18)..(18): Xaa can be any naturally occurring amino acid
FLDQKACQSLMCFEYSFXGALLLLNYFEESFCFLKYQFSSS

SEQ ID NO: 1015668 - protein, 36 aa, Homo sapiens
LFDTPPFCSNSTNSFRNTVEGYSDPTESMTLLFESS

SEQ ID NO: 1015669 - protein, 32 aa, Homo sapiens
  misc_feature (12)..(12): Xaa can be any naturally occurring amino acid
  misc_feature (29)..(29): Xaa can be any naturally occurring amino acid
GILWYRGSASGXWNPYRRPFGFQHDELNXTGM

SEQ ID NO: 1015670 - protein, 33 aa, Homo sapiens
  misc_feature (30)..(30): Xaa can be any naturally occurring amino acid
SGRFFSLTESVCHSGWTAVLVATSACRVQXILV

SEQ ID NO: 1015671 - protein, 73 aa, Homo sapiens
  misc_feature (5)..(5): Xaa can be any naturally occurring amino acid
ALGHXLLHLLTQFLQGRVRAFTHGTVQDMMLLREYRQLQEQQSLLPSLSPQPSPLFSKKAARGTTGAPLLFTY

SEQ ID NO: 1015672 - protein, 32 aa, Homo sapiens
MNCLLLPKLVQCVDAFEEKRQHVISEIGRRGV

SEQ ID NO: 1015673 - protein, 78 aa, Homo sapiens
TWPCLLHLLTQFLQGRVRAFTHGTVQDMMLLREYRQLQEQQSLLPSLSPQPSPLFSKKQPEGQRAPLFLFTYLKGWEC

SEQ ID NO: 1015674 - protein, 47 aa, Homo sapiens
RKGLYAYSRPGHHPMTYNEGDSITKYPAISSPDPTYGALPFPTPTTH

SEQ ID NO: 1015675 - protein, 70 aa, Homo sapiens
VIYKRPTIRHHRRNGTLTQFNTQIDQTNGVVIKLVPDTQTGGVLDPKARAELVAAQTQTVDQQDMTPPDI

SEQ ID NO: 1015676 - protein, 57 aa, Homo sapiens
WRHSKRLRDGGIQKGHMTMHYRALALQVGARDDEIATLVTQLQAAEQVDAAVATDLL

SEQ ID NO: 1015677 - protein, 120 aa, Homo sapiens
KRNGTTTVGSKTREQRPLIQVTLMANPTTCIISSTGIHGKENIWLHEINCAMLPTQANFFLYISPIINVFGVVTSCRSSNAPNNVTNPKRLSQAFDITRCCLAVKTVVTSGTIKSPGRTP

SEQ ID NO: 1015678 - protein, 96 aa, Homo sapiens
DYVIFEAFICKVVRNYIVCKAGVDDHTRLPRTSGLARHTDNAEAMWSGLRTFCTLMMIGAWSIASHGDAGANALTLAAISSYSTPPSQHRLSRCHF

SEQ ID NO: 1015679 - protein, 72 aa, Homo sapiens
MQRIIRIESGDGKVSTGETESREERIQQFRKAGRDKRTNVGRFESRDERVTGMAGAVWPRRKSRERRFHRVE

SEQ ID NO: 1015680 - protein, 80 aa, Homo sapiens
LLPNGTLVHHINANYFLDHHLREAQRKSRAILFSFSSTSEDPSTATYMQFLYGGTPSVACPISSPRVPGRDLIKQTPRLR

SEQ ID NO: 1015681 - protein, 133 aa, Homo sapiens
VNGYYDHLWDWLADSVTADFATPTDLAAVRLYQSVDDALRYLATICRYENRGNHMPEYTMLADFIRVYMSSLKHMETMLSQPMREYGLSFEQWLIMAAIARENAVDINRNCGCRDVTKALLPPIKAVVGVGFV

SEQ ID NO: 1015682 - protein, 76 aa, Homo sapiens
EDTGSVLVLRECTSIADNRRSRRRNNHGHSNLRRIRKEGSYLLACSFKGGLRVHMLDNGLQVYKRKLLQDLNHFQA

SEQ ID NO: 1015683 - protein, 49 aa, Homo sapiens
DESEIKLVLLEAAPTIFNMLQDRRLADKALKYMTDNGVDLRLGAMVTGV

SEQ ID NO: 1015684 - protein, 49 aa, Homo sapiens
ILSEGRLVDSQGYGVAGVNYYTNSGRWVTGENGEFSFSWGETISFGIET

SEQ ID NO: 1015685 - protein, 56 aa, Homo sapiens
MSVFCPRLDIVFNVNLLNLSVRCDCLYWNITHSHNRLVVNFRVINHESVFRGRRTM

SEQ ID NO: 1015686 - protein, 86 aa, Homo sapiens
MQLYLIPPNVFQLFDDLTNRRLRVRSVNDLGFTKLPRFSSTFANNSLKSGTQNKSTRLRNTCNVLAKVPLRYPNHHAHSKFNMTLP

SEQ ID NO: 1015687 - protein, 80 aa, Homo sapiens
  misc_feature (16)..(16): Xaa can be any naturally occurring amino acid
  misc_feature (51)..(51): Xaa can be any naturally occurring amino acid
  misc_feature (77)..(77): Xaa can be any naturally occurring amino acid
TGIPLKKRSGELRRLXTGWGPIEAHVPSSLRAVRPRAQVLRPKWRLRTSQXYGELSDWSLPATAHNEPWFSISWKTXKTT

SEQ ID NO: 1015688 - protein, 89 aa, Homo sapiens
SGYQKSASSAMSTVGKVMMGAGAAITAVGVTGVKSFGDFQASLNQAAVIAGGTSKDINGLADVATKWVLTCLYALVLLQKVLVAMARDG

SEQ ID NO: 1015689 - protein, 119 aa, Homo sapiens
  misc_feature (6)..(6): Xaa can be any naturally occurring amino acid
  misc_feature (18)..(18): Xaa can be any naturally occurring amino acid
  misc_feature (29)..(29): Xaa can be any naturally occurring amino acid
  misc_feature (31)..(32): Xaa can be any naturally occurring amino acid
  misc_feature (40)..(40): Xaa can be any naturally occurring amino acid
  misc_feature (47)..(47): Xaa can be any naturally occurring amino acid
  misc_feature (54)..(55): Xaa can be any naturally occurring amino acid
  misc_feature (60)..(60): Xaa can be any naturally occurring amino acid
PGTLMXQDASTPYQPIIXPHTKVHGETNXIXXLGLFNTYXPPYSTLXAQLQCQXXFIVKXFKCTYVLIFPCSMLYFCVLYFCNFRSVLFLGNICSIINLLTFSYVFKKIRASSALNAKK

SEQ ID NO: 1015690 - protein, 67 aa, Homo sapiens
IIGDWAIHAGTADLTNPSASPPPQSAGSSAPAYSHDRVLSVHSFSPIRVAFQAWLVADRKRRSLPNA

SEQ ID NO: 1015691 - protein, 81 aa, Homo sapiens
IDTRDTFVVIKSQQATYYSTGSEAFLKRIKGRHLWFGMIYKARERYFYYYQTGHIGNMTYQIYIGLAEVIGMVLTVRPPYL

SEQ ID NO: 1015692 - protein, 80 aa, Homo sapiens
IPKEDHRATLGQFEMRGFPVLCDEVIHRQGVGHRFIYIGHEPLAMDYTGTPPISNYPICALSTKRKKIRQLVVQPLIIEV

SEQ ID NO: 1015693 - protein, 96 aa, Homo sapiens
EWALVDKVRGENCLEMWGATSCGLSGGRYLFGRDSFEIKLLVAGSYGGKPVFVKSASQGVGGVVLSNGNDLLRLPPCDRCNVFMKLCTHVAGFSSH

SEQ ID NO: 1015694 - protein, 103 aa, Homo sapiens
  misc_feature (8)..(8): Xaa can be any naturally occurring amino acid
  misc_feature (15)..(15): Xaa can be any naturally occurring amino acid
  misc_feature (75)..(75): Xaa can be any naturally occurring amino acid
  misc_feature (83)..(83): Xaa can be any naturally occurring amino acid
  misc_feature (87)..(87): Xaa can be any naturally occurring amino acid
WHIVSAIXSSFVCLXTGYQHFGRPRWADHLKPGDRDQPGQHGKTNSTKNTKISWAWWCMPVIPATWVVETQESFXPWKEEVAXEPRXVSLYSSLQQRERDFYL

SEQ ID NO: 1015695 - protein, 53 aa, Homo sapiens
  misc_feature (18)..(18): Xaa can be any naturally occurring amino acid
PTTGAKPFHCVDSCAKLXLGTQALTTVTPANRDSSRRRRPLITQVGIKYLNLV

SEQ ID NO: 1015696 - protein, 76 aa, Homo sapiens
  misc_feature (42)..(42): Xaa can be any naturally occurring amino acid
  misc_feature (66)..(66): Xaa can be any naturally occurring amino acid
  misc_feature (75)..(75): Xaa can be any naturally occurring amino acid
MVRPVWTGVDVGVTNHQIQRYWTCLVKRFNYAPSHVSAMAFXTRISELRYIALVTRAPDGLTDRCXIVRNLNANXF

SEQ ID NO: 1015697 - protein, 86 aa, Homo sapiens
  misc_feature (6)..(6): Xaa can be any naturally occurring amino acid
  misc_feature (17)..(17): Xaa can be any naturally occurring amino acid
  misc_feature (20)..(20): Xaa can be any naturally occurring amino acid
  misc_feature (41)..(41): Xaa can be any naturally occurring amino acid
KLKLSXRKWLNACPMAXKPXGLFGYKTKTSARNTIQTSCKXPRASKYDVITLADDLNPEGPTQDHGFAGQLSLGVGGHPGLTSLFI

SEQ ID NO: 1015698 - protein, 106 aa, Homo sapiens
  misc_feature (7)..(7): Xaa can be any naturally occurring amino acid
  misc_feature (28)..(29): Xaa can be any naturally occurring amino acid
  misc_feature (36)..(36): Xaa can be any naturally occurring amino acid
  misc_feature (62)..(62): Xaa can be any naturally occurring amino acid
  misc_feature (76)..(76): Xaa can be any naturally occurring amino acid
MGALTCXNWGLPINNWPQVPMPQVGPPXXGCAPPWXLPSLGTQGETPGLSQCLPGPSGWGAXKPCAPSFCFLALLXRDLTWGVSAILWQHIDSDEPTRPQPILRKR

SEQ ID NO: 1015699 - protein, 55 aa, Homo sapiens
AKMTHQQDLTKSLKKASQESNPGSLLILQYYSDNVLPNHGSRWWSALRRSTTMGF

SEQ ID NO: 1015700 - protein, 40 aa, Homo sapiens
NCSSDETSVSFFFVGLLRWVRALPSDGCGPAQAKSPPCAA

SEQ ID NO: 1015701 - protein, 102 aa, Homo sapiens
  misc_feature (4)..(4): Xaa can be any naturally occurring amino acid
  misc_feature (6)..(6): Xaa can be any naturally occurring amino acid
  misc_feature (55)..(55): Xaa can be any naturally occurring amino acid
  misc_feature (88)..(88): Xaa can be any naturally occurring amino acid
  misc_feature (91)..(91): Xaa can be any naturally occurring amino acid
LKEXFXLKFEGIREAFNPPCSAPSPYLAGREHWKDCGGANKSCGPGIQSGQESQXAVSQLSQGAEDIFLGTSISFSSSWAPLRGRGGXYLXGRRCAVKGPAD

SEQ ID NO: 1015702 - protein, 100 aa, Homo sapiens
YLGFIEFFFLIASLVKFIHGGYATLIIYAAILLVMVVWYYGNKRREAISKQDDYVSLKDYRKQLINLSKDDGGPIFARICLHCAYASKYMLKRSMIYSIL

SEQ ID NO: 1015703 - protein, 58 aa, Homo sapiens
THSDVTSASSHCDTQQDERELEATTIITANKWMPPTARFQFADYRSLSSSYRQLAIYL

SEQ ID NO: 1015704 - protein, 139 aa, Homo sapiens
ASASGKNLAIGPEIPSAVTFNQAKPFAPKRSIYCASCQYLYVVVRRTTRNGNRFDNSTTIFDRIRKDTKFRILDRFQTNPEVRREYANQAYPSKTRHRFFPSKCLNCISVKIITDDIMHHRLHHSFTKADFISRINDVL

SEQ ID NO: 1015705 - protein, 112 aa, Homo sapiens
  misc_feature (7)..(7): Xaa can be any naturally occurring amino acid
  misc_feature (107)..(108): Xaa can be any naturally occurring amino acid
INCGNYXKAVGGPTGNAKNKNNVLNAAELLRPACVNDVRVRLHGTSGKRKHSRIGSIRYRYASNAHDCGARQPAHPLPAHPLESSRPLPRPPRSVPADHRLDLNLFXXLDAV

SEQ ID NO: 1015706 - protein, 72 aa, Homo sapiens
  misc_feature (10)..(10): Xaa can be any naturally occurring amino acid
  misc_feature (18)..(18): Xaa can be any naturally occurring amino acid
PWKMKERERXRPCSSRAXSAAILTPDDDCNSPPLSDTYFNWYIRTVRMQAIRRVEGLAKTRGLGLNENPVLK

SEQ ID NO: 1015707 - protein, 120 aa, Homo sapiens
  misc_feature (95)..(95): Xaa can be any naturally occurring amino acid
  misc_feature (102)..(102): Xaa can be any naturally occurring amino acid
  misc_feature (115)..(115): Xaa can be any naturally occurring amino acid
AARLYLAPDRKTGSSGIWIDLAIVLLPLIRPLRLLRLVVLVGALQKALGKRIRGKVIIYTISGAVLLVYVGALAVYEAERGAPDGHITAFGLAVXLGDDHDXHRSVTATCIPVNXTGPSH

SEQ ID NO: 1015708 - protein, 81 aa, Homo sapiens
  misc_feature (63)..(63): Xaa can be any naturally occurring amino acid
  misc_feature (69)..(71): Xaa can be any naturally occurring amino acid
MARSRWSLSLHSCWIHLQKGCHFTLGRLHSGQAEALLTSQTGGGQAETLLTSQTGQPGRGAPXFLDRVXXXQRRSSPPRRW

SEQ ID NO: 1015709 - protein, 108 aa, Homo sapiens
  misc_feature (5)..(5): Xaa can be any naturally occurring amino acid
  misc_feature (7)..(7): Xaa can be any naturally occurring amino acid
RTQAXGXESQIFPLVGSFFQEKYSCHAGLSKESLQLCPNSQAVLVLVNSLGEDDFFSPSFTTADTGGAFPMGAWHGYTYRTTSLETLQGDLHPHREGAFPSAGFALRR

SEQ ID NO: 1015710 - protein, 125 aa, Homo sapiens
  misc_feature (120)..(120): Xaa can be any naturally occurring amino acid
  misc_feature (123)..(123): Xaa can be any naturally occurring amino acid
DAQHESGRSSSKSSHCDSPPRSQTPQDTNRASETDTHSIGEKNSSQSEEDDIERRKEVESILKKNSDWIWDWSSRPENIPPKEFLFKHPKAHGHPSGMREHGGVHGRKGGLISLARIFLXSFXPF

SEQ ID NO: 1015711 - protein, 56 aa, Homo sapiens
RGHALKVRSMDLLEGKEGPEFGQSSKAIRLLNVDRRVPETSVCSLVPPPPKSDRLE

SEQ ID NO: 1015712 - protein, 69 aa, Homo sapiens
CNTGLLRVARQQHMSNPVLDLLNNHRSIRAYTNEPVTDDIVTTILSAANAGPNMNNYQPVTFIELRTKH

SEQ ID NO: 1015713 - protein, 51 aa, Homo sapiens
AHLFLAKPEAALPQNVLGTSVAQSFTGTCGEGLIAADVLLCIKTYVCGDTY

SEQ ID NO: 1015714 - protein, 85 aa, Homo sapiens
VNAIDNADIVVALLDAKDQDTGTIWEMVYAYATHKPVVVLTVGDTFEYTINLMPAQGAIHHLGNNTLATIDFYGNNKRFYVGKQS

SEQ ID NO: 1015715 - protein, 109 aa, Homo sapiens
MQKKQQKTGFSVRSVVATGIGAAVFFVLMKFIAIPTGVPNTTINVAEGWLALIASLFGPVVGLLVGIIGHTLNDAVTYGAPWWSWVIADGVFGFLLGLSKSRLPWNMAH

SEQ ID NO: 1015716 - protein, 36 aa, Homo sapiens
MDIRLEEQEKKSTYDIAQAASLSWIDSLKFDDYNIH

SEQ ID NO: 1015717 - protein, 58 aa, Homo sapiens
NIKLSSTKSDVDATYAVSNIFSSRVHSREGKSSPPRGAQLFLGTAKDTHLTDTIVMAN

SEQ ID NO: 1015718 - protein, 50 aa, Homo sapiens
ADFGISAGQFVAVFWDEVIPSGGSERSRWISSSVNRNEGRVSVDNIKQLQ

SEQ ID NO: 1015719 - protein, 49 aa, Homo sapiens
VYRRHTRLAFPGCVYSLTLQKTQRPGSVRCWVLKKFDGGWVKEPGAKAK

SEQ ID NO: 1015720 - protein, 51 aa, Homo sapiens
YVRKEDMTYAVRKLDNTKCRDIMRAKLPTSRVKVDGPRSPSYGGTRYTKPL

SEQ ID NO: 1015721 - protein, 68 aa, Homo sapiens
TIIWSETGDKVPSKTVAAKKGNRLQIQSKAQESPKQRTVVEAVNSDSDSEFGIPKKTTTPKGKGRGQR

SEQ ID NO: 1015722 - protein, 122 aa, Homo sapiens
  misc_feature (2)..(2): Xaa can be any naturally occurring amino acid
  misc_feature (11)..(11): Xaa can be any naturally occurring amino acid
  misc_feature (21)..(21): Xaa can be any naturally occurring amino acid
  misc_feature (24)..(24): Xaa can be any naturally occurring amino acid
  misc_feature (70)..(70): Xaa can be any naturally occurring amino acid
  misc_feature (104)..(104): Xaa can be any naturally occurring amino acid
  misc_feature (110)..(110): Xaa can be any naturally occurring amino acid
SXKYGVALYHXAERDLKRLFXQVXPQNVVAAQIGYADDEASCDVIHNRSWLLESLSGFAVISRCPLLTAXVRSSRSHHFGKSCRPPCIIAAIRSTARSSISLGXKIEHNXSNWAIRDLTTGP

SEQ ID NO: 1015723 - protein, 51 aa, Homo sapiens
ADTLTGDVLEDARETRGGLAKKTIRESRVGGLTHLWIYEEKSRFGGKAIKV

SEQ ID NO: 1015724 - protein, 32 aa, Homo sapiens
  misc_feature (18)..(18): Xaa can be any naturally occurring amino acid
LRLVNQPVRLDVHAARRXDKDHHGLLTNTAPE

SEQ ID NO: 1015725 - protein, 71 aa, Homo sapiens
RVTSAQDKQLANFETLRNEVFDSIRAMIISVTDVLMCYTQDGPEQRIYLRLCDLRPQTDMNGLFHSDNLSV

SEQ ID NO: 1015726 - protein, 124 aa, Homo sapiens
  misc_feature (11)..(11): Xaa can be any naturally occurring amino acid
  misc_feature (13)..(13): Xaa can be any naturally occurring amino acid
  misc_feature (24)..(24): Xaa can be any naturally occurring amino acid
  misc_feature (39)..(39): Xaa can be any naturally occurring amino acid
  misc_feature (46)..(46): Xaa can be any naturally occurring amino acid
  misc_feature (55)..(55): Xaa can be any naturally occurring amino acid
  misc_feature (59)..(60): Xaa can be any naturally occurring amino acid
GRSCGEGVGAXAXSIPDSAVDSAXESGSRAPGTCPPQAXARRSLQXVGPGPGAGXWNLXXREGGGDRAQGTRGGSRDPDISGQASCRFRAQPPPFDTYFDDETMGGVLLFVPGRGTPGPTPNSK

SEQ ID NO: 1015727 - protein, 50 aa, Homo sapiens
IAKTIENSEELNGRLSDAWLILKLATCHHEFFEINSRLYIMPRQGLQTYQ

SEQ ID NO: 1015728 - protein, 49 aa, Homo sapiens
PVIQRVDLNDISPLGLATVIAYAYLEAHSLLVYNRKHYFCYYYIRSTTL

SEQ ID NO: 1015729 - protein, 53 aa, Homo sapiens
  misc_feature (6)..(6): Xaa can be any naturally occurring amino acid
  misc_feature (14)..(14): Xaa can be any naturally occurring amino acid
QGTAGXVRGLSPSXMHPPPGSGFSISTPPEGFCLPLPLRSQEAVLAGVAGTCH

SEQ ID NO: 1015730 - protein, 50 aa, Homo sapiens
SAGPETSSLPHQLWMDVRAYPMRLSRLWHTAVSQILAGLVELIVVSLRKV

SEQ ID NO: 1015731 - protein, 123 aa, Homo sapiens
  misc_feature (22)..(22): Xaa can be any naturally occurring amino acid
  misc_feature (38)..(38): Xaa can be any naturally occurring amino acid
  misc_feature (110)..(110): Xaa can be any naturally occurring amino acid
ALSNSFGFGGTNALLIFGPPPXRPDSRGVPDTPVRHLXISQGIRPDSHLHIRSLNVSLHAMRTTSFKSMECPTARALDCIGEFWDAPDPGGDCVNRGCYTLSDEFPGAVXGDLPPIRLNGADL

SEQ ID NO: 1015732 - protein, 49 aa, Homo sapiens
MRLVVLMALLAHARVMNPAERPGLRPGDPILGAVILRWGRGEQLSPGTR

SEQ ID NO: 1015733 - protein, 133 aa, Homo sapiens
  misc_feature (14)..(14): Xaa can be any naturally occurring amino acid
  misc_feature (61)..(62): Xaa can be any naturally occurring amino acid
  misc_feature (108)..(108): Xaa can be any naturally occurring amino acid
  misc_feature (125)..(125): Xaa can be any naturally occurring amino acid
KLKTPGRIRALLEXRRLTGTDPTRYKYRLSKMGIDLFPLLVVLFDWGSKYLVNDGVAVQQXXRESGRVLESVVVDRTDCGRFTVDRVLLKAGPVASAAVHERVEQVRXCAKVPRAADRSRTVGTXRNRPEYRP

SEQ ID NO: 1015734 - protein, 50 aa, Homo sapiens
QLGKILTKTGELPSSTTHPKETEEELTEQQEDFTGEGALTMPRKLPQRVS

SEQ ID NO: 1015735 - protein, 49 aa, Homo sapiens
SLTNYNGTVDSRAESIDKKIFRLVNELVKYKVHIKDERGPAKNMAKQKA

SEQ ID NO: 1015736 - protein, 49 aa, Homo sapiens
TSQNTPKEANQAIQVASTVPPGFHSYIAEATDLGRRLFLLPQLCPAFTL

SEQ ID NO: 1015737 - protein, 50 aa, Homo sapiens
  misc_feature (19)..(20): Xaa can be any naturally occurring amino acid
PRCNFLRSSRIRDNPTPAXXPMRRVRPERDKVVIPEVHRVKSVPFCMYPV

SEQ ID NO: 1015738 - protein, 49 aa, Homo sapiens
  misc_feature (33)..(33): Xaa can be any naturally occurring amino acid
AFRKAAKSRQREHRERTQPGFRKHLGLLEKKKXYKLRADDYRKKQEYLK

SEQ ID NO: 1015739 - protein, 50 aa, Homo sapiens
  misc_feature (43)..(43): Xaa can be any naturally occurring amino acid
RGGGKMEDHQQRYQIDIQTQQALRLDWRTEGMQPEMAELYEDXEKINDDI

SEQ ID NO: 1015740 - protein, 50 aa, Homo sapiens
KSVDAGEMNRGLGGAGSLADKRTAAAAAAAAGGPFADVLLSLNISPFEKA

SEQ ID NO: 1015741 - protein, 50 aa, Homo sapiens
SVGATLQKNRLRVTTKMPVRAHSAAVVPAFPRRATWFQNALGQRHCCKDF

SEQ ID NO: 1015742 - protein, 119 aa, Homo sapiens
  misc_feature (11)..(11): Xaa can be any naturally occurring amino acid
  misc_feature (23)..(23): Xaa can be any naturally occurring amino acid
  misc_feature (32)..(32): Xaa can be any naturally occurring amino acid
  misc_feature (69)..(69): Xaa can be any naturally occurring amino acid
  misc_feature (72)..(72): Xaa can be any naturally occurring amino acid
  misc_feature (89)..(89): Xaa can be any naturally occurring amino acid
  misc_feature (94)..(94): Xaa can be any naturally occurring amino acid
  misc_feature (119)..(119): Xaa can be any naturally occurring amino acid
PGMAGNCRPVXLVVQGPSSLWSXNWGAACPSXLPWSPKPLWAQGHQPGSVLTLLVAPSPGLSSDHPCLXPPXICMFHLTPGGWQVEVSXHVAPXARAEHLTLTVAGHWVSAPNKSNSNX

SEQ ID NO: 1015743 - protein, 50 aa, Homo sapiens
RPAQLHDDGTRFCHTATRPEVERKPKITASRKLKLKSLMLAKARNAGSRS

SEQ ID NO: 1015744 - protein, 58 aa, Homo sapiens
QLHRLLCEMHQRSWLLTLAGYAQTDWIRVETASTQEQHGPSMEKYEIDQMEMFVLEGS

SEQ ID NO: 1015745 - protein, 48 aa, Homo sapiens
MVRVSTNLCPGKDKANWPNCPGVINPGECKIGIMPGHIHKKVVLAICP

SEQ ID NO: 1015746 - protein, 53 aa, Homo sapiens
KFPCYWLQSNTTPKNGPGPTKPNTAGPDSTDLTIDGFQPQWSMWLVSMLRIQA

SEQ ID NO: 1015747 - protein, 53 aa, Homo sapiens
GRQYPSQSRNMAQAHQHQRVPAPDHICRLCLASLNPKKCYAPEKRVALKHLAN

SEQ ID NO: 1015748 - protein, 79 aa, Homo sapiens
  misc_feature (6)..(6): Xaa can be any naturally occurring amino acid
  misc_feature (15)..(15): Xaa can be any naturally occurring amino acid
  misc_feature (33)..(33): Xaa can be any naturally occurring amino acid
FSRLPXFLKAKVIQXKRTGKTKGTGFVSFKDPXDYVRAMREMNGKFVSRPIQTSQEHVEGPESDVVRKKQKEKKKLGLR

SEQ ID NO: 1015749 - protein, 113 aa, Homo sapiens
  misc_feature (23)..(23): Xaa can be any naturally occurring amino acid
  misc_feature (26)..(26): Xaa can be any naturally occurring amino acid
  misc_feature (61)..(61): Xaa can be any naturally occurring amino acid
  misc_feature (86)..(87): Xaa can be any naturally occurring amino acid
  misc_feature (110)..(110): Xaa can be any naturally occurring amino acid
TKAVAHVDEMPNALSALSDLHAXKLXVDPVNFKLLSHCLLVTLAAHLPAEFHPCGARLPGXVPGFCEHRADLQIPLSWSLGGHASXXLGLPPAPPPLPAPVPPWSLNKKXSGR

SEQ ID NO: 1015750 - protein, 64 aa, Homo sapiens
  misc_feature (26)..(26): Xaa can be any naturally occurring amino acid
YYPGPPNSGGQYGSGLTPGGGYGGSXLEVLWTPAVRAYGHPCWDVPSGLRRTIWRFTPGFLWSV

SEQ ID NO: 1015751 - protein, 70 aa, Homo sapiens
TLERQVAGQTRSRRHTRQSSEPRTAPGPTTAVFYMSVKFLDAVRTITDKWLVLGPSCDRSRHESIQELSM

SEQ ID NO: 1015752 - protein, 53 aa, Homo sapiens
MGIQGLANYLLMWPQCIRENDIRSYFGRKWAIDAIYEHLSVLIAVRRVGMCCR

SEQ ID NO: 1015753 - protein, 63 aa, Homo sapiens
  misc_feature (31)..(31): Xaa can be any naturally occurring amino acid
ELGRDTGRFDRQAASEACFYNSDYVAARGPXRQLQEQEEELLESLDVYELFLHFSSLHVLRAV

SEQ ID NO: 1015754 - protein, 57 aa, Homo sapiens
  misc_feature (20)..(21): Xaa can be any naturally occurring amino acid
ERPPTPAERRRDQDQGDRRXXRCSARLCMPSPPVESAESPGAESMLVPLARVSCLAY

SEQ ID NO: 1015755 - protein, 223 aa, Homo sapiens
MDPPRPLLLSILLLFLTEAALANAAQEPTENNPKICLLPLDYKPFLALLLRYYYHTYTQTFHHFLYLAFHPNPNNFYTSQAFHNASFTIQKLPKLSPLQLTLYHHSHPSTQNYFFNLTSITSQKFFSPPSHPNPIHNTFPHQPTSYRAFSPHQTKNSHAFFPTTPKTSTPLLALTKSSTPLIYFLIPTMKRTLIDLFSTLMTPARPTPMRQMNFSLTHTTDFA

SEQ ID NO: 1015756 - protein, 88 aa, Homo sapiens
  misc_feature (41)..(41): Xaa can be any naturally occurring amino acid
  misc_feature (44)..(44): Xaa can be any naturally occurring amino acid
  misc_feature (48)..(48): Xaa can be any naturally occurring amino acid
  misc_feature (50)..(50): Xaa can be any naturally occurring amino acid
  misc_feature (78)..(78): Xaa can be any naturally occurring amino acid
GSKKVLLLPERPPPLGMEVSLSWASGPFAPNVLPQDGLLLXGGXGGVXPXGHLQRKLLNSAAAPQNLYACTCPRIYSXAYLRISNFLP

SEQ ID NO: 1015757 - protein, 50 aa, Homo sapiens
CQERHVIRISQATGTAAVPLISTQISRCCDEQYRLARRDVRDESPRWLSS

SEQ ID NO: 1015758 - protein, 50 aa, Homo sapiens
HLPKLSLSAFTLCLDVIGGTSGHCYVVDFSLSIYGQLSPNCVTRMLTALK

SEQ ID NO: 1015759 - protein, 49 aa, Homo sapiens
RNHHGGWNPGHEPENWRAFKVSTLLSTVGLRSACLRTTPLPFRADQPIP

SEQ ID NO: 1015760 - protein, 76 aa, Homo sapiens
  misc_feature (50)..(50): Xaa can be any naturally occurring amino acid
PGVTQVDNKSGFLQKRPHPKAAARRHTALANGAQLLLLGSAGPSTWLYLXPCPHELPCTQLTNLACSFSQAYHPIP

SEQ ID NO: 1015761 - protein, 54 aa, Homo sapiens
ARDILFDTFMVQAEWGALTSSQLSGGVQHLLAETCPVELPPGQGGRDLTIRWED

SEQ ID NO: 1015762 - protein, 70 aa, Homo sapiens
RLGVAVAVLGGFLYAVGGSDGTSPLNTVERYNPQENRWPLQPYGPGETLGCQFIGLIYAVGGRVTLRASV

SEQ ID NO: 1015763 - protein, 50 aa, Homo sapiens
KNRAPSKMDPPPGMTLNEKSVQNPITQWMVDMEGPPGPIYEGEKFQLLFK

SEQ ID NO: 1015764 - protein, 63 aa, Homo sapiens
LASSIPRLPSGVRVHIFLQPETEPSAWKALCQHQAEGKTERAEKNLHLYLTWSLNLDMVFPEV

SEQ ID NO: 1015765 - protein, 52 aa, Homo sapiens
QKEKSTKSEGKHEGFYRELVDEKALKHITEIGFRMDASRQAFMENGIILDAA

SEQ ID NO: 1015766 - protein, 48 aa, Homo sapiens
MARYRLLYSERDIVAIMPFIANYMVTCPYDATVQSMHVSERSNEPTFG

SEQ ID NO: 1015767 - protein, 51 aa, Homo sapiens
IKELTTRRGGQKTSAAADLVDKLQLKVKAYSSQAEERRSKPTPPVQFPVQQ

SEQ ID NO: 1015768 - protein, 49 aa, Homo sapiens
RTTTFKDPRNGKPPVTKGGPQMAYERGLRGSFLTAFIGASLMHTESWKI

SEQ ID NO: 1015769 - protein, 54 aa, Homo sapiens
GEDRSVRKVCKSAETMLPKMYVVVKVKTRMRDKGKGKQEACYVGSRRSLLGCVE

SEQ ID NO: 1015770 - protein, 52 aa, Homo sapiens
SRISPGLESIRLEENLLYRLLKSVIVPPFSFVSSKFSKKACVDHILLVIVYL

SEQ ID NO: 1015771 - protein, 143 aa, Homo sapiens
  misc_feature (7)..(7): Xaa can be any naturally occurring amino acid
  misc_feature (12)..(12): Xaa can be any naturally occurring amino acid
  misc_feature (17)..(17): Xaa can be any naturally occurring amino acid
  misc_feature (22)..(22): Xaa can be any naturally occurring amino acid
  misc_feature (38)..(38): Xaa can be any naturally occurring amino acid
  misc_feature (52)..(52): Xaa can be any naturally occurring amino acid
  misc_feature (74)..(74): Xaa can be any naturally occurring amino acid
  misc_feature (79)..(79): Xaa can be any naturally occurring amino acid
  misc_feature (81)..(81): Xaa can be any naturally occurring amino acid
  misc_feature (139)..(139): Xaa can be any naturally occurring amino acid
AFRYGKXKMQEXPACRXFIVQXVRLKIHLAPCTCRRDXGNPGRGAWGLWRLXGGVDSSSEGRTRLGRRGGRCTXHASEXSXSPHESHQAGQSSSCPRSHRHERRVTRRIVLTAQAGCVAPWMGSWGGMGQGTGSQKINXLYWN

SEQ ID NO: 1015772 - protein, 77 aa, Homo sapiens
EEILYGLTRVFRREETEDVVTSDKEGKCDSYESSNSCSDSMKAGTDLLKIVGRTTQSKLEMASCVALLKLVADVAIR

SEQ ID NO: 1015773 - protein, 51 aa, Homo sapiens
MWLFIPMNGIMKDGKRVGIDCVQNGVQWTGGSGHRKEVSENRTQGLCVCVC

SEQ ID NO: 1015774 - protein, 48 aa, Homo sapiens
MVDIGHVDSGKSPLLAILIYKCGESTKEPLKIKKKEADWDGKGSSGLP

SEQ ID NO: 1015775 - protein, 50 aa, Homo sapiens
EYVVEITGDYTTMRRLGLICRGSKRVIISDTLLMPHVRMGVNEKVDTAQV

SEQ ID NO: 1015776 - protein, 56 aa, Homo sapiens
DIERINLHLSLSRLILGRIFSISYGQIVNFYVDEVSWYRYEILAPNRLSHHPGTLL

SEQ ID NO: 1015777 - protein, 51 aa, Homo sapiens
MCELLARYPGPWHLPRGCGRHWAAQWHVAVLVVGGQTWCRETQGLGLMGIK

SEQ ID NO: 1015778 - protein, 51 aa, Homo sapiens
TVLIPACVDRYVRTGEVRHLYEEEDASEGVRLGGPGGTKSGRVTGDGEIGE

SEQ ID NO: 1015779 - protein, 82 aa, Homo sapiens
EELTSRNKPENYSFFKLKKTFLNDEIYCPPETAVPLASHAVQAQVMEDYHKEITKAGTRQMMGPYPGCIGPPTTRTGEKTCL

SEQ ID NO: 1015780 - protein, 49 aa, Homo sapiens
ILYVHVVNVLCPVPAAFFSLLFHVALVLLVFCPCLLLTIQSFRALGFLS

SEQ ID NO: 1015781 - protein, 56 aa, Homo sapiens
SVTFVKVFTAAVKNEKVKNPHNHPPAVSSSALVHPLQAERKYKPGITIMVFISSVP

SEQ ID NO: 1015782 - protein, 49 aa, Homo sapiens
RLVPLLLVLMPPGASSLGTRGFWSGPTLLPPGTPGEGVSYGPVGGLSVF

SEQ ID NO: 1015783 - protein, 51 aa, Homo sapiens
DLMRDRQDLKFEEARDEGTQFRICNEAATVPDSQELAQTLHLMRHETIKLY

SEQ ID NO: 1015784 - protein, 49 aa, Homo sapiens
ARFSLGRVFCGGEPSRVSCAFRPPGGFAPCSPAAFCGRLVGLPAVALGH

SEQ ID NO: 1015785 - protein, 50 aa, Homo sapiens
PGLSWRTWERTSQPYSGQAGRRNPPGNHPPYHHYCSAPSFNNTYHLLITP

SEQ ID NO: 1015786 - protein, 61 aa, Homo sapiens
GKCSLESRGGDSAFQCIADSCLLLRYLSIPQGSFFGVSSRMLSSGPVPLGLLPLSDVKANR

SEQ ID NO: 1015787 - protein, 49 aa, Homo sapiens
TATTQAASGEPTPAEDSSHRDTGVSERDDTSLSRFPFVSLSCRMVYGGP

SEQ ID NO: 1015788 - protein, 51 aa, Homo sapiens
EHTDTASETRKETRQTDPERHTPARKPHEHIGNRNSAPRTNPGVPLRRGTR

SEQ ID NO: 1015789 - protein, 70 aa, Homo sapiens
MKSCEEYRRRSGRSANEEQEETTKRILSEAKTEEPGQKKIKKKRKPRRLKMPMEETNPSPVNLPLVHQYH

SEQ ID NO: 1015790 - protein, 48 aa, Homo sapiens
MSGCPGEDEQEMVSVKRPPRGALEEDQGEGFLSEMDNEPPVSEGDDGF

SEQ ID NO: 1015791 - protein, 50 aa, Homo sapiens
VEPAAPLFRLDCTATLSRHCRSLLPFTSPARTGIAVLSVVCFRVNSAYLH

SEQ ID NO: 1015792 - protein, 90 aa, Homo sapiens
FLLSASLWSPAILSFVHRPMIQIAALRSLEIVVPSARSIESGRSRSLSAPEGVAAESEVPRAWTLYRLPLKQLGLPASSSSQLLGAVTVE

SEQ ID NO: 1015793 - protein, 52 aa, Homo sapiens
SLRKRDWASGRVTQGEHAGGGISEPEGVNAPVGGLRVWVRGGSWGSQPVPVG

SEQ ID NO: 1015794 - protein, 50 aa, Homo sapiens
  misc_feature (8)..(8): Xaa can be any naturally occurring amino acid
PKSQNGEXKDSYQPCASLDTWIRASPPLLAICFCKCGGSDKKPLKNLGGG

SEQ ID NO: 1015795 - protein, 50 aa, Homo sapiens
FWSSAFALVQVSDRDQGENGVVPAPWWRRAFELKRASDTGVPDQEKVLLD

SEQ ID NO: 1015796 - protein, 50 aa, Homo sapiens
SASTYGKSIDLSTITLDQNVMNINHQGRDGHTGYTLLATTVTFDWYGQLD

SEQ ID NO: 1015797 - protein, 52 aa, Homo sapiens
RSTQQDIYAGSVQPILRHLLEGQNPLCLPMDPQELGRRTHCLAAQSNLGDPA

SEQ ID NO: 1015798 - protein, 59 aa, Homo sapiens
HRSQMSGSRSKPEPPKAPPRPSMSTDMFEPSPDSGDHDERPLIDQNPDGSLTRRTARLA

SEQ ID NO: 1015799 - protein, 62 aa, Homo sapiens
LKPMEGKTLHMSSWTRDSAVTTTGHLIYKCGGFDKELENFRRRLLSWERAPPSLPGSGKPKA

SEQ ID NO: 1015800 - protein, 103 aa, Homo sapiens
CWWQVKKGNLKLKSPEGEAPCAEPCPCQRNWRYSRSTMYSERPCTGGRYPAVKSQVEKKKEEKVLSNCYKPVGGNKNGVPGVNFRNCLVFSPEVSLEAVGPEN

SEQ ID NO: 1015801 - protein, 101 aa, Homo sapiens
  misc_feature (12)..(12): Xaa can be any naturally occurring amino acid
ALCCPGLECNGXISARYSLCLLGSGNSPASASRVAGITSVHHHVQLVFVFLVEIGFCPIGQAGLELLTSSDPPASAFQSAVIIDMSHCAWSWMRFKWEDLE

SEQ ID NO: 1015802 - protein, 56 aa, Homo sapiens
RGPPMSEGPSWGYLAPRPTGETLFDPVFLNSDLTSGTLHLGIVHRGGIRSGLPRYT

SEQ ID NO: 1015803 - protein, 49 aa, Homo sapiens
MTARQLHSTPGKVRIEITEFDHFGYLITGTTLTSVSDFWPHAPSDLHLE

SEQ ID NO: 1015804 - protein, 48 aa, Homo sapiens
MGVLQHSRSPVADHHLPMSSEQDRYDVTESHLDPLLPPPKFHHDRGSD

SEQ ID NO: 1015805 - protein, 50 aa, Homo sapiens
LLVNESRHGVDTGVRELDSYTWLNVHLFGANTVYGGLAVRAWMSERGPSP

SEQ ID NO: 1015806 - protein, 56 aa, Homo sapiens
AYLDDCHRGLAVPLPPHLANHTPLLQVIRAVRGYSLFTRGKLDAGRKGRSSHLSFF

SEQ ID NO: 1015807 - protein, 135 aa, Homo sapiens
  misc_feature (2)..(2): Xaa can be any naturally occurring amino acid
  misc_feature (5)..(5): Xaa can be any naturally occurring amino acid
  misc_feature (13)..(13): Xaa can be any naturally occurring amino acid
  misc_feature (18)..(18): Xaa can be any naturally occurring amino acid
  misc_feature (110)..(111): Xaa can be any naturally occurring amino acid
LXCTXPRYFQNGXVALLXQNQKMCIPNRKMKPLPYDLLPSGFFPYSRLSSPHDVERVNLLINPLPVKTANRIALVEVRIKKVTGRLLIRSPVCRGVPERDSSPRLLPTKXXSPWCLTPPSVCECVRERLDVVKRF

SEQ ID NO: 1015808 - protein, 536 aa, Homo sapiens
RVGLTVVVRCVVARGLGWARLRSTSPLRCRLLTRRLSVSRGLAGGALSLEPGPSVVWRCCVLLSLFGTSSAVVYGMVSLALSSLLFASFCRPAGYVVDLPLASVSEFAPPPRSRCPVSSLRPPLGVRRPSMVGGACVASRSSLCLPPSRGVGSAPPSRVRRPVGGVALAWGVACLPRPAGRWAPPPAGVCVVGVLSCSLPRCLVRRLCLVVGRVSCALSRSLRVSLSRSPLPRLPPRPRALRRRCAVVEVMPPAALVGGSLVPRCPGSAGSLWSVLSPRSPPSLSSLALLALARAARALVCLRARPPRRSCCGASFSLSRLSWCFSCLSCCWCRGCVWWLVARRAWLAVASCCVVCVCVCFWVLFVCWLSECGASVRGARALALSSSAVGGVVGCCSSLSLRRRGARAPAWCVCGVCCVCVWRARRPRRGAVSRSRRVCVCVAAPARFVVVGRAARPPLLRSPLSLPPLVLPVLCWGRAPCASLLFLPPPRRCVVLSRSLPLARWGWLSPSSCCCCVLCVCCCCVKNNRIYKLRCK

SEQ ID NO: 1015809 - protein, 66 aa, Homo sapiens
QSAASSFASPAEPHRSDTMAKVKVGINRFCPIWRLVTKLSFNSCKIDIFSINYPFIYLNYKVYNSI

SEQ ID NO: 1015810 - protein, 107 aa, Homo sapiens
PLVVAESISKSLAKKSVSAKLDGAYVGMHDVIPASGDFQLITTADDEALDLLRAFCLTLIGTSLKRLPKFANMHFGVGPFIENSFYYDTDNGAGNQVTGEDFAEIEP

SEQ ID NO: 1015811 - protein, 120 aa, Homo sapiens
KVRFYRQGAVMEEKVKDALVIYTKGGNDTLAVGEYPDDQEQKELFDEGILAPKAADKIIDLNPQIKRLQQLAGDDFSQMPRSEKEQVEFAVTATKLTLHVHQLVHKVCLGDSVVDQRTLN

SEQ ID NO: 1015812 - protein, 69 aa, Homo sapiens
SELLVVGDGNREPKNCSCRLRLLIPSHYAVSSISIHSEPAWLSTICKSAGLYLPEHGISQFHNSITKPF

SEQ ID NO: 1015813 - protein, 72 aa, Homo sapiens
MGVGTLMGMNPAIVAGIVLSGAIFGDKSSPLSESTNLASAFQGRIFLPHQKFDVALCRLGVTFIECDLSVGT

SEQ ID NO: 1015814 - protein, 51 aa, Homo sapiens
YYLDIRPLIRIHTSTLTPQFLQQGSVLILNSGSRSIISLKFLSHTDLNMLN

SEQ ID NO: 1015815 - protein, 142 aa, Homo sapiens
YNKALTPMTMRLTVTLLMKVNSKAMTIITPNFISGFMMRHLEKLVAGLQTLSGSQTNPLLRVIDGYIITTVWFCLVVMSAMTANSCACDALSKPAKGSSNNKTGVPVMSMSNTCSFFCCHQIIGNDVLNDMTQIKLYQDVIE

SEQ ID NO: 1015816 - protein, 49 aa, Homo sapiens
MKAKTVEPENQRRGVFCTIILHNLVTFETYLFIATYRTKLFIVLVLDPT

SEQ ID NO: 1015817 - protein, 51 aa, Homo sapiens
VKRHIRMIILTRQYLGYAIFQSLSQGDTHLIDIHVRKKNIQQKYTICDGNG

SEQ ID NO: 1015818 - protein, 69 aa, Homo sapiens
MTLASRSLLAACTAHVRRELSRWPEKCGAGLCCSRGGVSALGLLASGLCQTAYRGVGTRNVCSTISVQQ

SEQ ID NO: 1015819 - protein, 60 aa, Homo sapiens
PAGIIEKVQYLTGSAKEERGPLKCLNKHVEKLQNAMYQLSTVLMCGGADRGLIWMLSAEV

SEQ ID NO: 1015820 - protein, 136 aa, Homo sapiens
RQNLALSPRLECSGVIWAHCNLRLPSSSDSHASAFQVAGITGTHHHAWLIFVFLVEKGFCHVGQAGLEPLASSDLPASASKIVGITGMRYCAQPRIMFLIVQNQSLWETMLEMRVLSLETLIGSVFHSVRQVCGAF

SEQ ID NO: 1015821 - protein, 71 aa, Homo sapiens
EPEMAFMHQEESLELQERYISFLISKVLERNEQELDILGRDKALLASYTELPYPRISYDYSEGLLQDTGFD

SEQ ID NO: 1015822 - protein, 69 aa, Homo sapiens
FKPSYPIIYQSFNLETLKTIRRLRQQLISQRYGYWGGYKVYWLKWRGVFDYVHVDMRILKHKPEIFLAL

SEQ ID NO: 1015823 - protein, 102 aa, Homo sapiens
SQIEDFEARIGWLPLLQAETDRRGTAGQRLGGHWPDAGCKADLHPRGGQNARGGHRCAVSCILRRGDLVETQGARPEASWRRRQHWVWGKRKARSSLARKET

SEQ ID NO: 1015824 - protein, 61 aa, Homo sapiens
EVNRVVRNPNLGCHLGNVFIVFRRGTNPVLIGVVPVLHKNPDNIVNPAALTTRRSRRIYAP

SEQ ID NO: 1015825 - protein, 77 aa, Homo sapiens
YDDSFTWPLIKFERVAHIHLANENNPFPPQLRQFSRTIDVRIWYIVRGLFDEQAWLLIAILKPEPHKLARDNNQMHK

SEQ ID NO: 1015826 - protein, 49 aa, Homo sapiens
ASTSALSIDKTLLTIVLPSECAIEPTLRCLKLGTPPSTARRHVLHSFKQ

SEQ ID NO: 1015827 - protein, 105 aa, Homo sapiens
  misc_feature (28)..(28): Xaa can be any naturally occurring amino acid
  misc_feature (43)..(43): Xaa can be any naturally occurring amino acid
  misc_feature (79)..(79): Xaa can be any naturally occurring amino acid
  misc_feature (83)..(83): Xaa can be any naturally occurring amino acid
  misc_feature (89)..(89): Xaa can be any naturally occurring amino acid
  misc_feature (92)..(92): Xaa can be any naturally occurring amino acid
  misc_feature (104)..(104): Xaa can be any naturally occurring amino acid
LTRPWLQATTPPPPAWTQGAGAGGSEPXVTVTVQCAFTVALRXEEEPTCPACGHCWAKPSLTRAQLGKLQVGQKAPGWXRLEXGTARIXGSXLEEGVGRGSFSXP

SEQ ID NO: 1015828 - protein, 125 aa, Homo sapiens
  misc_feature (13)..(13): Xaa can be any naturally occurring amino acid
LKACHPGVFPLPXIKTLVSHNPLIHNPRHSFPSDNNSFNQLPNKKILNLPITLEPPRSTFELSYLSGQKQCGSCMYLIDVSCLPKMYTIRLAQITLGTCSQALLRSLSRAIGHSDSAQNKSLQIL

SEQ ID NO: 1015829 - protein, 116 aa, Homo sapiens
  misc_feature (13)..(13): Xaa can be any naturally occurring amino acid
  misc_feature (29)..(29): Xaa can be any naturally occurring amino acid
  misc_feature (35)..(35): Xaa can be any naturally occurring amino acid
  misc_feature (57)..(57): Xaa can be any naturally occurring amino acid
  misc_feature (77)..(77): Xaa can be any naturally occurring amino acid
  misc_feature (79)..(79): Xaa can be any naturally occurring amino acid
  misc_feature (91)..(91): Xaa can be any naturally occurring amino acid
  misc_feature (115)..(115): Xaa can be any naturally occurring amino acid
QDSFTETPAPRRXLERRGRGGTGKAALSXGAGTFXFGPGLGHLGAPGPRQNRRRTEXIQRLVGAAGARKAGAACISXNXGALSPSPAAAFXGTSSPNGGLPGCWASWAMFFGHDXH

SEQ ID NO: 1015830 - protein, 155 aa, Homo sapiens
  misc_feature (18)..(18): Xaa can be any naturally occurring amino acid
  misc_feature (26)..(26): Xaa can be any naturally occurring amino acid
  misc_feature (31)..(31): Xaa can be any naturally occurring amino acid
  misc_feature (42)..(42): Xaa can be any naturally occurring amino acid
  misc_feature (54)..(54): Xaa can be any naturally occurring amino acid
  misc_feature (62)..(62): Xaa can be any naturally occurring amino acid
  misc_feature (66)..(66): Xaa can be any naturally occurring amino acid
  misc_feature (75)..(75): Xaa can be any naturally occurring amino acid
  misc_feature (83)..(84): Xaa can be any naturally occurring amino acid
  misc_feature (106)..(106): Xaa can be any naturally occurring amino acid
  misc_feature (112)..(112): Xaa can be any naturally occurring amino acid
  misc_feature (135)..(135): Xaa can be any naturally occurring amino acid
  misc_feature (150)..(150): Xaa can be any naturally occurring amino acid
ALPLGSARLAPGSFLKEXRQWGERSXKMNAXLWGGPLKMPQXFGGLKKWNPRCXGVGWGLQXSTQXPPDVKDRRXGLASPSPXXPLCLVVCWGAIAALPTVKALAXFPPSCXPRGQHPHLLQLTSRGYSLLPGPXPSRGYSVTMNKVIKXFLFQK

SEQ ID NO: 1015831 - protein, 51 aa, Homo sapiens
GSIEDLFGNDNDKLGTVAIPESRHFGRRRRADHFRSEFKTSLANLRNHFST

SEQ ID NO: 1015832 - protein, 113 aa, Homo sapiens
  misc_feature (112)..(112): Xaa can be any naturally occurring amino acid
PQVNAVFPESKADLILIVVAVEHALLALKFILAFAIPDKPRHIQMKLARLEFESLEALKQQQMKLVTEEPEGGTNGKAGRRRQPECPALPSCPVGQKACVCGHTCHGGQVGXP

SEQ ID NO: 1015833 - protein, 51 aa, Homo sapiens
ESTTTGHLIDELRCIDERTIGKFEKEATEIGKAPSSYLVWITEADCTVSID

SEQ ID NO: 1015834 - protein, 43 aa, Homo sapiens
MTRDEYNALPAWRQVNLEEAKACTEWEDAGGVSRLTSNNTLNR

SEQ ID NO: 1015835 - protein, 66 aa, Homo sapiens
RHGAKTTTTVVDRSHWLVALIQNVMLKRILLYIDHDKSEEWTTKKGNQGLQPVREFFQILFNGGFA

SEQ ID NO: 1015836 - protein, 50 aa, Homo sapiens
LHVLLRSWGDPMPPSLDGEGGRQTIEILDEHLERDRCSCQDDALVIIATT

SEQ ID NO: 1015837 - protein, 49 aa, Homo sapiens
MPAIAASAGLALTREARFLLPDRIWRCSLPSRLLSSDSRSSKVLLRTCS

SEQ ID NO: 1015838 - protein, 58 aa, Homo sapiens
SDLRKEFTEAMEAKQVAQQEAGSYRGHRIPALTLSDHHLPASEQSVLLQLTQGGPPCL

SEQ ID NO: 1015839 - protein, 55 aa, Homo sapiens
ANTKIGPRDSTQSFAGGNKKYRPLRLDVGNFYWGQECCTRKQGSSMFLQCIYNEL

SEQ ID NO: 1015840 - protein, 49 aa, Homo sapiens
CNLSCNSIFWGIIGILVPWFFPRGPTRKVIFTLVGNLYGLLHSLLAVAS

SEQ ID NO: 1015841 - protein, 58 aa, Homo sapiens
VDDLVELQGNYCRGVRDSRMTRHQGVCSDMYNTLRLAEHKAREIARCYLTAYPVIKDN

SEQ ID NO: 1015842 - protein, 60 aa, Homo sapiens
CSLEALALIEGFATCWKAPSREKSSRPSVWVSSLPGSSFRHVFDYVVHLPFWTQRKGRLL

SEQ ID NO: 1015843 - protein, 55 aa, Homo sapiens
LKLQTSCPAGIMEKVQYLTRKPKKSSTIECSTSEKPRSDYNFCLILICLLLICII

SEQ ID NO: 1015844 - protein, 50 aa, Homo sapiens
TDGYSQYRESMSWWWSLLIDHTMENTYHWKTDTSKKATEPRHPTTCPPSV

SEQ ID NO: 1015845 - protein, 50 aa, Homo sapiens
DEEGRRSHECIIDEDCGPSMYCQFNSYQYHLPAMPEKEDDSAPGTVSDCR

SEQ ID NO: 1015846 - protein, 49 aa, Homo sapiens
TIKRDNQLVSQKQMSDRRENDMSPSNNVVTIMSTTTETSKGAVLSDIEG

SEQ ID NO: 1015847 - protein, 49 aa, Homo sapiens
EEKRRSMRDDTMWQLYEWQRLQFYTNRAPSLDTDFESPNHGKYFDQTMT

SEQ ID NO: 1015848 - protein, 51 aa, Homo sapiens
TPTSRHWRPLQRYDLPEVDVSGPEHSVQGNSFILTTGLSCWADGTCVSLVS

SEQ ID NO: 1015849 - protein, 30 aa, Homo sapiens
MGDRLTWEATPRSILEGIATAIMNSDCLVF

SEQ ID NO: 1015850 - protein, 49 aa, Homo sapiens
QGDRGPCVSCRRTEEMTEVEEGVGVVAKIMTQPQRSEDMDSEEDGEDVF

SEQ ID NO: 1015851 - protein, 49 aa, Homo sapiens
LRWLQVGAGCANSNLLDMCEFSLLTQVLSTADGQLGSQQMAASHRDESS

SEQ ID NO: 1015852 - protein, 50 aa, Homo sapiens
QGIVEVKSFLDDPPAGHLTASWIQAGMTHIVGSRQADQVNKKKVVRLTME

SEQ ID NO: 1015853 - protein, 50 aa, Homo sapiens
MRLLTIVVKALFSKSLKQRKEPGLKAYQITAEQIRRRRDEYPTLTVTNYY

SEQ ID NO: 1015854 - protein, 54 aa, Homo sapiens
IWHLRQSLPRFRRPSLSLAFKVNCDFREDPDPEGNLGSGSNRTDDAIPGVLPVV

SEQ ID NO: 1015855 - protein, 52 aa, Homo sapiens
MLKVLSSSTLIPCQGWMDWQPQLTGSPLPFEMILDIFQPVELSGMLSDTKVQ

SEQ ID NO: 1015856 - protein, 50 aa, Homo sapiens
FDHPWKLLHSCNAKYQTYEPSVVGVMCWQHIDPLEVAQPQLLSTEWDCFI

SEQ ID NO: 1015857 - protein, 51 aa, Homo sapiens
LVVEGPGYWQPGWGLSEVVIDTMEEELMEGRNYHDHPNYNRSLLTTSPESG

SEQ ID NO: 1015858 - protein, 49 aa, Homo sapiens
CSMRIGYPKYGVSFMSTDILDIAEPSNKSRRSKYHLELRTIGKGIYHYK

SEQ ID NO: 1015859 - protein, 50 aa, Homo sapiens
KQYEHNIINYEDTDKLEGDHQLIQEALSWTQAHDYTMEHIRVCGAYCRHL

SEQ ID NO: 1015860 - protein, 102 aa, Homo sapiens
REFFSGGSARSFPPWHLRKQGESRGSNSNVYSMFEQTQIQEFKEAITIMDQNRDGYIDKNDLRDTFAALWKVNVKNEEIDELIREATGPINLAVYLTCLGRT

SEQ ID NO: 1015861 - protein, 57 aa, Homo sapiens
QGSIPEREPEIPAFDEAIAELDTLSEESYKDSTLNNAFLRDNLTLWTSDTQGDELKQ

SEQ ID NO: 1015862 - protein, 49 aa, Homo sapiens
GWVEEEIGEKVSKVTSQQFEAEATDEKDVVDKMKGLASSFKRGKNSSLK

SEQ ID NO: 1015863 - protein, 49 aa, Homo sapiens
NDWISMGGHMASLAVSNRPKPMLLIPSRCGHSIWGLHYGSVRKSINWRS

SEQ ID NO: 1015864 - protein, 52 aa, Homo sapiens
QWHNDCFDCKKYTHSLVGRRNLTERDDILCPDCGKDYWIQHREDTACDLTHG

SEQ ID NO: 1015865 - protein, 50 aa, Homo sapiens
RLKRLEPGRGRTSRPRSRDPLRADAWETLRCSPPPTVACHDHHEQLEPVQ

SEQ ID NO: 1015866 - protein, 49 aa, Homo sapiens
VDNGGVRRTGYRFGLFVVMYDMIRVYTGLAYCEDCVAHFPHVYPEIGHC

SEQ ID NO: 1015867 - protein, 50 aa, Homo sapiens
RKKRRQSNNKITVVGVGQVGMACAISILDSLWLMNLLLRSFGDKLKGKMM

SEQ ID NO: 1015868 - protein, 50 aa, Homo sapiens
EAETEETRQKKMKKKRSKEAEDAHEESNQARRQPLVLQIRMRESDLMHHR

SEQ ID NO: 1015869 - protein, 50 aa, Homo sapiens
ASRTGAQLVTHSNEYRLDKSEKLPNSGNHNMYHMNYGEGGDLITEYHIYT

SEQ ID NO: 1015870 - protein, 49 aa, Homo sapiens
MADASDRPWGGDDYYTPNTVRRAMARRATGYVCRLGPRHDELRLTYALY

SEQ ID NO: 1015871 - protein, 40 aa, Homo sapiens
MRGIDKDHENFRGALRWKALRYAGLDELKLTDGSHDILEL

SEQ ID NO: 1015872 - protein, 38 aa, Homo sapiens
MAQWGVIDLAAIAESGVERQVLLETSTQLRVHLPPADT

SEQ ID NO: 1015873 - protein, 66 aa, Homo sapiens
AGPGGAAVPKAKLATHGSPLHEQQVQVGEWTCLKQDLTAALQDIRAQYETIAAKNISKAEEWYKSK

SEQ ID NO: 1015874 - protein, 50 aa, Homo sapiens
MCHSDWKSGEYWIDPNQGCNLDAIKVYCTELVSLRVPHSAECGRENCTQQ

SEQ ID NO: 1015875 - protein, 50 aa, Homo sapiens
AQLQEQQVQVEMDMSKPDLTAALRDIRAQYEANRGYEHFLRLRGGQDEGV

SEQ ID NO: 1015876 - protein, 49 aa, Homo sapiens
YCCTGYWFDELFVPVTSAAENMKGVIVLNMTTENHWPRREPTQREHWHD

SEQ ID NO: 1015877 - protein, 51 aa, Homo sapiens
LSQDDPVLPEISRSQNENCSQRITTWYTVWSYSCPGGSKENFDDSQRNRRG

SEQ ID NO: 1015878 - protein, 52 aa, Homo sapiens
SLSRSGPSLQLQHNALAADMHCADATFRCTLKSHNGWVTQIATTRVTRHDLS

SEQ ID NO: 1015879 - protein, 51 aa, Homo sapiens
DHRTSIRIRHCLMRNHDTLSYTAYHHWRDYEPVELDVTRCDEPFRHWEVED

SEQ ID NO: 1015880 - protein, 50 aa, Homo sapiens
VESRVTELASAFRNCYTSSALQRYAADARKAKYIQYPIFYLRFAISRACP

SEQ ID NO: 1015881 - protein, 50 aa, Homo sapiens
VKPSGKYGLGYKQTLKLIRQGKAKSVILANNCPALRKSDIEHYAKEAKTG

SEQ ID NO: 1015882 - protein, 159 aa, Homo sapiens
  misc_feature (10)..(10): Xaa can be any naturally occurring amino acid
  misc_feature (84)..(84): Xaa can be any naturally occurring amino acid
  misc_feature (148)..(148): Xaa can be any naturally occurring amino acid
  misc_feature (150)..(150): Xaa can be any naturally occurring amino acid
  misc_feature (157)..(157): Xaa can be any naturally occurring amino acid
GGNRIKVQNXNPGSVKRKAPNDEEIRSGKPGNQNALNGPGSEFASPEFVECRMPSRPTMGKRRVAPLAITLNPVAHTSTSISYXATSVVNHRRRCDLGDALGHQVYVRQVIGLEDIRCASTALAAELILRRELLTGLRSLTWVRIHSXRXRFGATDXAV

SEQ ID NO: 1015883 - protein, 56 aa, Homo sapiens
LTLAVSYYVAKTIQLYSVISEQLGNIQHSNQLRIRRREGGVGYERNEEKLSTQGDA

SEQ ID NO: 1015884 - protein, 123 aa, Homo sapiens
  misc_feature (6)..(6): Xaa can be any naturally occurring amino acid
MVGRLXATRSWVSALPRRRILDDAVQVTPIPGIAPRVEPVHEWMHDAARALDDSPQHQVDDDYCAAVKGRLHARHASIVLSQGGTRKSGLGIDHTGGAEKTVSVPTSGAMDGMICTALAPVAD

SEQ ID NO: 1015885 - protein, 49 aa, Homo sapiens
LDAYMAQQIRIPMSEACPYSHERLLLSQHSVNKPEITAEKKSDVMLDGP

SEQ ID NO: 1015886 - protein, 67 aa, Homo sapiens
EKNPTIGNFPITNVELRGYLSDEVQAVHKNTTYDLITNIVHDGMPSEVRYRIHVASSWLQANGYELQ

SEQ ID NO: 1015887 - protein, 67 aa, Homo sapiens
QYVKEAKMERSLEPPHLHSSKPSIYHRTNVNPLKAFSTEENLSSSITKQPIHQRENIIPLLVTSNSD

SEQ ID NO: 1015888 - protein, 49 aa, Homo sapiens
SRQERTTMATHHKDLQHVARNEETYEVIVTLLTDYQTETNALDPGDEPR

SEQ ID NO: 1015889 - protein, 81 aa, Homo sapiens
  misc_feature (29)..(29): Xaa can be any naturally occurring amino acid
GRQHDVRRYRVVAVSLVGVLGDHQFGRLXASMTVCRLATVATGLVQMIHTALMSPVPSCRNISMVPGPTSVRMVPGSSSQC

SEQ ID NO: 1015890 - protein, 39 aa, Homo sapiens
  misc_feature (3)..(3): Xaa can be any naturally occurring amino acid
VAXGPQLGKPAVQGLGVRMKFSYARSPIPSTEYRTPLRS

SEQ ID NO: 1015891 - protein, 50 aa, Homo sapiens
SYFVMKRKNQIHSMGNLLKSALKKERRYQLRNHHCIKEGNGSDNGCNAQK

SEQ ID NO: 1015892 - protein, 54 aa, Homo sapiens
LSTNKLHTQHRVVGLTFVMRRTCPALIIPLKPRTACVCVSESHILLTHTAFADD

SEQ ID NO: 1015893 - protein, 110 aa, Homo sapiens
PFWRMKTGRDASGFMSHCIAILKICHTLTEKLVDMTLALGQDEDFTSVSYIIVVAKRISPRVDDVVKSMYLRWTQTPGRRDDCPAPVCQYLVLVTRNACHLSGGLDWIYQ

SEQ ID NO: 1015894 - protein, 105 aa, Homo sapiens
  misc_feature (97)..(97): Xaa can be any naturally occurring amino acid
GAGTCNPSYSEVEFAVSLDCTTALQPGQQSETLSQKKVTARLFFLRQGLALLPSLECGGMIIAPCTFNLLGSRDPPTSASPVAGTNFFFVVMGSRYXCPAWVSNF

SEQ ID NO: 1015895 - protein, 51 aa, Homo sapiens
ERDRAVNDYPSPATSLAFRWLKAAALIGLPGLRGLLGGLKVLSIGKEWVGD

SEQ ID NO: 1015896 - protein, 49 aa, Homo sapiens
STIDGVCVRLPVKGTYNNISGPFRDVCTLLGAQHSGRGWVQGSFSSPRV

SEQ ID NO: 1015897 - protein, 49 aa, Homo sapiens
GKQQYLQSIEEREKLDGLYECFSDPAVAPAAPATGGRRQISRALQFLCS

SEQ ID NO: 1015898 - protein, 39 aa, Homo sapiens
MRVTLAKEEEAYLKDVATDTAKRGGPEPLRHRIKYIDLD

SEQ ID NO: 1015899 - protein, 49 aa, Homo sapiens
KAKAKAARESSREAVQIDGLVVLENSHIIKKRDTDLKLYKECFGLVERR

SEQ ID NO: 1015900 - protein, 70 aa, Homo sapiens
  misc_feature (53)..(53): Xaa can be any naturally occurring amino acid
FHYHPRANECGSLGSWAKALGPPVLPRGDGNPQATAEGSSAVLGCPWREQGIXGDKCLVSFRGWVHRAPS

SEQ ID NO: 1015901 - protein, 51 aa, Homo sapiens
KIAHCTQPGNKGDSIAPLNNKKVPITGLPKTHYNLSKQSRPRGAFMFNKNP

SEQ ID NO: 1015902 - protein, 50 aa, Homo sapiens
VTCTAYGLIQKERVYDDVISRHVCQSAVNGRVRRFQRNETAATVDAKRVK

SEQ ID NO: 1015903 - protein, 55 aa, Homo sapiens
DPQSANHMNSSLLTIYGKGNADSVSNTPEVGAKRNHLFNTTNKIKTGYIPLKTLP

SEQ ID NO: 1015904 - protein, 52 aa, Homo sapiens
GWAWWCMPVVLAAWQYEVEPRSQRLHGAMITALYSRLGDKVRPCLTEKIIII

SEQ ID NO: 1015905 - protein, 50 aa, Homo sapiens
  misc_feature (20)..(21): Xaa can be any naturally occurring amino acid
AGTLYTFPENWRAFKALIAXXSSGAQVRVLSAPPTSIFGKPTAPLIFFRK

SEQ ID NO: 1015906 - protein, 56 aa, Homo sapiens
EQVSGAKSSSGLKRKMWRHIGIVGSSDRIALLPAVGIKYIGMRMSKRLVMLPPRLD

SEQ ID NO: 1015907 - protein, 80 aa, Homo sapiens
EKVRIAAKFITHAPPGNLMKYSMTVGYYLIMTIFSGEGQHMPLPSITWSSVTRVKIEGYVDQVLITERGDLVIADFRSKK

SEQ ID NO: 1015908 - protein, 52 aa, Homo sapiens
DQKARADGYAKKAALCKTEVLKASRAHPLEALPTRTLLLLLSTHSLKDVRTQ

SEQ ID NO: 1015909 - protein, 46 aa, Homo sapiens
PVPKEAAALLPSNSSGQTFLISQHFYRTDLCQNVMECSTYTCHRAT

SEQ ID NO: 1015910 - protein, 73 aa, Homo sapiens
DSLPSQPCNEVTPPMYVGNGSVAQDIPKLQSLGINTVLNAAEGRSFMHVNTNANFFKDSGITYLGIKANDTQR

SEQ ID NO: 1015911 - protein, 49 aa, Homo sapiens
SITYLVPARHGSFTQRKAQGYYHKPSGTKVNVGKLGGRRNPGEGYLGCL

SEQ ID NO: 1015912 - protein, 61 aa, Homo sapiens
THTLLGCKPAEALRTASSQEDGSLLREDYINLFSTSPLLRLPVKLRQVNRALATLARHLLN

SEQ ID NO: 1015913 - protein, 78 aa, Homo sapiens
PARYLRIAEEEDLHGRHCGSLVLNAIFETHRTSCHPLSSGAEPWPHNSTAHTLRHQGLPRFQKLQKQSPADLHRMSCG

SEQ ID NO: 1015914 - protein, 49 aa, Homo sapiens
VIREDNQTNQPAGGSKPSSRASGTTEWLQTISVSLFLNNARICIAEKSL

SEQ ID NO: 1015915 - protein, 52 aa, Homo sapiens
DRQPPQATRQLRASAHWHAETSRGKVGQLCRCPSVITPRPLSVAPERPYLKY

SEQ ID NO: 1015916 - protein, 58 aa, Homo sapiens
  misc_feature (44)..(44): Xaa can be any naturally occurring amino acid
SAAKAICDPVRTIWFGTPKEVFSVPRVLSLMANSLGVPDEYCSXLTLVVIQDKNSELV

SEQ ID NO: 1015917 - protein, 50 aa, Homo sapiens
RRLSPCRVYLCKHARTGWNEDEHRELRGKDKPCELVGRRSHRCSRHSTHP

SEQ ID NO: 1015918 - protein, 50 aa, Homo sapiens
EYDLTTRIALFGSSIYLSAFLNVLSCKGAYIMKKELLQGEIRTFFSRYQQ

SEQ ID NO: 1015919 - protein, 48 aa, Homo sapiens
MAAVSWGLLKGCTSLADLPHVLILFYTVETGRAPQRMKGVGIASALLS

SEQ ID NO: 1015920 - protein, 49 aa, Homo sapiens
LGIRFMQEHEASVAYSRSGKCTDRSHRSTTVHYCHTNVNMILEFTDERL

SEQ ID NO: 1015921 - protein, 58 aa, Homo sapiens
  misc_feature (21)..(22): Xaa can be any naturally occurring amino acid
YRLNAPQGFPTACTAPVVIGXXPNTPLDEALPIAAIQIAELLLSHRARRYDSADGVPS

SEQ ID NO: 1015922 - protein, 51 aa, Homo sapiens
GTTITTNMLLYSKGNNIIKWQPMDWDTQFASHISDKVLMSNRYKEHIHLIV

SEQ ID NO: 1015923 - protein, 50 aa, Homo sapiens
GRPFLSSGPGVKNTHIPEGLGTEEAWGDDTFGLLTIALLRRSVVHTGIPG

SEQ ID NO: 1015924 - protein, 49 aa, Homo sapiens
NGLSDGKWQLVLNVWEKVEADIPGHGRKYSSGSLRVTRDSWRSLQSQST

SEQ ID NO: 1015925 - protein, 56 aa, Homo sapiens
MDNEAAYSTSRIRVEIRRNKARLDPVGPLEGSIAGVDVAIAVSGSKRVLEEVSLWV

SEQ ID NO: 1015926 - protein, 49 aa, Homo sapiens
SVKDPKMAGRKLALITIDWVAFAEIIPPNQKAIASSLKSWKETLTSRLV

SEQ ID NO: 1015927 - protein, 56 aa, Homo sapiens
SGPWSRPAAFMSTLLINQPQYAWLLSWAPRVNEGVYNGAGSRVEVLRPIACYTSQQ

SEQ ID NO: 1015928 - protein, 54 aa, Homo sapiens
LTVDATAPCMMAGNLPFLQNQSRLTCSPPRDAVVQCRKRMSEQSHLGQPSFFKT

SEQ ID NO: 1015929 - protein, 57 aa, Homo sapiens
MLYKPQRHWNTIPMMRRMSWSPRHSSEASLCEPSWANQATFYVNDHIYDVDRHSPCI

SEQ ID NO: 1015930 - protein, 81 aa, Homo sapiens
QAADEEEEIVYCHKGYYTLMVINKTESSRKRFVEPYFKGDERETSLQNFSHIEVVRIIEERRKLLGHTCKDVNLLCRYASR

SEQ ID NO: 1015931 - protein, 58 aa, Homo sapiens
ESHVSAREPCWKFIQDLDNCSVMAVECESRRYCFQITTPMENLGIILQAESRKENEEW

SEQ ID NO: 1015932 - protein, 53 aa, Homo sapiens
PKSVKQPEDTHAAIVECPKVKPGTAFIQTQQLHAAIGDTFLRAHVPPWTFDSP

SEQ ID NO: 1015933 - protein, 51 aa, Homo sapiens
PGDPDEQQMYIFLVIGAKRTLTISQCSLADDAAYQCVVGLQKCSTELFMKE

SEQ ID NO: 1015934 - protein, 69 aa, Homo sapiens
  misc_feature (10)..(10): Xaa can be any naturally occurring amino acid
  misc_feature (21)..(21): Xaa can be any naturally occurring amino acid
  misc_feature (56)..(56): Xaa can be any naturally occurring amino acid
LPKFKYDLTXREIWPLEAQEXGTEGNPGDPKPTTLPRNPRMAYSCSKVSFLAPNPXKHWGRLLQFIFDE

SEQ ID NO: 1015935 - protein, 58 aa, Homo sapiens
PHEFIAADIGYCGGTLSGQPLGTRLEFRGFLTRGFPKLLGKLELAEIPEGYGPEHLGI

SEQ ID NO: 1015936 - protein, 54 aa, Homo sapiens
  misc_feature (15)..(15): Xaa can be any naturally occurring amino acid
DLCTTIHVGCKVGVXPDTYPSRVFPPQLFTQRASPVCEEFPYTKNQWLLTLAGN

SEQ ID NO: 1015937 - protein, 49 aa, Homo sapiens
  misc_feature (21)..(21): Xaa can be any naturally occurring amino acid
DLNFVKCRGVNLKSPFPKKWXTFSLEMLDGNLMKQPKCTQGEGTFPNFD

SEQ ID NO: 1015938 - protein, 47 aa, Homo sapiens
VGYQVGPGYPFGLFVGHVQNMIKGVTLGFRYMMRSVYAHCPINVAHP

SEQ ID NO: 1015939 - protein, 57 aa, Homo sapiens
  misc_feature (19)..(19): Xaa can be any naturally occurring amino acid
SGAQVRVLSAPPHFHFATXPALRVMMDLCVWIAYYESYEELREKYYRGSSQVVQWVS

SEQ ID NO: 1015940 - protein, 41 aa, Homo sapiens
MGTLGFTPRKRTSRHRGKVKSFPKDDPIQSRVHPHKPSLEY

SEQ ID NO: 1015941 - protein, 68 aa, Homo sapiens
  misc_feature (20)..(20): Xaa can be any naturally occurring amino acid
KLRYIEAIFQRLERLFYILXSDRDRGRTEGFVMRGSRTGLIWKEVWNPGEKLVKKRWNLDELPKFEKI

SEQ ID NO: 1015942 - protein, 54 aa, Homo sapiens
DLDLLHCSNQWHYSHLPTQDPAAQSLMIMNKMKNFKRRYYLSSDPHETIEESLA

SEQ ID NO: 1015943 - protein, 49 aa, Homo sapiens
IETSLEKEMTLSHLNTVITWHDIGQANPAGATYIASQQAFKASFQHAPS

SEQ ID NO: 1015944 - protein, 34 aa, Homo sapiens
PTAVPERAKLINGHARNEDRALRYPIKNGNAAFI

SEQ ID NO: 1015945 - protein, 59 aa, Homo sapiens
  misc_feature (32)..(32): Xaa can be any naturally occurring amino acid
LETKVQKGSIGGMVFQEQPGEKGVPGIPGPQXHLAYLETKVQKERKGRQATWHRHPKGS

SEQ ID NO: 1015946 - protein, 60 aa, Homo sapiens
SGSFLPQNISILQEPSAMPGHAHFQLESWGLGTGEFFQQPAALTVCSARMLRRFPAHPAA

SEQ ID NO: 1015947 - protein, 55 aa, Homo sapiens
MTPGLVANQAALKWHELAAESSRVEYRAVQEIVYQSVLDRSPYTASEQPICESVW

SEQ ID NO: 1015948 - protein, 59 aa, Homo sapiens
MHYWTMWTPTRALRGAGSSGLKPCRLAVCFAGANARPRCYRLTLRTSKEPVSVTCVSCW

SEQ ID NO: 1015949 - protein, 49 aa, Homo sapiens
LVYCIVLLTIGAQAIVAILDDVGIHVIRSSPLVIKPSHCHCRHAAMLAT

SEQ ID NO: 1015950 - protein, 98 aa, Homo sapiens
  misc_feature (3)..(3): Xaa can be any naturally occurring amino acid
QFXWSSWHLVVPAGKHGNRGDNWFFLCPVGPAGAVWPKRYLVGPQGIRGDKGEPGEKGPRGFPGLKGHNGLQGLPGIACHHGIKVLLILGPAGPRALL

SEQ ID NO: 1015951 - protein, 95 aa, Homo sapiens
  misc_feature (31)..(31): Xaa can be any naturally occurring amino acid
IGGIRRPTRPAEAQVDRVGELPGGREGGGGXEGEPEVKKRRLLCVEVFLGRKPSVSAVGVMVFLPRNDVENERAFNVVVEPPSGGAPLNADRNQL

SEQ ID NO: 1015952 - protein, 69 aa, Homo sapiens
SAEIRHTAEYQEHWFYFEAKLAILRWRRGNPVKDPEIKPVSPTFWEQKRGKRLYRNVESRKYEGEDEAT

SEQ ID NO: 1015953 - protein, 41 aa, Homo sapiens
MEDLGDSQSFEASSVQPTTIQFCSKSMTHSEQRSVHRLSKI

SEQ ID NO: 1015954 - protein, 34 aa, Homo sapiens
TLLCRFQARNGPRESIMIMTCPITLDSLPVGVFL

SEQ ID NO: 1015955 - protein, 35 aa, Homo sapiens
LAANAVAHVRSAYYCNYTNTSAELQQCGSAHCCRR

SEQ ID NO: 1015956 - protein, 53 aa, Homo sapiens
QNDSEHQRMFNPVSSLVKGHLSPNCRPPTEEKGPICPATSEPISRTTLKGRTA

SEQ ID NO: 1015957 - protein, 45 aa, Homo sapiens
YPISSWPKRYLPPAIPRTHATYHPATGTTYPLLLRHEGDHPDNTY

SEQ ID NO: 1015958 - protein, 49 aa, Homo sapiens
NTGVVKTTPKRPKLGKERTHINIVVIGHVDSGSHHYSTIENLEEAAEMG

SEQ ID NO: 1015959 - protein, 36 aa, Homo sapiens
MPATTLEDYTNRRRNSLPNDNLHAEDIGRRNAFAYF

SEQ ID NO: 1015960 - protein, 38 aa, Homo sapiens
SHATSKPAGHYSRILQTTDPQPQPHRKLISPHFPPQHG

SEQ ID NO: 1015961 - protein, 66 aa, Homo sapiens
GDKRAGSGAPRYALFTFDLTKPLYTLAPSLLLLCRLTINICTGAIWGLLLPTRLKDYLEDYKFQEE

SEQ ID NO: 1015962 - protein, 82 aa, Homo sapiens
MSTRCRIVPRPEATAPGFSCMDWEILGTDGRSFCRYQRCTYQIYLPHALVRPVTLNMNVAILHGLIYGLSQITEDNLDEQQQ

SEQ ID NO: 1015963 - protein, 100 aa, Homo sapiens
AARVVRPTRSGLQLDLGSPPDFEGVIAAPVGVKRRGCSMPTQEEKAFMREEESCVFYTWSPSQRDPLAADERHPRGVYCPHKIETMKKGEQTEEYEVLDD

SEQ ID NO: 1015964 - protein, 57 aa, Homo sapiens
RHCLHDYDPDYARNDLNIDLQDMACMREKTSRSNEGRKNKIEEVGDSKAMFVCKRIG

SEQ ID NO: 1015965 - protein, 76 aa, Homo sapiens
NKKKPEEEGSSHQDTAEKNAPSPEKAKGRHTVPCMPPPKEVFLKSPEGPELEKSMKMPQEVVEIRKKIEVFKKLSW

SEQ ID NO: 1015966 - protein, 48 aa, Homo sapiens
MYNAVSNADLMGFKNFLDHLGEKVPLEDEVVPPQVLSEPYEEAGASLS

SEQ ID NO: 1015967 - protein, 42 aa, Homo sapiens
QAVFREGFKVGLPGFRQLPAFSYASLPHFGGAGFNQFGIGKR

SEQ ID NO: 1015968 - protein, 46 aa, Homo sapiens
CAVSPRHSSTASLIRCRCLAMPLNRFYGHRAALYTGYSTQAHCILK

SEQ ID NO: 1015969 - protein, 51 aa, Homo sapiens
IYHYGLSRQLISSEILMIMVSLDSERSLVRSSEVFAMNGKPHCDRDLADVE

SEQ ID NO: 1015970 - protein, 39 aa, Homo sapiens
PEQRPCIPGPGEASQQLLQLNGSGYSVVTNVSSTYHPSY

SEQ ID NO: 1015971 - protein, 73 aa, Homo sapiens
MINAARYLPCALCGILRRCLKENAMSAQKPGLHPRNRHHSRYDLATLCQVNPELRQFLTLTPAGSKADFANPL

SEQ ID NO: 1015972 - protein, 107 aa, Homo sapiens
  misc_feature (17)..(17): Xaa can be any naturally occurring amino acid
  misc_feature (25)..(25): Xaa can be any naturally occurring amino acid
  misc_feature (102)..(102): Xaa can be any naturally occurring amino acid
RGAVSGQSARAAWELGXAWRWGRAXVIVPRLLYAPDPGMLFGRIPLRYAILMQMRFDGRLGFPGGFVDTQDRSLEDGLNRELRRELGKGLAVSALSQLDYRXFPRSG

SEQ ID NO: 1015973 - protein, 270 aa, Homo sapiens
MVLATMRSCCRSLPFLVLLLFLVCVFLWVAFRSVVYVACRCAYVVSRLSCEVSPSLVLVFGSYSRWLPLWLCLFPVGAIWCCPLCVSFSICRCVVVHSVASGLCVVCRPSTSLRGRSAPMIVLCQRVGASLWYLEIPGPLPPGDPLCGLPGRVGSVVLMSSVWSHGGSCLGRCRSLLQACIVDVSCATSCPSVNYEGTCPQLDPLPARTSWLRPSLRTHEGLGLCMEIRDCLIEDSDDEAGLELSVMIVLAGTCMAVATCTPHNDAGMAR

SEQ ID NO: 1015974 - protein, 113 aa, Homo sapiens
  misc_feature (6)..(6): Xaa can be any naturally occurring amino acid
  misc_feature (9)..(9): Xaa can be any naturally occurring amino acid
  misc_feature (27)..(27): Xaa can be any naturally occurring amino acid
  misc_feature (33)..(33): Xaa can be any naturally occurring amino acid
  misc_feature (55)..(55): Xaa can be any naturally occurring amino acid
  misc_feature (75)..(75): Xaa can be any naturally occurring amino acid
EPGTSXGVXAAGKREVSGFSASRSARXTRKPLXLPGSAPSSVLESHEAAAALAVXKGELRVGLGSFQNGGASEPXFEEESEEEPECLEIDFKSRTLSVRRFGLQVTFACGRPF

SEQ ID NO: 1015975 - protein, 61 aa, Homo sapiens
  misc_feature (11)..(11): Xaa can be any naturally occurring amino acid
  misc_feature (15)..(15): Xaa can be any naturally occurring amino acid
  misc_feature (26)..(26): Xaa can be any naturally occurring amino acid
  misc_feature (45)..(45): Xaa can be any naturally occurring amino acid
LLGLRDAPVHXAPQXRVPGLLASWAXFRMLCPPWLRQARVSALRXSRFALVVQVYCPLEGS

SEQ ID NO: 1015976 - protein, 112 aa, Homo sapiens
  misc_feature (27)..(27): Xaa can be any naturally occurring amino acid
  misc_feature (40)..(40): Xaa can be any naturally occurring amino acid
  misc_feature (105)..(105): Xaa can be any naturally occurring amino acid
  misc_feature (110)..(110): Xaa can be any naturally occurring amino acid
RHRDSPPGIVRAAFDQRMKTWQRGRIXSHTAEEAGGRGSXLWANKPDKLQQAKDEILEWESRVTQYERDFERISTVVRKEVIRFEKEKSKDFKNHVIKYLETLLXSQQQXAK

SEQ ID NO: 1015977 - protein, 67 aa, Homo sapiens
  misc_feature (19)..(19): Xaa can be any naturally occurring amino acid
HPIATTQTAPSNPTHKIHXQEDTPRRHQAFSSCPILFSRFRNKIKPLGEQESRPASAAPGPKDMYNH

SEQ ID NO: 1015978 - protein, 132 aa, Homo sapiens
  misc_feature (6)..(6): Xaa can be any naturally occurring amino acid
  misc_feature (24)..(24): Xaa can be any naturally occurring amino acid
  misc_feature (47)..(47): Xaa can be any naturally occurring amino acid
  misc_feature (69)..(69): Xaa can be any naturally occurring amino acid
  misc_feature (80)..(80): Xaa can be any naturally occurring amino acid
  misc_feature (100)..(100): Xaa can be any naturally occurring amino acid
  misc_feature (102)..(102): Xaa can be any naturally occurring amino acid
  misc_feature (107)..(107): Xaa can be any naturally occurring amino acid
  misc_feature (130)..(131): Xaa can be any naturally occurring amino acid
VLITGXPQEAFPVISYHGPPSLGXSPSQALSPAPPAPAHPLALVLSXSHREQVGSTLEARAGGAVLLFXDFVSIGVALLXLISVFLILPFCKVYITKFRXPXYIYIXIYIYKLYSFCLCTFRQEEKINLXXE

SEQ ID NO: 1015979 - protein, 130 aa, Homo sapiens
  misc_feature (7)..(7): Xaa can be any naturally occurring amino acid
  misc_feature (109)..(109): Xaa can be any naturally occurring amino acid
RHDGCEXVDNANISHRCDTAASRGTVMNRKQYRIALATLSVFIALRSLAGIVHGMLFDERVFRYSIVTLILSILSFVVLLNLAPGTVRKRNTGRTICLAHVKRGFTRNXRAAAVGQIQGSARNWGEFISG

SEQ ID NO: 1015980 - protein, 85 aa, Homo sapiens
  misc_feature (32)..(33): Xaa can be any naturally occurring amino acid
  misc_feature (80)..(80): Xaa can be any naturally occurring amino acid
  misc_feature (85)..(85): Xaa can be any naturally occurring amino acid
MRLSPFQHLKGAVDMGKLILERVVAIHMVLRXXPRLMIRQTGPTRLIALNRSMYRQAVAREAPEFVLLIQINRARSRHAXHDARX

SEQ ID NO: 1015981 - protein, 130 aa, Homo sapiens
  misc_feature (17)..(17): Xaa can be any naturally occurring amino acid
  misc_feature (22)..(22): Xaa can be any naturally occurring amino acid
  misc_feature (117)..(117): Xaa can be any naturally occurring amino acid
GLECIRALSSMNPDIEXAAETXAAYPALTSTEMDIDSNDRIEMLDGEQRHDFSPPRSAPATQRRDLSAERVTPPVLLPNCDTIHSTTIGRLLFARIGSSTINPASSALNPASNAMLXLPCAFPAHGTHPP

SEQ ID NO: 1015982 - protein, 130 aa, Homo sapiens
  misc_feature (1)..(1): Xaa can be any naturally occurring amino acid
  misc_feature (62)..(62): Xaa can be any naturally occurring amino acid
  misc_feature (98)..(98): Xaa can be any naturally occurring amino acid
  misc_feature (120)..(120): Xaa can be any naturally occurring amino acid
  misc_feature (123)..(123): Xaa can be any naturally occurring amino acid
  misc_feature (130)..(130): Xaa can be any naturally occurring amino acid
XHFTRRYVDRLRFNTLHRKNPDFKCSLSASAFAHFDPRNALNNPFAAAVMFMIGGPPPAPAXLPKSERFTELGIDWISPIRMRAVMRRRLHPDRPATXRLQRHVTTSDHCWASTVFAGPXNDXPVRFEGX

SEQ ID NO: 1015983 - protein, 154 aa, Homo sapiens
  misc_feature (6)..(6): Xaa can be any naturally occurring amino acid
  misc_feature (9)..(9): Xaa can be any naturally occurring amino acid
  misc_feature (22)..(22): Xaa can be any naturally occurring amino acid
  misc_feature (58)..(58): Xaa can be any naturally occurring amino acid
  misc_feature (68)..(68): Xaa can be any naturally occurring amino acid
  misc_feature (90)..(90): Xaa can be any naturally occurring amino acid
  misc_feature (97)..(97): Xaa can be any naturally occurring amino acid
  misc_feature (100)..(100): Xaa can be any naturally occurring amino acid
  misc_feature (114)..(114): Xaa can be any naturally occurring amino acid
  misc_feature (139)..(139): Xaa can be any naturally occurring amino acid
  misc_feature (146)..(146): Xaa can be any naturally occurring amino acid
  misc_feature (152)..(152): Xaa can be any naturally occurring amino acid
VSPYWXGWXRTSKAQVIRLPWXPKSAGITGVTPAPGHAYIFNPTIYYFCDMMGSKAPXQVNFSPIWAXRKRGFLGEIFTRANVGKTAAWXPTPFLTXTRXSATLHTLRDFILKXLFKILVCKQRNWGVHIRQVTCHSLXRRNPVTXPRDKHXNI

SEQ ID NO: 1015984 - protein, 61 aa, Homo sapiens
  misc_feature (7)..(7): Xaa can be any naturally occurring amino acid
  misc_feature (13)..(13): Xaa can be any naturally occurring amino acid
  misc_feature (52)..(52): Xaa can be any naturally occurring amino acid
KEQAKTXNRRPLXGRALQPGRREPASCPSPSPRTLGPQGVFLQPMRTWSSRXSSRVSDGSR

SEQ ID NO: 1015985 - protein, 85 aa, Homo sapiens
  misc_feature (24)..(24): Xaa can be any naturally occurring amino acid
  misc_feature (51)..(51): Xaa can be any naturally occurring amino acid
  misc_feature (54)..(54): Xaa can be any naturally occurring amino acid
  misc_feature (80)..(80): Xaa can be any naturally occurring amino acid
  misc_feature (82)..(82): Xaa can be any naturally occurring amino acid
SPPAVDGDGERLRGLVVLNVPPPXTGGIPPGHHRRQLFPLLVAGAPDRYWXRGXRTEVFWAPEGDPHCRLSTELKTSHTXPXLEI

SEQ ID NO: 1015986 - protein, 112 aa, Homo sapiens
  misc_feature (30)..(30): Xaa can be any naturally occurring amino acid
  misc_feature (41)..(41): Xaa can be any naturally occurring amino acid
  misc_feature (57)..(57): Xaa can be any naturally occurring amino acid
  misc_feature (62)..(62): Xaa can be any naturally occurring amino acid
  misc_feature (93)..(93): Xaa can be any naturally occurring amino acid
RQKWKRKRTIKGRLERNGYDKNRNKTDYQXNKRQTTGTDRXKTFVKCTLTSRPQDTXDGKRXDPDCVTLTPSLDKQDQRCLPHDASVLISLKXGPAGALKSHPVENTTSAIS

SEQ ID NO: 1015987 - protein, 82 aa, Homo sapiens
  misc_feature (27)..(27): Xaa can be any naturally occurring amino acid
  misc_feature (29)..(29): Xaa can be any naturally occurring amino acid
  misc_feature (49)..(49): Xaa can be any naturally occurring amino acid
  misc_feature (55)..(55): Xaa can be any naturally occurring amino acid
  misc_feature (68)..(68): Xaa can be any naturally occurring amino acid
  misc_feature (81)..(81): Xaa can be any naturally occurring amino acid
MVMLLLLLSALVWTSSDDGQRDKTFHXWXSDPNPPVQENFDVNKYLGKXGTKLRXIPTTFENGRCIQXNYFTNWKTGKIQXV

SEQ ID NO: 1015988 - protein, 77 aa, Homo sapiens
  misc_feature (10)..(10): Xaa can be any naturally occurring amino acid
  misc_feature (67)..(67): Xaa can be any naturally occurring amino acid
  misc_feature (70)..(70): Xaa can be any naturally occurring amino acid
AVPVSSLVMXTRTSSWRAVNITEPEARTESRTSASPSSRFRPAAPTHPIFESCPPCPPVWFPSCNKXNGXLEPSPVQ

SEQ ID NO: 1015989 - protein, 32 aa, Homo sapiens
  misc_feature (8)..(8): Xaa can be any naturally occurring amino acid
  misc_feature (29)..(29): Xaa can be any naturally occurring amino acid
MGLWARRXLLILLHNLTLFPKEYIPQPWXRQL

SEQ ID NO: 1015990 - protein, 117 aa, Homo sapiens
  misc_feature (105)..(105): Xaa can be any naturally occurring amino acid
RWSLALSPRLECSGVNSAHCNLHLPSSSNSPASASRIARITVTHHHATLIFMFLAEMGFHHVGQPGLELLTSGDPPASASQSAEIKGVTAGVQPIDTFKSWTIFXTLGVLFLGCLEK

SEQ ID NO: 1015991 - protein, 224 aa, Homo sapiens
  misc_feature (84)..(84): Xaa can be any naturally occurring amino acid
  misc_feature (99)..(99): Xaa can be any naturally occurring amino acid
SALCFGVALSVFRSLRCRAPVFGPSVPSLVLLLQLSVFREPLSSWAFYDRLASDWVSGPQFEPSSCRTPNPWAYVCRSLGAGAXHFLPGEYLLPWMPTXTTEHPKSPVWPFVVRLSTAGLPEERLARTGVVVLRSSPSPLLFQWFEGHPTAPPCRDPLMDAFSSPSHQTHPTCDGVTSGGNAVGHLIHLVESTNTRLSIGFVSKGPDLKGKFYLVRSCLSGYSC

SEQ ID NO: 1015992 - protein, 218 aa, Homo sapiens
  misc_feature (7)..(8): Xaa can be any naturally occurring amino acid
  misc_feature (127)..(127): Xaa can be any naturally occurring amino acid
  misc_feature (189)..(189): Xaa can be any naturally occurring amino acid
  misc_feature (197)..(197): Xaa can be any naturally occurring amino acid
MAALGRXXSGPRAAVPAWKRDTVERNRAKPAALGGGAGPGEEDKSSGCWQKAWARCAKKCAASSSPSGGGGGGTVGARLQKLEIRVPGVRALSADSVPKKKTVPGLTPTQPAAEETEKEATKGPKDXTQLKENKSLLERFHPPAAPRRRGEAEPLPTAPPPREKGEEGKGLEKKKIRKEKKKEGRKKEXKRRRREKXEKRKEEKQREKKRGKREKKGG

SEQ ID NO: 1015993 - protein, 56 aa, Homo sapiens
  misc_feature (1)..(1): Xaa can be any naturally occurring amino acid
  misc_feature (12)..(12): Xaa can be any naturally occurring amino acid
  misc_feature (49)..(49): Xaa can be any naturally occurring amino acid
  misc_feature (51)..(51): Xaa can be any naturally occurring amino acid
XRRTLTVQTHCXAAGVLACARSRPGAINWGEYSKCDLPLRTWESLLSGXGXRTFLI

SEQ ID NO: 1015994 - protein, 108 aa, Homo sapiens
VSAATSTNDSFEIRPAPKPVMETIPLGDLQARALASLRANSRNSFMVIPKSKASGAPPPEGRQSVELPKGDLGPASPSQDSDPSRAEGKWGAPASGKSPGGGSSTWGS

SEQ ID NO: 1015995 - protein, 117 aa, Homo sapiens
  misc_feature (2)..(2): Xaa can be any naturally occurring amino acid
  misc_feature (23)..(23): Xaa can be any naturally occurring amino acid
PXHSTGNNTESGLGPQGPVRPEXPPNPICQRCFQVEGSGEQPFLLPPTLSSSKGFLYPVHVRIKLFTWSEKPITTDSYCRYGKLTTKKGEKYTKQLAWLNTSKDSYSHWCELLIINV

SEQ ID NO: 1015996 - protein, 50 aa, Homo sapiens
  misc_feature (4)..(4): Xaa can be any naturally occurring amino acid
  misc_feature (12)..(12): Xaa can be any naturally occurring amino acid
  misc_feature (27)..(27): Xaa can be any naturally occurring amino acid
  misc_feature (35)..(35): Xaa can be any naturally occurring amino acid
  misc_feature (44)..(44): Xaa can be any naturally occurring amino acid
FSGXVWLGLPPXEMAGELQGTQAPSLXLTGLTSQXSGVNPNNSXRGREAM

SEQ ID NO: 1015997 - protein, 73 aa, Homo sapiens
QLDQMYRKQLSLRHPRVDGGNVVSSESLEMPGSAEPPKRVLQRVTALAGGALRSGLPVGPQLFFLSRHLQCGE

SEQ ID NO: 1015998 - protein, 64 aa, Homo sapiens
  misc_feature (24)..(24): Xaa can be any naturally occurring amino acid
SAQGCVLIGFRRLQLMSNEANSKXLDAHYDPMANIHTFSACLALADLHGDGEYKLVGRGPWPWC

SEQ ID NO: 1015999 - protein, 81 aa, Homo sapiens
  misc_feature (1)..(1): Xaa can be any naturally occurring amino acid
  misc_feature (5)..(5): Xaa can be any naturally occurring amino acid
  misc_feature (11)..(11): Xaa can be any naturally occurring amino acid
  misc_feature (21)..(21): Xaa can be any naturally occurring amino acid
  misc_feature (26)..(26): Xaa can be any naturally occurring amino acid
  misc_feature (72)..(72): Xaa can be any naturally occurring amino acid
XDRSXGQGSSXVPLTQAPGVXKGTFXEVHLEDGPFPAAPQLLEHSLETQQVFSIVHGVTDVSAKKAQLRDRXLQEAFPTCH

SEQ ID NO: 1016000 - protein, 88 aa, Homo sapiens
  misc_feature (30)..(30): Xaa can be any naturally occurring amino acid
  misc_feature (82)..(82): Xaa can be any naturally occurring amino acid
RTRADRKQIGVAADHEIALGLAEHFMRVDXKSLAHPAEQLATQRLAAGENTAQLDPGMPDIGLAHQLQRRRAGRRYGCSETXSVPSSP

SEQ ID NO: 1016001 - protein, 122 aa, Homo sapiens
  misc_feature (10)..(10): Xaa can be any naturally occurring amino acid
  misc_feature (76)..(76): Xaa can be any naturally occurring amino acid
  misc_feature (79)..(79): Xaa can be any naturally occurring amino acid
  misc_feature (92)..(92): Xaa can be any naturally occurring amino acid
MPTSSAPSEXHLRIPTGPSYVERSMPSSARTAADSLDANTEIGRVCGTSASIAEEDDHSDVFGEGGIQISAVKLRXCVXRLRAEQEEDIARXVAGDIEFGVRASAFPDAPGSRGTHSFTGRR

SEQ ID NO: 1016002 - protein, 133 aa, Homo sapiens
  misc_feature (1)..(1): Xaa can be any naturally occurring amino acid
  misc_feature (11)..(11): Xaa can be any naturally occurring amino acid
  misc_feature (31)..(31): Xaa can be any naturally occurring amino acid
  misc_feature (39)..(39): Xaa can be any naturally occurring amino acid
  misc_feature (64)..(65): Xaa can be any naturally occurring amino acid
  misc_feature (129)..(130): Xaa can be any naturally occurring amino acid
XEHRKSAGFAXRSAKHRPEEDDHSDVFGEGXIHDLCGEXRQLRDGSVPSSEEDIARVVAGDIEXXVAGERIPRSARVARDPFIQATARPAASAVLVGDDRAVELEVEVQLRVHFGDRDDVELLLECPPXXRLG

SEQ ID NO: 1016003 - protein, 104 aa, Homo sapiens
  misc_feature (99)..(99): Xaa can be any naturally occurring amino acid
KLRTFTFSFKRKHFVASLWHIRITSITLLLSGATVKQSEDYLGTGTVMLEIVDLITKTATKSLSRVGGLYSVDVLDQGMTHIPGRLEPTRRGDFIHVTXKGTPI

SEQ ID NO: 1016004 - protein, 111 aa, Homo sapiens
  misc_feature (50)..(50): Xaa can be any naturally occurring amino acid
  misc_feature (72)..(72): Xaa can be any naturally occurring amino acid
  misc_feature (87)..(87): Xaa can be any naturally occurring amino acid
RHSLETSGQRQAGSGGGRGLGWSLLALLSLEDRREPGGVGGEPAAVTQRXALPVGVDSAMKEEVQRLQSRVXLLEEKLQLVLAPLHXLASGTWSMGSRDPGSLLVALLSSS

SEQ ID NO: 1016005 - protein, 112 aa, Homo sapiens
  misc_feature (63)..(63): Xaa can be any naturally occurring amino acid
SGTMDTNPSLKNTPKIKFFFFQGAHATTYVTPEVVIEKVVPFPFSITKETGMEDSPRGLKACXMNNSSSSGPVPRYKLAPAGKIGRGRKRAGLGRTRYPLEGSRGEVALGTT

SEQ ID NO: 1016006 - protein, 98 aa, Homo sapiens
  misc_feature (8)..(8): Xaa can be any naturally occurring amino acid
  misc_feature (35)..(35): Xaa can be any naturally occurring amino acid
  misc_feature (92)..(92): Xaa can be any naturally occurring amino acid
MKKMYKAXLKYPEWKQKHLPHFKPWLHPEQSPLPXLALSELSVQHADSLENIDESAVAESREERMGGAGGEGSDDDTLLTERRTAKGTETGXRRALGR

SEQ ID NO: 1016007 - protein, 53 aa, Homo sapiens
MVRDIRFPELAVITVLPLFSVVAASKYTKVEQLTLRERLARIQHTHPLPRRPP

SEQ ID NO: 1016008 - protein, 116 aa, Homo sapiens
  misc_feature (10)..(10): Xaa can be any naturally occurring amino acid
  misc_feature (59)..(59): Xaa can be any naturally occurring amino acid
  misc_feature (90)..(90): Xaa can be any naturally occurring amino acid
GKLNQTCRQXRARRQPVLAQGHYEVDLEHLFLALLEKPASDFSIVARRSAFEASVLEAXLNAEIRGFKNGNTRTPVFSPHLPRLFEHAWXIASLDTQTTRIRSGSPVAGRCFTEPD

SEQ ID NO: 1016009 - protein, 31 aa, Homo sapiens
  misc_feature (4)..(4): Xaa can be any naturally occurring amino acid
LCSXPSLLQAILDKLSFPAARWLCTVRQRLL

SEQ ID NO: 1016010 - protein, 149 aa, Homo sapiens
  misc_feature (50)..(50): Xaa can be any naturally occurring amino acid
ELINETHGYSPFSYDRRRIESLYFIGIAAPELLNGRERENASVSSIFAMXIHMDQNPVVGFGHVLFQQSDTDDPAYALTSTFAKVVFSISYLDDLTRNSKAHFLHTTFFSRYVGSGFADEHVPDGGLPRKAFPHHGPFAAGFLAILTIL

SEQ ID NO: 1016011 - protein, 100 aa, Homo sapiens
  misc_feature (3)..(3): Xaa can be any naturally occurring amino acid
  misc_feature (12)..(12): Xaa can be any naturally occurring amino acid
  misc_feature (23)..(23): Xaa can be any naturally occurring amino acid
  misc_feature (30)..(30): Xaa can be any naturally occurring amino acid
  misc_feature (68)..(68): Xaa can be any naturally occurring amino acid
  misc_feature (74)..(74): Xaa can be any naturally occurring amino acid
  misc_feature (94)..(95): Xaa can be any naturally occurring amino acid
ARXTSDISFRVXPRSSPCFPAWXWRVSNLXWYQASASARLHLAISSYCALTSAMMPSRSRERLLYMDXTTDVLXIWDCSSVNSVSLRVLRKLIXXFRGFN

SEQ ID NO: 1016012 - protein, 141 aa, Homo sapiens
  misc_feature (27)..(27): Xaa can be any naturally occurring amino acid
IRNEEQVAPQQLLGRLRAVLHAFQRQXIQRDDDQRVEDHRRQIADVGLCSPITFSAPSAGYVATNAAGMIAKYFARSFATLNVVSAPVQWIICLPTSTTCISFVGLLSRSTMLAASFRRLRCRCCIRERPSGPCAKPGRIR

SEQ ID NO: 1016013 - protein, 78 aa, Homo sapiens
  misc_feature (14)..(14): Xaa can be any naturally occurring amino acid
  misc_feature (18)..(19): Xaa can be any naturally occurring amino acid
  misc_feature (54)..(54): Xaa can be any naturally occurring amino acid
  misc_feature (58)..(58): Xaa can be any naturally occurring amino acid
  misc_feature (74)..(75): Xaa can be any naturally occurring amino acid
MLNPDGVVRGHYRXDSRXXNLNRQYLKPDAVLHPAIYGAKAVLMYHHVQYRLNXQSSXEDQPSYCFPPDATVFXXGGK

SEQ ID NO: 1016014 - protein, 85 aa, Homo sapiens
  misc_feature (28)..(28): Xaa can be any naturally occurring amino acid
  misc_feature (39)..(39): Xaa can be any naturally occurring amino acid
  misc_feature (51)..(51): Xaa can be any naturally occurring amino acid
  misc_feature (63)..(63): Xaa can be any naturally occurring amino acid
  misc_feature (77)..(77): Xaa can be any naturally occurring amino acid
PTKGPPGNTKPPDNLQGSIPTGPRTFQXFNEQADTLHEXSKTKKKNTSMLXDLNNQKDNDFIXFLFENVPESWNVSXSRFMNIFS

SEQ ID NO: 1016015 - protein, 124 aa, Homo sapiens
  misc_feature (6)..(6): Xaa can be any naturally occurring amino acid
  misc_feature (26)..(26): Xaa can be any naturally occurring amino acid
  misc_feature (32)..(32): Xaa can be any naturally occurring amino acid
  misc_feature (69)..(69): Xaa can be any naturally occurring amino acid
  misc_feature (78)..(78): Xaa can be any naturally occurring amino acid
ATEFPXCLAFKIQLWSQGHLLAVKTXLGVPGXAPHACGPSTLGGRGGRIASSGVRTTLGRHGEAPCLLXMQEIARRGXGRLWSRLLGRLRQENRWNPGGGGCSGPRWRHCAPALGDRARLGLKK

SEQ ID NO: 1016016 - protein, 76 aa, Homo sapiens
  misc_feature (6)..(6): Xaa can be any naturally occurring amino acid
  misc_feature (49)..(49): Xaa can be any naturally occurring amino acid
  misc_feature (71)..(71): Xaa can be any naturally occurring amino acid
YWLLTXPGPAGWVLRGPVYPRRATGVEPTASEDFLSSVPTEWSQPAVQXCPLLGSCLPSSACHPSLHLPAXKKVLL

SEQ ID NO: 1016017 - protein, 142 aa, Homo sapiens
  misc_feature (89)..(89): Xaa can be any naturally occurring amino acid
  misc_feature (113)..(113): Xaa can be any naturally occurring amino acid
  misc_feature (128)..(128): Xaa can be any naturally occurring amino acid
  misc_feature (133)..(133): Xaa can be any naturally occurring amino acid
  misc_feature (137)..(137): Xaa can be any naturally occurring amino acid
DPRNQALAVFADERTHHRHYDGKRCLGLTAYIFPLDSRSAPKVVGSVATFDNAGRTGTLGCIHRIEPDCTNLVNAHPDVTTTRCSASAXITGHCSHPLFSALCRARIFTVDTXFSQANWKPNVVIEVXIVIAXAVVXPGGQR

SEQ ID NO: 1016018 - protein, 136 aa, Homo sapiens
  misc_feature (11)..(11): Xaa can be any naturally occurring amino acid
  misc_feature (105)..(105): Xaa can be any naturally occurring amino acid
  misc_feature (124)..(124): Xaa can be any naturally occurring amino acid
  misc_feature (135)..(135): Xaa can be any naturally occurring amino acid
MTGKLFLTPLXSALQRARNITVNTRFRSKIKTERCTEVLTVCRKPCSHRAAERCSRLTVVASAPKRMQRRRGSRQAIFPTNRSFVEGSGPLRTFEANYLVSPEGXRCGVRFREGPGEEPLRNDXGENEYEDPVFXL

SEQ ID NO: 1016019 - protein, 107 aa, Homo sapiens
  misc_feature (12)..(12): Xaa can be any naturally occurring amino acid
  misc_feature (15)..(15): Xaa can be any naturally occurring amino acid
  misc_feature (95)..(95): Xaa can be any naturally occurring amino acid
KFDRRRNRDFSXARXISAAAPSSSLAQEHDSPATMYGRILFKDGSAQMIETLNQSAASEGLRDGPGRRLSPQLLRRHSVGIGHIDDDLARPGGQXLRDISVGLETDS

SEQ ID NO: 1016020 - protein, 131 aa, Homo sapiens
  misc_feature (113)..(113): Xaa can be any naturally occurring amino acid
  misc_feature (115)..(115): Xaa can be any naturally occurring amino acid
  misc_feature (131)..(131): Xaa can be any naturally occurring amino acid
LTAAPSLQSNCGCPLSTRRDRIETCDHGRSVELHQILKDQLTPAISARVHKQSTFRKPAKFDRRETEIFRKRANLRCGTVIVARQEHDSPATMYGRILFKDGSAQMIETLTSXPXVKASAKAQEEGFSPSX

SEQ ID NO: 1016021 - protein, 124 aa, Homo sapiens
  misc_feature (120)..(120): Xaa can be any naturally occurring amino acid
RGIQWRTDRWRLDDIQQHRLGAHPALITSFLRCGHAVDQDPTNGVHGGERDVANDSQLFVGLTHRLTQRRELLHHNEIRTGPSEPIVQDRFARQSIAPWWAMNIDPGCIRQSAFQTTADXWVSI

SEQ ID NO: 1016022 - protein, 126 aa, Homo sapiens
  misc_feature (66)..(66): Xaa can be any naturally occurring amino acid
  misc_feature (69)..(69): Xaa can be any naturally occurring amino acid
  misc_feature (73)..(73): Xaa can be any naturally occurring amino acid
  misc_feature (83)..(83): Xaa can be any naturally occurring amino acid
  misc_feature (92)..(92): Xaa can be any naturally occurring amino acid
  misc_feature (109)..(109): Xaa can be any naturally occurring amino acid
  misc_feature (113)..(113): Xaa can be any naturally occurring amino acid
  misc_feature (120)..(120): Xaa can be any naturally occurring amino acid
GTNLHSCPCIRTRPVCTGAPRGLAQEDVHHHCNQHEHQAPLGHLTPSSRDPNCRPPLLCSLSHALXPVXWTSXAGCWERGGPXAPVLVLLLXPLWSFLLVLQALFTCSXSPVXAHSHICXGFPGGP

SEQ ID NO: 1016023 - protein, 124 aa, Homo sapiens
  misc_feature (105)..(105): Xaa can be any naturally occurring amino acid
  misc_feature (110)..(110): Xaa can be any naturally occurring amino acid
  misc_feature (120)..(120): Xaa can be any naturally occurring amino acid
FLKNQVLFDTCSKVFLFFLLLSCSFSPLGHFPPTLGPHAWFRQAHCYFCGNLTLGPAQPLALVGGELAESQAAFSQDELLLKQAGLRAVGRLQQGLGMPQTRAGXGFTSXDLQTVRLSRXQVLP

SEQ ID NO: 1016024 - protein, 35 aa, Homo sapiens
  misc_feature (9)..(9): Xaa can be any naturally occurring amino acid
  misc_feature (16)..(16): Xaa can be any naturally occurring amino acid
  misc_feature (19)..(19): Xaa can be any naturally occurring amino acid
  misc_feature (24)..(24): Xaa can be any naturally occurring amino acid
MGFQHVAQXGLELLGXKQXNFPLXFQSIWGFTGVT

SEQ ID NO: 1016025 - protein, 105 aa, Homo sapiens
GFSLSLSYHPLPSQPPLPEPAKDPKDLPKFSHCWPPHPPSKPLRGFLQGRVRAFTHGTVQDMMLLREYRQLQGTAVPTTQPLPPTIAPIQQEAARGQRRPSSITY

SEQ ID NO: 1016026 - protein, 48 aa, Homo sapiens
  misc_feature (23)..(24): Xaa can be any naturally occurring amino acid
MRLSRSLRSFSSRDSTSSVLLVXXRGAFSSFFSSSEWSAADVEDSSSF

SEQ ID NO: 1016027 - protein, 69 aa, Homo sapiens
  misc_feature (7)..(7): Xaa can be any naturally occurring amino acid
  misc_feature (10)..(10): Xaa can be any naturally occurring amino acid
  misc_feature (21)..(21): Xaa can be any naturally occurring amino acid
  misc_feature (29)..(29): Xaa can be any naturally occurring amino acid
SQVLPPXRLXDFPRGMTASMXSSQKHDKXDFPALLEIRGGNGSRSRSSAGLRSVAQILNSSKRAIAQPV

SEQ ID NO: 1016028 - protein, 84 aa, Homo sapiens
  misc_feature (6)..(6): Xaa can be any naturally occurring amino acid
  misc_feature (9)..(9): Xaa can be any naturally occurring amino acid
  misc_feature (18)..(18): Xaa can be any naturally occurring amino acid
  misc_feature (23)..(23): Xaa can be any naturally occurring amino acid
  misc_feature (55)..(55): Xaa can be any naturally occurring amino acid
  misc_feature (71)..(71): Xaa can be any naturally occurring amino acid
RQCRAXGFXHAVVISQPXARDPXALGLDPRPFDREAMRVEAERVDERDILVDVVXKRRTRSPRAGRRSSAXYARPPTGRSHHSR

SEQ ID NO: 1016029 - protein, 112 aa, Homo sapiens
  misc_feature (28)..(28): Xaa can be any naturally occurring amino acid
  misc_feature (58)..(58): Xaa can be any naturally occurring amino acid
  misc_feature (63)..(63): Xaa can be any naturally occurring amino acid
  misc_feature (70)..(70): Xaa can be any naturally occurring amino acid
MVNSCPNKHTRVDCLALLYVVGTTDDPXLVTPSLPNIQSWYVRPCREEELPGATGTGXPSFPXLGIPGRXSCRSQRSILTLRWEGCSFYVPILLSFDIKKKYMFIVENLETV

SEQ ID NO: 1016030 - protein, 100 aa, Homo sapiens
  misc_feature (26)..(26): Xaa can be any naturally occurring amino acid
  misc_feature (29)..(31): Xaa can be any naturally occurring amino acid
  misc_feature (97)..(97): Xaa can be any naturally occurring amino acid
PCCWPAAASAPQVLQKQSIVTFSLWXRDXXXTYTTSQVSKGCVAQAPNAILEVHVLFLGVPNGPVTAGADSPGHPSKMGTWAPRGASGPQCKQQCLXASS

SEQ ID NO: 1016031 - protein, 97 aa, Homo sapiens
  misc_feature (55)..(55): Xaa can be any naturally occurring amino acid
  misc_feature (69)..(69): Xaa can be any naturally occurring amino acid
  misc_feature (77)..(77): Xaa can be any naturally occurring amino acid
LRCRRSCRARTSMRPAKSRCNVELRLLGDDVDHAARIHQPVQQRRRPLQHLDAVXRRVERTALHERHAXLHDRAVAXAPKPRFMIVSCVPASVLPCV

SEQ ID NO: 1016032 - protein, 75 aa, Homo sapiens
  misc_feature (66)..(66): Xaa can be any naturally occurring amino acid
  misc_feature (73)..(73): Xaa can be any naturally occurring amino acid
MGRDQHSTESIRSNSKLFIMNTECGQTHDCACPRRFAEGNCFLDAKLLEVIFGDIQRMQFLQALLXDRAADPXFS

SEQ ID NO: 1016033 - protein, 130 aa, Homo sapiens
NFLPFQMESLFKNILLKTHKYLVQMKPLKWSTQSLNGQLEIPLEPPALPSFPYCSSPVHILLAHKAPPGPNPPPTTTIVLITYRENYVWLSWPNPRQKRGRKRLEQFFKCEYHLGVMHDGLPVLSLKFSN

SEQ ID NO: 1016034 - protein, 70 aa, Homo sapiens
  misc_feature (37)..(37): Xaa can be any naturally occurring amino acid
  misc_feature (63)..(63): Xaa can be any naturally occurring amino acid
  misc_feature (67)..(67): Xaa can be any naturally occurring amino acid
SAGASAGLGWGVKSRAVLGLPGTPGPCPCCGLHREPXPAGVPAPAPATAAFGLSWEARKAIFXVQKXLSG

SEQ ID NO: 1016035 - protein, 110 aa, Homo sapiens
MNIPSGPSIWSRLSPIGRFQFFLDFRVERACGCDSEWKARKPWRGGRQPCRCVPCRQSRGACPRCAVRASRSETSLAIVRALAQHIGTFHQTSRHGKQKCQGHIRRVFGQ

SEQ ID NO: 1016036 - protein, 78 aa, Homo sapiens
  misc_feature (19)..(19): Xaa can be any naturally occurring amino acid
  misc_feature (52)..(52): Xaa can be any naturally occurring amino acid
KAVAGDVATAADPNVLQQXVTQRNPAGAQKWKLLVTLAEPGDSVDDAHEGLXPQRTTIDAGTLVLDRVEAQDSGPCRD

SEQ ID NO: 1016037 - protein, 154 aa, Homo sapiens
  misc_feature (15)..(15): Xaa can be any naturally occurring amino acid
  misc_feature (27)..(27): Xaa can be any naturally occurring amino acid
  misc_feature (35)..(35): Xaa can be any naturally occurring amino acid
  misc_feature (63)..(63): Xaa can be any naturally occurring amino acid
  misc_feature (77)..(77): Xaa can be any naturally occurring amino acid
  misc_feature (79)..(79): Xaa can be any naturally occurring amino acid
  misc_feature (140)..(141): Xaa can be any naturally occurring amino acid
  misc_feature (149)..(149): Xaa can be any naturally occurring amino acid
  misc_feature (154)..(154): Xaa can be any naturally occurring amino acid
QESTRSQSNPESCYXKSNSGNESRCSXPVFEFCPXVVSRARSAGMLIAAKAERVRHPWLNAVXRDAACEQRRHRNEXLXDGGSGDTSSNRFMHGTDPQRMVSILPVGSFRHLDIGQASVNVGRFCAGSVAQPVSSRSSRXXTPRIARRXGTSRX

SEQ ID NO: 1016038 - protein, 111 aa, Homo sapiens
  misc_feature (71)..(71): Xaa can be any naturally occurring amino acid
  misc_feature (73)..(73): Xaa can be any naturally occurring amino acid
LLHVDVHEHLLRHLHVHAELQCGAEAALVDRHALPADVEPVVVEVRVVQPGADVRAHLARMVEVILQQQRXAXRRPRRRGLPRLRRHLVPRRAEDQLRRQGSQRIMYVKFE

SEQ ID NO: 1016039 - protein, 137 aa, Homo sapiens
  misc_feature (2)..(2): Xaa can be any naturally occurring amino acid
  misc_feature (33)..(33): Xaa can be any naturally occurring amino acid
  misc_feature (49)..(49): Xaa can be any naturally occurring amino acid
  misc_feature (112)..(112): Xaa can be any naturally occurring amino acid
SXLLINPRAFCLRFDLPVAQPPHDAPRHAREQXAARHVVTGLHKTRRRXDRRRTDRRTVHHHRIHPDHRVGFERRAMHDRAVADVAVDTEPARLADPDMQHAAVLHVAAVLXDDRTEVAAQVRMRADVAARADRHVD

SEQ ID NO: 1016040 - protein, 119 aa, Homo sapiens
  misc_feature (117)..(117): Xaa can be any naturally occurring amino acid
NDRGDDGDPQAHALFHWCWTRVVNSCHLKPMGLRHAIDRVSSRLTGTRERGAPRSPVDRLHRPQAIRRQLLINPRAFRLRFDLRVAQPPHDAPRHAREQHAARTFVNRPFTNAAGGXRF

SEQ ID NO: 1016041 - protein, 122 aa, Homo sapiens
  misc_feature (11)..(11): Xaa can be any naturally occurring amino acid
  misc_feature (14)..(14): Xaa can be any naturally occurring amino acid
MGRPFRNALGXAPXLKPCSLSFRMKVEANTPKCKSKPRKARPDEWLQITDVFIAARAAMPYLPHHHTRAETRAFFKSVMETQEVWTAEATLDGEQRIAGFAAIRDTQGETWLDHLYIHPASQ

SEQ ID NO: 1016042 - protein, 148 aa, Homo sapiens
  misc_feature (7)..(7): Xaa can be any naturally occurring amino acid
  misc_feature (9)..(9): Xaa can be any naturally occurring amino acid
  misc_feature (15)..(15): Xaa can be any naturally occurring amino acid
  misc_feature (21)..(21): Xaa can be any naturally occurring amino acid
  misc_feature (25)..(25): Xaa can be any naturally occurring amino acid
  misc_feature (46)..(46): Xaa can be any naturally occurring amino acid
  misc_feature (111)..(111): Xaa can be any naturally occurring amino acid
  misc_feature (145)..(147): Xaa can be any naturally occurring amino acid
VPKFDQXNXPCRPRXPLANGXAPFXLGPSSGTMNRGEQAVLGFQRXVSFSDLVLDFFAGLLILRYQGAEVGEYFRVPHRLPVRRKQFGVPLDIEQLLAHQDEFLGEDERPXSRPNAVSCRPIVPEEILPNEVPMGRVTFRSDSAXXXR

SEQ ID NO: 1016043 - protein, 97 aa, Homo sapiens
  misc_feature (35)..(35): Xaa can be any naturally occurring amino acid
AGFISACLIACDEANQVTATSDGVAWLPWLAPYRXAEIHHRLVVPPVGELAFDRTAVRRIARKRPIRINLGRRRALIVETLPPCPFEKIDALETVPR

SEQ ID NO: 1016044 - protein, 76 aa, Homo sapiens
PVSPLWYPIKTLVETTVNLLTIQMMLLLQRHDGYQPVSQEYPKNEVFLFPRCPRHPYVTPEVVIEKVVPFPFSITK

SEQ ID NO: 1016045 - protein, 135 aa, Homo sapiens
  misc_feature (33)..(33): Xaa can be any naturally occurring amino acid
  misc_feature (66)..(67): Xaa can be any naturally occurring amino acid
  misc_feature (75)..(75): Xaa can be any naturally occurring amino acid
  misc_feature (114)..(114): Xaa can be any naturally occurring amino acid
KKDLEGPQIVSHRRNAFDCLGNDPTFLLEAHMXRECTQSLNLSVPYYAAGKQSPTQNSSAQAGPSXXKRALECSXLSLLCKHCGPVVNPSQIKWPLHEPCAKKGYVHPLCVESXSCFSKSFGLSQILYVSLLIQS

SEQ ID NO: 1016046 - protein, 34 aa, Homo sapiens
SEQERCGPERSRYHLQQNVQFSEDTVRLYICEMA

SEQ ID NO: 1016047 - protein, 30 aa, Homo sapiens
  misc_feature (22)..(22): Xaa can be any naturally occurring amino acid
TNPQCRRRGQKASTIPALRLLXCSIYSIWF

SEQ ID NO: 1016048 - protein, 34 aa, Homo sapiens
KPPPGFSGLLPRALPACVPSPATTTTTKAPGVCP

SEQ ID NO: 1016049 - protein, 33 aa, Homo sapiens
LGVRNTQTQTLTCSGAREEPGAERAGGYFASGS

SEQ ID NO: 1016050 - protein, 47 aa, Homo sapiens
MTLASISDEHIQVERFEKVFSSERLFSWKGINFVMVNSVDLNGMLWH

SEQ ID NO: 1016051 - protein, 66 aa, Homo sapiens
  misc_feature (14)..(14): Xaa can be any naturally occurring amino acid
  misc_feature (30)..(30): Xaa can be any naturally occurring amino acid
  misc_feature (50)..(50): Xaa can be any naturally occurring amino acid
IRHRFVTMADRAAXKRACKDPNPIIDGRNXPLNLAYLGAKRGPPDGLCIXVQQLHHLDPADLRAYP

SEQ ID NO: 1016052 - protein, 134 aa, Homo sapiens
  misc_feature (23)..(23): Xaa can be any naturally occurring amino acid
  misc_feature (49)..(49): Xaa can be any naturally occurring amino acid
  misc_feature (53)..(53): Xaa can be any naturally occurring amino acid
  misc_feature (57)..(57): Xaa can be any naturally occurring amino acid
  misc_feature (61)..(61): Xaa can be any naturally occurring amino acid
  misc_feature (82)..(82): Xaa can be any naturally occurring amino acid
  misc_feature (115)..(115): Xaa can be any naturally occurring amino acid
  misc_feature (130)..(130): Xaa can be any naturally occurring amino acid
QFLAWNFEALTQAEAGPVSPQTXSNCCCPGGPGGASELALLKAVDTWSXGERXSHEXVEGXVEKIRFPMMLPEDSLVQFNLXLYWSHEALFQKKTLQALEFHTVPFQLLALYKGXNLTEDNLTSPGFYNXVHWE

SEQ ID NO: 1016053 - protein, 37 aa, Homo sapiens
CDVEYVLSVKTVFPGALTDGDASHVVGSSAAVMAVVF

SEQ ID NO: 1016054 - protein, 115 aa, Homo sapiens
  misc_feature (10)..(10): Xaa can be any naturally occurring amino acid
RLVGFKNIIXLLPTKIPVLSTYQGVTAADSRVAIRAVELGLICATGAQPGRDTWPENGNGSTKISRMSLSHALARYLKRVISNYTDDTVSTVWFTTLSTLQFTTFQPCREFSTLA

SEQ ID NO: 1016055 - protein, 88 aa, Homo sapiens
  misc_feature (37)..(37): Xaa can be any naturally occurring amino acid
  misc_feature (66)..(66): Xaa can be any naturally occurring amino acid
  misc_feature (69)..(69): Xaa can be any naturally occurring amino acid
  misc_feature (76)..(76): Xaa can be any naturally occurring amino acid
  misc_feature (80)..(80): Xaa can be any naturally occurring amino acid
  misc_feature (85)..(85): Xaa can be any naturally occurring amino acid
SAQAPADPALPGASEPWQCPFTASLSIGGVSKDPFPXGMASPGVSFKSLVSSYETRVVGMAPGLPXKRXVLFPLLXPGSXPHPRXIWG

SEQ ID NO: 1016056 - protein, 95 aa, Homo sapiens
  misc_feature (8)..(8): Xaa can be any naturally occurring amino acid
  misc_feature (13)..(13): Xaa can be any naturally occurring amino acid
  misc_feature (52)..(52): Xaa can be any naturally occurring amino acid
  misc_feature (75)..(75): Xaa can be any naturally occurring amino acid
PNALSALXDLHAXKLRVDPVNFKLLSHCLLVTLAAHLPAEFTPAVHASLDKXLASVSPVLTSKYLKLEPRWPCFXALGPPPSPSSPSCTRSPVVF

SEQ ID NO: 1016057 - protein, 107 aa, Homo sapiens
  misc_feature (16)..(16): Xaa can be any naturally occurring amino acid
  misc_feature (22)..(22): Xaa can be any naturally occurring amino acid
  misc_feature (34)..(34): Xaa can be any naturally occurring amino acid
  misc_feature (95)..(95): Xaa can be any naturally occurring amino acid
IRLEGATAHAGRAPGXRRASAXRTLYTGFSILVXLLLAGQATTAYFLYQQQGRLDKLTVTSQNLQLENLRMKLPKPPKPVSKMRMATPLLMQALXMGALAPGGPLQN

SEQ ID NO: 1016058 - protein, 44 aa, Homo sapiens
  misc_feature (27)..(27): Xaa can be any naturally occurring amino acid
HALEAPERAAAPRSQEDQGLTKDYGNXPLHRFKKAGLQELPEHI

SEQ ID NO: 1016059 - protein, 125 aa, Homo sapiens
  misc_feature (5)..(5): Xaa can be any naturally occurring amino acid
  misc_feature (12)..(12): Xaa can be any naturally occurring amino acid
  misc_feature (25)..(25): Xaa can be any naturally occurring amino acid
  misc_feature (34)..(34): Xaa can be any naturally occurring amino acid
MGALXSCKTQRXRSAALLPEPSETXEPHPEGRNXRRAHLKSCNTARVRGFILEVSETKNPPNPDTTPFLPIPSPWQPLICFLSLWIYLSWVFHAMKLLMERSPDPEPKRGFLDLVQKRIQGKSIK

SEQ ID NO: 1016060 - protein, 46 aa, Homo sapiens
TEARTAVIKTGAALRLLLLMHKGRKKTEHRPWENGQHHQVLQDLEI

SEQ ID NO: 1016061 - protein, 41 aa, Homo sapiens
  misc_feature (30)..(30): Xaa can be any naturally occurring amino acid
MVSLAHGPVFHMEQQGVSLQWEGSSCQFRXILQTLASSWRK

SEQ ID NO: 1016062 - protein, 108 aa, Homo sapiens
  misc_feature (3)..(3): Xaa can be any naturally occurring amino acid
  misc_feature (36)..(36): Xaa can be any naturally occurring amino acid
  misc_feature (39)..(39): Xaa can be any naturally occurring amino acid
  misc_feature (53)..(53): Xaa can be any naturally occurring amino acid
  misc_feature (56)..(56): Xaa can be any naturally occurring amino acid
  misc_feature (58)..(58): Xaa can be any naturally occurring amino acid
  misc_feature (96)..(96): Xaa can be any naturally occurring amino acid
WKXSRAQNPQGFGAGNFNSLFKAFEEEQNLRGNLTXMEXNGVVPGMYSPAHPXEAXAXQPRPLILELAQLPYWLLPLGPAHQRTRPPKSAHTDPNXWRGRPLLQPSRL

SEQ ID NO: 1016063 - protein, 104 aa, Homo sapiens
  misc_feature (12)..(12): Xaa can be any naturally occurring amino acid
  misc_feature (37)..(37): Xaa can be any naturally occurring amino acid
  misc_feature (92)..(92): Xaa can be any naturally occurring amino acid
GRDGFLLCCPGXLELLASSIPPALASQSPWIIGMSTXPSQEKIFFIFKTGSHSLIQARTHWHNHGSLQPQPAGLKQSSHLSRLSHWDYRCTXTPGLIFKLFCRD

SEQ ID NO: 1016064 - protein, 67 aa, Homo sapiens
  misc_feature (1)..(1): Xaa can be any naturally occurring amino acid
XVGSAGEDNPAGQMNPGWKPSSDGAVVAPAPKSEEKDAAEIQKRKRLEQAGIKVMPAAQRFARSALG

SEQ ID NO: 1016065 - protein, 147 aa, Homo sapiens
  misc_feature (3)..(3): Xaa can be any naturally occurring amino acid
  misc_feature (23)..(23): Xaa can be any naturally occurring amino acid
  misc_feature (29)..(29): Xaa can be any naturally occurring amino acid
  misc_feature (54)..(54): Xaa can be any naturally occurring amino acid
  misc_feature (69)..(69): Xaa can be any naturally occurring amino acid
  misc_feature (81)..(81): Xaa can be any naturally occurring amino acid
  misc_feature (112)..(112): Xaa can be any naturally occurring amino acid
  misc_feature (116)..(116): Xaa can be any naturally occurring amino acid
  misc_feature (121)..(121): Xaa can be any naturally occurring amino acid
  misc_feature (125)..(125): Xaa can be any naturally occurring amino acid
LKXGLQIPEGWGPWGMGFSKPPXVCPLGXGEAEAPREKICASSRPYLLSPSYTXLEPRVCKPDTLYVFXHVSTYTHAPAAXASVSSSSHPFSCCCLPSQAGAGSFLGDGGSXCAGXLPGNXKIGXHGPGSERCGPTPIYDIKISTPK

SEQ ID NO: 1016066 - protein, 31 aa, Homo sapiens
GRATWKGVRTERAKRGAFDPYTLVGSRHDLD

SEQ ID NO: 1016067 - protein, 50 aa, Homo sapiens
PASAPRVAGNNGVRHHAQLIFGRVGFLHVIPAGLNYRSSDPPAWFQCPGL

SEQ ID NO: 1016068 - protein, 35 aa, Homo sapiens
SVLSAPLAALCCLDDDLAERYYGSRAWRRDEQQLI

SEQ ID NO: 1016069 - protein, 42 aa, Homo sapiens
AKPTLERLLERTNLQSNHVHATPVDVERQQLTTVTSDRKSCM

SEQ ID NO: 1016070 - protein, 37 aa, Homo sapiens
AASSVVDSAGLREMQAWGSLQLDREEKNGDASSISAF

SEQ ID NO: 1016071 - protein, 30 aa, Homo sapiens
MALNRMDLTTAALSARRDSGKNEPNHASRR

SEQ ID NO: 1016072 - protein, 130 aa, Homo sapiens
EDIYIATCLATGMFNYCFLLNWKITDGGFGLLYVCILNTYPRSACHIKDALGPGTVAHSCNPSTLAGRGGRITGAQEFETNLANMVRTHLYKKINKISWVWLRAPVVLAIWEAEVGGLLEAILDRRSRQQ

SEQ ID NO: 1016073 - protein, 110 aa, Homo sapiens
  misc_feature (109)..(109): Xaa can be any naturally occurring amino acid
RQGLILSPRLECSGTITAHCSLDLLGSSNPPTSAGTGIHRRTQPHPANFVFFVEMGFCLVAQAGLELLSSSDLRQLPKVLGRTGLNHRAQLKKVKIYQNYGTFNIYRTXT

SEQ ID NO: 1016074 - protein, 343 aa, Homo sapiens
EFTPHDRVARWLDEHAFDAEDTVMLRRVIDANGRSRAFINGTSATLAQLRELGEMLVDIHGQHAHQLLMRPDAQRELFDTHAGLVAEAANVARAWRVWRDATQAIDAAKAHERELQLEREKLAWQLAELDKLAPQPGEWEEVSAEHKRLSHSANLIEGVRGALDALSESDEAMLTQLGAIVSKLRSLADYDAALGDALASLEPAEIQLQEAVYSLSHYAQRLDLDPDRLAQVEMRLDALHSTARKFRLPPDTLHEEHAARRAQLAALDAAADLGALEAAQAKAWDAYLADAKRLSKARAQAAKALGTAVTAGMQELSMAGGSFEVALVPLADGGPHGLEQIEF

SEQ ID NO: 1016075 - protein, 162 aa, Homo sapiens
MLRPSAPDSPCQSETDVAGPNRPACPKDLPPKMSIHTPCGYDARPKPQEVGPTQIVILPPKSCVPPLLKNMVAQDPFEPIPAGIFIGHCHCCQNNLGIIPWPHKFGSDDIEDCQGETGETPCNRCCKNTGTRPRFRDPPACRTDLRAAMDLHPPDSQPASLA

SEQ ID NO: 1016076 - protein, 89 aa, Homo sapiens
  misc_feature (4)..(5): Xaa can be any naturally occurring amino acid
MALXXWEKGYLTQNKYICHELALCGNECGYWSCVIWATWMKNGKDPVHLQKGKNGPSCTKGQGNTLELVITNPLDATLEERGACTLESM

SEQ ID NO: 1016077 - protein, 84 aa, Homo sapiens
MTRHINGKLFLPKYALSQDVCTYRDFIYRTVEIPGCPHHVAPYFSYPVALSCKCGKCNTDYSDCTHEAVKTNYCTKPQKSYLVG

SEQ ID NO: 1016078 - protein, 30 aa, Homo sapiens
CARVPPPSTYYRSGSYIDYWGQGTLVTVSS

SEQ ID NO: 1016079 - protein, 99 aa, Homo sapiens
  misc_feature (89)..(89): Xaa can be any naturally occurring amino acid
PVLAGLRASTSDWILRVNGTGYLPGMGRVLLPGTEQFVSIQEKMAEDPLTYKSRLMVVVKMDSSIQPGAFRAVLKYLYTGELDEDERDXMDIAYIGEVV

SEQ ID NO: 1016080 - protein, 102 aa, Homo sapiens
GCKDIRLRVLWPSQKCWDYSCDATMPSPIFEDFSYVKLNNRYSLNSWVISNLKRMFEPRHCAHACNSNTLEGQGRWLTRGQELKTSLINMVKPHLYLKIQLK

SEQ ID NO: 1016081 - protein, 50 aa, Homo sapiens
TLLVVKEITCPPPPVIYNGAHTGSSLEDFPYGTTVTYTCNPGPERGVEFS

SEQ ID NO: 1016082 - protein, 74 aa, Homo sapiens
KDYSLKTTSRIKRLLFRYHLLVFSAFTLSAGFVTTGLGKRIAYLLIGKIGNTTLGLGYVTVFLDLVLAPATPSN

SEQ ID NO: 1016083 - protein, 44 aa, Homo sapiens
  misc_feature (19)..(19): Xaa can be any naturally occurring amino acid
YQGNRISMAAGAPTLSDRXFSKLTMTNSFFIISGTHTIRVQVPA

SEQ ID NO: 1016084 - protein, 30 aa, Homo sapiens
YLCASSQASRTSDPLDTQYFGPGTRLTVLE

SEQ ID NO: 1016085 - protein, 152 aa, Homo sapiens
  misc_feature (114)..(114): Xaa can be any naturally occurring amino acid
KQVKQPQAPDYAKKKRTPYPDLDVKLIADTFIAIHLSSTSGTITSRDQETITCCPAVSVAGSSSPVIIGLTYKQFFTAVQFQFKTSCRALILHRLDRAIGLQFTRGVEADMFRXQGEASRHATKFLCHQSIKNIRCTNEPGNKPPSLAAYRD

SEQ ID NO: 1016086 - protein, 120 aa, Homo sapiens
MPLTELVSGGKIWFSTTPALLHTAGVVSGSGAAAAGGERAVSHSHPKGGWTPRHPHRDRHRPAFLHPPALLISLPLTRGTFPDGRLLEDARGAFLSPLLRHIILFPADRNALSSCRQEQS

SEQ ID NO: 1016087 - protein, 133 aa, Homo sapiens
  misc_feature (21)..(21): Xaa can be any naturally occurring amino acid
  misc_feature (57)..(57): Xaa can be any naturally occurring amino acid
  misc_feature (79)..(79): Xaa can be any naturally occurring amino acid
  misc_feature (99)..(99): Xaa can be any naturally occurring amino acid
  misc_feature (108)..(108): Xaa can be any naturally occurring amino acid
ELSRATTLETFKSNERESHYXIRRDGETEAWRNTVTCTKTSSKSKTRMTGCVTFQSXKSNSAVEVATESCQEPLGTLSXMPFPVGARMPALLLSPMALXPVMLLNLAXESELQLKARSLLYSPLGVVFYTTYS

SEQ ID NO: 1016088 - protein, 82 aa, Homo sapiens
  misc_feature (7)..(7): Xaa can be any naturally occurring amino acid
  misc_feature (50)..(50): Xaa can be any naturally occurring amino acid
  misc_feature (57)..(57): Xaa can be any naturally occurring amino acid
  misc_feature (59)..(59): Xaa can be any naturally occurring amino acid
RQYPNAXRDIHYNEYLNVSIDLAIRRSLEARAQWVESKMLMGKVEKFKPXKFGFKGXEXVINEHVIMGSNLKEVMLYSGERH

SEQ ID NO: 1016089 - protein, 72 aa, Homo sapiens
  misc_feature (20)..(20): Xaa can be any naturally occurring amino acid
  misc_feature (25)..(25): Xaa can be any naturally occurring amino acid
MHQACGYQLLIEVRCCLGDXVIFCXPVGIIDGVTLVVTVCLISCSSDRHVAVTSNCRYPSSPEFKYLKGRIS

SEQ ID NO: 1016090 - protein, 76 aa, Homo sapiens
HKIEKKGTLAKSSYDTSITLIPKPGKDITKKENYRPISLMNIDAIILNKTLANCFQQHIKKIIHHDQVGFIPGMQG

SEQ ID NO: 1016091 - protein, 44 aa, Homo sapiens
  misc_feature (33)..(33): Xaa can be any naturally occurring amino acid
  misc_feature (43)..(43): Xaa can be any naturally occurring amino acid
QHVDHWRVGFLHLGLLPSQSAIATGSAVFSVLXSLAARWFGKXV

SEQ ID NO: 1016092 - protein, 53 aa, Homo sapiens
  misc_feature (21)..(21): Xaa can be any naturally occurring amino acid
  misc_feature (30)..(30): Xaa can be any naturally occurring amino acid
  misc_feature (47)..(47): Xaa can be any naturally occurring amino acid
QRINSIPNIKGEIAKITISSXLSTSTQHLXAGTRSRTYLTETQVSGXVSATLA

SEQ ID NO: 1016093 - protein, 48 aa, Homo sapiens
  misc_feature (1)..(1): Xaa can be any naturally occurring amino acid
  misc_feature (12)..(12): Xaa can be any naturally occurring amino acid
XFCQTQGLSDHXFCLKEIMSAWLGTDLFEVSPVVRGFTLEPLKSRLCH

SEQ ID NO: 1016094 - protein, 72 aa, Homo sapiens
  misc_feature (1)..(1): Xaa can be any naturally occurring amino acid
  misc_feature (5)..(5): Xaa can be any naturally occurring amino acid
  misc_feature (42)..(42): Xaa can be any naturally occurring amino acid
XQLVXLHYDAICQYMGPSDADDDDPWDSSHAPRLVPVLSHMXQLPSAARKIIVPYLSLLVQSWRQGQWERDG

SEQ ID NO: 1016095 - protein, 149 aa, Homo sapiens
KLCIKPSAADGSTMTVSSNGPRYQKLGNHLLTSMQLEDAQNSGHSFDRFTVQPRRPDGAARRARAALSVATRVSVAPPRGVIPRASHRKLRRRRRAVPAVGRYTTRALDKPIILGRGSVQGLARPTASSCMPAEVGIFGVCIFAGWRYC

SEQ ID NO: 1016096 - protein, 100 aa, Homo sapiens
LCSRSSSAAALHALALLTVASLWPKHAHVLDLPPRGIPLATTTPDRRKRDQQHCSTFYCQRPQYMQINQCDDNTLTKRKKKTQIITIDAEKAFDKVQHPF

SEQ ID NO: 1016097 - protein, 47 aa, Homo sapiens
SQFCRYPSHKNNIGRAKGLRPAINHFFEQADGEIQSALCRYQAPTQG

SEQ ID NO: 1016098 - protein, 56 aa, Homo sapiens
  misc_feature (8)..(8): Xaa can be any naturally occurring amino acid
  misc_feature (25)..(25): Xaa can be any naturally occurring amino acid
LDSDPFGXDGSLWSFNYFFYNKRLXRIVFFAASSISGSTYTPSEAGNELDMELGEE

SEQ ID NO: 1016099 - protein, 204 aa, Homo sapiens
MLIPFGALATEWFGARTTGGLYEVVLCLFSVPLVSPAQGGVYNPQGSRAPPMGGSGAPEALCDTWDLLGERDGSVGMWGRLIARVPQGAPRGGAPEWGLPPPPLVRGGQHRGSPPGIFCSIFYQYGEGSPCRWPPPVFSRTGFMNLIGVSGRPSVCHPRERAPPLGASPPTRLFWPHREPRGVCAHTQCPGPPSPTGALYLSAR

SEQ ID NO: 1016100 - protein, 108 aa, Homo sapiens
RWSPELVAQAGVQWRDLGSPQPPPPGFKQLSCLSLQSSWDHRHPPPCRANFCTLSKDGFRHVGQAGLELRPQAIRPPQSPKVLGLQARATMSRLVCFLKNLWPWSLKP

SEQ ID NO: 1016101 - protein, 122 aa, Homo sapiens
  misc_feature (42)..(42): Xaa can be any naturally occurring amino acid
  misc_feature (78)..(78): Xaa can be any naturally occurring amino acid
  misc_feature (92)..(92): Xaa can be any naturally occurring amino acid
  misc_feature (105)..(105): Xaa can be any naturally occurring amino acid
  misc_feature (119)..(119): Xaa can be any naturally occurring amino acid
SLESCSHHPVGWWRFLLTRGLFSPPSCWAAAHWAGPPLPSMXQPLQLNPRGSVQEGARRPLLVPDTFADGDGGREVSXSGHLSLRRAGPLSXALLLGCRQEDIIXLVLEWSHVESGKRXPCS

SEQ ID NO: 1016102 - protein, 30 aa, Homo sapiens
  misc_feature (3)..(3): Xaa can be any naturally occurring amino acid
  misc_feature (7)..(7): Xaa can be any naturally occurring amino acid
MSXSSLXEQRPKGQGNKVQNGSVHQKDGLN

SEQ ID NO: 1016103 - protein, 45 aa, Homo sapiens
  misc_feature (6)..(6): Xaa can be any naturally occurring amino acid
  misc_feature (32)..(32): Xaa can be any naturally occurring amino acid
DTAEVXSAESERGRAGLQLWDAIRLPRKLLAXALAGCTLSSEDPI

SEQ ID NO: 1016104 - protein, 39 aa, Homo sapiens
  misc_feature (15)..(15): Xaa can be any naturally occurring amino acid
  misc_feature (21)..(21): Xaa can be any naturally occurring amino acid
  misc_feature (27)..(27): Xaa can be any naturally occurring amino acid
IPGVVIKSLRQSGDXWCSELXREWTCXSRRGQEKQVQVL

SEQ ID NO: 1016105 - protein, 133 aa, Homo sapiens
GTCNPPSCIALVFHVPGIWLTWDCSPCRALSFGHTFVPLVWSPGALRSPQLGNASSVILRSSSVLGHGRLLTVQSGARDVARSDAQCLSNALEGGRTVVLRGFLDVWCRMLNGDWSAAKNDARPPQDQDQNFW

SEQ ID NO: 1016106 - protein, 75 aa, Homo sapiens
  misc_feature (62)..(62): Xaa can be any naturally occurring amino acid
GERGSTLGKRAKEEIFPKEKNPRGTLNIKERPDFGEEDSTQREHCMQGHSRREKRLAHSQSXREVPEELSQKRGL

SEQ ID NO: 1016107 - protein, 107 aa, Homo sapiens
  misc_feature (6)..(6): Xaa can be any naturally occurring amino acid
  misc_feature (18)..(18): Xaa can be any naturally occurring amino acid
  misc_feature (25)..(25): Xaa can be any naturally occurring amino acid
INNRNXFLTILEAGKSKXKVLTDLXSGEDPLPGSWMFVFSLSHGRRGDGALWVSLYKGTNPIHERCYSPDLSLTKSPTSKYHHIGNEDFNIRNSGGTQTIQSTADIK

SEQ ID NO: 1016108 - protein, 110 aa, Homo sapiens
  misc_feature (43)..(43): Xaa can be any naturally occurring amino acid
  misc_feature (45)..(45): Xaa can be any naturally occurring amino acid
  misc_feature (56)..(56): Xaa can be any naturally occurring amino acid
  misc_feature (75)..(75): Xaa can be any naturally occurring amino acid
  misc_feature (101)..(101): Xaa can be any naturally occurring amino acid
SPPASDPAGSLPQTIPSQGDLPYLLQHARHHPESPAPCKFPNXCXLLTSFLKLILXPSLECRLLQQDTAPNHCFXNCCRVPSTQQALFSGVPGSSYSWYGXPEAAGGVGD

SEQ ID NO: 1016109 - protein, 77 aa, Homo sapiens
  misc_feature (70)..(70): Xaa can be any naturally occurring amino acid
TESPCSLCGLEFLVFTIENGNYKIQSRSLFTCEASGDPIPSITWRTSTRNISSEEKTLDGHMVVRSNARXSSLTLKE

SEQ ID NO: 1016110 - protein, 287 aa, Homo sapiens
AALLFLRSVVFVVLGSFPADRRSISLFLSLSSLSFWLCACGASLTHVCAHLLTSFVLFVSLIVFVFLSVLFLFLVFLRLQLVIIERHAPSPSLLVLLARRSRPTRACVFFSFFLIVFRCSLPRYAHSLSLSLSHAISRAGLLFSSSDCAVVVLHSLAIIYMDTLLSLFLWVWRSLFSLSCEACPHPRPALFVFSVSWVCRPPPRGGFCLVLFFCWCARAQTFSLHSSLRCVVTVPPAPPVAELGCVHGCPFFFFSSSDVLFFCISMRFFLLAGAAHHPPRLLLLPCI

SEQ ID NO: 1016111 - protein, 121 aa, Homo sapiens
LHNHWGKVKGKEEQVTSYMDGSSKERPCAGKLPFLKPSDLVKLINCHQNSKGETCSHDSFISHRVPPTTCGNYGSYKMKFGWGHKTKPYHSAPGPSQISCLHISKSIIPSQRSPKVNPFQH

SEQ ID NO: 1016112 - protein, 31 aa, Homo sapiens
ARDRVYVYDSSGSQYFQHWGQGTVVIVSSAS

SEQ ID NO: 1016113 - protein, 122 aa, Homo sapiens
  misc_feature (12)..(12): Xaa can be any naturally occurring amino acid
  misc_feature (15)..(15): Xaa can be any naturally occurring amino acid
  misc_feature (119)..(120): Xaa can be any naturally occurring amino acid
SFPFPFESISSXVHXRSIPFHSSPIPFESVPFQSIPFESIPFHSMSFHNDPFHSIPFDSIPFYFIPFDSLPLDSFPFECIPFRSISFRSVRFLPFDFILFQSIPFASIPFHFTPFDSIXXHS

SEQ ID NO: 1016114 - protein, 114 aa, Homo sapiens
  misc_feature (40)..(40): Xaa can be any naturally occurring amino acid
SVYILTSHWPRKVVAELQLACARSGGTAGLDPAPARHWMXLPLSLVPGTAREKDALSNLLYVHCRYSIVDRCGTHGPLVLRPAKAPRHVSCHSVYSLLMSLSAATQGLGSTGPG

SEQ ID NO: 1016115 - protein, 87 aa, Homo sapiens
SAASGGSTRSRGEGLSQEVRVHVFPPVPAPQPGVEHPSPPFHPPGVLPSGDIRCRVLIPVLRVDDNLDDAFHGRGKPSSQFVVSEIP

SEQ ID NO: 1016116 - protein, 33 aa, Homo sapiens
YGQQSSLLAYNTTSHTDQSSRLSVKEDPSYDSV

SEQ ID NO: 1016117 - protein, 30 aa, Homo sapiens
GHILLCERYSISYNRPGNPGHRLPSIPDQP

SEQ ID NO: 1016118 - protein, 336 aa, Homo sapiens
GGGACGPQQCGTQVAGGGGRSAAGPPPGHWSLNGQVAEQLRTAAALLASPNPLPAGADPVGVQKSPQMWVDLMARPSWWCTRTFEQDVEELDLGAHGLPWRSTVTGGDGWGPELPTHCLQSCSARLERCMDVSVALSGGHATSSDWIRRPQPDQCMTDTLESHFWLDPEIRAMALLPIWSISGPIPLRGGRRPKGTIRNKHCERLARATTGGVPGGWLMGLTNEKPGKTAPRDNNTASNRVRSACRKTEMLADRHITRRIRYQVDRPHLALPGEIEKRGAARGSGGQGERRYHSRGTGRRPRENAVDNNGTNGDYEPSRSHGATEKRAQGQRRKGR

SEQ ID NO: 1016119 - protein, 129 aa, Homo sapiens
MWAWLSVSIFLWLQDAGGPGEVCHWSARSLCTEAGEASKDFRAAEPSLQFLPYKQGSNPKPGVRVRPQGEGPRGMGTCKACEGTFLQQAESPSQVGGESDKTKAQGGSSKDGKGSSIGWIWLLWDGEET

SEQ ID NO: 1016120 - protein, 82 aa, Homo sapiens
NLYTDIINILFWAQVQLLGNKQCPWAHIVCACCANLVHRLIEHLPCNIPLTIRIDASCKRRVPRYCSMKRMLAHTSEVEHSA

SEQ ID NO: 1016121 - protein, 102 aa, Homo sapiens
  misc_feature (20)..(20): Xaa can be any naturally occurring amino acid
MSQVAVQHSFTHLSTNPTLXSQWRISALLLTCYHWPPCMLPASNYRVDVSHFYPTPVRALTRTEAPPLDEPALHRLLKTPFLGDMATSAEAPIIYCQSPQPA

SEQ ID NO: 1016122 - protein, 208 aa, Homo sapiens
  misc_feature (102)..(102): Xaa can be any naturally occurring amino acid
MFVARRMRPRVWRAARDSVCSVLYVASVCPFHHSALWCSYLRAHSRSRSISLRVTRSPAALGYAETQRLSRPWAPRALSSRITALARPRTNAACTHTERYTXVRDHPRAVVDNTLTPRWRTHPLSQYLRALARTHTHTQAHNTRGGDTSDQDNVVRRALFVSHHYYATIFSATPLPGRRWRTTSGEMGHPSRQNRYFYTRNQSDNSRH

SEQ ID NO: 1016123 - protein, 52 aa, Homo sapiens
  misc_feature (13)..(13): Xaa can be any naturally occurring amino acid
  misc_feature (32)..(32): Xaa can be any naturally occurring amino acid
  misc_feature (50)..(50): Xaa can be any naturally occurring amino acid
VGAFILIPLAAFXLTALLSMDILVEHRSVQDXAPGAGLGSSKKRGPRRLXHI

SEQ ID NO: 1016124 - protein, 30 aa, Homo sapiens
MDPNCSCEAGGSCACAGSCKCKKCKCTSCK

SEQ ID NO: 1016125 - protein, 34 aa, Homo sapiens
EFHFNRYLTRRRRIEIANALCLTERQSKIWFQNP

SEQ ID NO: 1016126 - protein, 130 aa, Homo sapiens
MVSDRGTTSVKPVRSPVGRQSSGVILRSSPSCFHRTSMMLDHLQGQDVLPEVIPVLKDYAILAPLCASALVYMIHRGFILDSMNVYCSTQTSISMVLGSSGDCRWYRASRYVSCRMHLCIMSLVWGLGVF

SEQ ID NO: 1016127 - protein, 108 aa, Homo sapiens
MGGEGVSGPGPMPRTEKQEQNTIPRKTLRRTSGGAGCSRKLHPGFPSSGTFLSCPIACTESLSDEEPHWGPGRLGKHVVCSGVRGPEAVAVGVDGVVSIHVHVHLQRV

SEQ ID NO: 1016128 - protein, 103 aa, Homo sapiens
  misc_feature (52)..(52): Xaa can be any naturally occurring amino acid
  misc_feature (72)..(72): Xaa can be any naturally occurring amino acid
  misc_feature (85)..(85): Xaa can be any naturally occurring amino acid
  misc_feature (98)..(98): Xaa can be any naturally occurring amino acid
SLTLSPRLEYSGVISAHCNLCLLGSGGFPASASRVAGSTGTHHHTQLVFVFXVEIGFHHVSQAGLKLLNLKXFLDLYPGQINHLXSQGACCVLVLWLXQGLNH

SEQ ID NO: 1016129 - protein, 280 aa, Homo sapiens
  misc_feature (197)..(197): Xaa can be any naturally occurring amino acid
KRGVYEGHLRGGFSLRGENLESCKHWEWTRGGGARQGAGSVLGPPASGRVPLAAVLAYAILVLAEALQGCRAGGVIIQDVLGLPELLVDEDDGDQHQHLSHDAQEGPEGGQVAAHAEERMAWSEPLAAGAVAPVLAGVGLHVQVLNVCSDRPCEELTKNLRSEPFMRALSSESVILYQAQLVTGGTDSDLQTSMARXPLVDVVLSDFTAFTLGGPWSWMSAVPMGSGRKTQEYSPHWSSECTLNSVFWPGSASSFSTTPPFSQRCPVTSVALSFKEQVRS

SEQ ID NO: 1016130 - protein, 265 aa, Homo sapiens
MAPGGPSKPPPELPPDGTEKEGALEEFEAVTLGRPTVLGKSVLLWPREVQRSSLRHRGRTQDAVGPDENEDIKAQKWRNQTALASDRQATGPLVSAVNFQKGQGPGTDSGQWRRLCRPPGHDSDPEAESDRRGRRQAAPGRLVKTLQKEKILRNRILNGENPTFLKKKEVYDGNLRGGFSLKGENLESCKHWELDSGGGADREQESVLGPPASGRVPLADVLAFVILELPAALQGVQSRRRHHPGTSSGFRRFYVDEDDGDQHQL

SEQ ID NO: 1016131 - protein, 50 aa, Homo sapiens
MKIQYTVKTPEIQKPHKKKGITKKKKKEEKKTKEKQCKKERENNKKKGIC

SEQ ID NO: 1016132 - protein, 301 aa, Homo sapiens
SCAYLLPALLLARAPCPLLASLRIFVTGPEDSLRLIGRREQLPACKCQVALLGTLARVCACEALPFLVKKLGFLDSRVLSLEHLPALETVLSETPGFSCHFGVPVLASYTSCGALYLFSPVGPAQPVAPLPRSLNSPGPCPVCGRVSPVHHRGAPFSAPVADALTMRACPHCSLPFYGVYIFNQGHPGLAGSHSSPPGPSSYHLVPAEGLNLSPQEAVTPHTLSCHLSRPPSLAARHFRGTTFDRVCPGTLATLPRHSQTLPEYPSLGSTPVGPPASSNSARGPPGNPPPPPPPIKSPPPS

SEQ ID NO: 1016133 - protein, 101 aa, Homo sapiens
NHPRLAACCAWSQTCKLRCIDSPCVPAKTPSLRDYVNCCRNSSSPQTRRSGSLFVRLSCLSRLSLYHTADKHPLSENCHSRHLQAYAHSQPLGVEGMQDSV

SEQ ID NO: 1016134 - protein, 525 aa, Homo sapiens
CRFEILSRVVERRVVVLVSARLWCLVGVWRRHVGVRVVVPLFWVYPCCGRRLSDGVCRAPPCVLWFEAGLSGAVVCWALCGGPPGRGGSPVVSVGWGGGARPWVHHTGWGVTDNEGVALCFRRLFFRELAPPRIVVRDKFSPRGPRDIFGGANPVSPRRHVVLRSQEQGPDTNMFYHPRCVVPTARGLRINGRCFSPEKFSLFSNTICDTLKIVDAQSLSLTSRGRCAQRTQCCVLTDDRKAARATVGGHTQGNGLTPAESPSETPPYCELFGVFLSPDDILCVNRYNSVVIISDNTLLSRGNSVLVCGLRLLWDISVLSTLRVRYTPPQELLWNVAFVGARCYVRSSSMISLVTKLPHEMVYLSCALLSLCARPTLGIREKAPVLSSQREFKGGEFGFYHAATAVYSVLEGDLERDHAAVVVVLCGVLFRFLWPCLCLSWAYSSHDEHPLSTLPPRTKAPPPPPTAPTHPFPSWARNGKHTHAVWLHRKEKAPPWSCGNPGRRVESWDPFLLKSRPFCGYNLPI

SEQ ID NO: 1016135 - protein, 97 aa, Homo sapiens
  misc_feature (42)..(42): Xaa can be any naturally occurring amino acid
  misc_feature (61)..(62): Xaa can be any naturally occurring amino acid
FFETETHSVTQAGVQWHDFGSLQPPPPEFKQLSCLILRSTWXYRCVPPCPAHFCILSRDGXXPCWPGWSQTPGLNRSTLIGLPRCWDYRREHHKLAQ

SEQ ID NO: 1016136 - protein, 113 aa, Homo sapiens
  misc_feature (36)..(36): Xaa can be any naturally occurring amino acid
  misc_feature (39)..(39): Xaa can be any naturally occurring amino acid
  misc_feature (47)..(47): Xaa can be any naturally occurring amino acid
  misc_feature (71)..(71): Xaa can be any naturally occurring amino acid
  misc_feature (110)..(110): Xaa can be any naturally occurring amino acid
LFKVILLLTEINAYLIGSFGKANQKLKGMQPFVACXPMXWKPPPHFXVPPLLQVVWPFQTKPVFTLHILIXVPCLPKMYKTKVCSDHLGHMSSGPPEGCIMGAASLTLGXNKL

SEQ ID NO: 1016137 - protein, 37 aa, Homo sapiens
AAAVVPSGEEQRYRCHVQHEGLPEPLTLRWGGKGGSY

SEQ ID NO: 1016138 - protein, 102 aa, Homo sapiens
GGDLMFHIQKSRRFDEARARFYAAEIISALMFLHEKGIIYRDLKLDNVLLDHEGHCKLADFGMCKEGICNGVTTATFCGTPDYIAPEILQEMLYGPAVDWWA

SEQ ID NO: 1016139 - protein, 30 aa, Homo sapiens
GVHRIRVDFKDSVSLRPSIRFQGSQGHISI

SEQ ID NO: 1016140 - protein, 252 aa, Homo sapiens
LDGALVLEVDERDQDDEEARREMARILKELKQKPKQQQKSRAFYRIQATRLMTGAGNILKRHAADQARKAVSMHEVNMDVVENDPVSKVFFEQGTYQCLENCGTVALTIIRRGGDLTNTVFVDFRTEDGTANAGSDYEFTEGTVIFKPGETQKEIRVGIIDDDIFEEDENFLVHLSNVRVSSEVSEDGILDSNHVSRIACLGSPNTATITIFDDDHAGIFTFEEPVTHVSESIGIMEVKVLRTSGARGNVIV

SEQ ID NO: 1016141 - protein, 153 aa, Homo sapiens [sequence omitted]

SEQ ID NO: 1016142 - protein, 98 aa, Homo sapiens
  misc_feature (98)..(98): Xaa can be any naturally occurring amino acid
SLPIDIVLQTLLAFAVTCYGIVHIAGEFKDMDATSELKNKTFDTLRNHPSFYVFNHRGRVLFRPSDTTNSSNQDALSSNTSLKLRKLESLRREDFYRX

SEQ ID NO: 1016143 - protein, 698 aa, Homo sapiens
MVGLLLGGIIFGVDEKSPPAMKTDVFFLYLLPPIVLDAGYFMPTRPFFENLGTIFWYAVVGTLWNSIGIGLSLFGICQIEAFGLSDITLLQNLLFGSLISAVDPVAVLAVFENIHVNEQLYILVFGESLLNDAVTVVLYNLFKSFCQMKTIQTVDVFAGIANFFVVGIGGVLIGILLGFIAAFTTRFTHNIRVIEPLFVFLYSYLSYITAEMFHLSGIMAITACAMTMNKYVEENVSQKSYTTIKYFMKMLSSVSETLIFIFMGVSTVGKNHEWNWAFVCFTLAFCLIWRALGVFVLTQVINWFRTIPLTFKDQFIIAYGGLRGAICFALVFLLPATVFPRKKLFITAAIVVIFFTVFILGITIRPLVEFLDVKRSNKKQQAVSEEIHWCRFFDHVKTGIEDVCGHWGHNFWRDKFKKFDDKYLRKLLIRENQPKSSIVSLYKKLEIKHAIEMAETGMISTVPSFASLNDCREEKIRKLTPGEMDEIREILSRNSLSNPPATLSYNRHNLTADTSERQAKEILIRRRHSLRESLRKDNSLNRERRASTSTSRYLSLPKNTKLPEKLQKKNKVSNADGNSSDSDMDGTTVLNLQPRARRFLPDQFSKKASPAYKMEWKNEVDVGSARPPPSVTPAPRSKEGGTQTPGVLRQPLLSKDQRFGRGREDSLTEDVPPKPPPRLVRRASEPGNRKGRLGNEKP

SEQ ID NO: 1016144 - protein, 114 aa, Homo sapiens
  misc_feature (41)..(41): Xaa can be any naturally occurring amino acid
  misc_feature (48)..(48): Xaa can be any naturally occurring amino acid
  misc_feature (106)..(106): Xaa can be any naturally occurring amino acid
  misc_feature (113)..(113): Xaa can be any naturally occurring amino acid
SGLVTAGGALQLLCPVLCLEATSSSIFSQGPRGHPRAWGRXPAGPGWXPPCPVPSCSWGGIVPVWPGRWPHTLIHSHKYTHTHSHSHTHTHGCTRHTHSHTHIHTXTQSHTQXP

SEQ ID NO: 1016145 - protein, 31 aa, Homo sapiens
LLDRMFNSIPGLHQLAASSNLHFLQLRNQGK

SEQ ID NO: 1016146 - protein, 125 aa, Homo sapiens
GGQKQRLSIARGVVGSPKILFFDDPTSAVDARSENLVQEALDKELAGTTTIVIAEKISSVLHADRILVLDDGRLVGSGLHAELLASSAIYREIYETQKAKGGDEACMIFNARMRYFYRYLKRYWL

SEQ ID NO: 1016147 - protein, 55 aa, Homo sapiens
STATISTRTRAMWPGTTPASPKSRRDPRCLGWLHPGTSRTLCSRAAHPNLLVGRK

SEQ ID NO: 1016148 - protein, 51 aa, Homo sapiens
  misc_feature (10)..(10): Xaa can be any naturally occurring amino acid
  misc_feature (47)..(47): Xaa can be any naturally occurring amino acid
FSLAPADMNXHSSRSHSIFLINIKQENMETEQKLSGKLYLVDLAGSXKVSK

SEQ ID NO: 1016149 - protein, 81 aa, Homo sapiens
  misc_feature (26)..(26): Xaa can be any naturally occurring amino acid
SIDTMFAELGKVWPKFDGFVHSIGFXPGDQLDGDYVNAVTREGFKIAHDISSYSFVAMAKACRSMLNPGSALLTLSYLGAE

SEQ ID NO: 1016150 - protein, 96 aa, Homo sapiens
  misc_feature (1)..(1): Xaa can be any naturally occurring amino acid
  misc_feature (6)..(6): Xaa can be any naturally occurring amino acid
  misc_feature (16)..(16): Xaa can be any naturally occurring amino acid
  misc_feature (48)..(48): Xaa can be any naturally occurring amino acid
  misc_feature (95)..(95): Xaa can be any naturally occurring amino acid
XQDKLXGNKGTTAVSXKHGKQAEDPITTTHPPKDWGWVLQSCTGFHGXATKVDFLFSDRTFLGKVQHALDGEIRAMNMDLLVGLCFLEESTRAGXS

SEQ ID NO: 1016151 - protein, 90 aa, Homo sapiens
MPYQGRELAFKLGLEGKLVQQFTKIFMGLATIFLERDLALIEINPLVITKQGDLICLDGKLGADGNELFRSLILREMRDQSQERSALMTG

SEQ ID NO: 1016152 - protein, 111 aa, Homo sapiens
  misc_feature (3)..(3): Xaa can be any naturally occurring amino acid
  misc_feature (104)..(104): Xaa can be any naturally occurring amino acid
CVXPRFQHRSPQHHANKEYRRRPACTTQIQYREYRNSYSRDAKRGHRKVISVEQCDDNDGPKIVDNSQSHQKDLQRYRNTTSQQCQYTKCKSNVSSRRDRPPFXGNRIGHS

SEQ ID NO: 1016153 - protein, 112 aa, Homo sapiens
  misc_feature (66)..(66): Xaa can be any naturally occurring amino acid
LTFHEKLKPEAFHEAKHRTEGLLGWETCSKSLPGKLKTIHTFSWILKMLSPTEGEREIWNPDPAAXLQDSESHPCRPAGLQRRRPKRSEMQFKIPMTFSFKKKLGMRCALLL

SEQ ID NO: 1016154 - protein, 116 aa, Homo sapiens
  misc_feature (4)..(4): Xaa can be any naturally occurring amino acid
  misc_feature (67)..(67): Xaa can be any naturally occurring amino acid
HCPXRSGALCYPVNEWPSSLRGHKVHLVVQKLHLIKKNTIRLFFSPPRRSLALSRRMECSAMISAHXNLHLPRSCDSPASASRVAGTTGASYCPRPIFVFLVETGFTMLARLFSNS

SEQ ID NO: 1016155 - protein, 85 aa, Homo sapiens
LALWFGKRSSRLSPAILRELENTGFPSPMSVWFWGRVEAPVRSVILAPPALAFPRLPYVCAPARGSQPEPDAKAMLTSFRPFVTL

SEQ ID NO: 1016156 - protein, 43 aa, Homo sapiens
MVRVEGGAPGRSLLSGSALVVAAGERLWTGGVALGCSAVCFCF

SEQ ID NO: 1016157 - protein, 145 aa, Homo sapiens
GTPPKRIPPLRETPKTPLICQDSPKVEMKGKKLLRGSQRERVGLPPQKGKPPSGLTSRSSRKKLLQARRKWGPIFNILKEKNFQPRISYPAKLSFISEGEIKSFTDKQMLRDFVTTRSALKELLKEALNMERNDRYQPLQNHAKM

SEQ ID NO: 1016158 - protein, 144 aa, Homo sapiens
TRIRKTHAAFTLIVDPDKFLIIAYNMTSLFTIANTSFGGVSYAFLKTDRNIAAMDNRTFADISLIDKVVEISRLRAFSSFSAMNHGMDGFTHLFFKTLLKIGARDPDRIQYLIHFNPFTGVITNVMHGLNNGGIGSASDNLLSA

SEQ ID NO: 1016159 - protein, 140 aa, Homo sapiens
AAQARFPASIRTDKRQLSTGFNVKLEAIPAFFCRYCCKPPGYIIERALGSGNPDPFQNRLPCAYLRTLFHQTFKAFTFQRYGVDTHMDDDLRAFFGFQAERYGIRRYAAGLLKAYFSCLKVALNLTNEELAQTFTEWNKR

SEQ ID NO: 1016160 - protein, 36 aa, Homo sapiens
QAQTDRVSQQNLRGYYNQSEAGFHIIQRMYGCYVGP

SEQ ID NO: 1016161 - protein, 43 aa, Homo sapiens
PLNISREMLQQTKILKVIRKNLVKNCLDLFTDLAEDKAYKKFY

SEQ ID NO: 1016162 - protein, 33 aa, Homo sapiens
ECEYDGHRASSSSMEKSYELPDGRYITIGFERF

SEQ ID NO: 1016163 - protein, 35 aa, Homo sapiens
  misc_feature (12)..(12): Xaa can be any naturally occurring amino acid
  misc_feature (20)..(20): Xaa can be any naturally occurring amino acid
  misc_feature (31)..(31): Xaa can be any naturally occurring amino acid
KRDKAYFTKRLXPVNDIIFXLVWNKVDILKXRQGP

SEQ ID NO: 1016164 - protein, 115 aa, Homo sapiens
PPQTGPWKTPRGGFRPPRAPTPLRGPKPPGVLTRPRPSLRGGLAPRWGPRPPKFFKGALKKKGPNRGPRGFSPPQAPWGGRGKFWPRPFRSSDPGPPGKKFQVAPPPPGKKVFAG

SEQ ID NO: 1016165 - protein, 39 aa, Homo sapiens
SNEEEEKKDGDKKKKKKIKDTYIDQDELNKTKPIWTRNP

SEQ ID NO: 1016166 - protein, 36 aa, Homo sapiens
MTRNPWRLEVFGWWLEAPRRRHPAEGPQLERRQDGP

SEQ ID NO: 1016167 - protein, 35 aa, Homo sapiens
FLEIVTNPDGFASRTARISMWAKTRSHTAGSLCIG

SEQ ID NO: 1016168 - protein, 41 aa, Homo sapiens
MATASPDVFLLMVNGQVESAQFPEYDDLYCTILLCVRPRLG

SEQ ID NO: 1016169 - protein, 72 aa, Homo sapiens
LSVVSRNGPSERSKNIRGHLKRSAETGEYIGNRSLGTLPGLTGYLDYKYQKELIWIFNWESQNFGFLFKCKY

SEQ ID NO: 1016170 - protein, 68 aa, Homo sapiens
APGGPLETVLTTVPGSEEVLPSTPVTRLAYRGTEAEVVVVRTTRTRHTWGLGEEVGDRVGEGGSGRYP

SEQ ID NO: 1016171 - protein, 49 aa, Homo sapiens
SVRGRSRCRTQVETETASEVEEVGVVEEVLAPTLLLGSVHYPSPQTQRL

SEQ ID NO: 1016172 - protein, 33 aa, Homo sapiens
  misc_feature (9)..(9): Xaa can be any naturally occurring amino acid
SICVVEISXEEPLGIGADIIGGATCTESVAVEE

SEQ ID NO: 1016173 - protein, 74 aa, Homo sapiens
SINTMLGYSTVTKVAKQTGAIAFGSHDILFWLDIFVLLGLIFARKIKFDPRPLPRFQPFKSANSSVFVLIANLF

SEQ ID NO: 1016174 - protein, 35 aa, Homo sapiens
MCSTRGSQSLNPEMGAIFPAHHPHVGIVVAWLSWL

SEQ ID NO: 1016175 - protein, 50 aa, Homo sapiens
DQDELDQLSKAAVTALALLYGTKFNYAHIRQFIKQWKHYGLDLQPGIRYS

SEQ ID NO: 1016176 - protein, 70 aa, Homo sapiens
RTNNPNKITSPRNPLSNRTVCAWLAKGAGAVLWLGALVKAGHPPLPVDAVIGNWQGGQTRPGSQGVLPNP

SEQ ID NO: 1016177 - protein, 44 aa, Homo sapiens
DYLTETQAKTEVEPEREELSVIFYPAKRQDSEIVMPSRNYTHTQ

SEQ ID NO: 1016178 - protein, 100 aa, Homo sapiens
NLRVMREVKAVVQTQYNSILTTTFPDSDLDKLEMIDKEQIYTAVVYYDPELKPLSADDLRQLQQQPPVVFTSQQHQAGLNYLLGKMDLKDIQDHRLHRVL

SEQ ID NO: 1016179 - protein, 71 aa, Homo sapiens
IGIPPPPPPVGFGFPGTPPPPCAPSLPPYPDFAAPPPPPPPPAADYPTLPPPSLSHANRRVEEEEEDFYRV

SEQ ID NO: 1016180 - protein, 50 aa, Homo sapiens
LTGNGILNYHLFNRHQLRTHRHLTEDRRMRFIIFDDPSNLKLYPSNYETP

SEQ ID NO: 1016181 - protein, 51 aa, Homo sapiens
VNGFGRIGRLVYQGCFELSVPVDIVAINDPFIDLNYMALHACRSAFPTALG

SEQ ID NO: 1016182 - protein, 35 aa, Homo sapiens
MFSLCMVESGADEVNLHGVTSLGLKQALEFAYTGQ

SEQ ID NO: 1016183 - protein, 66 aa, Homo sapiens
MPLSFGVTPYGYESRFEIHFDDKFDVSFGREGETMSLGCRVVITPEIKHFQPEIQWYRNGVPLSPS

SEQ ID NO: 1016184 - protein, 36 aa, Homo sapiens
YNPFDGPNENPEAELPLTAGKYLYVYGDMDEDGFYE

SEQ ID NO: 1016185 - protein, 55 aa, Homo sapiens
DQRARITNQFFIRSKASRSPGRIIGMHHDQRAIPVAQELGIIACQADPGSQVGRF

SEQ ID NO: 1016186 - protein, 68 aa, Homo sapiens
INKWLFIIIILYYNFIGCTIIHIFISQTKCMTSFPVFHHKYCRLNILFADQLNIRALLGNYCNRCPLM

SEQ ID NO: 1016187 - protein, 56 aa, Homo sapiens
PVVAKGGSPLGSGIWNERKEQTLAFDRTDRYSWGNSRAPQGGHRRKFQGYIVYNLD

SEQ ID NO: 1016188 - protein, 63 aa, Homo sapiens
VNSKGLEIISYWLANSKIALVIEDTISSTKPFNDGKPTLTLDKRSYCLTFTFSRENCISFEVT

SEQ ID NO: 1016189 - protein, 71 aa, Homo sapiens
KIAVRNTTCRNNQKIDPTMVGMVNKKKKVVKPGYKRQIKSAIQRENQMDRRIAKREEMRAVRKSNKKRGGP

SEQ ID NO: 1016190 - protein, 56 aa, Homo sapiens
PQFGTNCLESLKTGFECQGGVKGPSRPTLCSPLFCARLIHTEEFASITPTTIKVAP

SEQ ID NO: 1016191 - protein, 140 aa, Homo sapiens
RLQNEIEDLIVDVERSNAAAEPWNKKAEELRQDPVAEWKQKYERVAERSSEMLSRRRLRSVSSRALTYCKNAYAGVPGYMLEDFKRDNKNLQEEYLHLTEQLGFSGETIHELEKVNAAGGRVDGAAVSLEEAEPLEHEEA

SEQ ID NO: 1016192 - protein, 31 aa, Homo sapiens
MAFAPELAVILLFKSLKLITRPIFITQAAII

SEQ ID NO: 1016193 - protein, 66 aa, Homo sapiens
QLEINFNTLQTKLRISNQILTLHEPPEGIAIVYGIIACVPWVRRLAAESVERGLRGSAYVSIEISE

SEQ ID NO: 1016194 - protein, 69 aa, Homo sapiens
SLGKRDFKGNGETPQDRYMSAAAMADDLSSVLSARRGNEERFAQCRKRLMIAHYSDGTNFKTTLKTGGV

SEQ ID NO: 1016195 - protein, 95 aa, Homo sapiens
PPSLRIVHTNTSECPIIWAKVKVDDNALQKAIADAKVAGMTTTQDKSATKTVNFNQFPDTQKTILADYQSQADNINALVHKHTDLNTTLLSQRQP

SEQ ID NO: 1016196 - protein, 78 aa, Homo sapiens
MANLLPVIELMKPAVNAESDPARKTRIILWSESKMFFMQLEVVFQNFWCVKLGVKILKKGINFIIGGVFIYRVTSPDL

SEQ ID NO: 1016197 - protein, 44 aa, Homo sapiens
MCYWPQDLKLASLHPGDCGFQGIRAGVGIHGPPGRCSAVFSNES

SEQ ID NO: 1016198 - protein, 113 aa, Homo sapiens
LIQSCPLDRQGVRNHIRIDVVHQCAVAEGFTITGVHGVTRELLTINDDVVTPRRHRSGGPHVVEGDHNGLHELLEVTEANFIGRDDKGEAHIPHVLIHRSTTGEAAVMVTPFS

SEQ ID NO: 1016199 - protein, 90 aa, Homo sapiens
GLLVLLVLLVLGKALVTVVRSVLLAPMDLLVLLVLLVNLVLKGERGAKGPKGEYGVVGPTGPVGSAGPAGPKWSPPVPAWKFVVMEAPLV

SEQ ID NO: 1016200 - protein, 93 aa, Homo sapiens
RSTNVRTSSCRVAILCSQCDMLVALPRLEHGQIAAMSPVWHNVNRGVVCPSVAFPPPYGLAVLFMLLLSNLFSFCEYERCRSYQCYYITGNSR

SEQ ID NO: 1016201 - protein, 81 aa, Homo sapiens
TVIGGDFLAEIIKTITARSTSNPSTRYQDTGPVISQVVHTLSAVLLVLWVLSFITKETKKFMVAQCIGGHWDFLSGVVSVY

SEQ ID NO: 1016202 - protein, 75 aa, Homo sapiens
WMNSYKPEELFNADGSLKDEVKALAPKGDKRMSANPITNGGRRRGEAPKTLDLSDLLLNSQTTLLTKTLDMNCPK

SEQ ID NO: 1016203 - protein, 82 aa, Homo sapiens
MSVVYVSRIEPTCSSRSINRGYNRGGPGRAYRGYPGIERLRQEDRCTPEGPHTHHQPCVGPRAFRMGTRKRGSRGKCKPLPI

SEQ ID NO: 1016204 - protein, 72 aa, Homo sapiens
PASLRSMAGCCAQGGRYRTPGRRGTDRGPRQQEVSRGPSPGHSRPINQLQDIPGIVKLRLPLLFSFFSEIIL

SEQ ID NO: 1016205 - protein, 64 aa, Homo sapiens
ELHRDLHQGIEAASDEEDLLLVDHPTGPGIDGNWPQFEEWSLEPQRTISRIEKGGRSPDEVTLT

SEQ ID NO: 1016206 - protein, 207 aa, Homo sapiens
MSRPRAETLEARVGDVCGLREQTVRSCEGSKFNPWHKTTAKDRHGKDSTHLNEEGPTGVCSEGNALLAAWLVRIGMLDEGKMKLEYILGLKIRGSSERDACRPTVVQAEALGHSPSTTLRVLIRQRHIRVRKTGWLNIPSFIVRLLIPRSTSTSLCALPYGGGRPGRVKRKNDQEGPRVGAGAGDDEEEDEVHLSLLAADCYRFPAN

SEQ ID NO: 1016207 - protein, 59 aa, Homo sapiens
ISGRSLLPCAKILMDGAHYLLLGTCLAAISVRVPYAIMFDLRAPCPMVLVLLQSTVYVR

SEQ ID NO: 1016208 - protein, 61 aa, Homo sapiens
LSLGNREGDVGLQVNLLEFGTSLSQVVGHCGSQMPHGSSGQSCPHGLLAQLNSWIAIIEIT

SEQ ID NO: 1016209 - protein, 52 aa, Homo sapiens
VRHTLVDVFTGHAIRHDAERDNRSIWLSPNSAAHLLAVPIVFAGIGLRQWQP

SEQ ID NO: 1016210 - protein, 46 aa, Homo sapiens
LYSNGAIAEVRPPTEDVDHNRVAVSPCMHGPPCSTLDHPDSSFSRD

SEQ ID NO: 1016211 - protein, 104 aa, Homo sapiens
SFGHPLCTPELLSLLGRPTSVYKPCFVPVPFSTLRVPLLPLIFPFKALSRGSVLLPSSHSLPSLTRTPFLILPGIQPWSELQQASLQSLVCSKTVASGCEKWAS

SEQ ID NO: 1016212 - protein, 35 aa, Homo sapiens
LPTYNMRILIPQYRHVKAPLPVNKRFQQKLNHPAT

SEQ ID NO: 1016213 - protein, 75 aa, Homo sapiens
QEPVESEGSQQVGGGGPKLSVASSEDLTQFMGTLEPEKGVEPSTNTPGLAPALGYVLLPDSGWDLGEVLCWSVIP

SEQ ID NO: 1016214 - protein, 241 aa, Homo sapiens
FGAYRSRKDESTQRKLQPKGPQKFQYVMVTKKSFLEDIRKALVRFPRVICDAQGVYACYGMAATVVLAGTLQSMAASPLMWRGGCIIRSCIPRKDKLDAFDSKPGYFRTSYWTTFSKSAVENCQDSWRRAVSTGVQAGIPMPCLTTALSFYDGYRHEMLPASTHARLQRDYFGAHTYELLAKPGQFIHTNWTGHRWHRVILVIQCLIMLLLSPSTIPQTRTFHVPHGTATWPFAVFSVQYF

SEQ ID NO: 1016215 - protein, 69 aa, Homo sapiens
NPTLLIEAPLNPKANRDKMTQIMFETFNVPAMYVAIQADAIPCYAFLARTHRPLFLDSGDGVTPQCSPS

SEQ ID NO: 1016216 - protein, 118 aa, Homo sapiens
GVANRAAVEEHVQPLDQDNREEIGQILDGIEQGEYTEPFTTETLKSVRKRSHWQQDLKIYKWAADHDYNGNDILAAYELYQSRISLVDNTVLNQYLQDLESRLDIGFFELADFEESLL

SEQ ID NO: 1016217 - protein, 53 aa, Homo sapiens
PATSDNGKDGLAYFLPLLKNELLGAGIEKVQDPQTEDRSLQPSHALRKKGSVS

SEQ ID NO: 1016218 - protein, 66 aa, Homo sapiens
SNHVLAIGVGLNEPNVSFGKGLVPIFGHNMGDYNAIWPYHPTEFSALQNMTAKSIIGKPIYVSEGK

SEQ ID NO: 1016219 - protein, 67 aa, Homo sapiens
NSYRFCSVITVNNTELAFTGIATTCIINNGHPTAHFIINALHHFIWFGRNDHDLHLLLTGIKGINHA

SEQ ID NO: 1016220 - protein, 57 aa, Homo sapiens
MSVVRTPLKSSKFFMRLGFCGVSVVVVGFLYDFLTMRDLRLISFMSSQTKRSPSSVF

SEQ ID NO: 1016221 - protein, 89 aa, Homo sapiens
MRKFFHNFMKHRVAGRIGGAVFYAVIVAVAMDYFLAARAYLLFWFYRFAQLVSTFIWRADSSWLALAFVNLPMLMIAWWRVSWRFAIFT

SEQ ID NO: 1016222 - protein, 69 aa, Homo sapiens
MDLEEELVAANLGARQQAWRFPLPIKPGLLLLSWAHCDHWPLYSTACRCFKAEPRPLTPGWEVAKDAGA

SEQ ID NO: 1016223 - protein, 55 aa, Homo sapiens
CHHKKYCREEASAQIAPRTHPYSPKSEAPRTTRDEIRRASALMIVERRPPRQDSP

SEQ ID NO: 1016224 - protein, 36 aa, Homo sapiens
MIHVKRLLEAFLLSALTLLVLLVRLAVDVHSPFSST

SEQ ID NO: 1016225 - protein, 112 aa, Homo sapiens
SRSPDLVILLPLPPKVLGLQACNCARPNNTVVIKYFPCLSSCLRCWCRCMLLFCWLWQRAHCCTDHSCSGDCFWPVADFLHCVGGVMWCSVSVCVGAWGGRCARGVVALCLF

SEQ ID NO: 1016226 - protein, 48 aa, Homo sapiens
MSSNAVISLVFFNCANLIADPTPNGIPSCFTVTTLSIPLTNRIENWIY

SEQ ID NO: 1016227 - protein, 101 aa, Homo sapiens
LQKSGAPKIQDSDFKYLNTHREGYPNKQVDVLNIFGNLQDGSNSDGDVTVVSAKSLKYLLRDRYKHYQELEISGKKGQHSQLHENARVDRAIGEFLWPIVE

SEQ ID NO: 1016228 - protein, 44 aa, Homo sapiens
GEVLGLWFPGRGRHAKVLLGVDWKAGALGGPWEGYQSQVSEALS

SEQ ID NO: 1016229 - protein, 67 aa, Homo sapiens
DCPGFTYPTDSSVETQNDVRESIINMKATKRLTVPEDVAGSAVFLASRLANNVTGQCLYVDGGLVMH

SEQ ID NO: 1016230 - protein, 57 aa, Homo sapiens
  misc_feature (50)..(50): Xaa can be any naturally occurring amino acid
SCTFLVAQAELTRDKSSKKRPWQWDPLEEERLPSQAAPPLVLTTPLGGGXVHWVCVP

SEQ ID NO: 1016231 - protein, 133 aa, Homo sapiens
  misc_feature (43)..(43): Xaa can be any naturally occurring amino acid
  misc_feature (55)..(55): Xaa can be any naturally occurring amino acid
  misc_feature (76)..(76): Xaa can be any naturally occurring amino acid
ERRAKWNASDSSWMLNSSEARSQSDRLRSAGYELSTITYSVSXHDTIIGDTYENXEGSHKLCYKKSEAVIEIIGTXNLYTVRNGTRRPGWRTSVIEGLRSRRHWPESYSSNVLVIVQVNHGTRYEGLTSRKNR

SEQ ID NO: 1016232 - protein, 52 aa, Homo sapiens
VFYRELFYSIPAAPLDAMKHGLQLCPTTPTGSHFSRLSDGPLPDGNQKIGAA

SEQ ID NO: 1016233 - protein, 63 aa, Homo sapiens
SQYGEIARLPRKLPEGYALEYKEEAGIRLASYRRSKKKDRTQRTPPLLAPQRVRSGAAASLVR

SEQ ID NO: 1016234 - protein, 62 aa, Homo sapiens
  misc_feature (28)..(28): Xaa can be any naturally occurring amino acid
GSHMLNRQGEGQRRYSGERDEGRDHSAXTRPGAQQCPLLVLLFSVADDVHHVLVVQVASHVR

SEQ ID NO: 1016235 - protein, 94 aa, Homo sapiens
REQHVYLTAHRHREEGFQAIYHVLLHGLQGVWWMAVEQRSDMFRPSSFLYVAVAAHILYTLRSYSEKGGSPSGNRPPVQKVARLHSTCRVWGLG

SEQ ID NO: 1016236 - protein, 41 aa, Homo sapiens
GGLADDTCGANAKQSRDSCRMPSRVVADAFFSDALWEALNP

SEQ ID NO: 1016237 - protein, 108 aa, Homo sapiens
KAQNGVAYVQEQRANMPPREPLFKRRERPKKSITDFGDDPLGVKTTKTATVDPVVPPATAPADWNLSEPDIKWQGPVRADCNTATQRPATQLCANPLKAQPSRNRQSS

SEQ ID NO: 1016238 - protein, 65 aa, Homo sapiens
MDYLALTFPSPKPMALPSSPASDTDAGALAGLGVDTAGAGVGAVSVGATGPCHLISGSTNSVAGA

SEQ ID NO: 1016239 - protein, 86 aa, Homo sapiens
ALEVVLVGKDGYNRIEYEPGTLVWAVFSIYPPGDMCRSQSSQYKATVELGNQPHKEIRLRPETTYSKKSLHRLCCAARHCELLQSR

SEQ ID NO: 1016240 - protein, 88 aa, Homo sapiens
MVCLSLSSSETYTSRTAPEVCAPGINHAPGTVQLHGIKDAGWFTLSPVSSRLVTVRRRASYREGEPQHHKGSVRYVLIIELDRDLIVT

SEQ ID NO: 1016241 - protein, 74 aa, Homo sapiens
LQREGSIETLSNSSGSTSGSIPRNFDGYRSPLPTNESQPLSLFPTGFPYGTSHLLLTGWPTHPLEGPGHSLPPG

SEQ ID NO: 1016242 - protein, 38 aa, Homo sapiens
VEIVPGSHLEWIPDRALTLLFCLLSCMLSSLQPVRANQ

SEQ ID NO: 1016243 - protein, 91 aa, Homo sapiens
THCRFNNLITQLIDKPDIFSNGMNFSGEMIPRSADTQRHNASAPRMAGVNINDRLIDEEEFANFHCMANITRNPDILFYFVEFRVITENKL

SEQ ID NO: 1016244 - protein, 91 aa, Homo sapiens
IRALYTKMVPAAVSHSDFWHRYFYKVHQLEQEQVLEDALKQRAEQSIFEEPGWEEEEEELMGILPIFPKEAKFPLAKFFTFPEGEPGPQSP

SEQ ID NO: 1016245 - protein, 66 aa, Homo sapiens
  misc_feature (29)..(29): Xaa can be any naturally occurring amino acid
  misc_feature (41)..(41): Xaa can be any naturally occurring amino acid
  misc_feature (63)..(63): Xaa can be any naturally occurring amino acid
  misc_feature (66)..(66): Xaa can be any naturally occurring amino acid
SEVPSCHSIYMRQDGFLAHPSRTEGCMFXKGPRQFYDDTCXVPENFDGDIKTRARTVSGRTHXPKX

SEQ ID NO: 1016246 - protein, 109 aa, Homo sapiens
  misc_feature (16)..(16): Xaa can be any naturally occurring amino acid
  misc_feature (43)..(43): Xaa can be any naturally occurring amino acid
EVGITNVDISTVDKDXSIAPKITRVTYPAKAKGTFIADSHQNXALFFYLVDVTTGAELTPHQTFVRFHNQKTGPEVVFVAAPANTPVYTFPLATFARPLAFASAFRTYT

SEQ ID NO: 1016247 - protein, 108 aa, Homo sapiens
  misc_feature (2)..(2): Xaa can be any naturally occurring amino acid
  misc_feature (29)..(29): Xaa can be any naturally occurring amino acid
  misc_feature (50)..(50): Xaa can be any naturally occurring amino acid
  misc_feature (55)..(55): Xaa can be any naturally occurring amino acid
MXSPGRRRSGPQPWRREILVRRLPGSRQXFSFFKEKKKAEGLKFLDSKIXTSSSXTSPEEAMGTPRIQHFLILLVLGASLLTSGLELYCQRGLSMTVEAVPANMFNWT

SEQ ID NO: 1016248 - protein, 55 aa, Homo sapiens
  misc_feature (16)..(16): Xaa can be any naturally occurring amino acid
  misc_feature (18)..(18): Xaa can be any naturally occurring amino acid
  misc_feature (31)..(31): Xaa can be any naturally occurring amino acid
IKLKSSELQAIKTELXQXKSNIDALLAALSXSLRVKANPDGKKKGDGGGATAAAA

SEQ ID NO: 1016249 - protein, 33 aa, Homo sapiens
  misc_feature (25)..(25): Xaa can be any naturally occurring amino acid
MAAALDSVWALLGPVSVREAAAARXRGDMLRPC

SEQ ID NO: 1016250 - protein, 62 aa, Homo sapiens
  misc_feature (39)..(39): Xaa can be any naturally occurring amino acid
  misc_feature (54)..(54): Xaa can be any naturally occurring amino acid
SRWPPRRVTPRAPPAPIGGELSVGWRWSLSPVLAFHFLXAQAQAIPFGRVERPXKPWSGPGS

SEQ ID NO: 1016251 - protein, 112 aa, Homo sapiens
  misc_feature (9)..(9): Xaa can be any naturally occurring amino acid
  misc_feature (20)..(20): Xaa can be any naturally occurring amino acid
  misc_feature (58)..(58): Xaa can be any naturally occurring amino acid
  misc_feature (92)..(92): Xaa can be any naturally occurring amino acid
LRAAVPRIXPSTRSYPTDSXYVGDLHPDVTEAMLYEKFSPAGSILSIRIFRGLITSGXYNYAYVNFQHTKDVGDALDTMSFDVIKGKPVRLXGLSVIHEFEKVGVGNIFVKN

SEQ ID NO: 1016252 - protein, 68 aa, Homo sapiens
  misc_feature (31)..(31): Xaa can be any naturally occurring amino acid
  misc_feature (50)..(50): Xaa can be any naturally occurring amino acid
  misc_feature (62)..(62): Xaa can be any naturally occurring amino acid
LLDLLTNRVPPGVDEAAYVKAGSWLLSRKAXNIPSAAPEKAIELLGTMQXGYNIHPLIDALXDAKLGT

SEQ ID NO: 1016253 - protein, 48 aa, Homo sapiens
MGPEEWPWCQRVKAELTQQEQGFCPQAAAAAQLKPASHIVFRVVLEPA

SEQ ID NO: 1016254 - protein, 64 aa, Homo sapiens
GSNTCSQEPGLEPLEPESTLMSIVGAPTLLNPESCGIDQGPALCSTPPGTEITGTFGGTPYLSR

SEQ ID NO: 1016255 - protein, 79 aa, Homo sapiens
EGEKIRKKYPDPCPCIVRKGLPKPRIGDLDKKKYPVVLLILTVWFSFYLLEFRKRIHLRAEDALFFFVNNVIPPTIATL

SEQ ID NO: 1016256 - protein, 101 aa, Homo sapiens
AKVQEGGSGFSAGEKQLISFARTIVKDPKILILDEATANVGHRERKYLIQQSLRKMRQNRTTIAIAHRLFTIKDADLILVLDKGEVVERGTHDGLLAQRRF

SEQ ID NO: 1016257 - protein, 79 aa, Homo sapiens
GRFVTIIHLVLSKISCQANCPKANGMPFLGYPWQLMGPHPKFERIQKTNVKARTIVFIQMFPNSGVACMFTMLIGPKLQ

SEQ ID NO: 1016258 - protein, 79 aa, Homo sapiens
IQLDERLIRRCNFEKWGGGVGINVSNLREAGAPTYWDRPFSRWRCAPHEVVGRLFHIFITSWGTTRGRVLSICQCSLPT

SEQ ID NO: 1016259 - protein, 75 aa, Homo sapiens
  misc_feature (15)..(15): Xaa can be any naturally occurring amino acid
DRISQIKARLIEHSXNSNSNEFASAEEMAEIVDLIVTQKVDGVFADNDMMAVQLQNALRRANIRVPEDVIVAGMT

SEQ ID NO: 1016260 - protein, 37 aa, Homo sapiens
MRLPLATWNSFLTEEIQTPLLLYHEKGFGLATCRPAW

SEQ ID NO: 1016261 - protein, 106 aa, Homo sapiens
MSFWAVCLSPSTLLLSWERMPSSRSLGDYDPYKHTAGYVSEYRFVPDQKEELEEAIERIHKTLMGQIPSEAELNYLRTAKSLEMYGVDLHPVYGENKSEYFLGLTP

SEQ ID NO: 1016262 - protein, 91 aa, Homo sapiens
MTALFVMPNPTNCTTCTIVHSTVERVNSDKLTAGHFCLINNAKKHRNMIVAVLFGQTKPRICLQYGGLYIFKIEKRRDFLGERINGNPPVF

SEQ ID NO: 1016263 - protein, 69 aa, Homo sapiens
RAALSGVPAIKRVDNAIELVIEDGKKGQFPGGQTVTYGLKQKGVDIARDSMPENAWAATQAAKQEILDG

SEQ ID NO: 1016264 - protein, 52 aa, Homo sapiens
HSKKVQSWIPTLPPDSIDMEEEPGDKAPAYQLFTGDPSRLPCSKEVYIQEPP

SEQ ID NO: 1016265 - protein, 46 aa, Homo sapiens
NSLSRYPKPPACILPTSQYFHRSLSHKAYTQYYTDHSSPSSQTSRG

SEQ ID NO: 1016266 - protein, 73 aa, Homo sapiens
EHSSFGLQVRLRQLSIVILQDVPYWPYLTAETLKNRMGHQPPPPTQQHSIIDNSLSLKTPPECLSLPFHPQLY

SEQ ID NO: 1016267 - protein, 49 aa, Homo sapiens
PPLPRTPTIASVIGPGGKHVQAQDPSPALGCGGLSLEPPTLGPVPEGKR

SEQ ID NO: 1016268 - protein, 85 aa, Homo sapiens
  misc_feature (6)..(6): Xaa can be any naturally occurring amino acid
NESKQXAEDAILVIGSGAFRMGDAASGGYATTITLSELRRLQYPTIIMNNNPSDATLLPHLADKQYFEPLEISDVMQVVELEQPK

SEQ ID NO: 1016269 - protein, 54 aa, Homo sapiens
  misc_feature (19)..(19): Xaa can be any naturally occurring amino acid
ALTGIPAVRQGTTIFQQRXIFAGKQLEDGGTLSDYNIQKESTFNLVFRLRGGMQ

SEQ ID NO: 1016270 - protein, 49 aa, Homo sapiens
PVYLNFTRAELIFIVDFEFATKEDPRSSYERGPRSLVHRVNFSSSEIPA

SEQ ID NO: 1016271 - protein, 97 aa, Homo sapiens
  misc_feature (87)..(87): Xaa can be any naturally occurring amino acid
DLVEIKGGDRVPEDLRIISAHAKVDNSSLTGESEPLTRSPDCTHDNPLETRDITFFSTNCVEGSSGRGGGPATALSWAYRHPGIQVXRLADAIAIEF

SEQ ID NO: 1016272 - protein, 63 aa, Homo sapiens
  misc_feature (43)..(43): Xaa can be any naturally occurring amino acid
GSVKLVAFEAGLRTNMVPGIARATVVTAQAEAMVCRFPRLFGXNPQISGSAESDGDDIKFVVN

SEQ ID NO: 1016273 - protein, 96 aa, Homo sapiens
AQRRERCRPKTMLEKNPEFYAACSAAIKQRPRVHSVDSFVHTFKRVHGDEVFPSTPTVYRDIEAGRFELRAHDLPRKPSLRIKRAIPITRTNKTGL

SEQ ID NO: 1016274 - protein, 66 aa, Homo sapiens
IVGVDDRSANLRVFWDAAVCEPSTGVIFKCFGFEIMSFGVAVSRIFELDKTSIGQQMETTGFVCWI

SEQ ID NO: 1016275 - protein, 65 aa, Homo sapiens
YERVRDYSQKVLERQPDNAKALYRAGVAFLPFWQDYDPGPPTNLPGCRGIGIEKVSKKGFEFKDK

SEQ ID NO: 1016276 - protein, 124 aa, Homo sapiens
HTQGFSSPFTSTAKPPGPPEDPSEGGRGGRFQRPPFKEEDAEAQKGEVTCPRAKNQQCRGPKANLPPLEPQPPGPLAVPTPPLFSLCPPPPQLTWACRDPKGSLAAEIFQEWQLGEAWSTPERN

SEQ ID NO: 1016277 - protein, 66 aa, Homo sapiens
TYSALNFRETSPEQRGSKVHTKMTVNDQTIITRNGKVVSMATQQQHEVLYKQSPLPPETVLTPELP

SEQ ID NO: 1016278 - protein, 72 aa, Homo sapiens
FPTNVTNGHLGLFHFRLHVFNQFLTAVFGQLRNHQPNRFPVVLRRQARFRFVNRPFDVLLRSSSRTARYTLA

SEQ ID NO: 1016279 - protein, 49 aa, Homo sapiens
FVEAATNSLQVVEAASTSSSPKAAWRPAFVRPPTCLVDNYSWFLSAGAI

SEQ ID NO: 1016280 - protein, 62 aa, Homo sapiens
FGHSFSVPASSSGVVVKDIGLLTSPDARFFALSARFEPFCIKGLALVVPLTVNLGGTSLWAA

SEQ ID NO: 1016281 - protein, 77 aa, Homo sapiens
  misc_feature (14)..(14): Xaa can be any naturally occurring amino acid
LQLSQCLSCGMLGXAAHIVLAVLRVWPLQSHAPAGGIGPTGRSWVLLPGGLGSVTLYHCGPSPQELAYASPAEAILP

SEQ ID NO: 1016282 - protein, 46 aa, Homo sapiens
GGRGCKGLRVSVRMVAGDQEQHVIIEVKTVKGFEEEGQEISSVSPE

SEQ ID NO: 1016283 - protein, 46 aa, Homo sapiens
GRPESNLKRVGEADSGGVVVANPKRELKDLNASLGLTVDRAYTGRF

SEQ ID NO: 1016284 - protein, 43 aa, Homo sapiens
DEARKKKALSNMMHFGGYIQKQAQTERKSGKRQTEREKEEEDS

SEQ ID NO: 1016285 - protein, 50 aa, Homo sapiens
ARANFDIIRSSVINIIIKSKIIRAKRDVGRDGRTTVTDAFRSIIDRNRYR

SEQ ID NO: 1016286 - protein, 51 aa, Homo sapiens
SDAKKDNRLTLTVVTRRCRQRRDLIHFDVNCWEWERIACMELQTERTRAAR

SEQ ID NO: 1016287 - protein, 52 aa, Homo sapiens
LHRITLSARDMEMKGASFIHLITVGQYSNDGEVRATEYNDSGVDIYGGVGQI

SEQ ID NO: 1016288 - protein, 283 aa, Homo sapiens
  misc_feature (3)..(3): Xaa can be any naturally occurring amino acid
  misc_feature (221)..(221): Xaa can be any naturally occurring amino acid
  misc_feature (275)..(275): Xaa can be any naturally occurring amino acid
TPXIVLGPLTDRTLTKFHFDHLTWGPAAVVTQSAGTLGEAGEVRKASYRFFSSSHLVVDRQKKDLGTCPGGHRPQSPQGPNLGHGGGCWCVGGGGGQLPPAWQRKAQFQITRDLTVNTLKLVLRPEELWLGLVLVLVPGGISQRKKLQFRRWAGSGCTHSGLGRVPGEGGGLSHSHLASSPEGLSGPQVPMFQGSPGECRSEVSDLVLQFSGNVLQAEGQXHLLGGRILLQGIYELVTVLLRVLVELVESKRVYKECVCAREISARCVYMFWALXCTICRIPL

SEQ ID NO: 1016289 - protein, 33 aa, Homo sapiens
  misc_feature (12)..(12): Xaa can be any naturally occurring amino acid
  misc_feature (26)..(26): Xaa can be any naturally occurring amino acid
PAASGGTPRPAXLPPAQPCQGSPAMXLFRFLGD

SEQ ID NO: 1016290 - protein, 184 aa, Homo sapiens
  misc_feature (64)..(64): Xaa can be any naturally occurring amino acid
MYENTLIIYLKQLRNKVILLFFYNPGKKKVHIGSWAQGKAPPEPLSEKRLFRTCRFWNTTAPTXGQTTMPRRAHSSSRNTRHPVRTPLRKFPVGSSTSSLGDLRKLTLGSILVQSMLSSSGVCSTISWNIVMDDDVMIVRQVAGAGGGPEVVAGGQAHSRDVNAVLPLVLVLQVGHHRQTAPGS

SEQ ID NO: 1016291 - protein, 202 aa, Homo sapiens
GWIWRWRLGPAVPGKAHEASRHWTHEPTLNLLILLLLKKSVTAEITDGNSEHLKREHSLINPYQGGGASSKPRRDFQGITSRKIQDGRRTPDERTKRALVWNHQPGGRKDSCKGTATAKATAQGRRTAKETASPCGTPGTASGQGLCLEAKITSTAVTIILDTYPNDETTERVGPYIAEKVNKGARADDHSKDGRGTERAGG

SEQ ID NO: 1016292 - protein, 179 aa, Homo sapiens
VCGACSPDALCGLCMFFVACGSSWVRFSQVVCLLVCVSLYYSWGLIPALRFPPCAILCDSLLPGGPHPFKLGLSRAAFVCGHYVPELFPLLGDPSPSGGTFALAQFRSRRRMSFIAPKTTVDDPQGDFSPTALCGVPGVPAPVFVRSPLGNHCCCPPGWGPLGFPRNPLMCREPSRFFT

SEQ ID NO: 1016293 - protein, 44 aa, Homo sapiens
GTSASTEWRLRRGLYLGPGANDELFFNRDYKRQQIPILVLPNIN

SEQ ID NO: 1016294 - protein, 62 aa, Homo sapiens
MGCGPCQAAVDAGLVPRHSGVGSWDAGEVLLFGWCVARVATGEAVNWEPRAVLCTLAASWQS

SEQ ID NO: 1016295 - protein, 91 aa, Homo sapiens
  misc_feature (28)..(28): Xaa can be any naturally occurring amino acid
  misc_feature (42)..(42): Xaa can be any naturally occurring amino acid
  misc_feature (50)..(50): Xaa can be any naturally occurring amino acid
  misc_feature (64)..(64): Xaa can be any naturally occurring amino acid
PHENCSHLMVEHTPQRGEHRLDPRSSPXVNLPSSRPKDNVDXPHGEPSRXRGLTGWRVFLLLLXLSLGIVVCAVVGAVVFQKRQERDKRFY

SEQ ID NO: 1016296 - protein, 45 aa, Homo sapiens
  misc_feature (12)..(12): Xaa can be any naturally occurring amino acid
EEEEEEEEESEXGEEEDDITSAESESSEEGEQGDPQNATRQQQLE

SEQ ID NO: 1016297 - protein, 255 aa, Homo sapiens
  misc_feature (162)..(162): Xaa can be any naturally occurring amino acid
MRPSVEWLPHQGRKGGRGGSLLVALLGDICGVWDRIITPTGGAHTTHSLFVGPPSRKICCCRCLVVLFLLLSRTNNPVGRTAVWCAPFLYRVGRPICSGPSPPLLLLCGPPSPWLLVPLLARLLFWWAPQLSPRGVPPLGVLPAPPFIGSSPPLCPAPRGRXERRALSWSTAPLRRSSGGLWERALLLMGASPRVVGRPPPRLMCASEEGASSRRRGSFFTRELLSSACYLFTRPHTVAPHHTPVREFGAPPPLG

SEQ ID NO: 1016298 - protein, 71 aa, Homo sapiens
  misc_feature (48)..(48): Xaa can be any naturally occurring amino acid
PEFRKHNIGRMLLGRSREVLEQWSRDHPDEAVMGVAGVIQNPALVAKXRPPTSPVGAFTLVGYTQEGEQIR

SEQ ID NO: 1016299 - protein, 35 aa, Homo sapiens
MMSVGTANVDVPCEGGQSETTGYLPLWTRAQERSV

SEQ ID NO: 1016300 - protein, 77 aa, Homo sapiens
  misc_feature (12)..(12): Xaa can be any naturally occurring amino acid
  misc_feature (40)..(40): Xaa can be any naturally occurring amino acid
  misc_feature (52)..(52): Xaa can be any naturally occurring amino acid
  misc_feature (66)..(66): Xaa can be any naturally occurring amino acid
WNATLDRLELAXEETATRPADLLMAGVRRVAVRDSAGHCXHVACTPAFDLYXKALDAYTPEHAATXTGVDAADIVEA

SEQ ID NO: 1016301 - protein, 118 aa, Homo sapiens
  misc_feature (106)..(106): Xaa can be any naturally occurring amino acid
KHRLVLQVADFRGVRHQQQRDIEAIVDQHLLDGFAFAFDDAHAQVADRREMADISDGIRYAEMVSVIPIRTCPEICSGSSCAAETVRIDGHRRVLHMTQESFAGRXQTDAFSDDAEAA

SEQ ID NO: 1016302 - protein, 40 aa, Homo sapiens
FTCPFVEKFSIDIETFYKTDTGENDDVFSLSPGEKNQLIT

SEQ ID NO: 1016303 - protein, 57 aa, Homo sapiens
DLCNEEVFPKDITKWNSNDLMDKMENPEPEDPQDGIYHQSSPEFRVASSVEQLNIIE

SEQ ID NO: 1016304 - protein, 120 aa, Homo sapiens
MAVTGSLAVPNCSSGHLPTLLPMSRGSAQVPVDQKPGPRIWSLQLSRQGALLSCRVLRALEGADKMAKRRVVMASLYLGTGPLEQELVDCLESSLEKSLQSKFPSDLKVSILLDFTRGSR

SEQ ID NO: 1016305 - protein, 33 aa, Homo sapiens
DQAQHARRTLLDELVTLDLLLPPGVRGPCSKVY

SEQ ID NO: 1016306 - protein, 76 aa, Homo sapiens
WRLYLLKSTSLNYTKEYYDRHLRQKVTMAERVGIGLDLDPQLAAGYELLQGAMTALEEHDVDQLMDLLVHQMGRAS

SEQ ID NO: 1016307 - protein, 50 aa, Homo sapiens
MSAGRTITSWAGVKHSRDYDSSENYPGYVHIHDYTGLVIGTIAGISKQVS

SEQ ID NO: 1016308 - protein, 41 aa, Homo sapiens
RRYRMWVSVEFNSSCLGIYLMRKLISPIGGFTEAWLVSRSQ

SEQ ID NO: 1016309 - protein, 34 aa, Homo sapiens
MSYELLAVDIIITIHTQLYVCIALYELFGSPGFI

SEQ ID NO: 1016310 - protein, 54 aa, Homo sapiens
QGAVARSGLVVPLPQRTHVAVIIDASRRGTRFNSYANQYHDTRRHPGETITNLP

SEQ ID NO: 1016311 - protein, 37 aa, Homo sapiens
TQTNSEPAKVYYSVTNLQAILDWANEHDTYVILDEIY

SEQ ID NO: 1016312 - protein, 49 aa, Homo sapiens
AEATYSPDPSVCRRMHVYVAGPSPSRVVKTNVIPESSLQDVISVVFRLL

SEQ ID NO: 1016313 - protein, 53 aa, Homo sapiens
GSFAFQDLSHPGPQGLQQTQVALQEEESTTFLIATVKNRRVSSDPIFIGKDIH

SEQ ID NO: 1016314 - protein, 48 aa, Homo sapiens
TRGPYRVERRYYLVRVLEYFVTDIGTNYDDGRVTRGAWLTVLDVSWLS

SEQ ID NO: 1016315 - protein, 36 aa, Homo sapiens
MLKAQSIRNSQSSPKPAVYAEVSLQLVPRASVNSAT

SEQ ID NO: 1016316 - protein, 53 aa, Homo sapiens
VTTLEHKEVKWTYPGEKRSKKCSKTNLRPRGEIKGKMMGSDDPEKKKPGEQRR

SEQ ID NO: 1016317 - protein, 52 aa, Homo sapiens
YPAAGEECTHSSKQQEEQDNLGSMTEERCVIDAGFKKQGCQRCDAEEWKERM

SEQ ID NO: 1016318 - protein, 50 aa, Homo sapiens
HKMLSLCGPLIAPAPLTPPPTESLLLLFIANRLVSRDLSAHAASRRSAYV

SEQ ID NO: 1016319 - protein, 48 aa, Homo sapiens
MRPPRVPITSPALSVKLTAPAYHLSQDTFVTALDPNYRTNKLKSKIPA

SEQ ID NO: 1016320 - protein, 71 aa, Homo sapiens
DPAVSVPHFRFRYITFLFPFINLFHDMAVLESLNLLWLGRLPNLQIILCSINPLNGMVAHGWYSDARCERP

SEQ ID NO: 1016321 - protein, 57 aa, Homo sapiens
TESRLLQRDVQIILESCHNQNILGTILHPNGNITESPSGRKGFARCVDSVALQINTP

SEQ ID NO: 1016322 - protein, 59 aa, Homo sapiens
THKAARVLGLDEGKEVLDIAKSAVGRYYYRPRRSAKTLTTNYRVLLVNIERGQKQCEVL

SEQ ID NO: 1016323 - protein, 81 aa, Homo sapiens
QAKAVLSAEQLRNEEVHAGLGSLLRSTQQLHGAQRDLEAGQPTVRTQLSEFADDFVRRHSQPLPTCEPLSQYTLFPAHRAQ

SEQ ID NO: 1016324 - protein, 64 aa, Homo sapiens
AAGCSQDAGTPGLVQRPLPTSIGRSCSGVPVENLSSVALRLRHWLSPPTPGTQRSCFHALLRPG

SEQ ID NO: 1016325 - protein, 125 aa, Homo sapiens
  misc_feature (86)..(86): Xaa can be any naturally occurring amino acid
MCLLPLFHGGPLTTILGGTTCITHDAFWTPKCGEIVKLCGEYTHTLCAIRNIYERLSEALCIGAIVCALKGDTLCLAEHAFCTHKXGRLSQNCSLHSHVTSSRRSHEVRTLRVFVASLLARPLLL

SEQ ID NO: 1016326 - protein, 342 aa, Homo sapiens
GQQSGGARVPPWTDLTRGPPVPECCSNVYRRCTAPMLNLRQPSSHANNGPASTTSCLTLEHRTIGALYLVALLPKNLADWQDVMLACWWTLDQCPGRDGRPHLGRRMYHMDAARYNVTPAGIAASDCTVMALADTRITTHRIPGSTSTGMKIAYESQAQASETKTDRSIQAQTVITEDGCTAQGGYHESTAPIHRHDPITHKRTLRRASRTHESNTHPCDDADKHIKRQVPHIKREITPTILGYSTNKTIDCDTTQEDKKTTRHQTESAQKIHTHEYINRPYQSSHMKPKAPEQRSQFTQKSARADTGPNTGREDKHPNGRQPQGKYHYPCTCWTNSNTKEH

SEQ ID NO: 1016327 - protein, 55 aa, Homo sapiens
RFLSILGWKLATERQASLPLHILEGGKTDGLQFPGRRLMLQEARGAGPLIIVQGL

SEQ ID NO: 1016328 - protein, 69 aa, Homo sapiens
RLVDPLIRKHQEGHVEQQGTHHGQVDDNDDLDGGGAASSYLHSQQQAVGSTSWPGTDGLHHVRQLQSFL

SEQ ID NO: 1016329 - protein, 92 aa, Homo sapiens
MTVGEKHNLPTGEDAHPPNLREEEKTQQQRRQAQEKTQYESSEQKRTGRNKEGQPHSNEVMGNNSTAPHERILTSGTNPNQEHQAKHKQGRE

SEQ ID NO: 1016330 - protein, 264 aa, Homo sapiens
MVYFLFLLRDQMGLTGVTMEENNLGYESPAHFVTQKDLTPLGESVTHLEDDQSGLNDLLNPSSSLDCVKPRDTPLSKVQCQPALEAGNLHDPSSHQGSTKCTNLLSGTQHWTAQAQPDSITKERPDIIQAEDAKPTPDSIKGTQIDIICQNTGKPHNGATEAHILTLEVMTIQGKPKEQRRQKEPNRRPRQEVHPPRRHKSNYHQVVRGGDRATHNVTNEHPTPLLTSTHSPVVDKRPSIRSNDENAHDTYCIRVRPPYLARTN

SEQ ID NO: 1016331 - protein, 40 aa, Homo sapiens
SLKSAGTSHSPELWAIMRLAASMLGMLGTAALDVLQQTQR

SEQ ID NO: 1016332 - protein, 31 aa, Homo sapiens
VQNSHGRMPLFFRKRKASEEARKRLEYQMCL

SEQ ID NO: 1016333 - protein, 48 aa, Homo sapiens
MATIRFLCGEEVDTEEFFLSTEQNEKSPRVYLFATEEVDLDILVRFLR

SEQ ID NO: 1016334 - protein, 82 aa, Homo sapiens
MQKAAFEALQVKKDLAHRQIRNQIRLIETELLQLTQLELKRKSLDTEALQEMVSEQRWALSNLLQQLLKEKKQREEELHDIL

SEQ ID NO: 1016335 - protein, 77 aa, Homo sapiens
NEEETENLRQREIAAAMQQMLTESCKSRLIQMAYESQRQSLVQQACSSMAEMDQRFQQILSWQQMDQSKAISHILQE

SEQ ID NO: 1016336 - protein, 77 aa, Homo sapiens
DFVNHHKQYQQPRLEMLNTYYTGQNVSILTPDNRRTGDGSDVRLTHPFGREIADFQAGFSVGQPISIDVDDSGARQS

SEQ ID NO: 1016337 - protein, 81 aa, Homo sapiens
SEECGKDFRQSSSLYMHQRVHTGEKPYICCECGKGFRQSSSLCIHQRVHTGEKPYRCCGCGKAFRQSSSLCIHQRVHTGEK

SEQ ID NO: 1016338 - protein, 34 aa, Homo sapiens
  misc_feature (18)..(18): Xaa can be any naturally occurring amino acid
  misc_feature (26)..(26): Xaa can be any naturally occurring amino acid
MPFEGCDRRFANSSDRKXHMHVHTSXKPYLCKMC

SEQ ID NO: 1016339 - protein, 111 aa, Homo sapiens
  misc_feature (10)..(10): Xaa can be any naturally occurring amino acid
  misc_feature (22)..(22): Xaa can be any naturally occurring amino acid
IRMAIEMESXDWKKNGIIIEWXRIESQNEIEWNHHRMESNGIIMNGIEWNHRVDTNGIIIEWNRIESLNGLEWKQHRMESNLVIDVALSGIIIEWNLRKSSNGLEWNHRMD

SEQ ID NO: 1016340 - protein, 53 aa, Homo sapiens
LHNMILVDQMDPTFLALPSLLDVRFWTSDYPPGFAADGPNLRLLPSLMVVGRF

SEQ ID NO: 1016341 - protein, 105 aa, Homo sapiens
NLWIVVGTYGASSGSPWDKLAATFLLSEVHKSPGLSQSRAEDGQRTKRAERWWDDQLQRGVLSADSWRQWDGWLQRRATFSTESCRDNLPAERSHPFQGLLSTEN

SEQ ID NO: 1016342 - protein, 75 aa, Homo sapiens
  misc_feature (56)..(56): Xaa can be any naturally occurring amino acid
  misc_feature (69)..(69): Xaa can be any naturally occurring amino acid
GFPALDGEPQASLNLAPGGQDLPRQFGKRPRKGFLHWGNLNPPSWGPDTHSPFAPXLTTQSPQYFQACXTKVPVL

SEQ ID NO: 1016343 - protein, 52 aa, Homo sapiens
  misc_feature (6)..(6): Xaa can be any naturally occurring amino acid
  misc_feature (28)..(28): Xaa can be any naturally occurring amino acid
  misc_feature (47)..(47): Xaa can be any naturally occurring amino acid
MGKDYXQTLGLARGASDEEIKRAYRRQXSATTRTRTRSPCAEEKFKXIAEAY

SEQ ID NO: 1016344 - protein, 46 aa, Homo sapiens
LSASTTEHKDKIHNSKSTSNGAMPKPSPLPKAGRGLVGAGAALTTS

SEQ ID NO: 1016345 - protein, 63 aa, Homo sapiens
MINIGKIIGLRAEARYKIRDEVINNGLTNISFSGVTLFITRRIVPNIIRRPSLIKSPDSRMKT

SEQ ID NO: 1016346 - protein, 125 aa, Homo sapiens
  misc_feature (33)..(33): Xaa can be any naturally occurring amino acid
  misc_feature (44)..(44): Xaa can be any naturally occurring amino acid
  misc_feature (60)..(60): Xaa can be any naturally occurring amino acid
QEPPRHRKKAKIVRKQQVEFEGPRAQNEAAHSXSERKVPSGAKXSSVYTPGAISLPKPCXPLALGLPCRPPAVFMASSSPPRPRVSCSCLCLIAAPGLTFYGFVFYWFVFIFSGILNKSIAVRYP

SEQ ID NO: 1016347 - protein, 101 aa, Homo sapiens
  misc_feature (8)..(8): Xaa can be any naturally occurring amino acid
  misc_feature (45)..(45): Xaa can be any naturally occurring amino acid
KVTKNLAXGGLRLTTLTAFLVSPSDQKRELVVEPVGPVGFKPETXQKVFTLYICMVLRERRNPLNPETSSCLSSTEEGLGHVEPQCPFGLNLSLTIKSTLR

SEQ ID NO: 1016348 - protein, 72 aa, Homo sapiens
  misc_feature (20)..(20): Xaa can be any naturally occurring amino acid
  misc_feature (41)..(41): Xaa can be any naturally occurring amino acid
  misc_feature (72)..(72): Xaa can be any naturally occurring amino acid
KEKGFSKKGKQRLGEGKGGXPLSLINLPGTSLLIIVPSEPXRSLLNWGQEIPREPFRKKSGKMEKVERGSPX

SEQ ID NO: 1016349 - protein, 99 aa, Homo sapiens
  misc_feature (23)..(23): Xaa can be any naturally occurring amino acid
  misc_feature (29)..(29): Xaa can be any naturally occurring amino acid
  misc_feature (97)..(97): Xaa can be any naturally occurring amino acid
KPMDPTSFSPRNLRGFTRDISKXFQPIWXIGYGPGCPKVCNKPFAYNLTRGPHALDLCQKYLLVFQGLLTDEVYVQKRVRYKFKEEKKLIAKRKSVXSI

SEQ ID NO: 1016350 - protein, 85 aa, Homo sapiens
  misc_feature (15)..(15): Xaa can be any naturally occurring amino acid
  misc_feature (20)..(20): Xaa can be any naturally occurring amino acid
  misc_feature (38)..(38): Xaa can be any naturally occurring amino acid
GGTTNCGDLYLSTSXARPLXPLNVTGPFEIPGNQDPSXLLGPGSGLMSQGLPFLGAPSCNECPAGGATILPLVIRGFLRVWDFYN

SEQ ID NO: 1016351 - protein, 59 aa, Homo sapiens
  misc_feature (19)..(20): Xaa can be any naturally occurring amino acid
  misc_feature (31)..(31): Xaa can be any naturally occurring amino acid
PVQPAAPARDKASQNGSSXXLTLEDINAILXVPTARVPLHPRLPAQSPRLLNKDLPLLP

SEQ ID NO: 1016352 - protein, 46 aa, Homo sapiens
  misc_feature (36)..(36): Xaa can be any naturally occurring amino acid
MAGWLLSNSLSSDHAEVWAGWHWLASWEVEAGVVRXKLGGSHCGAA

SEQ ID NO: 1016353 - protein, 124 aa, Homo sapiens
  misc_feature (9)..(9): Xaa can be any naturally occurring amino acid
  misc_feature (20)..(20): Xaa can be any naturally occurring amino acid
  misc_feature (37)..(37): Xaa can be any naturally occurring amino acid
  misc_feature (59)..(59): Xaa can be any naturally occurring amino acid
  misc_feature (122)..(122): Xaa can be any naturally occurring amino acid
MNTMRTNHXPPSSPVAYPGXTSEITVHFLGQTSRSIXNSLSIEQRREIDNCLWLIASDXMREAVGHRSARDEGRGMAVPPFAQLVVVNILIKHRIDLCGQFGVDDGVQTAIDRHVAAGTTRXCR

SEQ ID NO: 1016354 - protein, 85 aa, Homo sapiens
  misc_feature (3)..(3): Xaa can be any naturally occurring amino acid
  misc_feature (9)..(9): Xaa can be any naturally occurring amino acid
  misc_feature (11)..(11): Xaa can be any naturally occurring amino acid
  misc_feature (25)..(25): Xaa can be any naturally occurring amino acid
  misc_feature (74)..(74): Xaa can be any naturally occurring amino acid
  misc_feature (76)..(76): Xaa can be any naturally occurring amino acid
  misc_feature (79)..(79): Xaa can be any naturally occurring amino acid
KKXLASAGXEXRPLRITFFVKDVQXGLDDLAERCQLKLAVVVNGEKVDVRSSHVMDIQEVGGIAYFLWIGSQRXRXKGXDSQRGG

SEQ ID NO: 1016355 - protein, 93 aa, Homo sapiens
  misc_feature (2)..(2): Xaa can be any naturally occurring amino acid
  misc_feature (12)..(12): Xaa can be any naturally occurring amino acid
  misc_feature (15)..(15): Xaa can be any naturally occurring amino acid
  misc_feature (21)..(21): Xaa can be any naturally occurring amino acid
  misc_feature (26)..(26): Xaa can be any naturally occurring amino acid
  misc_feature (31)..(31): Xaa can be any naturally occurring amino acid
  misc_feature (40)..(40): Xaa can be any naturally occurring amino acid
  misc_feature (48)..(48): Xaa can be any naturally occurring amino acid
  misc_feature (74)..(74): Xaa can be any naturally occurring amino acid
TXLTVKLPLREXAAXMMPSSXEKGAXSRKAXALGGKGAPXTPTCIGLXRQGPELLLLLLLRVTMNPMDTESGLXVVAHACGPSTLGGQGGRIA

SEQ ID NO: 1016356 - protein, 185 aa, Homo sapiens
  misc_feature (127)..(127): Xaa can be any naturally occurring amino acid
MSSTIGNRPRPTKKRPQRATSNVFAMFDQSQIQEFKRGLHTWIDQNRDGFIDKEDFDDMLASLGKNPTDAYTLSAMSEEAPGPINFTMFTDHDLDEKLEMAQIREDVSQKRPLLALMKKQTRQPSYXEDLNLREAADNPWGIGGTDRGTWMTLYQREHRELTKRGISTDMEVTRILKHGAKDKDD

SEQ ID NO: 1016357 - protein, 68 aa, Homo sapiens
  misc_feature (23)..(23): Xaa can be any naturally occurring amino acid
  misc_feature (30)..(30): Xaa can be any naturally occurring amino acid
  misc_feature (39)..(39): Xaa can be any naturally occurring amino acid
  misc_feature (51)..(51): Xaa can be any naturally occurring amino acid
RIRHEVTRAILCLDLAGRDLTDXLMKILTXRGYSFTTTXEGEIVRDIKEKXCYVALVFEQEMDTGVSS

SEQ ID NO: 1016358 - protein, 49 aa, Homo sapiens
  misc_feature (15)..(15): Xaa can be any naturally occurring amino acid
  misc_feature (38)..(38): Xaa can be any naturally occurring amino acid
  misc_feature (46)..(46): Xaa can be any naturally occurring amino acid
AGFGTRFGKANTKMXKNKLVGTPNPSTPLSNTVPQFIXREPYELTXPAL

SEQ ID NO: 1016359 - protein, 70 aa, Homo sapiens
AAEEEAEAAARAPKPEEEDAFTAPHWRRKQLEGPYGDKLAKTKGSNNNEGRARRQSLQATGKEGKRHAFI

SEQ ID NO: 1016360 - protein, 135 aa, Homo sapiens
  misc_feature (70)..(70): Xaa can be any naturally occurring amino acid
  misc_feature (113)..(113): Xaa can be any naturally occurring amino acid
EESFRVQCIQRTDDNFPGCLHLQVRPFSHSMAATAPSITSPCNCSQSKTETLSLRVCGTSYVDGREQTPXLVAMALGDEEGTYVLQRSSFCPCWLSLASGGTGYRKMAEYMPXFLTNHCPLGGHIYRCADGSGRG

SEQ ID NO: 1016361 - protein, 78 aa, Homo sapiens
WWWSVVGEVVVEAELVVQARQEAGEQEGARIITKGVNLNSISSMEVISITILDFDREDIPLVESTEPYILLELKYQKL

SEQ ID NO: 1016362 - protein, 108 aa, Homo sapiens
  misc_feature (95)..(95): Xaa can be any naturally occurring amino acid
  misc_feature (103)..(103): Xaa can be any naturally occurring amino acid
MSVRDSFQDPEIRSSRGRSGSSELLIYEMAENGKNCDQRRVAMNKEHHNGNFTDPSSVDEKKRRERERKAEYCPVETAVHYLAVFFSGNPCNLGXIGPQNFVXIVKAL

SEQ ID NO: 1016363 - protein, 61 aa, Homo sapiens
  misc_feature (40)..(40): Xaa can be any naturally occurring amino acid
  misc_feature (53)..(53): Xaa can be any naturally occurring amino acid
LVRQRISRLGQRMSGFQINLNPVKEPLGFIKVLEWIASIXAYSTCGGFKGQTXIQVNCPPA

SEQ ID NO: 1016364 - protein, 52 aa, Homo sapiens
  misc_feature (34)..(34): Xaa can be any naturally occurring amino acid
  misc_feature (46)..(46): Xaa can be any naturally occurring amino acid
  misc_feature (49)..(49): Xaa can be any naturally occurring amino acid
GKQACILMIKALELDPNLYRIGQSKIFCRTCVLXHLEEERGLQITXGYXGHT

SEQ ID NO: 1016365 - protein, 109 aa, Homo sapiens
  misc_feature (4)..(4): Xaa can be any naturally occurring amino acid
  misc_feature (76)..(76): Xaa can be any naturally occurring amino acid
MQPXGIVHVVPPPRGDFCGGTERAIDQASFTTSMEWDTQVVKGSSPLGPAAWGLRSQPPPRSCRLGCSLRGALCSXAHSVTHFGRIGAPRTGTFRGSLQGPWSFSQSYK

SEQ ID NO: 1016366 - protein, 81 aa, Homo sapiens
  misc_feature (50)..(50): Xaa can be any naturally occurring amino acid
  misc_feature (54)..(54): Xaa can be any naturally occurring amino acid
  misc_feature (75)..(75): Xaa can be any naturally occurring amino acid
  misc_feature (81)..(81): Xaa can be any naturally occurring amino acid
RRSCEKGWGRSWEFSAVAGVRGQRPSGPSLAERVPGASLSQRGAKVARRXRLLXIDLVLLKNPKLNSRCGAYDYXYSRPLX

SEQ ID NO: 1016367 - protein, 38 aa, Homo sapiens
  misc_feature (23)..(23): Xaa can be any naturally occurring amino acid
  misc_feature (35)..(35): Xaa can be any naturally occurring amino acid
MYALSLLASLLAAALAGPVLGLXDCPRGSAVWCQXVTT

SEQ ID NO: 1016368 - protein, 60 aa, Homo sapiens
  misc_feature (23)..(23): Xaa can be any naturally occurring amino acid
  misc_feature (36)..(36): Xaa can be any naturally occurring amino acid
  misc_feature (60)..(60): Xaa can be any naturally occurring amino acid
SDFRKEFYEVVQSQRVLLFVASXVDALCACKTLQAXFQCDHVQYTMVPVSGWQDLETAFX

SEQ ID NO: 1016369 - protein, 38 aa, Homo sapiens
MSGLHPFEFGKRKWPEPSRLLISPPVGKAPQKKLDTIR

SEQ ID NO: 1016370 - protein, 50 aa, Homo sapiens
DLGTFTGYYSPGPGLALPADGGVVTCEVDAQPLELGRPLWRQAEADDKID

SEQ ID NO: 1016371 - protein, 30 aa, Homo sapiens
SLTMTAEQKDSELNELRKTIELLRKQNAAA

SEQ ID NO: 1016372 - protein, 33 aa, Homo sapiens
FECRLFISQDSRDASEVSSDDNIHPALYDGRRA

SEQ ID NO: 1016373 - protein, 32 aa, Homo sapiens
WFLENLRHVRPDKQAGAGGMGCVRGPVCTQLL

SEQ ID NO: 1016374 - protein, 41 aa, Homo sapiens
IFPFSPEGNPDKQFSQEEAERTGLGKGPPGPGSSSLSLSLS

SEQ ID NO: 1016375 - protein, 47 aa, Homo sapiens
TRRGRHPLTEAPTKKQRSNDPNRTTQPYTKNYEGLRTTQRCNIPKGK

SEQ ID NO: 1016376 - protein, 39 aa, Homo sapiens
RNVVVDTRYNSHKYHQVFGKVGMKITIPKRQQSSDPMSN

SEQ ID NO: 1016377 - protein, 42 aa, Homo sapiens
VTHLLKTYYLTFLKLKTQKIKASFIELLVTSGRATTRLSTLR

SEQ ID NO: 1016378 - protein, 53 aa, Homo sapiens
EKTHINIVVIGTRRVAGKVHKVRPTLIYIMWAAFDRKKDLIFLMKKDDSDWLK

SEQ ID NO: 1016379 - protein, 38 aa, Homo sapiens
WTTHQVYDLAMDYTLRSRAPHGKIVLHNVCDTRRYVVL

SEQ ID NO: 1016380 - protein, 35 aa, Homo sapiens
VRPGLPPAKCNLNCLEYFWSFGGYQTCVFCVAKSF

SEQ ID NO: 1016381 - protein, 31 aa, Homo sapiens
WSGGMGEEVMLGHPNDIQCSRRMAAEVLALF

SEQ ID NO: 1016382 - protein, 45 aa, Homo sapiens
QTVKKGSDLQKKLFTLLIEWTPFIKDIMEDAIPITRLDSKEWPYC

SEQ ID NO: 1016383 - protein, 38 aa, Homo sapiens
KRGEAPFAQRIDPTREKLTPAPTPEICKRESNTAQEQH

SEQ ID NO: 1016384 - protein, 64 aa, Homo sapiens
SLYTYSEGSSSSFCRSRSYWPGTTIDWEQRRSGFSNLRDHGRERWSLGWLFGEHMSFEEHIICQ

SEQ ID NO: 1016385 - protein, 42 aa, Homo sapiens
VFLGVVIYLCMSLSVWCRCFTVIVRRRSFVSLQTYISLYNQP

SEQ ID NO: 1016386 - protein, 58 aa, Homo sapiens
FLSAASLNLNIRLEINILDYTVKSQKVVDPSTLKVSEVLENESTDGKHSAESSSVTSE

SEQ ID NO: 1016387 - protein, 62 aa, Homo sapiens
FLHGLEVQYFRYVREFQGSDALPCQTDLCKDDHGMVTPIGHRGTNGSRRGASNTDGGMRHRQ

SEQ ID NO: 1016388 - protein, 35 aa, Homo sapiens
MSESSWDCDSFRLMLFVVSDADASWVVPDSSGQCF

SEQ ID NO: 1016389 - protein, 69 aa, Homo sapiens
ELHPFPLFRVYDDTKLVRSSRPLSWSGTRGSYGPFVLEEEEDLDQIDLYPPPNRRTRVLVLTELRRQES

SEQ ID NO: 1016390 - protein, 66 aa, Homo sapiens
RTRTFTYPTLRSLSSSTSEDNHFVAEDLGHFLLVPPYFVVDQSTHLREVKTGDLSVVNRVVGYLYD

SEQ ID NO: 1016391 - protein, 61 aa, Homo sapiens
  misc_feature (1)..(1): Xaa can be any naturally occurring amino acid
XSDDYRAYSLEAKMERYDDRTDGSIMGRGGTPDNGILSIHRIPKSCLQPEVEARIERAPGL

SEQ ID NO: 1016392 - protein, 30 aa, Homo sapiens
STKQIEKSTAETSSGMDSDVCDSKSKEVYS

SEQ ID NO: 1016393 - protein, 44 aa, Homo sapiens
FEIDKGSTQTEDLICGPVKVAGAPGALMTAPEYYEVSEVGGDTN

SEQ ID NO: 1016394 - protein, 51 aa, Homo sapiens
MISGRILWICILLRCSRILRFLLVLLVFGGPSRVSGGGDSVTAILAGSYDL

SEQ ID NO: 1016395 - protein, 60 aa, Homo sapiens
PHYRVSFKRRGSVPREPKDGAFACSSVAPFHFSKGFLLGRFGQVECPEGPYVPTVLSVAR

SEQ ID NO: 1016396 - protein, 35 aa, Homo sapiens
FKTLVYPFFKLRGVFLLGGPLEKGIYFSEEGGQSS

SEQ ID NO: 1016397 - protein, 82 aa, Homo sapiens
  misc_feature (74)..(74): Xaa can be any naturally occurring amino acid
MSKMETIHEDYLSEQPFNQNFKHRHGAESKQQGPVKRPEKEILMEPASRVDHCASLNRPSVRDEKNGDKKGGSXLPTITRLS

SEQ ID NO: 1016398 - protein, 208 aa, Homo sapiens
PQLVADSTTKRRCTRGVNPGWNDGTREPFVVRHILKGATRPSWERPSGEGRAQPRALARDFHKAAECPVTRAPSTGTVKARGINSTQIRRIPGRLIQGKMHGPLKGYKELAPRKILKEPEENQAGRGRKPGPVPDKTDRRAAAPRISRNGPHQALPSNPRGTGELLPPATGLLVSRCRSNLGIHPCLGDESTIDEGVLRKILAGVQKM

SEQ ID NO: 1016399 - protein, 106 aa, Homo sapiens
  misc_feature (11)..(11): Xaa can be any naturally occurring amino acid
  misc_feature (20)..(20): Xaa can be any naturally occurring amino acid
  misc_feature (87)..(87): Xaa can be any naturally occurring amino acid
  misc_feature (94)..(94): Xaa can be any naturally occurring amino acid
  misc_feature (104)..(104): Xaa can be any naturally occurring amino acid
GELTQRSNAGXCRGCQCVVXQVRSGHLVATGTQRWYDLGVAEWSAAGWANRVEQPVEARREGARIDRVLAPTMLLAMVIANPECLDXGVWATGXRRNNGSRLGXHV

SEQ ID NO: 1016400 - protein, 49 aa, Homo sapiens
HIHKNKLIRLIAAMALAGLRKLIAIGRHEAHDETWYVGWLKIRIQSNPV

SEQ ID NO: 1016401 - protein, 49 aa, Homo sapiens
PNLVPPKIPDGERENFDDIHRKRMEKDLNELQALMQAHLQNRRTEEEDL

SEQ ID NO: 1016402 - protein, 83 aa, Homo sapiens
KLGTRVMTSLECHEAAAHDPATVMTSLGVATWSLPTSRALSSPAWSATVAAAVTDSILGGGGCIQGFVNRLDHVSLAPVTGGG

SEQ ID NO: 1016403 - protein, 49 aa, Homo sapiens
CDPFEIGEYKGIKLKTPHSDFAKSFCKIRSSAINKDDYLSRFRTNNTSV

SEQ ID NO: 1016404 - protein, 52 aa, Homo sapiens
RRSHVQSDPKPGRRCKIWSPAVRDSATIPFSAISTIRSVKQSCSKLQLQSSW

SEQ ID NO: 1016405 - protein, 38 aa, Homo sapiens
MNWAFPLPSAMIVHFLRPYPEAEQMPGTMLPIQTSQNR

SEQ ID NO: 1016406 - protein, 50 aa, Homo sapiens
RSLKADITLNCVYSMDEEGKINAEYLRLISRKRAAEQMTLNPWPALLTAS

SEQ ID NO: 1016407 - protein, 102 aa, Homo sapiens
AWHEAGAGPDRLPQLLQPRLLGACGADLLLAKDRAAESPPHSSSHLWMPPEVEAEQRLRAGLLPSHLPEVVGALRCAFIALVFVTVFLVLQLRSRFSFRGVK

SEQ ID NO: 1016408 - protein, 139 aa, Homo sapiens
MGMIVDTAMVKRYQEVAEIFYGRLSVNLRIREATIRFMDIVGALVGLTFFAVPMLIIGMFVKKDGGEVFFKQNRIGLNGKHFVMWKIRSMVVDAEEIRQELIAQSDVEGMFKMKDDPRITPIGKFIRNIQLMNPQFWTS

SEQ ID NO: 1016409 - protein, 57 aa, Homo sapiens
SANIEVIKPIAKKNGKKVRSGFDPDAENKQHKAKIKRIGVNAEMLLAYNSDTTKTAM

SEQ ID NO: 1016410 - protein, 33 aa, Homo sapiens
MVHLNPEEKSAVTALWARVKRWMKVGGEDPGQA

SEQ ID NO: 1016411 - protein, 51 aa, Homo sapiens
GVGVVFQAGPCLRLTANFPAPSRKQANGYNVVPKLHVMDFPPNLPKLQVLN

SEQ ID NO: 1016412 - protein, 49 aa, Homo sapiens
SRLSPRDEYKPLDLSYSTLSYTETEATNSLITSPGEYSDASMSPELQCL

SEQ ID NO: 1016413 - protein, 87 aa, Homo sapiens
SAGRVLYAGDAVPGLVRLSVLPTVAEVTARSGSTSSGSLALVYRKVFHVQCPFSRQLSQPRTSMLVCLEVVTMMSSGEKSLTSTANS

SEQ ID NO: 1016414 - protein, 51 aa, Homo sapiens
LGATENGLNSRESPGWQAARQQFSSQSPGLVIDMVQHVTLLGAYHHGASWL

SEQ ID NO: 1016415 - protein, 55 aa, Homo sapiens
TLEKLLPHIRGNEPFVFTKEDLTEIRDMLLGQEGGHLLPSLVAIAPSLKSLCQRQ

SEQ ID NO: 1016416 - protein, 56 aa, Homo sapiens
EFSGIYKRLRPILMTPFPKTLSKTNDRKGGFEGFYWVDTSNTHSKTTGMTRSSKDQ

SEQ ID NO: 1016417 - protein, 50 aa, Homo sapiens
YGGHAEVTSQTRRRMNVAHQEEPRINDNTALEDCYVSAVQGDDHTGLMAK

SEQ ID NO: 1016418 - protein, 50 aa, Homo sapiens
TTVTKKTYEILAFDGMTTSCCGIINHGYARVRRQSRIDPPYASSIELSRV

SEQ ID NO: 1016419 - protein, 51 aa, Homo sapiens
TPSPTPGTQLELEAGIGALGEGQHLLHTLHRAPGDYYMSVRPSLFLSPSLL

SEQ ID NO: 1016420 - protein, 53 aa, Homo sapiens
TNRDCDSLKGALRIMGNVFSGLHAVPPHLPPVKVRVLMLLYSCQKKKPQGPQS

SEQ ID NO: 1016421 - protein, 40 aa, Homo sapiens
ICKLRYTRKDKLKVHMRKHTGEKPYLCQKCGAAVGHNYDL

SEQ ID NO: 1016422 - protein, 49 aa, Homo sapiens
  misc_feature (36)..(36): Xaa can be any naturally occurring amino acid
WTKGFSNHPRVHLTKRFYECGHCGKGFRQLGFFMRXQRIHSHGEVYVVP

SEQ ID NO: 1016423 - protein, 118 aa, Homo sapiens
SLRLECRGMIPAHCNLCLLGSSNSPASASQAAGTTSAHYHTWLIFTFLVKTGSHHVGQAGLELLTSSDLPALASQSAGFTGVSHHAWPNFVQMLQVSIVNLHIASLVGYRISRLEGIF

SEQ ID NO: 1016424 - protein, 58 aa, Homo sapiens
MSLSTIKVLAGRKARETQAMLKDQAAKDKALQSMAAMSSAQIISATAFHSSMALARGP

SEQ ID NO: 1016425 - protein, 304 aa, Homo sapiens
ARSAVAALIRAGSPWLGGPAAAGEFPEEVVMQHVSSSQSSQRHVQWPGACPGAGEEEPACSQPCLLLTVPSPSNKLEELMVQIQSPTQPSPGPGEALENVRAGAPGPGLGLCSSSPKGDFVDASVVVRKISLSGSSGGEFVFEDGEGLTQMAQGAQVQLQHPRYDHKSPRAETLPAPETEGGTHSHTWGPQSPAAAGGAGLQPLASPSHITTANLPPQISSIIQGQLVQQQQVLQGPPLPRPLGFERTPGVLLPGAGGAGGFGMKSHPRPPALPGLPCPRPFQPPTHVCGDTGMKKVPRSRGDS

SEQ ID NO: 1016426 - protein, 97 aa, Homo sapiens
RGLDGIVAVLLPIRKLRYLRTLSRWRPPGFQHLHRQNWEDADFPFCARHVLEKTHIRMTKEKYGRNANLCQAIHSVSLVPGVRMGFKKTEVCQTCSK

SEQ ID NO: 1016427 - protein, 58 aa, Homo sapiens
MGSCSGWSAALQSRLTATSASRFKRFSLLQPPSSYGYTAPALRSLIVLNFIETRFTKT

SEQ ID NO: 1016428 - protein, 148 aa, Homo sapiens
  misc_feature (94)..(94): Xaa can be any naturally occurring amino acid
PPSLVVHQWCCYGSSLLSARWRHLTLGLLPRGVFSSSAFARKFVGRPIRQLLFLVAREYPAFSPPGGVFHNREWLYILPQRLLLLARRYLVGGXHALMTHGVTPSLVTRVVVVALFAHARRGAPLELPPPPPLVVAPPPPPLIIRGEV

SEQ ID NO: 1016429 - protein, 67 aa, Homo sapiens
FRTPLQLDPQQEQQLFPAPWKRSSLANCRGPLRLVAELNPTGTSPDQLGPPTLQSSDSAYASQSLAA

SEQ ID NO: 1016430 - protein, 41 aa, Homo sapiens
LEKLERRSRLGRRIRTTIDLSTVAEPLRSDLNGATEPYLGG

SEQ ID NO: 1016431 - protein, 84 aa, Homo sapiens
VLVPVLPRFPGARLGATAPHYAARPYPPSAAYGTQGKSVVGRRVARVGRRPTLVLAQTLGRMSGLTAGARASRARSPRTTALEH

SEQ ID NO: 1016432 - protein, 41 aa, Homo sapiens
YPPPPRLPPKPPRPLKFPPPRPSRYSHRNHLTTTTKSIRTM

SEQ ID NO: 1016433 - protein, 40 aa, Homo sapiens
GCWLRCHCRRFQHALKRTDTAQGSTLLSGFSNSLQLSSPI

SEQ ID NO: 1016434 - protein, 31 aa, Homo sapiens
MSFLGRGKERDSTEDKDPHDELFSQLISFCH

SEQ ID NO: 1016435 - protein, 264 aa, Homo sapiens
HLLPVACLPFLMCMDRVLVLGTSLDDSVCVIEITLPNGNAIFAELIFSMRTWPMCFVTEPDWFPISQDFALQRYPRVVNPKAFSDCSDSLRSRTDALTGWLLAPPAYFCLPRNQLCARTRNTTGTHSPGPPSQNHHAHPTPTPGPPPYRYTRLVHPSPAAPASPPTYTTTPLTTTTTPHHTLAPSTSSPSPLPHPHHTTTPTTNIPQTQPHPHTYAPPHPHLPPHTLTHLSTTTPTQLLPITLTPLPISTHPHNHNTPHPTPYQ

SEQ ID NO: 1016436 - protein, 279 aa, Homo sapiens
  misc_feature (189)..(189): Xaa can be any naturally occurring amino acid
FSFSSVVSWSGLWLVVGRGGRGGGGRGGGGGRRYNTYFSSMPGTDSSSSLCCGVLAGCCLPALVSPIKIVLADDCRLWSGVTASIHFWFVVSRRASLQFCSSSWSCVHIAVVFSSRVLFFSLLVTLPLGSTRRVICAAALFCKLAYAFLLGAATLLWWPPTTCAGVRRAALLWGQQNGTGRRRRLVFGXASRWCLRAPLRTLLWVVVSVVSSVCAPLLGWLLEITGGVCLAHMLLAGGGLPHRWLVVGSRGVMFFFLLLCAATTPRGPPSPVFFGGAHP

SEQ ID NO: 1016437 - protein, 231 aa, Homo sapiens
PPALFFVCASSSWVLVCLLALLLLVVLCLCPIWVRVPLFRGVGSRGLLGGWGFPLLILASHLFTLEFLGVFLVFWFFFPFFLHSDFSLTKGIASGRHTLDACKVTIVVRLYMPHTLPPLRGYPYSRTPEMSVWSASVQLLRPGRATRGWRPRSRGGTSLGVSNVCSSRAGTFFSIQMGVIFIFFCQVIFGLLLTFGVILFCAVYNVRSVRSPDVFLAWGLYTGPAHVKHCQ

SEQ ID NO: 1016438 - protein, 86 aa, Homo sapiens
MESCSIAQAGVQLRDLGSLQAPPPGFMPFSCLSLPSSWDYRRPSPHPDNFFSTDRVSHVSQDGLDLCLVIALGLQWLDTAGHTLLD

SEQ ID NO: 1016439 - protein, 53 aa, Homo sapiens
  misc_feature (2)..(2): Xaa can be any naturally occurring amino acid
  misc_feature (48)..(48): Xaa can be any naturally occurring amino acid
EXWQVAPIAIIYLWVVYRQPGQCIFLPYRAEVGLLAPVRHLAALVELXQSWQI

SEQ ID NO: 1016440 - protein, 50 aa, Homo sapiens
CVRTSICCVLCSTWFQDRLSFPRGYCCQEEVALKSVHRCDQHASRSQSQK

SEQ ID NO: 1016441 - protein, 46 aa, Homo sapiens
  misc_feature (28)..(28): Xaa can be any naturally occurring amino acid
  misc_feature (39)..(39): Xaa can be any naturally occurring amino acid
EFCGSLFVGQSPYHKFIAFKSFGELDHXPLLVDLTVEEXQRLKVIY

SEQ ID NO: 1016442 - protein, 91 aa, Homo sapiens
KYAFRSIKKKSVLTERLVYIDRMCTRIGKPDTAESERKAQFIIRMYTRSRDYQRLSSSITDKFVSTGLQLAEITANYVAANSVQSSNRAAT

SEQ ID NO: 1016443 - protein, 33 aa, Homo sapiens
GTRDFPACNHLRRYKYYTDSIVNPDGFGGFPCA

SEQ ID NO: 1016444 - protein, 175 aa, Homo sapiens
FLIKIIFKNNIITQNPKPTNNNPLSSPKPNQKPPTPTHYIPQQYTHFLNFTSTPTHNQQTKPPHLPQPQHPPSQTHTNTYPNPPNKPNITHLIKPPQHPNKPPHKFHNHFHPKQNSQLNPFVKHKIPITNTLTHTPNQKSTILTPNTKPPTHTPPTSLTTPTPIQTQHHTSPNRS

SEQ ID NO: 1016445 - protein, 98 aa, Homo sapiens
AQRVKPRLSRIASDECTERVVFDSYFICAPRGNHQHVNLVLHVYASCCRFHICTCNRAPDVSCCVLFVLSSACVFLMSIVIYILQLCVSRESTAQNIV

SEQ ID NO: 1016446 - protein, 77 aa, Homo sapiens
TPSNLSKSRPCLSEPGSVPGQLSEGGPVNHEPGLGLHVIVYERVKTGLAPCYMNLPETQLRLLSEFSSVSVCHHQLM

SEQ ID NO: 1016447 - protein, 68 aa, Homo sapiens
SPGRTQDTRKPEMDSVAFEDVALNFTQEELGFAESFQKNLYRDVTLETFKPGLGRIQWKDQDIEICTT

SEQ ID NO: 1016448 - protein, 61 aa, Homo sapiens
LRFCGLLSVLSSLFANFVYVVTRTLQRIQRMRIVDPHTLPRSLCQGSIGRFFSAPHRILDT

SEQ ID NO: 1016449 - protein, 67 aa, Homo sapiens
  misc_feature (11)..(11): Xaa can be any naturally occurring amino acid
  misc_feature (18)..(18): Xaa can be any naturally occurring amino acid
  misc_feature (60)..(60): Xaa can be any naturally occurring amino acid
  misc_feature (64)..(64): Xaa can be any naturally occurring amino acid
IGPPSLPDLVXPVRNVFXGEKARVIPGEENNFKTFASLRLARSHPRLFGIRAKRPREPPXRVVXKEK

SEQ ID NO: 1016450 - protein, 67 aa, Homo sapiens
  misc_feature (37)..(37): Xaa can be any naturally occurring amino acid
  misc_feature (44)..(44): Xaa can be any naturally occurring amino acid
  misc_feature (65)..(65): Xaa can be any naturally occurring amino acid
MVHRVCTCSISPSSAHKRLSSPVRLNTIRFCLPVSWXVIKSKRXFQFLEDSASSSQHPTSLLQLXLW

SEQ ID NO: 1016451 - protein, 98 aa, Homo sapiens
  misc_feature (8)..(8): Xaa can be any naturally occurring amino acid
  misc_feature (19)..(19): Xaa can be any naturally occurring amino acid
  misc_feature (67)..(67): Xaa can be any naturally occurring amino acid
  misc_feature (88)..(88): Xaa can be any naturally occurring amino acid
LARGTGEXLEQLLYHLKVXYNAKRRPSWARPASRSGGSHARAGSPLGLFLSKPGCKFGGFKCIKCLXDTGEFVVLLGLWASPAGLKCXHVGKHSVPRT

SEQ ID NO: 1016452 - protein, 99 aa, Homo sapiens
  misc_feature (95)..(95): Xaa can be any naturally occurring amino acid
MESGELPHLFQSMSMVIRLSFKNLLATFCFHQHIPDEERVVILRLHVQTSLSRVTMSELLVKTGEYLLSQTDGKCSDSTLTEKTRLEEIKATLVXCLSR

SEQ ID NO: 1016453 - protein, 34 aa, Homo sapiens
MGRRVHGGGAYLWGGAHLAITGLPQNKGQTGAVL

SEQ ID NO: 1016454 - protein, 113 aa, Homo sapiens
  misc_feature (39)..(39): Xaa can be any naturally occurring amino acid
  misc_feature (41)..(41): Xaa can be any naturally occurring amino acid
AKTSSHPHLQLQAPSALSVPHNQYGMLFRSLHNRYIYYXTXYIRGLTISGTPSLSPGPASYLPRGITSFHVAALLLSVPVVRAFRIVWPMLRPLYIPACYRSHLSLSSLGIRT

SEQ ID NO: 1016455 - protein, 78 aa, Homo sapiens
MWLVLYHQHLVRAGCRGWATILVVALCNATRGGVVYSQVKNTRGGGIWASQSSHATAKLCEGIFSRPRVFEPPSSHPT

SEQ ID NO: 1016456 - protein, 102 aa, Homo sapiens
  misc_feature (12)..(12): Xaa can be any naturally occurring amino acid
  misc_feature (26)..(26): Xaa can be any naturally occurring amino acid
  misc_feature (40)..(40): Xaa can be any naturally occurring amino acid
  misc_feature (52)..(52): Xaa can be any naturally occurring amino acid
  misc_feature (62)..(63): Xaa can be any naturally occurring amino acid
HKSLPVCGQQRXFARPIARRYKGAIXPGKFHCQVLLVVFXARFRQYPLARFXAQQGHFCNLXXHSRLPCYPLTRHICFYPQCGIRYSSPVRPPLTPSLLKKK

SEQ ID NO: 1016457 - protein, 105 aa, Homo sapiens
RRGHPRCHQREGCKPGGEDRACVTRKQWWWGPNTGDNRVTERAVATESCAPRDGVLRAPKARAQKNPAAPRGWPAKSIWSAAVLPPIGSPPAETFLNRGAPKVCP

SEQ ID NO: 1016458 - protein, 207 aa, Homo sapiens
MTLCGGKRRTLCLHVWSRARWSCVCVWRSCGDSVGVATCAGGHFQSEGLLHSFDFSWSSGGIRELVVIAWRRGGANHQKVQVLCTLIKGSAEDMQQSLYGPGVCFLCKQVRIEVTLPTYVPRKLAPLDLEVPKGPQVVIQCHTCCESEILWDASQQREGDFIPNPRWIRKGKGLFGIDNPGATRSSHILGDQATQLQRILAYGSNKR

SEQ ID NO: 1016459 - protein, 70 aa, Homo sapiens
QLALQVSLEYEKSGSFYHTCAVMHRPRLVVLPATDSRALDLPVVLGEYDVLLKEGPSSDPINSGTLCASL

SEQ ID NO: 1016460 - protein, 46 aa, Homo sapiens
DKRRTSPRHHHPEEQARQSSQGGSLPSEEKGLPQEESEESNSAWPF

SEQ ID NO: 1016461 - protein, 31 aa, Homo sapiens
MNRIRTLVDNAYSCDPRIKKFKEEEKAKKEA

SEQ ID NO: 1016462 - protein, 58 aa, Homo sapiens
  misc_feature (2)..(2): Xaa can be any naturally occurring amino acid
MXNPFIEIVFANKVPFNQMLGCLRRRLGVHEKGVGLGKRAGCNCSSLLLPLRQRVGEG

SEQ ID NO: 1016463 - protein, 75 aa, Homo sapiens
FANVSFVAKDGKLNDLKSKANRSIRRKLTVMATLNFNATGVMDIAALITNPGYVNTGFIDAEVLKGYIRKARRWM

SEQ ID NO: 1016464 - protein, 39 aa, Homo sapiens
GCSSHIAITLVLPSTAEDPGDRPKSGRNTLSPQSPLKHW

SEQ ID NO: 1016465 - protein, 124 aa, Homo sapiens
KIDDTTVSVMDFTSGLNWQEKTLTLKPTSLKGLLIALPKVAEVAQEEVVEPKIENPQPDEKPLGETLKDLFSRPVLPEMTDVHLPLNLNIEEFKGEQLRVDGRHGHHREHHAAESEQHLTAILK

SEQ ID NO: 1016466 - protein, 68 aa, Homo sapiens
TFFITRGKDTQQHHLRLRMCVITAVVLDEVTCFYIFWGKYITVILETLKSHLKMYDIYKYIYILFIKL

SEQ ID NO: 1016467 - protein, 108 aa, Homo sapiens
MLCCSTFSWWWCRRHGARTVVAAPIDGAVCSLTLSHTPRVCVFCVLRVCVCVTPHTPSLSLVHLSHAASVCVARHTRALYEERAHTRVYRENISLWRHTLFVPARALV

SEQ ID NO: 1016468 - protein, 101 aa, Homo sapiens
  misc_feature (24)..(24): Xaa can be any naturally occurring amino acid
  misc_feature (69)..(69): Xaa can be any naturally occurring amino acid
PETFAFVRYQRFGGDSESLNLKAXERGTVVLRGAGSLPAERPGPRSAVLPRQRQYPALTVRDEKRLSGXYGHQPSPPSVSLNLFRPFLAQTQPNSVLIAVS

SEQ ID NO: 1016469 - protein, 72 aa, Homo sapiens
  misc_feature (57)..(57): Xaa can be any naturally occurring amino acid
MHGTHLGIAICQRGSQRSQCIQISGNTPQMEGDLLLLQYSEPWDSSGYAPGVDCVAXGEDLHHLLSGYTARA

SEQ ID NO: 1016470 - protein, 123 aa, Homo sapiens
  misc_feature (19)..(19): Xaa can be any naturally occurring amino acid
EESTPEMGCSKPHLERVTXGITLILDSAPRVTEVTIIEKSPGERHLISSRGQETSCVMPGDVKTFHLMTNGFHMTWSVKVGEHITPLGCMGFNSISNLTQVTQPSMFSLPNAPTLADLEGRYT

SEQ ID NO: 1016471 - protein, 126 aa, Homo sapiens
  misc_feature (8)..(8): Xaa can be any naturally occurring amino acid
  misc_feature (58)..(58): Xaa can be any naturally occurring amino acid
PKFRVITXIKTIGRTYMVGSEITPDVNTIGFDRSNKEKDKSARETLVRHLADLADYRXGHEKDALTNITNQSFIRFMMCIGMNKGGVLVGVIGARKPHYDIWGKYSQCSQQGWSPRGVMRNIHVRR

SEQ ID NO: 1016472 - protein, 72 aa, Homo sapiens
  misc_feature (18)..(18): Xaa can be any naturally occurring amino acid
  misc_feature (26)..(26): Xaa can be any naturally occurring amino acid
  misc_feature (54)..(54): Xaa can be any naturally occurring amino acid
  misc_feature (61)..(61): Xaa can be any naturally occurring amino acid
TLARGKKIGAKPSPLSTXSETGHASXYSAMLLKPFFLIEMLPYLFSPMYGMLYXFIILFYXILFYRGGARYL

SEQ ID NO: 1016473 - protein, 89 aa, Homo sapiens
  misc_feature (15)..(15): Xaa can be any naturally occurring amino acid
  misc_feature (40)..(40): Xaa can be any naturally occurring amino acid
  misc_feature (47)..(47): Xaa can be any naturally occurring amino acid
  misc_feature (61)..(61): Xaa can be any naturally occurring amino acid
  misc_feature (65)..(65): Xaa can be any naturally occurring amino acid
  misc_feature (76)..(76): Xaa can be any naturally occurring amino acid
LNGQNLKKKANLAKXPFEMESTQPKEFDRAKDVDVKNFAXEALTVLXYPLILEEDQTLASXINPXTLKEVPPFGEXTGGAFGCNSLWMD

SEQ ID NO: 1016474 - protein, 71 aa, Homo sapiens
  misc_feature (33)..(33): Xaa can be any naturally occurring amino acid
  misc_feature (53)..(53): Xaa can be any naturally occurring amino acid
LKPADPPIVDTVPGNPMCVETLPKDYLTKGSAXLIRDMRQTFAVVFIKAVDKXPPGPAKFTKSAKKAQRAT

SEQ ID NO: 1016475 - protein, 59 aa, Homo sapiens
  misc_feature (34)..(34): Xaa can be any naturally occurring amino acid
  misc_feature (52)..(52): Xaa can be any naturally occurring amino acid
MDSQLHPNSGGLRPGTPSLHPYRSQPLYLPPGPXPPSALLSGVALKGQFLDXSTMQATE

SEQ ID NO: 1016476 - protein, 93 aa, Homo sapiens
  misc_feature (40)..(40): Xaa can be any naturally occurring amino acid
  misc_feature (69)..(69): Xaa can be any naturally occurring amino acid
  misc_feature (83)..(83): Xaa can be any naturally occurring amino acid
GSQAHLTVKDEKNHHELDHRERESSANNSVSPSESLRASXKHRGSADYSMEAKKRKAEEKDSLSRYDSXGDKSDDLVVDVSNXDPATSRVSPA

SEQ ID NO: 1016477 - protein, 71 aa, Homo sapiens
  misc_feature (9)..(9): Xaa can be any naturally occurring amino acid
  misc_feature (19)..(19): Xaa can be any naturally occurring amino acid
  misc_feature (49)..(49): Xaa can be any naturally occurring amino acid
MSLLNKPKXEMTPEELQKXEEEEFNTGPLSVLTQSVKNNTQVLINCRNXKKLLGRVKAFDRHCNMVLENVK

SEQ ID NO: 1016478 - protein, 135 aa, Homo sapiens
VLPCRGVWPLADKRPRRGGVCPEEGACAFPGSFARRGKMPGRKIRLACGAFTLWVCARQRPSGVKPLLVEVPRYRITLRAESPTGAAGRAHLCGGHMGTHMCGGVSTGVTHTPTNWITEPKSSTHTHGCAFFVAQ

SEQ ID NO: 1016479 - protein, 91 aa, Homo sapiens
  misc_feature (80)..(80): Xaa can be any naturally occurring amino acid
VFLFEFKMVHKAAKTTQNISNTFGPGTANKHTVQWWLKKFCKEESLEDEERDMGHGKLTTTNLRAIIELHEKLQKNSALXILRVIRVVQHF

SEQ ID NO: 1016480 - protein, 103 aa, Homo sapiens
  misc_feature (30)..(30): Xaa can be any naturally occurring amino acid
  misc_feature (71)..(71): Xaa can be any naturally occurring amino acid
  misc_feature (95)..(95): Xaa can be any naturally occurring amino acid
LGEENAPVPVAPENGPRRPWFIFPTGLSSXNPVAPLVPTPLPPFCSAEVVGTHGLWNWETGTLTHGWTGLXPNTGRRGDPWEGWAEGPVATGFLXRSPVPHLP

SEQ ID NO: 1016481 - protein, 126 aa, Homo sapiens
  misc_feature (28)..(28): Xaa can be any naturally occurring amino acid
GVWGLEHELNQRRWDSDVLPESSGEDLXSPPFFRCGASGLLRLHVQSVHPGSPCLPPGDRRVRTLSQLDGKCSVLHGTEQLVRRDEGDAGHVSRDVCETRTTPAGARSPGTAGPDVSRPLLSRVVL

SEQ ID NO: 1016482 - protein, 158 aa, Homo sapiens
  misc_feature (69)..(69): Xaa can be any naturally occurring amino acid
  misc_feature (91)..(91): Xaa can be any naturally occurring amino acid
  misc_feature (118)..(118): Xaa can be any naturally occurring amino acid
  misc_feature (120)..(120): Xaa can be any naturally occurring amino acid
RPSPGDRMTRLMESLVARETPQASRNETNEFQCELPKGTPFINLLRWTTVVALAETPVVVSVWETDDVXSKEREVLRKCRVGHDSLLLVGXQCPHGCLCVYKEPRATTLCLFEVDDCXIXYCPLTSDLRRVQLSVPLMSTMHTEPPCVYFSVPLWLTQ

SEQ ID NO: 1016483 - protein, 319 aa, Homo sapiens
DLFETRTRELGESPGELCCVRRARAGGGAGHVKGGRDGLFLGIWGPSAHHCFRGHWNLEGVGLGNSVPRAWWPSPPNTLGILESEKKGAVVQSGLPSLWSSTARKLERELVGDLGMRKERDQKAYAWGEESEEEEAEGRGKGGGGGGGGEGAGREEMAAAVLNEKPPESIFGDPKAGNGREGLCDRWVMNPIQGNTLDLVQLEQNEAAFSVAVCRFSNTGEDWYVLVGVAKDLILNPRSVAGGFVYTYKLVNNGEKLEFLHKTPVEEVPAAIAPFQGRVLIGVGKLLRVYDLGKKKLLRKCENKHIANYISGIRLSDIG

SEQ ID NO: 1016484 - protein, 103 aa, Homo sapiens
  misc_feature (61)..(61): Xaa can be any naturally occurring amino acid
  misc_feature (67)..(67): Xaa can be any naturally occurring amino acid
WFARGTRKGRLGTEELRGLGDFGGVSVKRCNQFRRRGTPFWSLLWLPKTLAHPPTLLEVGXASGQMXVPLFPLHSSLPLFFGGRNLGISMRPPPGRGSVGPPS

SEQ ID NO: 1016485 - protein, 255 aa, Homo sapiens
MTTTGGNMGQQGVNNRQCYPESITMGASETTSRGQNAYNVGRSLAYAQGRPRHTGRSTRRNTHFGGGTTPDFPPKIPLRKGVCGKHSVATSNSTGSPPSKMSFLFENCARNPKPRVFPRKLRGLFSGPRNALVETPPFPPWGPHKETVCVVFAAADHTTQLRNTGACVKQLATEEVDLGFIFSPAILLVEFNSSFPTQVFSWMVWLPPPRLATRGVCRQRCSPPRGTLITLSPTGSQCVGTCGAPTFPKPTSFAL

SEQ ID NO: 1016486 - protein, 277 aa, Homo sapiens
AAVRVFVPSGVLRGASLLVLWAHNCWFAWVGVLLLVLVVPRLLLFLIVSVFGLWFSFHRGFIPILPLLCGGLFVWGSFAVFPKLWGAPSFLSSVNVPRMGVFVFLLVSLLRSVFFGGGYYLWLSLVLPVARLVVVSHSAWIVPASGDGWLSRGRCSRCGVVCLCAAPPFGCLVSRGDFWGHLPPFGGSHFVSLRVRPPLRGGAPLKVLFCLAHTRICWVKVVTASFARVVVGDTIFLAPLVFSCVWGARGGRPSSSHTRFVLRRSSYDRDLLSSPSL

SEQ ID NO: 1016487 - protein, 65 aa, Homo sapiens
  misc_feature (58)..(58): Xaa can be any naturally occurring amino acid
MSLGHIWLSKGLPENFTYEHQARVVHGPWVTRKPRLSTRLHRGSSVPTDTYSTATRAXDAGGIRG

SEQ ID NO: 1016488 - protein, 145 aa, Homo sapiens
  misc_feature (50)..(50): Xaa can be any naturally occurring amino acid
  misc_feature (105)..(105): Xaa can be any naturally occurring amino acid
  misc_feature (109)..(109): Xaa can be any naturally occurring amino acid
  misc_feature (112)..(112): Xaa can be any naturally occurring amino acid
  misc_feature (117)..(117): Xaa can be any naturally occurring amino acid
  misc_feature (127)..(127): Xaa can be any naturally occurring amino acid
TKGAWQSYPALWPEDIASEITSSRGPAWSVTRCLTPGGTLSRAEVSIISXVLQIGPLYGWLHEGSAVSYGVRSGNDLPLEEAVMVQQDEETLWISHLLMRQYLTXPRVXNYXTFNGXFGWDDLGTDXNLRPVHILDFASPTVLLK

SEQ ID NO: 1016489 - protein, 69 aa, Homo sapiens
  misc_feature (6)..(6): Xaa can be any naturally occurring amino acid
  misc_feature (43)..(43): Xaa can be any naturally occurring amino acid
  misc_feature (68)..(68): Xaa can be any naturally occurring amino acid
TLLILXSGGDSNWYSGTEKPGMTNSTGAKACNLSRGGGVVTEXGGLRALWKPSDVRELPPLPTPSLTXF

SEQ ID NO: 1016490 - protein, 109 aa, Homo sapiens
  misc_feature (12)..(12): Xaa can be any naturally occurring amino acid
  misc_feature (40)..(40): Xaa can be any naturally occurring amino acid
  misc_feature (64)..(64): Xaa can be any naturally occurring amino acid
  misc_feature (80)..(80): Xaa can be any naturally occurring amino acid
  misc_feature (82)..(82): Xaa can be any naturally occurring amino acid
  misc_feature (86)..(86): Xaa can be any naturally occurring amino acid
  misc_feature (89)..(89): Xaa can be any naturally occurring amino acid
MPLDEGFWTCHXNTRYPHTSYYLMPGSLVKRGNSGCPDYXPVTCAGVDLLMELIGSPTGAISSXHLLSKLMIILKRIQLXIXVLPXPRXPAHVVILLVSLDLFIHTEKK

SEQ ID NO: 1016491 - protein, 104 aa, Homo sapiens
  misc_feature (39)..(39): Xaa can be any naturally occurring amino acid
  misc_feature (64)..(64): Xaa can be any naturally occurring amino acid
  misc_feature (71)..(71): Xaa can be any naturally occurring amino acid
PSPLKLPKISFPRGQATSFFKGGVPLGAEARKFIRYFTXFNGELEDYMSDRGQFVISAQEWDPXFEETLMXNPSLAFVRPRWIYSFNEKQKLLPHHLYGVVPQA

SEQ ID NO: 1016492 - protein, 104 aa, Homo sapiens
  misc_feature (34)..(34): Xaa can be any naturally occurring amino acid
  misc_feature (56)..(56): Xaa can be any naturally occurring amino acid
  misc_feature (83)..(83): Xaa can be any naturally occurring amino acid
  misc_feature (94)..(94): Xaa can be any naturally occurring amino acid
TTTLSSSFPGMTTKVPTATLVVDLYVTTCPPRSXTPGPPAPARALRGRERPSLLEXPCHTQSPTTLNLPSSQFPCRPLEEGRXLGSRTFSCTIXKVPCSLHKKK

SEQ ID NO: 1016493 - protein, 126 aa, Homo sapiens
  misc_feature (7)..(7): Xaa can be any naturally occurring amino acid
  misc_feature (58)..(58): Xaa can be any naturally occurring amino acid
  misc_feature (120)..(120): Xaa can be any naturally occurring amino acid
RTPSWEXGMIKMSLRLWPPGGLNHKPPDGPRKRWEDPETRRTLSDPSAHPPGTHQGAXGLQGPAHKLHLGSLGEEGPGGPGVPDSRTLGNRDTGNRGLLLLLAWETLWGQHCTPLLFFIXTLLEKK

SEQ ID NO: 1016494 - protein, 95 aa, Homo sapiens
  misc_feature (15)..(16): Xaa can be any naturally occurring amino acid
  misc_feature (53)..(53): Xaa can be any naturally occurring amino acid
  misc_feature (72)..(72): Xaa can be any naturally occurring amino acid
MGESSGAGPGHGAVXXSGRGVAVADVVGAAEPRGQSYYVKVVLYCALCFMVSXVASLVCLLRHGGRDGGEHXYHRLVSSDGSSTSYGLRFRSAAT

SEQ ID NO: 1016495 - protein, 101 aa, Homo sapiens
  misc_feature (5)..(5): Xaa can be any naturally occurring amino acid
  misc_feature (34)..(34): Xaa can be any naturally occurring amino acid
MGKVXTSPEMSTCTDLNPDNLQGGDDLDPNYVLXSWVRTGRSIRGSCLPPHCSRGERRVIEKLVVEALSSLDGDLVARYYALKSITAAEQQQLIVDHFLFR

SEQ ID NO: 1016496 - protein, 41 aa, Homo sapiens
  misc_feature (22)..(22): Xaa can be any naturally occurring amino acid
VVVKTLEQLAQQGKIKEKMYGXQKILTRGVHTLIKDGGLRQ

SEQ ID NO: 1016497 - protein, 37 aa, Homo sapiens
SSDRGTISYGYMEKKAVLNPHEGLVSLFPPQAHQGQK

SEQ ID NO: 1016498 - protein, 42 aa, Homo sapiens
RNQEYRRNMKVDKEHDQLKHSTTGEGFRPPDDCSHTRLLMVW

SEQ ID NO: 1016499 - protein, 73 aa, Homo sapiens
  misc_feature (57)..(57): Xaa can be any naturally occurring amino acid
STGVIDPEVQRYNTPGFSGCCLVYDFNNVAPLKTHFRTPRPMTVEVAEALRVQEELXDSICGDMPRLDFRGAT

SEQ ID NO: 1016500 - protein, 151 aa, Homo sapiens
MAPRRFWRMNWMEFSYFIPLLNKGQRHKDWSPAQARHAANSHAAAGGPHRTWPSPGSASFPLPCREGAPIVKRPVHNGDAILLQRRFVIGHFTHTHHSGSPVLLQVLNEGAERGVGGVVGYEEAHVFELISTGAGRFIRAMAPSDGPGSKK

SEQ ID NO: 1016501 - protein, 43 aa, Homo sapiens
  misc_feature (42)..(42): Xaa can be any naturally occurring amino acid
ALQEFGTRAGGNTMGAVTLTVIERWEEVPPSLDWYLRQLLFXP

SEQ ID NO: 1016502 - protein, 176 aa, Homo sapiens
  misc_feature (93)..(93): Xaa can be any naturally occurring amino acid
MSVLPHRMAKEFTPKALLVAMPFSYGHASGGIFFAPPAHTLTLLARAIALTHAANSGRTRKGEAECMRLYAVTPHRINFVARLAWISHTKNDXNRDLRCFNTTRCRALLSQHHRGFILLLMTRYRRLYAEHGHGDILCRATINSRSVGSSVLFDCIMCRKQEILPLEEMYWAYVRT

SEQ ID NO: 1016503 - protein, 58 aa, Homo sapiens
  misc_feature (16)..(16): Xaa can be any naturally occurring amino acid
  misc_feature (29)..(29): Xaa can be any naturally occurring amino acid
  misc_feature (34)..(34): Xaa can be any naturally occurring amino acid
  misc_feature (41)..(41): Xaa can be any naturally occurring amino acid
VLHPSFPASQPSSLQXAQARQQPPQYYLXVQAPXSLNSEQXDSLLLSTYSQQAGALGY

SEQ ID NO: 1016504 - protein, 115 aa, Homo sapiens
MRAARAAPLLQLLLLLGPWLEAAGVAESPLPAVVLAILARNAELLAAPLPGRSVSGWTTPPRPGWPSGVPRIHNVDNTTEMLQELLAAVGDDYAAVVWVPEGEHTVFYPDEEVSQ

SEQ ID NO: 1016505 - protein, 218 aa, Homo sapiens
TTLPEGASQRPPNPAKPGVRQPGTNPGRRAPENIDNRAGAAALVAAQRSPAHATGRDTHARPCMYTPRTRTRSRRRSPPRAISNKLPGCLSSATISRAVCDAHKPPTGTKGTSHTVPSACAWFELLLALSFGGSNTARFVIYGPGTHRGKRSFLGPATQAGLDTLYRHELGGDAPPRPPHATRALFARRNTWNPRVGYDKNRKIEQQGNKEEENKRKK

SEQ ID NO: 1016506 - protein, 33 aa, Homo sapiens
TVLGPDRQTCFDENECEQNNGGCSEICVNLKNS

SEQ ID NO: 1016507 - protein, 79 aa, Homo sapiens
LSRRENVVDSTSDTHCNALPSSHGVTCHLFIPDIQSLLPLRTGFIPFPGLLVRRKTPATRQHITYPQPFISFQHRVYAP

SEQ ID NO: 1016508 - protein, 119 aa, Homo sapiens
DCSYALFVRDNTQPFRFHHAWAGFQVITRPIGKLLELTAAYRDAALQVQVTDQRIEHHHSPTVIETVTAHHATVSNHRRLQLVRRELFGKCSNGLSIDTTPAAVFSTRKTLSSLLQAKE

SEQ ID NO: 1016509 - protein, 97 aa, Homo sapiens
SVEDFVPDDRLDRSFLEDTTPARTLKKVGAKAAQQDKVTVDGEALGRQPRWVAGFPGTMLDLRRPSHCGESHLLSAGRTSPSSKTITYFQSRVMEAS

SEQ ID NO: 1016510 - protein, 74 aa, Homo sapiens
DRRRALYLRATYVKHRCLNANCNKTVSWMLDNTPATPDNRSYLQRTKAFWIMLGLRIGENGPSYLCQGFIVGYV

SEQ ID NO: 1016511 - protein, 115 aa, Homo sapiens
  misc_feature (37)..(37): Xaa can be any naturally occurring amino acid
  misc_feature (88)..(88): Xaa can be any naturally occurring amino acid
MAYRNPTWIINPPGVFTRADARVAGTSVAVVSYVINXSPLALAEATRLRVLAAIEQTGYRPNDIARALASGNTLTYGLVVPDISNPFXSTLARALQREDSAHGRVLLLGDRATTG

SEQ ID NO: 1016512 - protein, 36 aa, Homo sapiens
MGSIEVKAFGGTPVLKTSDAIGMKLYTPSPTNRYFS

SEQ ID NO: 1016513 - protein, 98 aa, Homo sapiens
  misc_feature (91)..(91): Xaa can be any naturally occurring amino acid
APQSPILISYRRPAKKPATLNPHHRNDMGGIIPVPAVVRVIPTTLGRLRGRPGGFWVGFAACVCLSGGLCRYWYRHATSSYSSVTRLGSTXRESGNRK

SEQ ID NO: 1016514 - protein, 93 aa, Homo sapiens
  misc_feature (64)..(64): Xaa can be any naturally occurring amino acid
  misc_feature (83)..(83): Xaa can be any naturally occurring amino acid
MREQYDASERGNPLRNAPREVRHAASTAAAKRIGGVAQVNAWWEVIDRQQVADQIAALERSSSXRQQHGRRHRSRGVELLFVXPETAVTKPVI

SEQ ID NO: 1016515 - protein, 68 aa, Homo sapiens
PPKPAWEAKKAKKTENPFCCGQPGFAGLQRLGNPQDLRTFIQGLGFGSSGMGLGWCWCHGLCPEPSCL

SEQ ID NO: 1016516 - protein, 153 aa, Homo sapiens
  misc_feature (3)..(3): Xaa can be any naturally occurring amino acid
  misc_feature (12)..(12): Xaa can be any naturally occurring amino acid
  misc_feature (36)..(36): Xaa can be any naturally occurring amino acid
  misc_feature (76)..(76): Xaa can be any naturally occurring amino acid
  misc_feature (92)..(93): Xaa can be any naturally occurring amino acid
  misc_feature (122)..(122): Xaa can be any naturally occurring amino acid
  misc_feature (135)..(135): Xaa can be any naturally occurring amino acid
  misc_feature (138)..(138): Xaa can be any naturally occurring amino acid
KCXIRAWGPYEXPKTAVAANSMEHIQAVKLLPLGGXRSSINPSLAASKTESSEKRGSSGKSASNCCWPTCLKSCCXLRQGLHRALAWEFLHXXRLAMSDLTPVVDAITDALLAAAAAAAITXPGLGLMYFIHYYXALXRCGAASCRPSSSVTV

SEQ ID NO: 1016517 - protein, 72 aa, Homo sapiens
  misc_feature (30)..(31): Xaa can be any naturally occurring amino acid
  misc_feature (64)..(64): Xaa can be any naturally occurring amino acid
GTRISVVSATKGVPAGNSDTEGGRPGRKLXXGSHTATTQKKPSISITTESLKSLIPDIKPLAGXGGCCGSSC

SEQ ID NO: 1016518 - protein, 154 aa, Homo sapiens
ACFSTVSKLSTFEPMAMLTRVYQGRIETFSRWYYLLNTSSVPARCRGDHHDMSLNVATQCEAFDRRVMNLHTRRHQPTLETYAQAQPCEIAIANTLAYTSLALGTRTSCEALRTTQVQPYVYVIGKSYTPRARSLATNPLHSARVRFLSLSRTP

SEQ ID NO: 1016519 - protein, 84 aa, Homo sapiens
  misc_feature (53)..(55): Xaa can be any naturally occurring amino acid
NPVVQQKTLTSDVARCWAVELWRARYRNQGQIVVGRSIDVNAQFADQEEMRYXXXRTEVGRYSIHQENCEFTVSANLPKPLGHG

SEQ ID NO: 1016520 - protein, 247 aa, Homo sapiens
PRERCVVPPTQAAPRTRPAEGICAAYTHQRDKWPCPHHPLSYVPSIGDASLPRAWCFSLTIPVAQETLFDRGATRSLAAGVARQRLFCLIKRATSRAHTQGSGRSSPRALPRELKTPSILPSPPHPRWVFIARPTPPAQGPRRRISALNARRGLAPESRRRALTNRYLAYERRRSQPAPRAQIPQHNEEGGNALRETNKFLPDRAVSRATPGHGTQQTQSLWARAVERGTCHRRKARFIKGADFRFR

SEQ ID NO: 1016521 - protein, 138 aa, Homo sapiens
  misc_feature (58)..(58): Xaa can be any naturally occurring amino acid
MISHVELLSARDLHALQFSAPLRERFVDLATHLYDAALSPLSTEEISATGPPALYKVXLERGLRADTSARELTQEGGKPRHTERISLTTTARVPVHTLVAAHHRESRKVWGLGHTTPRNFPDLEGGFGPGRGPDPPPV

SEQ ID NO: 1016522 - protein, 71 aa, Homo sapiens
TMCFENAAPWFTLCQPTTPTIDATRRRAFALVSQAYTSIIADDFAAFVGLPVEEAVKGNFGLLFTYKENGK

SEQ ID NO: 1016523 - protein, 140 aa, Homo sapiens
MAATMFRATLRGWRTGVQRGCGLRLLSQTQGPPDYPRFVESVDEYQFVERLYRLPGFQIPQSMNIILPQWLAAPRDPPPNLPYFVRRSRMHNIPVYKDITHGNRQMTVIRKVEGDIWALQKDVEDFLSPLLGKTPVTQGQ

SEQ ID NO: 1016524 - protein, 359 aa, Homo sapiens [sequence omitted]

SEQ ID NO: 1016525 - protein, 85 aa, Homo sapiens
  misc_feature (62)..(63): Xaa can be any naturally occurring amino acid
SHGDSPAALRFLGCVDIKDLPVSEQQERAFTAGAKQDFSAREFLTFGELLMHPVLESLRNTXXGSGCIDTLCAFNSGNVERFQTL

SEQ ID NO: 1016526 - protein, 127 aa, Homo sapiens
GGGGSRALRVSEAEGTAGLTRTETMFRAAAPGQLRRAASLLRFQSTLVIAEHANDSLAPITLNTITAAGRLGGEVSCLVAGTKCDKVVQDLCKVAGVQTVLVAQHDAYKGLLPEELTPLILETQKQF

SEQ ID NO: 1016527 - protein, 142 aa, Homo sapiens
SPVSSTPISPIFGPSNWHFMPPVSEVVPTQGADPLLNELLLLPCQPPPLFKKWEDSAHPQRPDNADLAILYAVVDGVPPARWKEFMRFMGLSEHEIERLEMQNRRCLREGSVQHAGSWRRRTPPNEDTLEVVGLVLSKMNLA

SEQ ID NO: 1016528 - protein, 95 aa, Homo sapiens
LYYGCRRSDEDYLYREELARFHKDGALTQLNVAFSREQAHKVYVQHLLKRDKEHLWKLIQKVVAHIYVCGDARNMAKDVQNTFYDIVAEVWAHGA

SEQ ID NO: 1016529 - protein, 46 aa, Homo sapiens
  misc_feature (5)..(5): Xaa can be any naturally occurring amino acid
ELQRXPEEEKKEWIQIIQATIEKHKQNSETFKACGGALARMRTPPL

SEQ ID NO: 1016530 - protein, 340 aa, Homo sapiens
LSLVFSLLFMFRSVVIYVLCDCILSSPRGVLPVIFSVLCSLVSCPYLPALDSTRALPSCPLMPPGGPGPRYSCDLPLSSAAFSRRLQTPVSLPGSSAPTPLRPSLLRYPEYAMPLDLGPRIPNPWRFTADFMVTHAHLVFLFLTAPQPHGGTVTCPNPGDFRGMRLLRRADFHVGAHVNTFWRTPCPGPPEGLSQKSFLWENKHITWFAPWTAASGLLLPKQEKTYRRLLMPQNALTPKLPHHAGLNPRAFRMLHLDRRTLQNAVRNVLDGELLHRYLYLSTLERSELTQKIGTTPRHNPGRLAGDGPPSPPTSSPVEAVTPSTRNYLPPPFCTKPPGKT

SEQ ID NO: 1016531 - protein, 238 aa, Homo sapiens
  misc_feature (234)..(234): Xaa can be any naturally occurring amino acid
MDPARPLGLSILLLFLTEAALGDAAQEPTGNNAEICLLPLDYGPCRALLLRYYYDRYTQSCRQFLYGGCEGNANNFYTWEACDDACWRIEKVPKVCRLQVSVDDQCEGSTEKYFFNLSSMTCEKFFSGGCHRNRIENRFPDEATCMGFCAPKKIPSFCYSPKDEGLCSANVTRYYFNPRYRTCDAFTYTGCGGNDNNFVSREDCKRACAKALKKKKKMPKLRFASRIRKIRKKXFKHS

SEQ ID NO: 1016532 - protein, 212 aa, Homo sapiens
  misc_feature (87)..(87): Xaa can be any naturally occurring amino acid
  misc_feature (98)..(98): Xaa can be any naturally occurring amino acid
  misc_feature (115)..(116): Xaa can be any naturally occurring amino acid
  misc_feature (124)..(124): Xaa can be any naturally occurring amino acid
  misc_feature (126)..(126): Xaa can be any naturally occurring amino acid
  misc_feature (137)..(138): Xaa can be any naturally occurring amino acid
  misc_feature (141)..(142): Xaa can be any naturally occurring amino acid
  misc_feature (144)..(144): Xaa can be any naturally occurring amino acid
  misc_feature (154)..(154): Xaa can be any naturally occurring amino acid
  misc_feature (159)..(159): Xaa can be any naturally occurring amino acid
MDPARPLGLSILLLFLTEAALGDAAQEPTGNNAEICLLPLDYGPCRALLLRYYYDRYTQSCRQFLYGGCEGNANNFYTSDPSHHPSXTIQKLPKLSPXQLTLPPHLSPLHTKLFXXSTSHPISXIXFPSLSPQPHSXXLSXXPXFSPLLPPKPXSLLFXHSPPSPTAPLPLSLAIILIQDTEPVMLSPILAVEGMTITLLAGRIANVHVQKL

SEQ ID NO: 1016533 - protein, 88 aa, Homo sapiens
LSDRCGRTEMPVPVGPYGSPQPSCFDRVKMGFVMGCAVGMAAGALFGTFSCLRIGMRGRELMGGIGKTMMQSGGTFGTFMAIGMGIRC

SEQ ID NO: 1016534 - protein, 198 aa, Homo sapiens
  misc_feature (9)..(9): Xaa can be any naturally occurring amino acid
MFHGIPATXGIGAPGNKPELYEEVKLYKNAREREKYDNMAELFAGGERQCNALEKAYIKDCVSPSEYYMQHCSRRPGSNTKLPSGRSRSQKSALLTEFCRKFRLDCPLAMERINGGPAHHASRTTRAYPQPAASLDVVSLLITVMDIAAPGGSAAMDEIQPDLRELMEIMHLHEPPRTDFEGRRTVRQWLQTLSGMSA

SEQ ID NO: 1016535 - protein, 249 aa, Homo sapiens
  misc_feature (9)..(9): Xaa can be any naturally occurring amino acid
MFHGIPATXGIGAPGNKPELYEEVKLYKNAREREKYVQAPRLSHHTSCASGCPGAAPPDPPQTEGWEDAGSVWGTVPEALQDGRERYDNMAELFAGGERQCNALEKAYIKDCVSPSEYYMQHCSRRPGSNTKLPSGRSRSQKSALLTEFCRKFRLDCPLAMERINGGPAHHASRTTRAYPQPAASLDVVSLLITVMDIAAPGGSAAMDEIQPDLRELMEIMHLHEPPRTDFEGRRTVRQWLQTLSGMSA

SEQ ID NO: 1016536 - protein, 221 aa, Homo sapiens
LKMAMRLQQIHYLASSVKVAHFNKDRKKSSSECQAHKPVGQQECNKGSWELENIRDGHCHCPWGVLLLLLSVAAQTLQSSDTKEQLLWGRMAAHSQGTWLSLAQAFSHSGVHSLDGREIDRQALRELTQVVSGTASYSGPKPSTQYGAPGHFAAPGEGGDQWAALLLPTLAAHSQHMASEDIASDEEHTVIHEEEGVTDVIADDGFSTTDTDLKFKEWVTD

SEQ ID NO: 1016537 - protein, 85 aa, Homo sapiens
  misc_feature (6)..(6): Xaa can be any naturally occurring amino acid
  misc_feature (30)..(30): Xaa can be any naturally occurring amino acid
  misc_feature (38)..(38): Xaa can be any naturally occurring amino acid
  misc_feature (75)..(75): Xaa can be any naturally occurring amino acid
AQLGFXIRGGKASQLGIFISKVIPNSDAHXAELQEGDXVLAVNDVDFQDIEHSKAVAILKTAREIRMRVRFFPHXYHRQKERTVH

SEQ ID NO: 1016538 - protein, 74 aa, Homo sapiens
  misc_feature (69)..(69): Xaa can be any naturally occurring amino acid
HRCSFLCACGFPSSPALRVHGHHGVLGAAVLRSIWPLQRQQQHQALQRNPQRLKPLRVLTGIQQQRFLXPTKTT

SEQ ID NO: 1016539 - protein, 150 aa, Homo sapiens
FLVSFKDVGRKPPTFGDASVIALELLNSGYEFDEGSIIFNQFKSVISYKTEEKPIFSLNTIATAETMSIYDDIDADVLQNYQEYNLANLIYYSLKESTTSEQSARMTAMDNASKNASDMIDKLTLTFNRTRQAVITKELIEIISGAAALD

SEQ ID NO: 1016540 - protein, 261 aa, Homo sapiens [sequence omitted]

SEQ ID NO: 1016541 - protein, 70 aa, Homo sapiens
ESPSRLLDTSSRRFKSSKLVPLANIYGPGQDPPRPPAGAVDYGSTQSGTGYCVFTMVTPWMACRSTFVPV

SEQ ID NO: 1016542 - protein, 132 aa, Homo sapiens
MWLPVVRTWRLNERHYGGLTGLNKAETAAKHGEAQVKIWRRSYDVPPPPMEPDHPFYSNISKDRRYADLTEDQLPSCESLKDTIARALPFWNEEIVPQIKEGKRVLIAAHWQQPPGALSSIWRVSLKRLSWS

SEQ ID NO: 1016543 - protein, 209 aa, Homo sapiens
MLCSSFCFIEYRLDPHSAVSLRRQVLYHWHLLSDQWHLALSSEVRIALFCYEFDICFTSVQKRAIRTLWTVLDAIDQMWLPVVRTWRLNERHYGGLTGLNKAETAAKHGEAQVKIWRRSYDVPPPPMEPDHPFYSNISKDRRYADLTEDQLPSCESLKDTIARALPFWNEEIVPQIKEGKRVLIAAHWQQPPGALSSIWRVSLKRLSWS

SEQ ID NO: 1016544 - protein, 68 aa, Homo sapiens
RNEHFTRGQMPPLSCILKLVTSGSVAGIRQWPSAVLWRKLPFPKASASIDIGNVASSPWSCPQPMLFQ

SEQ ID NO: 1016545 - protein, 159 aa, Homo sapiens
PRLNGDDREAVEKELGSLTLSSEELAYGKTKIFIRSPKTLFYLEEQRRLRLQQLATLIQKVYRGGCCRTHYQQMRKSQILISAWFRGNKQKKHYGKIRSSVLLIQAFVRGWRARKNYRKYFRSGAALTLANFIYQSCTGFIDHPQLYGLKQATWSWFAV

SEQ ID NO: 1016546 - protein, 66 aa, Homo sapiens
KVTVQEEVGVEDEEAEDSTGKRVAEDDDDDDVDTKKQKTKEDDLAAKGKITLRTVTYSPSTSRLRI

SEQ ID NO: 1016547 - protein, 78 aa, Homo sapiens
SFRAALFVAQFPLSGRVSAPQPPVPLHSRPGSRRHGSPREESVRLRPQVVAVAEKREKLANGGEGMEEATVVIEHCTS

SEQ ID NO: 1016548 - protein, 180 aa, Homo sapiens
  misc_feature (178)..(178): Xaa can be any naturally occurring amino acid
MWLDPADSKMSSGNAKIGYPAPNFKATAVMPDGQFKDISLSEYKGKYVVFFFYPLDFTFVCPTEIIAFSDRADEFKKLNCQVIGASVDSHFCHLAWINTPKKQGGLGPMNIPLISDPKRTIAQDYGSLKRLMKVSLSRGLFIIDDKGILRQITINDLPVGRSVDEIIRLVQAFQFTDXPW

SEQ ID NO: 1016549 - protein, 266 aa, Homo sapiens
AGGREAPGPWRRAAAAQPSAGHVLSGGGEDLPRRESGDGPSAAGPRPVLGSGRRQRPSAGARGAESERWELLLRRGELLALGGHLKGALEAFAAALRAGPPARPECLGALVDCLVFNYRLRHGLGWSAAPVAGADGGAGGLLRCLGCRGFLSEPGDRALWPQLLPPLPCGGELREPVPALPGPAAAATASATDAEGTARGRRSGAAIAASDFRTSVVLNHLAEKWFPGQRERARAAGSSESYGPGRYREALARLEGWSRTQGLDCT

SEQ ID NO: 1016550 - protein, 117 aa, Homo sapiens
GEGGRRCRPGSVVPCGDNWRQRAGARDLVSGRHGPSVHESLYFNPMMTNGVVHANVFGIKDWVTPYKIAVLVLLNEMSRTGEGRRPASWKRRRLNQLAPAPACRGPDITPVKTLQVN

SEQ ID NO: 1016551 - protein, 187 aa, Homo sapiens
MHVQSGVTKSVSHSLWAGSASASPSRQHFIPFRNKETETGARGTDVDLLELHNRGNLWARADTRNQAPCINSLEVTLKNLFRAKEDGDSRSPRPDERRDKARDEPQRGRELLNGGKQGTGRRTRQSPGGAWQGSEAGNIDAENACANLRDDRAEKRTSGGGHNVERTIAAPNIGYNTPIRKREEGDS

SEQ ID NO: 1016552 - protein, 42 aa, Homo sapiens
QSQLPRPLLAMDTGVINGGLIVTLTIRLLLHGRKVGSIIGRR

SEQ ID NO: 1016553 - protein, 117 aa, Homo sapiens
  misc_feature (1)..(1): Xaa can be any naturally occurring amino acid
  misc_feature (7)..(7): Xaa can be any naturally occurring amino acid
XHEVEQXEAPVPNTDGTMNSGHSFSQSRLGLLPWRRRWLGAAQELPQGFHRPWRCGGIPDLPCPSPRGVPTPWGVLGFWKKQPPTRRKLGGHHAEISNDRLASYLGEVSRPGGGHHE

SEQ ID NO: 1016554 - protein, 90 aa, Homo sapiens
SPFWAPSAVFRRGGLRFARRGPVAVPASAFPAGGLLCWGPGQFRWVPGTCLPRRNSSRRQVRVVPLPPTRACAVGNRLSQMNSQMNRGVR

SEQ ID NO: 1016555 - protein, 109 aa, Homo sapiens
  misc_feature (8)..(8): Xaa can be any naturally occurring amino acid
  misc_feature (20)..(20): Xaa can be any naturally occurring amino acid
MAVALSAXGSAFGLRPSAAXQRAAATWQLNPSSPQPLLQLPRFLPPLRCALGNWLWASMTFMGRFFRSSSRAPVRTRGDLGGDANRFNIPFLNVFGVGSGYFTQGKDSF

SEQ ID NO: 1016556 - protein, 131 aa, Homo sapiens
  misc_feature (20)..(20): Xaa can be any naturally occurring amino acid
  misc_feature (60)..(60): Xaa can be any naturally occurring amino acid
QLTCPGLNDSLQVPERLTEXYRELLQSFQSKDAQHLIPCWSKLNDQFKLGFPVGYPSHRXKTSTYLRVSTVTTHSSDSEVPSRVTEVVVKLFDSDPITVVLPEEVSKDNPKFMDTVAEKALQEYRRKSRAE

SEQ ID NO: 1016557 - protein, 131 aa, Homo sapiens
PCPQKRVCPDLERLDEKGRATRSWTPLVSLDTPRESHSASGHPWLTLMDMKFALLGMKLFENSLRWIQKEANYWMMQWKQTKVTSGLLRGINQRLRVSGRHMKSTYISSPVCYQSGTYVLRNAPTTWLCPA

SEQ ID NO: 1016558 - protein, 181 aa, Homo sapiens
ALFFLVTTIHAELCHPDAENAFKVRLSIRAALGDKAYVWDTDQEYLFRAMVAFSMRKVPNREATEISHVLLCNITQRCPFWFVVTDPSNNYTLPAAEVQSAIRKNRNRINSAFFLDDHTLEFLKIPSTLAPPMEAIWCPSGIIESGVNICIGTGCNGTTGSIWDRQSRKEQQRTTGVEDAE

SEQ ID NO: 1016559 - protein, 225 aa, Homo sapiens
  misc_feature (11)..(11): Xaa can be any naturally occurring amino acid
  misc_feature (39)..(39): Xaa can be any naturally occurring amino acid
  misc_feature (50)..(50): Xaa can be any naturally occurring amino acid
  misc_feature (111)..(111): Xaa can be any naturally occurring amino acid
  misc_feature (140)..(140): Xaa can be any naturally occurring amino acid
MFATAEDITNXLSKCCESASEDCMAKELPEHTVKLCDNXSTKNSKFEDCXQEKTAMDVFVSTIHTCQQPNIPELPDVELPTNKDVCDPGNTKVMDKNTFELSRRTHLPEVXLSKVLEPTLKSLGECCDVEDSTTCFNAKXPLLKKELSAVIDKGQELCADYSENTFTEYKKKLAERLKAKLPEATPTELAKLVNKRSDFASNCCSINSPPLYCDSEIDAELKNIL

SEQ ID NO: 1016560 - protein, 97 aa, Homo sapiens
  misc_feature (1)..(1): Xaa can be any naturally occurring amino acid
XVKNRFQTVHFFRDVLGMQVLRHEEFEEGCKLHANGPYDGKWSKTMVGFGPEDDHFVAELTYNYGIGDLQSFGNDFMGITLASSQAVSNAREAGSGH

SEQ ID NO: 1016561 - protein, 133 aa, Homo sapiens
PDAQFITIGNERFRCPEALSQPSFLGMESCGIHETTFNSIMKCDVDIRKDLYANTVLSGATTMYPGIADRMQKEITALAPSTMKIKIIAPPERKYSVWIGGSILASLSTFQQMWISKQEYDESGPSIVHRKCF

SEQ ID NO: 1016562 - protein, 162 aa, Homo sapiens
  misc_feature (4)..(4): Xaa can be any naturally occurring amino acid
  misc_feature (20)..(20): Xaa can be any naturally occurring amino acid
  misc_feature (45)..(45): Xaa can be any naturally occurring amino acid
  misc_feature (101)..(101): Xaa can be any naturally occurring amino acid
EPYXGILIYRRDIIMDGGYXDLVHVVVNIIIWFLISSNGQVKFSXTSFSCLVFTESHGLGPKVSSPILPCSLILGNELLLLHNNNNNNNNNNNNNNIASLXEFGTSLAPSTMKIKIIAPPERKYSVWIGGSILASLSTFQQMWISKQEYDESGPSIVHRKCF

SEQ ID NO: 1016563 - protein, 175 aa, Homo sapiens
PGLLAPPAEGSAAVLKAAAPPSSHGVSTGTKYRYFACLMRARFEEHKNEKDMMRATQLLREAEEEFWQNQHPQPYIFPDSPGGNFLRRDMSAYKVPEWCLDYWHPSEKAMYPDYFSKREQWKKLRMESWDREVKQLQEETSPDGIMTEALPPARREGDLPPLWWHIVTRPRERPT

SEQ ID NO: 1016564 - protein, 76 aa, Homo sapiens
  misc_feature (10)..(10): Xaa can be any naturally occurring amino acid
GSKYKPAPLXHLPSTLDPAEYDVSPETRRAQVERLSIRARLKREYLLQYNDPKRVSHNRGSCLDSLDLCKISKYLS

SEQ ID NO: 1016565 - protein, 115 aa, Homo sapiens
  misc_feature (47)..(47): Xaa can be any naturally occurring amino acid
CITAQDHQLTPDSCIISMVWPSSRLMKIPSGFPPDVSIKEHQRCLGXAPMTCSGLPCTTSADLLLATVTLFPPPSSQSQLTPPDAPNIIHKRAGPRRERVQGASVTTVLCMMFGC

SEQ ID NO: 1016566 - protein, 116 aa, Homo sapiens
  misc_feature (4)..(4): Xaa can be any naturally occurring amino acid
  misc_feature (11)..(11): Xaa can be any naturally occurring amino acid
  misc_feature (21)..(22): Xaa can be any naturally occurring amino acid
  misc_feature (29)..(29): Xaa can be any naturally occurring amino acid
  misc_feature (60)..(60): Xaa can be any naturally occurring amino acid
SPEXMSCLPNXKTYFPNFDLXXVCPGYRXRKEGGDALTKAVAHVDDMPNACPPWATCTRXSLGGPGQLQAPKPLPAGDPGRPPPRRVHPWVHASLDKFLASVSTVLPPNTVKLEPR

SEQ ID NO: 1016567 - protein, 151 aa, Homo sapiens
  misc_feature (4)..(4): Xaa can be any naturally occurring amino acid
WKTXPHFPGDSSGQPAPQMRAAPRRAPAAQPPAAAAPSAVGSPAAAPRQPGLMAKMATTAAGVAVGSASGTHPGSRHHWGLQRRWQCCSPQSPTSLTRSLREPSCRTSSLLDLALLEIKQFLECAQNQSDVKLCEGFNEVLRQCRIANGLM

SEQ ID NO: 1016568 - protein, 318 aa, Homo sapiens
  misc_feature (274)..(274): Xaa can be any naturally occurring amino acid
HIVRLPFLGPPTGLAMMHSFLGPRLMIRPSALSLYFWGPLPIPRSLRESLDFKWTRYISAPVATVHCSPVSVCASHTFLGPPFGDPRAPGSPLCLVRVSVLSVCSFLSPPVMSSCVTFRDLWDLCNSPGLKLPFCALFNWGRLFPEPPRFLPQFPPGRAPGPRFDRGFGSGRPFGPFSQVRCALLSAFPAPDFPFTCPGLDAPDTDLIGGTRAAREMGRSPLRVVLLPARPFLRAVAEARFPRGPLGGARGWDPHGKPGQPGFHGLVTRFNHPXAGPAEGRLRFPPAIKFPFAFGTSGPRRLANVLFERSVELFKRVF

SEQ ID NO: 1016569 - protein, 104 aa, Homo sapiens
TSLSAYFVVSTIPPSRWGLELSIKFFPVSVSLSSFAWLCLSQGEISHLQALQGVLGSGKFVIRVSGTSYCCPKGKKKSETKNSPGPFRLHSEALERCRRTWKGS

SEQ ID NO: 1016570 - protein, 167 aa, Homo sapiens
  misc_feature (119)..(119): Xaa can be any naturally occurring amino acid
  misc_feature (134)..(134): Xaa can be any naturally occurring amino acid
  misc_feature (149)..(149): Xaa can be any naturally occurring amino acid
SERKFRTGSGAGEKAVTEFADCAKGVRACSRNLVEQPGACTPAEKPYACPECGKAFNQRSNLEPAPAALHSSAKRYAVPTVRKGLQGPLGPGATPARAHRRAALWLLRVRKDLPRLLLXAPARAPALGREALQXSRLAARPSCATAALXANLRTHTGERPYACGDSV

SEQ ID NO: 1016571 - protein, 168 aa, Homo sapiens
  misc_feature (166)..(166): Xaa can be any naturally occurring amino acid
WTPVTMRFLILFLALSLGGIDAAPPVQSRIVGGFNCEKNSQPWQVAVYRFTKYQCGGILLNANWVLTAAHCHNDKYQVWLGKNNFLEDEPSAQHRLVSKAIPHPDFNMSLLNEHTPQPEDDYSNDLMLLRLKKPADITDVVKPIDLPTEEPKLGSTCLASGGAALXPS

SEQ ID NO: 1016572 - protein, 38 aa, Homo sapiens
MCLWWLILCVTFAWPWFPETWSATVESFYDGAVNMWAK

SEQ ID NO: 1016573 - protein, 332 aa, Homo sapiens
RRDGGGFGLRSGRRQSLGLGLGLGLGLGLGLGLRLRLPWERVPADAEVALTLAPRLPFQVLLHVLFEHAVGYALLALKEVEEISLLQPQVEESVLNLGKFHSIVRLVAFCPFASSQVALENANAVSEGVVHEDLRLLLETHLPSKKKKVLLGVGDPKIGAAIQEELGYNCQTGGVIAEILRGVRLHFHNLVKGLTDLSACKAQLGLGHSYSRAKVKFNVNRVDNMIIQSISLLDQLDKGHQYLSLCVSGSGTGYHFPELVKITQATMATYCRLCPVLFGNRRELNEDKLEKLEELTMDGAKAKAILDASRSSMGIGTYLALTLINIRELLQS

SEQ ID NO: 1016574 - protein, 282 aa, Homo sapiens
  misc_feature (2)..(2): Xaa can be any naturally occurring amino acid
FXGLAAGAMVLLHVLFEHAVGYALLALKEVEEISLLQPQVEESVLNLGKFHSIVRLVAFCPFASSQVALENANAVSEGVVHEDLRLLLETHLPSKKKKVLLGVGDPKIGAAIQEELGYNCQTGGVIAEILRGVRLHFHNLVKGLTDLSACKAQLGLGHSYSRAKVKFNVNRVDNMIIQSISLLDQLDKGHQYLSLCVSGSGTGYHFPELVKITQATMATYCRLCPVLFGNRRELNEDKLEKLEELTMDGAKAKAILDASRSSMGIGTYLALTLINIRELLQS

SEQ ID NO: 1016575 - protein, 158 aa, Homo sapiens
MRNHLLLLFKYRGLVRKGKKSKRRKWLEFVIRPATAADCSDILRVIKELAKYGYLEEQVILTEKDLLEEVSGEHPLLPLTVFAEVPKEHDSGAGLRKVTVSSCAMYMAFRVQVDGRGGKLREILYSNEVDDHENEDTAFVGFGHVTIVTYDPWIGKLL

SEQ ID NO: 1016576 - protein, 136 aa, Homo sapiens
MAKFVIRPATAADCSDILRVIKELAKYGYLEEQVILTEKDLLEEVSGEHPLLPLTVFARMCRKSMTGKDTAFVGFGHVTILPMTRDVPVIVICEDFFVMSDDRGAGHRIRNLKNLSQVAMKVSVQHRMNFLDSRMD

SEQ ID NO: 1016577 - protein, 130 aa, Homo sapiens
LLNEHTPQPEDDYSNDLMLSSLKKPADITDVVKPIDLPTEEPKLGSTCLASGWGSITPVKYEYPDELQCVNLKLLPNEDCAKAHIEKVTDDMLCAGDMDGGKDTCAGDSGGPLICDGVLQGITSWALALR

SEQ ID NO: 1016578 - protein, 111 aa, Homo sapiens
  misc_feature (5)..(5): Xaa can be any naturally occurring amino acid
LLIPXKSSLNDPATEGIILIGEIGGHAEEKCAAFLKEHNSGPKAKPVVSFIAGITAPPGRRMGHAGAIIAGGKGGAKEKISALQSAGVVVSMSHAQLGTTIYKEFEKRKML

SEQ ID NO: 1016579 - protein, 198 aa, Homo sapiens
MEPPRGPPANGAEPSRAVGTVKVYLPNEQRTGGDCPGWRCVSTASLDKALKGAGLLKVTVLLCGLRERLSRRTQETVTAWVLQANSFPWMDDGAALMSMDPMKDVPSDAWQQSLSSGQTLFLQLCAVAVTCHAYKRLSRSHGFPVAQYLWRTRGSTQLLFLTRSATSAGVDMSTQATTSSTRVSEDLSWRLQDQHEAR

SEQ ID NO: 1016580 - protein, 202 aa, Homo sapiens
  misc_feature (55)..(55): Xaa can be any naturally occurring amino acid
  misc_feature (57)..(57): Xaa can be any naturally occurring amino acid
  misc_feature (63)..(63): Xaa can be any naturally occurring amino acid
  misc_feature (66)..(66): Xaa can be any naturally occurring amino acid
  misc_feature (70)..(70): Xaa can be any naturally occurring amino acid
  misc_feature (76)..(77): Xaa can be any naturally occurring amino acid
  misc_feature (79)..(79): Xaa can be any naturally occurring amino acid
  misc_feature (85)..(85): Xaa can be any naturally occurring amino acid
  misc_feature (93)..(94): Xaa can be any naturally occurring amino acid
  misc_feature (98)..(99): Xaa can be any naturally occurring amino acid
  misc_feature (101)..(101): Xaa can be any naturally occurring amino acid
  misc_feature (106)..(106): Xaa can be any naturally occurring amino acid
  misc_feature (109)..(109): Xaa can be any naturally occurring amino acid
  misc_feature (114)..(114): Xaa can be any naturally occurring amino acid
  misc_feature (121)..(121): Xaa can be any naturally occurring amino acid
  misc_feature (128)..(128): Xaa can be any naturally occurring amino acid
  misc_feature (131)..(132): Xaa can be any naturally occurring amino acid
  misc_feature (134)..(134): Xaa can be any naturally occurring amino acid
  misc_feature (143)..(143): Xaa can be any naturally occurring amino acid
  misc_feature (147)..(148): Xaa can be any naturally occurring amino acid
  misc_feature (151)..(151): Xaa can be any naturally occurring amino acid
  misc_feature (153)..(153): Xaa can be any naturally occurring amino acid
  misc_feature (157)..(158): Xaa can be any naturally occurring amino acid
  misc_feature (161)..(161): Xaa can be any naturally occurring amino acid
  misc_feature (167)..(168): Xaa can be any naturally occurring amino acid
  misc_feature (170)..(170): Xaa can be any naturally occurring amino acid
  misc_feature (174)..(174): Xaa can be any naturally occurring amino acid
  misc_feature (182)..(182): Xaa can be any naturally occurring amino acid
  misc_feature (200)..(200): Xaa can be any naturally occurring amino acid
MEPPRGPPANGAEPSRAVGTVKVYLPNEQRTGGDCPGWRCVSTASLDKALQVRGXPXACCVVXRLXPGRXPVPAWXXAXAPLAGXALLVAVLXXVPLXXPXFVRPXFFXLAFCXFCLPFLXPGFRCPXCGXXFXPPCSSPVPXVCVXXRPXRXPFSXXVLXLSGGSXXPXAPSXRPLNELLXPQGPSPRTQHCDPEHFPXPA

SEQ ID NO: 1016581 - protein, 157 aa, Homo sapiens
VLRVSLQHFRCGVWRRRAEMAPRKGKEKKEEQVISLGPQVAEGENVFGVCHIFASFNDTFVHVTDLSGKETICRVTGGMKVKAERDESSPYAAMLAAQDVAQRCKELGYHRPYTSELRATGGNRTKTPGPGAQSALRALARSGMKIGRIEDVTPIPL

SEQ ID NO: 1016582 - protein, 157 aa, Homo sapiens; identical to SEQ ID NO: 1016581

SEQ ID NO: 1016583 - protein, 157 aa, Homo sapiens; identical to SEQ ID NO: 1016581

SEQ ID NO: 1016584 - protein, 151 aa, Homo sapiens
VLRVSLQHFRCGVWRRRAEMAPRKGKEKKEEQVISLGPQVAEGENVFGVCHIFASFNDTFVHVTDLSGKETICRVTGGMKVKAERDESSPYAAMLAAQDVAQRCKELGYHRPYTSELRATGGNRTKTPGPGAQSALKKPTFCGTLAFGAIN

SEQ ID NO: 1016585 - protein, 99 aa, Homo sapiens
RFTSGAKKPSLGNAFGVPILDGNQPPVCERHWSQSPDLWPPASLWLSGRAGFQEVDAQMLRDICSKYFYDQCPAVAGYGPIEQLPDYNRIRSGMFLLRF

SEQ ID NO: 1016586 - protein, 183 aa, Homo sapiens
MSSTPFDMSIQCIQSVYISKIISSDRDLLAVVFYGTEKDKTFSDIFKTSIYDLTGVCDNPGCTTQNSSSLTKSQRGSRDTTTFPRHGWAHGSDYSLSEVAAGSVANLFSDVQFKDELIRGSLLYTNEDNPHGNDSAKASRARTKAGDLRDNRHLSLTLMHLKKPGGPRPYPVPHITSQTKQRP

SEQ ID NO: 1016587 - protein, 193 aa, Homo sapiens
SEEDKKTPTSIENWFRCMDLNGDGALSMFELENFYEEQCRRLDSMAIKALPFQDCLCKMLDLVKPRTEGKITLQDLKRCKLANVFFDTFFNIEKYIDNEKKEQISLLRDGDSGGPELSDWEKYAAEEYDILVAEETAGEPWEDGFEAELSPVEQKLSALRSPLAQRPFFEAPSPLGAVDLYEYACGDEDLEPL

SEQ ID NO: 1016588 - protein, 120 aa, Homo sapiens
MHRGPSPGSIRGAWRPQPGARCWLSGLELKVGSGDCLVLEVGGLSSLCFPEKRPRACSALLATSSPSPRCRFEAELSPVEQKLSALRSPLAQRPFFEAPSPLGAVDLYEYACGDEDLEPL

SEQ ID NO: 1016589 - protein, 453 aa, Homo sapiens
MAAVVLENGVLSRKLSDFGQETSYIEDNSNQNGAVSLIFSLKEEVGALAKVLRLFEENEINLTHIESRPSRLNKDEYEFFTYLDKRSKPVLGSIIKSLRNDIGATVHELSRDKEKNTVPWFPRTIQELDRFANQILSYGAELDADHPGFKDPVYRARRKQFADIAYNYRHGQPIPRVEYTEEERKTWGTVFRTLKALYKTHACYEHNHIFPLLEKYCGFREDNIPQLEDVSQFLQTCTGFRLRPVAGLLSSRDFLGGLAFRVFHCTQYIRHGSKPMYTPEPDICHELLGHVPLFSDRSFAQFSQEIGLASLGAPDEYIEKLATIYWFTVEFGLCKEGDSIKAYGAGLLSSFGELQYCLSDKPKLLPLELEKTACQEYTVTEFQPLYYVAESFNDAKEKVRTFAATIPRPFSVRYDPYTQRVEVLDNTQQLKILADSINSEVGILCHALQKIKS

SEQ ID NO: 1016590 - protein, 494 aa, Homo sapiens
ETLSFIYKLPQNPSPSTPGASLSGTQAADKLWVHPACAQLLGTVVVPVSCGRAGDFHSSVGVPPVPEGRRGLEGGWKLRDSSPREVSDSFRDFRARVGTVGGRRGTCEGHCDQSLEGLRGRKNLCAIVVLNAPGCEQEGVQWCRRYTGFSWVTVEPLKRCRYQIRLPEGSHKCVPVGRAVTPILSLQNLFEKRTTHVSPTRLHKTREQCDTEDQGATGMCVSQQAAVQQHGPSIYPPAVLRTCVANHPASIAQRRRAIPTRGTSRNNEQSRQSAINTPVETPRCQASVTFGAPNGGLPPGGGPSVTGGIPQDQRYGHLFSNHGARTQTSEQRLNPQARIHPTHGADPAGANTTGAAPTVYIRHHTAGKHTKFHTPRTIIVSTRWGLTKFPDSTKRAPRCCRHPNDMGYIHTATVNIAVLCVDHTNEVGGHHNDEGAGMWQDENTTRHLPYMIRGRYHTEKETLPWQCVCLMKHNNKAPYVAQLNRETIRQKRSY

SEQ ID NO: 1016591 - protein, 228 aa, Homo sapiens
GAGGFLGQRIVRMLVQEEELQEIIALFRTFGRKQEEELSKLQTKTKVTVLKGDILDAQCLKRACQGMCAVIHTAAAIDPLGAASRQTILDVNLKGTQLLLDACVEANVPTFIYSSSVLVAGPNSYKEIILNAHEEEHHESTWSNPYPYSKKMAEKAVLAANGSILKNGGTLHTCALRLSFIYGEECQVTSTTVKTALKNNSIIKKNATFSMANPVYVGNAAWAHILAC

SEQ ID NO: 1016592 - protein, 142 aa, Homo sapiens
MIVGFLWAGTQLLLDACVEANVPTFIYSSSVLVAGPNSYKEIILNAHEEEHHESTWSNPYPYSKKMAEKAVLAANGSILKNGGTLHTCALRLSFIYGEECQVTSTTVKTALKNNSIIKKNATFSMANPVYVGNAAWAHILAC

SEQ ID NO: 1016593 - protein, 145 aa, Homo sapiens
SFGQAKHQPTAIIAKTFKGRAITGVEDKESWHGISPSPYTWLSRSIQEIYSQIQSIKKILSNPPQEDAPSVDIANIRMPSLPSYKVGDKIATRKAYGQALAIVLAMPVTAIIVLDGHTFYSYLLGDLQKEYPDRFIDCCIVEAVS

SEQ ID NO: 1016594 - protein, 96 aa, Homo sapiens
TSLAADGGHHWTYEGPHGQDHWPTSYPECGGDAQSPINIQTDSVIFDPDLPAVQPHGYDQLGTEPLDLHNNGHTVQLSLPPTLHLGGLPRKYTAAQ

SEQ ID NO: 1016595 - protein, 66 aa, Homo sapiens
  misc_feature (13)..(13): Xaa can be any naturally occurring amino acid
  misc_feature (56)..(58): Xaa can be any naturally occurring amino acid
  misc_feature (63)..(65): Xaa can be any naturally occurring amino acid
GVMLADPAESSSXSPKPFAPEEAPQLQLNSQPPQAPPRESPEGSPINEGRTCPSCXXXPNTAXXXK

SEQ ID NO: 1016596 - protein, 103 aa, Homo sapiens
  misc_feature (8)..(8): Xaa can be any naturally occurring amino acid
  misc_feature (19)..(19): Xaa can be any naturally occurring amino acid
PGSPPRGXPQNGGPATCPXPALRSIPNTPPQYFKMEGDPLRFGFGGSNREKPYGQAQPKMQMVLENGYDPKILSRKVTPKHFLLSTLSVWPRNTVGTSMILSL

SEQ ID NO: 1016597 - protein, 121 aa, Homo sapiens
  misc_feature (29)..(29): Xaa can be any naturally occurring amino acid
  misc_feature (49)..(49): Xaa can be any naturally occurring amino acid
  misc_feature (61)..(61): Xaa can be any naturally occurring amino acid
  misc_feature (65)..(65): Xaa can be any naturally occurring amino acid
  misc_feature (79)..(79): Xaa can be any naturally occurring amino acid
  misc_feature (99)..(99): Xaa can be any naturally occurring amino acid
  misc_feature (101)..(101): Xaa can be any naturally occurring amino acid
  misc_feature (120)..(120): Xaa can be any naturally occurring amino acid
AGIKTELTQIKSNIDALLSRLEQIAADKXANPDGKKKGDGGGATARAAXGGGIGGDGSGGXGGGXSSGHQPPKRTQLLXAGLPQGESTDPRRRRLKGRXPXHTARKELGTQPGTQTRFIXT

SEQ ID NO: 1016598 - protein, 145 aa, Homo sapiens
  misc_feature (54)..(54): Xaa can be any naturally occurring amino acid
  misc_feature (73)..(73): Xaa can be any naturally occurring amino acid
  misc_feature (77)..(77): Xaa can be any naturally occurring amino acid
  misc_feature (79)..(79): Xaa can be any naturally occurring amino acid
  misc_feature (89)..(89): Xaa can be any naturally occurring amino acid
  misc_feature (93)..(93): Xaa can be any naturally occurring amino acid
  misc_feature (107)..(107): Xaa can be any naturally occurring amino acid
  misc_feature (109)..(109): Xaa can be any naturally occurring amino acid
  misc_feature (113)..(113): Xaa can be any naturally occurring amino acid
  misc_feature (121)..(121): Xaa can be any naturally occurring amino acid
  misc_feature (145)..(145): Xaa can be any naturally occurring amino acid
MYNLYIQAETFPFVYSKPSPCVCGIEGHIIGTSERVVSSHFLGKGGVVWPKWGXWMLPIVHAWWQIHHSGQSXSSGXVXSTFPGSGRLXFPGXKPVHSLSASWCHFXFXFSCXFLPSWRCXSSPGWGNDHSVFRFLGSPLGLSFX

SEQ ID NO: 1016599 - protein, 201 aa, Homo sapiens
  misc_feature (201)..(201): Xaa can be any naturally occurring amino acid
EHLAFKGTKNRPGNALEKEVESIGAHLNAYSTREHTAYLIKALSKDLPKVVELLADIVQNSSLEDSQIEKERDVILREMQENDASMQNVVFDYLHATLPKGTPLAQAVEGPSENVRRLSRTDLTDYLNRHYKAPRMVLAAAGGVEHHSKLLDLAQKHLSSVSRVYEEDALPGLNSMSLHWAVEIPAIGMTPLPLGHVGHFX

SEQ ID NO: 1016600 - protein, 119 aa, Homo sapiens
  misc_feature (2)..(2): Xaa can be any naturally occurring amino acid
LXFSKPLSEELEGPSQQVMNPTGKEALLQLLLLLLLAKHCRSPNPVTRQDGGTPPPPVGRATPPPGIMAPPPGMRPPMGPPIGLPPARGTPIGMPPPGMRPPPPGIRGPPPPGMRPPRP

SEQ ID NO: 1016601 - protein, 229 aa, Homo sapiens
GFLLQQCLNGTRCSTPPTPAGRFEPEPFATSSFRRSSVATAPRPAATMTTASPSQVRQNYHQDAEAAINRQINLELYASYVYLSMSCYFDRDDVALKNFAKYFLHQSHEEREHAEKLMKLQNQRGGRIFLQDIKKPDRDDWESGLNAMECALHLEKSVNQSLLELHKLATDKNDPHLCDFIETYYLSEQVKSIKELGDHVTNLRKMGAPEAGMAEYLFDKHTLGHGDES

SEQ ID NO: 1016602 - protein, 161 aa, Homo sapiens
  misc_feature (90)..(91): Xaa can be any naturally occurring amino acid
  misc_feature (95)..(95): Xaa can be any naturally occurring amino acid
  misc_feature (103)..(103): Xaa can be any naturally occurring amino acid
  misc_feature (120)..(120): Xaa can be any naturally occurring amino acid
  misc_feature (126)..(126): Xaa can be any naturally occurring amino acid
  misc_feature (132)..(132): Xaa can be any naturally occurring amino acid
  misc_feature (160)..(160): Xaa can be any naturally occurring amino acid
MLGVFGEEPKAHGASCARKWLGHRCIMAHRATARGRAAGSGLGPGLSSSCVRRSARLGPGLSVSPRADQSTRSNEGPRRKAGAARFSSAXXVSGXEVTSSPQXPWAGGYISGRAGAEARXARAYCXWASNNXGVRVGTWARAYGRRRELAHAKCFDRSPXP

SEQ ID NO: 1016603 - protein, 89 aa, Homo sapiens
VIAGLTRCAVHHMSYAAESGTLEYRTLEMSPSQFLKGLASRSPLVLCGDLHVAPEDVTFATPRGTNKDAGFTPHRRPGFGELLQAVPPG

SEQ ID NO: 1016604 - protein, 101 aa, Homo sapiens
  misc_feature (4)..(4): Xaa can be any naturally occurring amino acid
NSAXGRKELLSVYPSIHLLVGPHSVDRGICEGQDLDEHLVGGPLFHGVKQPWGCSWGLAGPPQTKLGGFCSFRTIRRMHTTPRLTPTSTNTHGHQRMYVLR

SEQ ID NO: 1016605 - protein, 343 aa, Homo sapiens
AVREHFGSERLGDRRVVRGCGGASLKEGARGWQLRLKHIDRRQQPGVMSDRAEQNYGERESRSASRSGSAHGSGKSARHTPARSRSKEDSRRSRSKSRSRSESRSRSRRSSRSIIPGHGLAPASHRRSRSRSYSRDYRRRHSHSHSPMSTRRRHVGNRANPDPNCCLGVFGLSFVHTDRDLEKCSLIWSHCRCVYVYDQQSRRSRGFALYLSTTVDDAKGSYSTCHGKDADGRRTAQSTTPKTNRHTRHHWGDHHETMPTETRPRKRPGNRPRQKSTPPEPTPAGRRDPNDKVETGHTTHGATKHTRQTQTTSTDPTRTREISQRRRVTHQDDTGCQLFPASR

SEQ ID NO: 1016606 - protein, 299 aa, Homo sapiens
AVREHFGSERLGDRRVVRGCGGASLKEGARGWQLRLKHIDRRQQPGVMSAQSRAELRRAGLDPEEAPEGIIPGHGLAPASHRRSRSRSYSRDYRRRHSHSHSPMSTRRRHVGNRANPDPNCCLGVFGLSFVHHRRDLEKCSLIWSHCRCVYVYDQQSRRSRGFALYLSTTVDDAKGSYSTCHGKDADGRRTAQSTTPKTNRHTRHHWGDHHETMPTETRPRKRPGNRPRQKSTPPEPTPAGRRDPNDKVETGHTTHGATKHTRQTQTTSTDPTRTREISQRRRVTHQDDTGCQLFPASR

SEQ ID NO: 1016607 - protein, 86 aa, Homo sapiens
  misc_feature (40)..(40): Xaa can be any naturally occurring amino acid
NSPSSCAGLFIASHIGFDWPGVWVHLDIAAPVHAGERAQXWGGSPTGSFWPCSEDPLLNLVSPLDCEVDAQEGDNMGRDSKRRRLV

SEQ ID NO: 1016608 - protein, 156 aa, Homo sapiens
EQGYSARGMAHMSQLTACEEWAFSWTVLAHKQVTSSMKRPVSTLPSLTADSAMPLPRSAFEDCDLHQEVLLTPVGKISPSFCLECPVFDLAAGVEPSPRPPGTLPLWLSRNRMWLPWPNVVLLSPTPAPQLLSSSGPCVWLVFAGLSLCSGIALPL

SEQ ID NO: 1016609 - protein, 167 aa, Homo sapiens
  misc_feature (24)..(25): Xaa can be any naturally occurring amino acid
  misc_feature (39)..(40): Xaa can be any naturally occurring amino acid
CAVLSCGAFRPSASRLALSGPSGXXAARLPGKHGDESGXXEPVVLSGQITGLTEGQHGFHVHQYGDNTQGCTSAGPHFNPHSKKHGGPADEERHVGDLGNVTAGKDGVANVSIEDRVISLSGEHSIIGRTMVVHEKQDDLGKGGNEESTKTGNAGSRLACGVIGIAQ

SEQ ID NO: 1016610 - protein, 122 aa, Homo sapiens
GSGSAAETLPEIRVTPLGAGQDVGRSCILVSICGKCMLEVDEWAANDDRRFPDFSYSHPEPAAKQTFLDCVIISPLPPGPLRGTYPYFMRDGGLTTKTQCYTDLTTIDMDILVDNSVCTNYR

SEQ ID NO: 1016611 - protein, 167 aa, Homo sapiens
  misc_feature (142)..(142): Xaa can be any naturally occurring amino acid
DSHHISTRQYARIVKRWVAEIGLDPSAYGTHSMRRTKPTLIYRRTKNFRAVQLLLGHTKLESTVRYLGIEVEDALALADKQTSNAKIDRSSLRWPGLADFRHHMPLATRHYTSEGKACFNRNATKISAEIVLENHSSESNAXLPAPKKSKGPVWTIKILLFLMRPGS

SEQ ID NO: 1016612 - protein, 140 aa, Homo sapiens
ADLRPELFVLGAGGAVQALKNERLGRGLVSGDCDLQGPPWSPEQMLEGQTAGGENPHSEYGLTDNVERIVENMRRLMHEKSSKQKVDLQSLPTRAYLDQTVVPILLQGLGCACKGKDHQIPCEFLASYLLKNKAQFEDRN

SEQ ID NO: 1016613 - protein, 146 aa, Homo sapiens
LLLPCSFAVLLLGTSPREVKTPEQEPSTPMFIVALFRIAQKENSLNALQLVNGLINHGTFIQPSPTKQYKRMNARDIHLHGRDSSDGILQLKWNSFQESFHIAVIDSVFNNRKTDGMIARVREGAPLRERDFEERLGSGGVMAVAT

SEQ ID NO: 1016614 - protein, 123 aa, Homo sapiens
MRVNGLELSGPSLKRQLSETFPKHLLFSMAIHYCKRSWAKGPIEELRDSSWLKHYPSDFLIQNPLARELIGQIPGGQLGYPRSIPLDSSKFFLSPRGIPQGLRRDNSPGDLLLTPIITDTCTR

SEQ ID NO: 1016615 - protein, 70 aa, Homo sapiens
LLKRLGGSAVEPLWLLSAEWKRVLLFVSLAMALQLSREQGITLRGSAGNRGRVLLIRHQQHFISAWHISI

SEQ ID NO: 1016616 - protein, 110 aa, Homo sapiens
  misc_feature (32)..(32): Xaa can be any naturally occurring amino acid
RALLCPLWAPNWPALPVILPRGMQGAKSNPLXAGGAPEIVAEFFSFGINSILYQRGIYPSETFTRRLPRNTLTWGTFKPLWPFGKTLTWESLEDLPIKKLTLKINVRVGK

SEQ ID NO: 1016617 - protein, 58 aa, Homo sapiens
GKGGCGQTGAALWPGRHHAALLCALTGLALLRAGLFGRCRTLQPSARELSSEHSVVTD

SEQ ID NO: 1016618 - protein, 103 aa, Homo sapiens
  misc_feature (1)..(1): Xaa can be any naturally occurring amino acid
  misc_feature (4)..(4): Xaa can be any naturally occurring amino acid
  misc_feature (16)..(16): Xaa can be any naturally occurring amino acid
  misc_feature (53)..(53): Xaa can be any naturally occurring amino acid
  misc_feature (55)..(55): Xaa can be any naturally occurring amino acid
XPYXQLEITLLRNKTXAPPVRPLYTSGSPGCRNRHEVVRLRIFGRTLLLLLTXFXSPRNKRSEPARSTMLLRIPENTRGAEVELPNRITLTSRNVNLGKGVSA

SEQ ID NO: 1016619 - protein, 73 aa, Homo sapiens
RFAVFSPFFVLHRSGQGLRTPESKAWVRLVPQVPGPRQPYPVAQWVSSEDFTGAPSPHLDEGNLGIQTKVEVT

SEQ ID NO: 1016620 - protein, 86 aa, Homo sapiens
QVINKFGDQVTLAVLQNRHQPKGILLKEPLGLILQVDIDDFVPDSLGLQDHQRPLSEGAEPHAVDADSGSGTGPGGALPFPRLLED

SEQ ID NO: 1016621 - protein, 107 aa, Homo sapiens
LVISSTQARPAAEKSRWQIEIEDYFPEFARYTLCRDATPEPGEDPRVTRPSTFIRDEFLRISTASGDGRHYCYPHFTCAVDTENIRRVFNDCRDIIQRMHLRQYELL

SEQ ID NO: 1016622 - protein, 183 aa, Homo sapiens
GQSSALLSTSLIQNSVGIGLKVQKRCCLPQKSLESIFSRKVRVLLCFRSQTLPQTCNEPQASNMAIVAVKMVSGFIPLKPTVKMLERSNHVSRTEVSSNHVLIYLDKVSNQTLSLFFTVSARCPSKRSETSHSESYDSYQPDEFAIAEVNAPCSKDLENLKDPKAEKSFAGVLSQSSPEDTCF

SEQ ID NO: 1016623 - protein, 107 aa, Homo sapiens
VPMSCKVSLSPSGGPEFEGQQEPPFLSPALIGPPGTTRSKREDQGPCRPSNPHCHCSWPQVLPLPRVPTSTAHLIFCSHFTELYKERTQHGRVGSLVLFVCLFVCLI

SEQ ID NO: 1016624 - protein, 134 aa, Homo sapiens
MDTSHTTKSCLLILLVALLCAERAQGLECYQCYGVPFETSCPSITCPYPDGVCVTQEAAVIVDSQTRKVKNNLCLPICPPNIESMEILGTKVNVKTSCCQEDLCNVAVPNGGSTWTMAGVLLFSLSSVLLQTLL

SEQ ID NO: 1016625 - protein, 232 aa, Homo sapiens
  misc_feature (53)..(53): Xaa can be any naturally occurring amino acid
  misc_feature (57)..(57): Xaa can be any naturally occurring amino acid
MREGGPPRPFRMKAAVLTLAVLFLTGSQARHFWQQDEPPQSPWDRVKDLAFFXFFFXKDSGGDYVSQFEGSALGEQLNLKLFDTWDSVTFTFSKLLRTARPCDPRSSGITLKKETEGLRQEMSKDLEEVEGQVAALPWTTSRRSGRRRWSSTARRWKPARRAPRGARQKLHELQEKLTHWARRIATRAPMWTVARIWPPTATSWPSLAARLEALKENAAPDWPSTTQGHRAF

SEQ ID NO: 1016626 - protein, 156 aa, Homo sapiens
  misc_feature (66)..(66): Xaa can be any naturally occurring amino acid
MREGGPPRPFRMKAAVLTLAVLFLTGSQARHFWQQDEPPQSPWDRVKEAARAAREADPLGEEMRDXRCPNVDASHASGPLQRRAGPAWPRALRLSRRTRRQTGRVPPKATEHSEHAQREGQARARGPPQSLLPVLESFKVSFLSALEEYTKKLNTQ

SEQ ID NO: 1016627 - protein, 118 aa, Homo sapiens
MELYRQKVEACAQSSKRRAPEAARAAREADPLGEESHASGPLQRRAGPAWPRALRLSRRTRRQTGRVPPKATEHSEHAQREGQARARGPPQSLLPVLESFKVSFLSALEEYTKKLNTQ

SEQ ID NO: 1016628 - protein, 157 aa, Homo sapiens
MSKDLEEVEGQVAALPWTTSRRSGRRRWSSTARRWKPARRAPRGARQKLHELQEKLTHWARRCATAQQQPNVERSHASGPLQRRAGPAWPRALRLSRRTRRQTGRVPPKATEHSEHAQREGQARARGPPQSLLPVLESFKVSFLSALEEYTKKLNTQ

SEQ ID NO: 1016629 - protein, 111 aa, Homo sapiens
MSKDLEEVEGQVAALPWTTSRRSGRRRWSSTARRWKPARRAPRGARQKLHELQEKLTHWARRIATRAPMWTVARIWPPTATSWPSLAARLEALKENAAPDWPSTTQGHRAF

SEQ ID NO: 1016630 - protein, 264 aa, Homo sapiens
  misc_feature (54)..(54): Xaa can be any naturally occurring amino acid
  misc_feature (58)..(58): Xaa can be any naturally occurring amino acid
EMREGGPPRPFRMKAAVLTLAVLFLTGSQARHFWQQDEPPQSPWDRVKDLAFFXFFFXKDSGGDYVSQFEGSALGEQLNLKLFDTWDSVTFTFSNCANSSALLPQKFWDNPEKGDEGQVAALPWTTSRRSGRRRWSSTARRWKPARRAPRGARQKLHELQEKLTHWARRYSERARAHVDTLSHASGPLQRRAGPAWPRALRLSRRTRRQTGRVPPKATEHSEHAQREGQARARGPPQSLLPVLESFKVSFLSALEEYTKKLNTQ

SEQ ID NO: 1016631 - protein, 70 aa, Homo sapiens
PPEREGAKFPIKWTAPEAINFGCFTIKSDVWSFGILLYEIVTYGKIPYPGRTNADVMTALSQGYRMPFLV

SEQ ID NO: 1016632 - protein, 278 aa, Homo sapiens
AEVARSADGWAAAGRPRGSGGRRHSGPRRSPSPLLLAPAASPADGDGRHPRRLGRDRVGREDEDGWETRGDRKPGSPWWRRSGARGINESLQEAGAAAGRAPRVQAKLENAEVLDADGAAVSQGVAAGPGRARREQAAWRKRGERFAAGYIQLLHKVHTFVSTSQGPFDATVRCRAPEPSARGPLPAGGERQQASQRSCWGDALGGGPPRATSSPNIAWVRPPSGHYTVGILQGALPAKHVAAEPRDPLGRRRKNASVDQSGARKPSEARGIWDLTQK

SEQ ID NO: 1016633 - protein, 160 aa, Homo sapiens
  misc_feature (109)..(109): Xaa can be any naturally occurring amino acid
  misc_feature (112)..(112): Xaa can be any naturally occurring amino acid
  misc_feature (118)..(118): Xaa can be any naturally occurring amino acid
  misc_feature (123)..(124): Xaa can be any naturally occurring amino acid
  misc_feature (131)..(131): Xaa can be any naturally occurring amino acid
  misc_feature (133)..(133): Xaa can be any naturally occurring amino acid
  misc_feature (135)..(135): Xaa can be any naturally occurring amino acid
  misc_feature (141)..(141): Xaa can be any naturally occurring amino acid
  misc_feature (144)..(144): Xaa can be any naturally occurring amino acid
  misc_feature (157)..(157): Xaa can be any naturally occurring amino acid
  misc_feature (159)..(159): Xaa can be any naturally occurring amino acid
ARRLRPFGVQRFLYTGRQQGPEEAAEFQAEFVSTPELAAQSDFIVVACSLTPAPEGLYNKAFFQRMRDTAVFINISRGDVVNQGALYQAWASGKIAAAGLDVTSPAPLXTNXPLLSLXSCVIXXHIGSATXRXRXTMCLLXAKXLLAGLRGERMPSXLXL

SEQ ID NO: 1016634 - protein, 108 aa, Homo sapiens
MRCPCVFRYLVLLLVLRASDGMASAVVRGTECLLTVHERCSSNVGYVELHKMVERFLGLSSLNLSSYNQISLVLPQKHREKPPSGSKWCFEEESHSQAGPGGFHNSGS

SEQ ID NO: 1016635 - protein, 108 aa, Homo sapiens; identical to SEQ ID NO: 1016634

SEQ ID NO: 1016636 - protein, 108 aa, Homo sapiens; identical to SEQ ID NO: 1016634

SEQ ID NO: 1016637 - protein, 108 aa, Homo sapiens; identical to SEQ ID NO: 1016634

SEQ ID NO: 1016638 - protein, 126 aa, Homo sapiens
  misc_feature (25)..(25): Xaa can be any naturally occurring amino acid
MFYNFYENSKSQLKYFNIVSCRIRXVCDWAAMDSGFGSDFGGTGGGKLDPGAIMEQVKVQIAVANAQELLQRMTDKCFRKCIGKPGGSLDNSEQKCIAMCMDRYMDAWNTVSRAYNSRLQRERANM

SEQ ID NO: 1016639 - protein, 185 aa, Homo sapiens
GLRPGSPMAAEDNPGRGATGGTESLPYDQGHVAGVISKDPRGTRRAAKKYNMRVEDYEPYPDDGMGYGDYPMLPNRSQHERDPWYQWDHSELRIELGVNRYTGNLDMYIRESVWTRHLPPVVLGDVMCKHLFGFGGPFMVFMFWVGHVFPSYQPVGPKQYPYNNLYLERGGDPTKEPEPVVHYDI

SEQ ID NO: 1016640 - protein, 95 aa, Homo sapiens
FVRPEALAELMIDEALFQAVRTQWPMEDALAELMIDEALLQAARMQWPMEDALAEFMIDEALFQAVSTQWPMKDALAELIIDQALFQAARTQWPM

SEQ ID NO: 1016641 - protein, 101 aa, Homo sapiens
  misc_feature (100)..(100): Xaa can be any naturally occurring amino acid
PSSMTPRVIHRTQHPRSARACSFLHDTQGHSQNTASQQCSRLLLPRHPGSFTQHGFPGALAPAPSSLTPRVIHRTRIPRRARACSFLHDTQGHSQNTAGXH

SEQ ID NO: 1016642 - protein, 140 aa, Homo sapiens
  misc_feature (38)..(38): Xaa can be any naturally occurring amino acid
LLGNLEPEEAKLIRVPLQRIHLGHRILNPLNGWEQLAXLSRTSTSGANPSFVPLSKFMNTQYFGTIGLGTPPQNFTVVFDTGSSNLWVPSTRCHFFSLACWFHHRFNPKASSSFRPNGTKFAIQYGTGRLSGNPEPGQSD

SEQ ID NO: 1016643 - protein, 165 aa, Homo sapiens
EADAQRCREKVTSRPSLSARNADTAALPPCCCRSLGRRDGSCRRPRPAGTYHRLMDKVELLLPKKLRPLYNHPAGPRTVFFWAPIMKWGLVCAGLADMARPAEKLSTAQSTVLMATGFIWSRYSLVIIPKNWSLFAVNFFVGSAGASQLFRIWRYNQELKSKGIQ

SEQ ID NO: 1016644 - protein, 205 aa, Homo sapiens
APRPCPGQCAGQGSVAGAGMRQSAALPRSPCSVPSQVPTSLGFFSRATAGVLPGDPSLWGSAERPGLVPPAWHVGCLERSGYYSLRVVLRGVFSVKRRIRTTASEEERSPSSSLELRGRYVLFGSNRLPPVKSAIRGQAPVVPYMRYGHSTVLIDDTVLLWGGRNDTEGACNVLYAFDVNTHKWVHTPECQGQFLGPGMDIQPVS

SEQ ID NO: 1016645 - protein, 139 aa, Homo sapiens
MLRWTVHLEGGPRRVNHAASGCRASGILLRGLLLWLKTTETAAVRVDVHIFNAVVLAYGQRLPPVKSAIRGQAPVVPYMRYGHSTVLIDDTVLLWGGRNDTEGACNVLYAFDVNTHKWVHTPECQGQFLGPGMDIQPVS

SEQ ID NO: 1016646 - protein, 96 aa, Homo sapiens
  misc_feature (81)..(81): Xaa can be any naturally occurring amino acid
ANHSQSQEEMNALVLPGGEAGPAEIRYDHSQEILMEKGTQRGRGHILGEEDCGYSGMGVWGGVAHQRRDLSVGVTVLMWKXRGGGVFEGRMQIREA

SEQ ID NO: 1016647 - protein, 110 aa, Homo sapiens
DPRVRSRVAALLFVFWSDILTGCGVCCYSPSFAMPPKDDKKKKDAGKSAKKDKDPVNKSGGKAKKKKWSKGKVRDKLNNLVLFDKATYDKLCKEVPNYKLITPAVVSERD

SEQ ID NO: 1016648 - protein, 97 aa, Homo sapiens
YFKPAGSGAMTYHPWPGWLLPITNDKASKLDAGKSAKKDKDPVNKSGGKAKKKKWSKGKVRDKLNNLVLFDKATYDKLCKEVPNYKLITPAVVSERD

SEQ ID NO: 1016649 - protein, 107 aa, Homo sapiens
PEIRPFMAGASFSVIFDEAVEIAGDLLAFECRLIDDKYKKDAGKSAKKDKDPVNKSGGKAKKKKWSKGKVRDKLNNLVLFDKATYDKLCKEVPNYKLITPAVVSERD

SEQ ID NO: 1016650 - protein, 103 aa, Homo sapiens
MPPKDDKKKKDAGKSAKKDKDPVNKSGGKAKKKKWSKGKVRDKLNNLVLFDKATYDKLCKEVPNYNLYPAVSLRDLRFEAPGQAAFRAPSKAYQLFKPSSVFT

SEQ ID NO: 1016651 - protein, 142 aa, Homo sapiens
TCLWLQSINVTARIPTAQAFKITPCHFQGTALKVSFGLGSATNYVTLDKSPHSQAHFPKLQNEVRGGGPLVLSRVLQFLCPWSPLVSLCKSDLGQHGVFAQSGSHSLLRQCLSLMPFGSWGSYVDSDLRAIRPVSSYPIEVS

SEQ ID NO: 1016652 - protein, 141 aa, Homo sapiens
  misc_feature (133)..(133): Xaa can be any naturally occurring amino acid
SKKGGLGLPGSRFPKGQDPWPTNGGEPSLFHGAHQAAEDLGRDEAGAPKGEVAEVEVPQVQVRLGSGDGPRGHVGAAGAQGLEEGGEQGTPHHVGHGVHVGPPRGGLQGLWEVSGAPGKADVRPQSPQGLVLXRARKGINR

SEQ ID NO: 1016653 - protein, 227 aa, Homo sapiens
FSLRWMRLVEQGLLEKPVFSFYLNRDSEGSDGGELVLGGSDPASLRTSPHPSYQSPSLPTGGPNMEECEGRHRAELLCQGCSAILDTGTSLITGPSEEIRALNKAIGGYPFLNGQYFIQCSKTPTLPPVSFHLGGVWFNLTGQDYVIKILQSDVGLCLLGFQALDIPKPAGPLWILGDVFLGPYVAVFDRGDKNVGPRVGLARAQSRSTDRAERRTTQAQFFKRRPG

SEQ ID NO: 1016654 - protein, 93 aa, Homo sapiens
FLETESCCVAQAGLEPLASSDPPTSASPGVGITGVRHCTWSFLGFLKQALQEILVCTKVGEGFVCLNPERGGGQGRLESVQASGKRVLSLSFS

SEQ ID NO: 1016655 - protein, 147 aa, Homo sapiens
AATMVRMNVLADLSRASTTLRREANARSSSGHVLKSSVRFLTVMMKHGYIGEFEIIDDHRAGKIVVNLTGRLNKCGVISPRFDVQLKDLEKWQNNLLPSRQFGFIVLTTSAGIMDHEEARPKTYRRENPWDSFFKRKAEIKSLSCRI

SEQ ID NO: 1016656 - protein, 286 aa, Homo sapiens
MADTIFGSGNDQWVCPNDRQLALRAKLQTGWSVHTYQTEKQRRKQHLSPAEVEAILQVIQRAERLDVLEQQRIGRLVERLETMRQNVMGNGLSQCLLCGEVLGFLGSSSVFCKDCRKVWKRSGAWFYKGLPKYILPLKTPGRADDPHFRPLPTEPAEREPRSSETSRIYTWARGRVVSSDSDSDSDLSSSSLEDRLPSTGVRDRKGDKPWKESGGSVEAPRMGFTHPPGHLSGCQSSLASGETGTGSADPPGGPRPGLTRRAPVKDTPGRAPAADAAPAGPSSCLG

SEQ ID NO: 1016657 - protein, 315 aa, Homo sapiens
MADTIFGSGNDQWVCPNDRQLALRAKLQTGWSVHTYQTEKQRRKQHLSPAEVEAILQVIQRAERLDVLEQQRIGRLVERLETMRRNVMGNGLSQCLLCGEVLGFLGSSSVFCKDCRKKVCTKCGIEASPGQKRPLWLCKICSEQREVWKRSGAWFYKGLPKYILPLKTPGRADDPHFRPLPTEPAEREPRSSETSRIYTWARGRVVSSDSDSDSDLSSSSLEDRLPSTGVRDRKGDKPWKESGGSVEAPRMGFTHPPGHLSGCQSSLASGETGTGSADPPGGPRPGLTRRAPVKDTPGRAPAADAAPAGPSSCLG

SEQ ID NO: 1016658 - protein, 210 aa, Homo sapiens
MADTIFGSGNDQWVCPNDRQLALRAKLQTGWSVHTYQTEKQRRKQHLSPAEVEAILQVIQRAERLDVLEQQRIGRLVERLETMRRNVMGNGLSQCLLCGEVLGFLGSSSVFCKDCRKKVCTKCGIEASPGQKRPLWLCKICSEQREVWKRSGAWFYKGLPKYILPLKTPGRADDPHFRPLPTEPAEREPRSSETSRIYTWARGRVVGRKC

SEQ ID NO: 1016659 - protein, 210 aa, Homo sapiens; identical to SEQ ID NO: 1016658

SEQ ID NO: 1016660 - protein, 210 aa, Homo sapiens; identical to SEQ ID NO: 1016658

SEQ ID NO: 1016661 - protein, 95 aa, Homo sapiens
GNWTEITPSWFEIHGAQTLFPTGGSVEAPRMGFTHPPGHLSGCQSSLASGETGTGSADPPGGPRPGLTRRAPVKDTPGRAPAADAAPAGPSSCLG

SEQ ID NO: 1016662 - protein, 210 aa, Homo sapiens; identical to SEQ ID NO: 1016658

SEQ ID NO: 1016663 - protein, 315 aa, Homo sapiens; identical to SEQ ID NO: 1016657

SEQ ID NO: 1016664 - protein, 232 aa, Homo sapiens
MADTIFGSGNDQWVCPNDRQLALRAKHCCTAVNRTNTVPGLKAQVEQRLQTGWSVHTYQTEKQRRKQHLSPAEVEAILQVIQRAERLDVLEQQRIGRLVERLETMRRNVMGNGLSQCLLCGEVLGFLGSSSVFCKDCRKKVCTKCGIEASPGQKRPLWLCKICSEQREVWKRSGAWFYKGLPKYILPLKTPGRADDPHFRPLPTEPAEREPRSSETSRIYTWARGRVVGRKC

SEQ ID NO: 1016665 - protein, 286 aa, Homo sapiens
MADTIFGSGNDQWVCPNDRQLALRAKLQTGWSVHTYQTEKQRRKQHLSPAEVEAILQVIQRAERLDVLEQQRIGRLVERLETMRRNVMGNGLSQCLLCGEVLGFLGSSSVFCKDCRKVWKRSGAWFYKGLPKYILPLKTPGRADDPHFRPLPTEPAEREPRSSETSRIYTWARGRVVSSDSDSDSDLSSSSLEDRLPSTGVRDRKGDKPWKESGGSVEAPRMGFTHPPGHLSGCQSSLASGETGTGSADPPGGPRPGLTRRAPVKDTPGRAPAADAAPAGPSSCLG

SEQ ID NO: 1016666 - protein, 161 aa, Homo sapiens
MADTIFGSGNDQWVCPNDRQLALRAKLQTGWSVHTYQTEKQRRKQHLSPAEVEAILQVIQRAERLDVLEQQRIGRLVERLETMRRNVMGNGLSQCLLCGEVLGFLGSSSVFCKDCRKKVCTKCGIEASPGQKRPLWLCKICSEQRELFYFTIYRVEPSVFL

SEQ ID NO: 1016667 - protein, 133 aa, Homo sapiens
MVHLTPEKKSAVLPLWGKVNVHEVGGEALGRLLVVYPWTQRFFESFGDLSTPDAVMGNPKVKAHGKKVLGAFSDGLAHLDNLKGTFATLSELHCDKLHVDPENFRLLGNVLVCVLPHHLAKEFTPSERAVKDL

SEQ ID NO: 1016668 - protein, 118 aa, Homo sapiens
SNRVEWNGMEWNHTEWNGVEWNGMEWNGMEWNGMESNPESQLNGIERNGMEWNGFNPNGVERNGINPSGMAWNGMECNGMEWNGMVGNRMEWNEMEWNGMEWNGMEWNGMEWNGIIPS

SEQ ID NO: 1016669 - protein, 111 aa, Homo sapiens
SNRVEWNGMEWNHTEWNGVEWNGMEWNGMEWNGMESNPESQLNGIERNGMEWNGFNPNGVERNGINPSGMAWNGMECNGMEWNGMVGNRMEWNEMEWNGMELNGMESFRVE

SEQ ID NO: 1016670 - protein, 97 aa, Homo sapiens
MNDLQKRLGPRGLVVLGFPCNQFGHQENGKNEEILNSLKYVRPGGGFEPNFTLFEKCEVNGEKAHPLFTFLRNALPTPSDDPTCAHDRPQVHHFGLR

SEQ ID NO: 1016671 - protein, 38 aa, Homo sapiens
MGEKAHPLFTFLRNALPTPSDDPTALMTDPKYIILVSG

SEQ ID NO: 1016672 - protein, 127 aa, Homo sapiens
MNELQRRLGPRGLVVLGFPCNQFGHQENAKNEEILNSLKYVRPGGGFEPNFMLFEKCEVNGAGAHPLFAFLREALPAPSDDATALMTDPKLITWSPVCRNDVAGTLRSSWWALTVCPYAGTAALPDH

SEQ ID NO: 1016673 - protein, 127 aa, Homo sapiens; identical to SEQ ID NO: 1016672

SEQ ID NO: 1016674 - protein, 226 aa, Homo sapiens
  misc_feature (101)..(101): Xaa can be any naturally occurring amino acid
MNELQRRLGPRGLVVLGFPCNQFGHQENAKNEEILNSLKYVRPGGGFEPNFMLFEKCEVNGAGAHPLFAFLREALPAPSDDATALMTDPKLITWSPVCRKXPGKIKFFLGPPAMLAGTFEKFLVGPDGVPLRRYSRASRPLTSSLTLKTCCLKGQLCYGAPSTPVVWQLQCCCLGGVFIYEGVSSKPTREEQLILQKIHLEMGAGPVDPSLCQTKASFPPNKVPGV

SEQ ID NO: 1016675 - protein, 326 aa, Homo sapiens
QCLFGALRWLLGQLRHVCCSASGGGGPVGVCLLGAPAGRRGACEPGLPAGQGTTYRECGVPLRHHGPGLHPDERAAAAPRTPGPGGARLPVQPVWASVLRRADSGRGGGRTVREMAGGLPAGVHSVGAVRLHSGGAVWADYSSFSFRSSCGSIASKFRLRRLGIAAWQGTNPVVTHRKISPGLVVKKLSHPYLFDPVFRKHGLLSCRRENAKNEEILNSLKYVRPGGGFEPNFMLFEKCEVNGAGAHPLFAFLREALPAPSDDATALMTDPKLITWSPVCRNDVGWNFEKFLVGPDGVPLRRYSRASRPLTSSLTLKTCCLKGQLC

SEQ ID NO: 1016676 - protein, 370 aa, Homo sapiens
RTTDDVMSCGPVGNFRHRTMATETVELHKLKLAELKQECLARGLETKGIKQDLIHRLQAYLEEHAEEEANEEDVLGDETEEEETKPIELPVKEEEPPEKTVDVAAEKKVVKITSEIPQTERMQKRAERFNVPVSLESKKAARAARVWDFFSSNKRSVILITNPMVNLDKLKERAQRFGFELSLPISRKSEDDEKLEKEERSDLGLSQVQLELEPQRIQRAKKQANEQSALGLLDDQSLILLFSSDPMSLLLLVTYMRKCTVMCYVWLRKEGTLTPGTSMKRRNKTTMEVKIKEEEQRTEKRYKVTKNRQQQRAGHYRKTQGDQDQITNLTTGSQRETKDNSTPKTTIERRRGNNPGTEQTKNKRIQKSAT

SEQ ID NO: 1016677 - protein, 366 aa, Homo sapiens
MARRRRGLIGRGGYKMATETVELHKLKLAELKQECLARGLETKGIKQDLIHRLQAYLEEHAEEEANEEDVLGDETEEEETKPIELPVKEEEPPEKTVDVAAEKKVVKITSEIPQTERMQKRAERFNVPVSLESKKAARAARVWDFFSSNKRSVILITNPMVNLDKLKERAQRFGFELSLPISRKSEDDEKLTKEERSDLGLSQVQLELEPQRIQRAKKQANEQSALGLLDDQSLILLFSSDPMSLLLLVTYMRKCTVMCYVWLRKEGTLTPGTSMKRRNKTTMEVKIKEEEQRTEKRYKVTKNRQQQRAGHYRKTQGDQDQITNLTTGSQRETKDNSTPKTTIERRRGNNPGTEQTKNKRIQKSAT

SEQ ID NO: 1016678 - protein, 42 aa, Homo sapiens
MGFWQWPTSQVLVFPHKYPLLTLWHGFYLVLKLDPNKELIIA

SEQ ID NO: 1016679 - protein, 116 aa, Homo sapiens
  misc_feature (2)..(2): Xaa can be any naturally occurring amino acid
  misc_feature (9)..(9): Xaa can be any naturally occurring amino acid
  misc_feature (13)..(13): Xaa can be any naturally occurring amino acid
RXGHTGKIXEACXPQDIPVKQQPLLEATELTASGNFCLFRSETQGTFCSEMTQYVWPKLHDRNTYEKYLGEEYVKAVGNLRKSPPHHLLKPALPGDLKISEVGLAPQGEDGNPDDP

SEQ ID NO: 1016680 - protein, 221 aa, Homo sapiens
SARWEDGGGGGDNRGLPLPVLRRNQDNEDEWPLARILSVKDISGRKLFYVHYIDFNKALDEWVTHERLELKKIQFPKKEAKTPTKNGLSWVPSWLSRERGETEGGGGFTERYSSAHAETSPGVRFCPQNVEPPVGQWQRPAGTDAKSRIVWALMRTPRTGSDGIPSVPRMTGSLVSDRKPRRRRHPDEEQLSAIERGAAPTQAVVHSPQYPRGTHHIACAL

SEQ ID NO: 1016681 - protein, 109 aa, Homo sapiens
  misc_feature (49)..(49): Xaa can be any naturally occurring amino acid
  misc_feature (61)..(61): Xaa can be any naturally occurring amino acid
  misc_feature (72)..(72): Xaa can be any naturally occurring amino acid
  misc_feature (75)..(75): Xaa can be any naturally occurring amino acid
  misc_feature (92)..(92): Xaa can be any naturally occurring amino acid
  misc_feature (104)..(104): Xaa can be any naturally occurring amino acid
MLIKVKTLNGKEIEIDIEPTDKVERIKERVEEEGIPPQQQGFIYSGKQXNDEKTAADYQIXVVQSSLVLALXEEXSWHDGPPFDSYLSLMSXYISHLWDTIAMXPSLDA

SEQ ID NO: 1016682 - protein, 194 aa, Homo sapiens
EDSVDSDESDESHHSDESDETVTASTQADTFTPIVPTVDVPNGRGDSLAYGLRSKSRSFQVSDEQYPDATDEDLTSHMKSGESKESLDVIPVAQLLSMPSDQDNNGKGSHESSQLDEPSLETHRLEHSKESQESADQSDVIDSQASSKASLEHQSHKFHSHKDKLVLDPKSKEDDRYLKFRISHELESSSSEVN

SEQ ID NO: 1016683 - protein, 82 aa, Homo sapiens
PSRLYSLLFRRTSTFALTIAVGALFFERAFDQGADAIYEHINEGKLWKHIKHKYENKENTLPLWDPKEQSPVSCLPGVGASA

SEQ ID NO: 1016684 - protein, 98 aa, Homo sapiens
  misc_feature (82)..(82): Xaa can be any naturally occurring amino acid
EVNVEKAHPSSLPFCGMPCQHPVTTPTALMTDPKYIIWSPVCRNDIAWNFEKFLVGPDGVPVRRYSRRFRTIDIEPDNRNPXVLSSLATPKAALALAW

SEQ ID NO: 1016685 - protein, 231 aa, Homo sapiens
ADQAQIMAGSRLETVGGIFSRTRDLVRAGVLKEKPLWFDVYDGFPPLREPVFQSASSANIANAKAPHPMTVWYHEPWIREKLLFMCMGLVKRVYGSIQSKSSSLPVNGFVARTYICVYTNTWATRRLNEAKLLSAGNEGPRLYLRRKGVMFIRRSKAEATDSTSGGSHGFPRKSRTLELSEPTALAVGHRKTEGTSMKQERFRLGNPGHFWEVATLPGTQGPQTGPSMPLP

SEQ ID NO: 1016686 - protein, 121 aa, Homo sapiens
  misc_feature (71)..(71): Xaa can be any naturally occurring amino acid
  misc_feature (75)..(75): Xaa can be any naturally occurring amino acid
  misc_feature (95)..(95): Xaa can be any naturally occurring amino acid
  misc_feature (108)..(108): Xaa can be any naturally occurring amino acid
  misc_feature (114)..(114): Xaa can be any naturally occurring amino acid
VVLYAQRGPERPGRELGRVHRPSLLPEPALRTKPPIPGPGVSRAPTAPGRQRAETHGAPYAPAPPPPPPRXRKRXVERATGGPGAASDPLATCAXPEGEAVKRQTRGXPRRFAXPPPCLPR

SEQ ID NO: 1016687 - protein, 211 aa, Homo sapiens
DHASLFPRLVPGADVRGSLLYAESVGTMASLSLAPVNIFKAGADEERAETARLSSFIGAIAIGDLVKSTLGPKGIGQNSPKQWTRRRSDGDQRRCYHSQEHWCGQPRSKGSKLICQGFKDDEVGDGTTSVTCLSPQKLLREAESLIAKKIHPQTIISGWREATKAAREALLSSAVDHGSDEARFWQDLMNIAGTTLSSKSLSPKGPFTKLA

SEQ ID NO: 1016688 - protein, 193 aa, Homo sapiens
MPVWGGGNKCGACGRTVYHAEEVQCDGRSFHRCCFLCMVCRKNLDSTTVAIHDEEIYCKSCYGKKYGPKGYGYGQGAGTLNMDRGERLGIKPESVQPHRPTTNPNTSKFAQKYGGAEKCSRCGDSVYAAEKIIGAGKPWHKNCFRCAKCGKSLESTTLTEKEGEIYCKGCYAKNFGPKGFGYGQGAGALVHAQ

SEQ ID NO: 1016689 - protein, 221 aa, Homo sapiens
ILNEINLPPPGDLGLPGPSLQPSLASSACAVWGGGNKCGACGRTVYHAEEVQCDGRSFHRCCFLCMVCRKNLDSTTVAIHDEEIYCKSCYGKKYGPKGYGYGQGAGTLNMDRGERLGIKPESVQPHRPTTNPNTSKFAQKYGGAEKCSRCGDSVYAAEKIIGAGKPWHKNCFRCAKCGKSLESTTLTEKEGEIYCKGCYAKNFGPKGFGYGQGAGALVHAQ

SEQ ID NO: 1016690 - protein, 87 aa, Homo sapiens
GRLLLLNSRPVNVAIHDEEIYCKSCYGKKYGPKGYGYGQGAGTLNMDRGERLGIKPESVQPHRPTTNPNTSKFAQKYGGACRRGREF

SEQ ID NO: 1016691 - protein, 132 aa, Homo sapiens
ILNEINLPPPGDLGLPGPSLQPSLASSACGTCSRLRLKMPVWGGGNKCGACGRTVYHAEEVQCDGRSFHRCCFLCMVCRKNLDSTTVAIHDEEIYCKSCYGKKYGPKGYGYGQGAGTLNMDRGERLGIKPER

SEQ ID NO: 1016692 - protein, 102 aa, Homo sapiens
MKRSTTNPNTSKFAQKYGGAEKCSRCGDSVYAAEKIIGAGKPWHKNCFRCAKCGKSLESTTLTEKEGEIYCKGCYAKNFGPKGFGYGQGAGALVHAQVRCKA

SEQ ID NO: 1016693 - protein, 375 aa, Homo sapiens
AAANRSRSCCDAASEAAKVEAGLAPEPGRLELVWGLRSRARHGRPGRSGRCLCPGCGRMSKWTSKRGPHVQGPQGEGAKGIGFLTSGWRFVQIKEMVPEFVVPDLTGFKLKPYVSYLAPESEETPLTGTAQLFQRSRGLPAIEEGLSKDGTFDPDNLEKYGFEPTTGGKAFPALPQELPALAGRGRGWPALIVHFYYFKTALLAQAKEREEEGRRKRTRSLAKVKKRIRAETYYKAECGREKEGDIEGRAGGKKRGGDRGGAAEKLEKKRGGGAEQAGAETTNKKRGGRRRDGRDSGARNSARKQGGGGEKQGRNKEHTEKRERRGEEKSSVERATGEGGRTGEEPEAREEAKHEEGTHRPQRRSKWEREAKEDD

SEQ ID NO: 1016694 - protein, 188 aa, Homo sapiens
MRLAVICFCLFGIASSLPVKVTDSGSSEEKLYSLHPDPIATWLVPDPSQKQNLLAPQNAVSSEEKDDFKQETLPSNSNESHDHMDDDDDDDDDDGDHAESEDSVDSDESDESHHSDESDETVTASTQADTFHSNPSLQVDVPTAEVILGLWTEVKSRSFQVSDEQYPDATDEGLTSQMKSGESKESPM

SEQ ID NO: 1016695 - protein, 177 aa, Homo sapiens
MSLLMISENVKLAREYALLGNYDSAMVYYQGVLDQMNKYLYSVKDTYLQQKWQQVWQEINVEAKHVKDIMKTLESFKLDSTPLKAAQHDLPASEGEVWSMPVPVERRPSPGPRKRQSSQYSDPKIHMVNRPKYNCQKFTRSFWPECSHDEGKAVRCREKKDRIRRRKENSRWGKNRK

SEQ ID NO: 1016696 - protein, 113 aa, Homo sapiens
ESCSRKQHPSKPKAPCNERIKASDVNFMFDPKTRVDLACLGCSPRVGLSSTRPKPYWGCLGTSHAVGRVLIVTESCIPCGKQSCSRGTGGARLESNTNSPGAEGTFPGTCAPE

SEQ ID NO: 1016697 - protein, 167 aa, Homo sapiens
  misc_feature (4)..(4): Xaa can be any naturally occurring amino acid
  misc_feature (20)..(20): Xaa can be any naturally occurring amino acid
  misc_feature (27)..(27): Xaa can be any naturally occurring amino acid
  misc_feature (33)..(33): Xaa can be any naturally occurring amino acid
  misc_feature (47)..(47): Xaa can be any naturally occurring amino acid
  misc_feature (49)..(49): Xaa can be any naturally occurring amino acid
  misc_feature (52)..(52): Xaa can be any naturally occurring amino acid
  misc_feature (63)..(63): Xaa can be any naturally occurring amino acid
  misc_feature (78)..(79): Xaa can be any naturally occurring amino acid
  misc_feature (166)..(166): Xaa can be any naturally occurring amino acid
MSFXSSFQIGSTSAPGQGGXLAQREFXRRLSPXFLDWAPFGVMTPPXIXIPXLLWYSSKRKYXTPKTKKNKLGLPQPXXPKKTKPPRKKAMCFPDSKGYLKCNLFSLSPWFHREAINRNAFGNSLEPRGPSDAPLRCCWFIAGNVNSLRGLGGAFWRLPDTTPIPXP

SEQ ID NO: 1016698 - protein, 55 aa, Homo sapiens
TQKYQVKHYIIFSFVLFSKQHCNNTITIKGACCGLSFMTQDTCGSRGSPAGRAGT

SEQ ID NO: 1016699 - protein, 211 aa, Homo sapiens
VHARVCTHVHMPPAPPSNPSVPPGQGPLLAIRVWPDRPFLPSTLQALGQAGPPGCCCVGARVPPGPCRLGIRWGGALLRNQTDAHSGLPKHPEHGAHPKASDACVGQGSPMPAGLPDCARGPAPTLSGWPRLGEQSRVGVAARSVCQRHQVERARHRPTLVQTLTLQKTPMVLKLSPGHAWPSPPRREVALLNLYRFIVPRDSPRPCIISL

SEQ ID NO: 1016700 - protein, 189 aa, Homo sapiens
VHARVCTHVHMPPAPPSNPSVPPGQGPLLAIRVWPDRPFLPSTLQALGQAGPPGCCCVGARVPPGPCRLGIRWGGALLRNQTDLTLGFPSTLSTEPTPRPPTRGWDRAARCQLAYLTVPGALPPPSQDGLDLGNRAGWGLQPGVSSKDKAQAEQDGAEESESSSSTRWRGPGTGPPWSKPSHYRKPQWC

SEQ ID NO: 1016701 - protein, 179 aa, Homo sapiens
TALPPFCGVLSQRPRREDGSLATFLGRRQFAFAEMRHSKRTHCPDWDSRESWGHESYRGSHKRKRRSHSSTQENRHCKPHHQFKESDCHYLEARSLNERDYRDRRYVDEYRNDYCEGYVPRHYHRDIESGYRIHCSKSSVRSRRSSPKRKRNRHCSSHQSRSKSHRRKRSRSIEDDEEG

SEQ ID NO: 1016702 - protein, 95 aa, Homo sapiens
DGAAAILWGVCRSGRGGKTAVWRHFSAEGSLLLRRCGIPKELTVLIGIAEKAGDMKAIVEVTSGRGDLIVAHKRTGIVNHITSLKNLIVLHVHPS

SEQ ID NO: 1016703 - protein, 214 aa, Homo sapiens
DGAAAILWGVCRSGRGGKTAVWRHFSAEGSLLLRRCGIPKELTVLIGIAEKAGDMKAIVEVTSGRGDLIVAHKRTGIVNHITSLKNLIVLLCIPLEASHSVEEDTHPSHYLEARSLNERDYRDRRYVDEYRNDYCEGYVPRHYHRDIESGYRIHCSKSSVRSRRSSPKRKRNRHCSSHQSRSMNIVDTLGEGAFGKVVECIDHGMDGMHVAVKI

SEQ ID NO: 1016704 - protein, 151 aa, Homo sapiens
RRHTFDLAERWTQHVCSNDYSEMRHSKRTHCPDWDSRESWGHESYRGSHKRKRRSHSSTQENRHCKPHHQFKESDCHYLEARSLNERDYRDRRYVDEYRNDYCEGYVPRHYHRDIESGYRIHCSKSSVRSRRSSPKRKRNRHCSSHQSRSI

SEQ ID NO: 1016705 - protein, 132 aa, Homo sapiens
  misc_feature (117)..(117): Xaa can be any naturally occurring amino acid
  misc_feature (130)..(130): Xaa can be any naturally occurring amino acid
DGAAAILWGVCRSGRGGKTAVWRHFSAEGSLLLRRCGIPKELTVLIGIAEKAGDMKAIVEVTSGRGDLIVAHKRTGIVNHITSLKNLIVFHWDCLPDCLSKLASWGYFKKQTCVGYXNECPYPQSVFGYXKG

SEQ ID NO: 1016706 - protein, 84 aa, Homo sapiens
  misc_feature (4)..(4): Xaa can be any naturally occurring amino acid
MVGXFSASSPTEEEQEQGEIGACSDEGTAQEGKAAATPESQEPQAKGAEASAASEEEAGPQATEPSTPSGPESGPTPASAEQNE

SEQ ID NO: 1016707 - protein, 84 aa, Homo sapiens; identical to SEQ ID NO: 1016706
  misc_feature (4)..(4): Xaa can be any naturally occurring amino acid

SEQ ID NO: 1016708 - protein, 107 aa, Homo sapiens
SRRSFLLRALGQAASSPEPTGCLLSQRRPLITVAMPGGLLLGDVAPNFEANTTVGRIRFHDFLGDSWGILFSHPRDFTPVCTTELGRAAKLAPEFAKRNVTVDVPFQ

SEQ ID NO: 1016709 - protein, 169 aa, Homo sapiens
QGPSVMLSTEAFLYVGTMLDGGDLSRFVLLMTNCYATPSSNSTDPVKYFIIQDSCPRTEDTTIQVTENGESSQARFSVQMFRFAGNYDLVYLHCEVYLCDSTSEQCKPTCSGTRFRSGNFIDQTRVLNLGPITRQGVQASVSKAASSNLRLLSIWLLLFPSATLIFMVQ

SEQ ID NO: 1016710 - protein, 77 aa, Homo sapiens
GKMAEVEQKKKRTFRKFTYRGVDLDQLLDMSYEQLMQLYSARQRRRLNRGLRRKQHSLLKRLQRPRRRRRPWRSRKW

SEQ ID NO: 1016711 - protein, 296 aa, Homo sapiens
  misc_feature (190)..(190): Xaa can be any naturally occurring amino acid
  misc_feature (207)..(207): Xaa can be any naturally occurring amino acid
MRSGKASCTLETVWEDKHKYEEAERRFYQHQGTQGAAFGPAAGQPEGPAMNGPGQDNPEDPDEAEAPDGGSRRDPRKSQDSRKPLQKKRKRSPKSGLGPADLALLGLSAERVWLDKSLFDQAESSYRQKLADVAAQAAWASLPWPLGASAPMENQVALPPRDLGGFWVNKSSFRPGLERGLLWMCVSCAXCCCAPDGACLQARVTPXHMAMQVCLSPDLCPPCPSPPGQWPCPLLVHACMALGSGGVAVRSPVYDAAERGFYEALFDGHPPGKVRLQERAGWPRVPGGAAETAGRN

SEQ ID NO: 1016712 - protein, 198 aa, Homo sapiens
  misc_feature (168)..(168): Xaa can be any naturally occurring amino acid
EELAERTETKRPDIGGHQLRGRWISGMVAATLTLTFDVVKTQRQMSLGAVEAVRVKPPRVDSTWLLLRRIRAESGTRGLFAGFLPRIIKAAPSCAIMISTYEFGKSILPEAQPGAASGPLESRGATGSCTGGIRRLKPSAFPPSPVTPGCPQTWIPAVSLPRIAPLPXPEFKTKSDDRPFLYPHVCYSLARGAWARQY

SEQ ID NO: 1016713 - protein, 135 aa, Homo sapiens
MACGLVASNLNLKPGECLRVRGEVAPDAKSFVLNLGKDSNNLCLHFNPRVQRPRDANTIVCNSKDGGAWGTEQREAVLSLPAWKCCRRLCITFDQANLTVKLPDGYEFKFPKRLKLEAINYMAADGDFKIKCVAL

SEQ ID NO: 1016714 - protein, 222 aa, Homo sapiens
PVTVSDAARCSTFISEGVRGNVVQNKLDPLIYPDAYGEKRCMDNPTLYLEEIRPGADSSCDDLDIVSRQLCLRPECGQVTGHSETFGVRLVGPDLQAFLAQPLTSIQSRITKTFTKSWVDEKTPERLVYGSIAGLDELGHECYQDSEFCRRLQQEGERIRRCAGRPCAEQSLYRIGADHVQSLLLKHCAPVLAELAHRLTIRTPIGQKFGSLGPSLCYQVVK

SEQ ID NO: 1016715 - protein, 151 aa, Homo sapiens
LARRGWLWKLPLATRREFWSRSRKEKEPVVAETVEEVKKEPVLVCPPLRSRAYTPPSDLQSRLESHIKEVLGSSLPNNWQDISLDDGHMKFRLLAGLADGLGHAVPNSRLHQMCRVRDVLDFYNVPVQDKSKFDELVASNLPPNLKISWSY

SEQ ID NO: 1016716 - protein, 142 aa, Homo sapiens
  misc_feature (13)..(13): Xaa can be any naturally occurring amino acid
CLRRCTAAASPKXPAPRLGSQPAAAVCSIRCYSHGSHETDEEFDARWVTYFNKPDIDAWELRKGMNTLVGYDLVPEPKIIDAGIAKHVDGEMILLVLFASWRFVKDKAGPHKEIYPYVIQELRPTLNELGISTPEELGLDKV

SEQ ID NO: 1016717 - protein, 145 aa, Homo sapiens
  misc_feature (127)..(127): Xaa can be any naturally occurring amino acid
SGVQSFDEEEGEATTEFPPPMPCLPLPPEGHGCDPYPPSPQLVQLKLGRQHWGTQGASRSSPGNGGPGWDFIQAYTLETHRPGQLRPGQLDGRELGVAVEKDLGCGLLGLCRQSLQCVHPEDGGSAXCSRLDLSSSRPDFVFQEP

SEQ ID NO: 1016718 - protein, 204 aa, Homo sapiens
MGKRQHQKDKMYITCAEYTHFYGGKKPDLPQTNFRRLPLDHCSLSLQPFVYPDLHPDGIVLTLREHCCHGLKKYGTNPEMEEKLDGRSLIKAELFQEQWGEVPMTSACLPELHRTTPTNVDCERRNGERLQPMRQRQQLNIKGKNFRDLLTDEAFYRQDIINHPGPHQFGTSSNVSNFYHVTNTMKIHDPDDETATQDRSSLSD

SEQ ID NO: 1016719 - protein, 92 aa, Homo sapiens
  misc_feature (1)..(1): Xaa can be any naturally occurring amino acid
  misc_feature (86)..(86): Xaa can be any naturally occurring amino acid
  misc_feature (91)..(91): Xaa can be any naturally occurring amino acid
XFDDTLGSLTARPGFLRLYGNDSLNSTFTQSTVARRWQHFAFRAETRMEFSPVHFQQRRGADLLLNSKNWSYCFVDYEGGPGTQFXPISEXY

SEQ ID NO: 1016720 - protein, 73 aa, Homo sapiens
VINPPSMEIEHNRESSGVLTANYMTRYCHIIVALFATGGARATGICAYPIHLFIQPLKAQTMHRQSLCQRKWL

SEQ ID NO: 1016721 - protein, 771 aa, Homo sapiens
FWCENVKPMLRMNAEAPNLEPGTRCFTLIKSLLKSQQLIKEVDAKTTHGILQKPVEADTDLLGDASPAFGSGSSSESGPGALADLDCSSSSQSPGSSENQMVSPGKVSGSPEQAVEENLSSYSLDRRVTPASETLEDPCRTESQHKAETPHGAEEECKAETPHGAEEECRHGGVCAPAAVATSPPGAIPKEACGGAPLQGLPGEALGCPAGVGTPVPADGTQTLTCAHTSAPESTAPTNHLVAGRAMTLSPQEEVAAGQMASSSRSGPVKLEFDVSDGATSKRAPPPRRLGERSGLKPPLRKAAVRQQKAPQEVEEDDGRSGAGEDPPMPASRGSYHLDWDKMDDPNFIPFGGDTKSGCSEAQPPESPETRLGQPAAEQLHAGPATEEPGPCLSQQLHSASAEDTPVVQLAAETPTAESKERALNSASTSLPTSCPGSEPVPTHQQGQPALELKEESFRDPAEVLGTGAEVDYLEQFGTSSFKESALRKQSLYLKFDPLLRDSPGRPVPVATETSSMHGANETPSGRPREAKLVEFDFLGALDIPVPGPPPGVPAPGGPPLSTGPIVDLLQYSQKDLDAVVKATQEENRELRSRCEELHGKNLELGKIMDRFEEVVYQAMEEVQKQKELSKAEIQKVLKEKDQLTTDLNSMEKSFSDLFKRFEKQKEVIEGYRKNEESLKKCVEDYLARITQEGQRYQALKAHAEEKLQLANEEIAQVRSKAQAEALALQASLRKEQMRIQSLEKTVEQKTKENEELTRICDDLISKMEKI

SEQ ID NO: 1016722 - protein, 838 aa, Homo sapiens
MSLQVLNDKNVSNEKNTENCDFLFSPPEVTGRSSVLRVSQKENVPPKNLAKAMKVTFQTPLRDPQTHRILSPSMASKLEAPFTQDDTLGLENSHPVWTQKENQQLIKEVDAKTTHGILQKPVEADTDLLGDASPAFGSGSSSESGPGALADLDCSSSSQSPGSSENQMVSPGKVSGSPEQAVEENLSSYSLDRRVTPASETLEDPCRTESQHKAETPHGAEEECKAETPHGAEEECRHGGVCAPAAVATSPPGAIPKEACGGAPLQGLPGEALGCPAGVGTPVPADGTQTLTCAHTSAPESTAPTNHLVAGRAMTLSPQEEVAAGQMASSSRSGPVKLEFDVSDGATSKRAPPPRRLGERSGLKPPLRKAAVRQQKAPQEVEEDDGRSGAGEDPPMPASRGSYHLDWDKMDDPNFIPFGGDTKSGCSEAQPPESPETRLGQPAAEQLHAGPATEEPGPCLSQQLHSASAEDTPVVQLAAETPTAESKERALNSASTSLPTSCPGSEPVPTHQQGQPALELKEESFRDPAEVLGTGAEVDYLEQFGTSSFKESALRKQSLYLKFDPLLRDSPGRPVPVATETSSMHGANETPSGRPREAKLVEFDFLGALDIPVPGPPPGVPAPGGPPLSTGPIVDLLQYSQKDLDAVVKATQEENRELRSRCEELHGKNLELGKIMDRFEEVVYQAMEEVQKQKELSKAEIQKVLKEKDQLTTDLNSMEKSFSDLFKRFEKQKEVIEGYRKNEESLKKCVEDYLARITQEGQRYQALKAHAEEKLQLANEEIAQVRSKAQAEALALQASLRKEQMRIQSLEKTVEQKTKENEELTRICDDLISKMEKI

SEQ ID NO: 1016723 - protein, 220 aa, Homo sapiens
PTAAREKMAAPAASGLSRQVRSFSTSVVRPFAKLVRPPVQVYGIEGRYATALYSAASKEKKLDQVEKELLRVRELLKDPKVSLAVLNPYIKRTVKVKSLNDITKREKFSPLTANLMNLLAENGRLGNTQGIISAFSTIMSVHRGEVPCTVTTASPLDDAVLSELKTVLKSFLSPNQILKLEIKTDPSIMGGMIVRIGEKYVDMSAKSKIQKLSKAMREML

SEQ ID NO: 1016724 - protein, 308 aa, Homo sapiens
RAGSRAHRRHRVYKLVEDTKHRPKENLELILTQRGGEFLKSVGDLVFSWKKIFRPEIDSFPQGLAVYASPENKKLCEEEKWLRQEGQSEKIQTKAGEATVKSLKSCPPGGRDEGHNCSNWELNPEDSVPAILIRILAGEWYAPAYVKVTSRDYHTVGRTYRCAGDRYNWAVNCEQWPMSVVNFETAKSRRDERSVKAQERLPKGHGPQASPPDQKASLAFQGQHNADSRAAGGEKRKGLDHNPGRTESMKEMEDYDGAETGTPTGLTGNGRGGTGRGRTHEQADRGQREEAGKDEPQTSAKKTAAYRE

SEQ ID NO: 1016725 - protein, 85 aa, Homo sapiens
  misc_feature (1)..(1): Xaa can be any naturally occurring amino acid
XSLTLDWSSSVVVPRRHVCPDATAAEELTGSARRLMVPGSRSTRKPARDKLGVLDITIGLTSCFVCCLLPAGWVLSHLESYKKRE

SEQ ID NO: 1016726 - protein, 593 aa, Homo sapiens; identical to SEQ ID NO: 829663

SEQ ID NO: 1016727 - protein, 61 aa, Homo sapiens
ADQHMRLQTAPYEGGKREPEKVVDPFSRKIGIIVKAPPMFQYKKYWKAVRQPGPRNQIASM

SEQ ID NO: 1016728 - protein, 74 aa, Homo sapiens
  misc_feature (35)..(35): Xaa can be any naturally occurring amino acid
  misc_feature (37)..(37): Xaa can be any naturally occurring amino acid
  misc_feature (48)..(48): Xaa can be any naturally occurring amino acid
  misc_feature (63)..(63): Xaa can be any naturally occurring amino acid
MDRRNDYGYRVPLFQSKHLNGDERSGSNYRRIPEXRXQPPRDVAILQXRANKLVRYLLVKDQXKIPIKRSDMLR

SEQ ID NO: 1016729 - protein, 178 aa, Homo sapiens
  misc_feature (154)..(154): Xaa can be any naturally occurring amino acid
  misc_feature (156)..(156): Xaa can be any naturally occurring amino acid
  misc_feature (160)..(160): Xaa can be any naturally occurring amino acid
  misc_feature (168)..(168): Xaa can be any naturally occurring amino acid
  misc_feature (171)..(172): Xaa can be any naturally occurring amino acid
RLLDSRRRGSPVTRPPRKMDRRNDYGYRVPLFQGPLPPPGSLGLPFPPDIQTETTEEDSVLLMHTLLAATKDSLAMDPPVVNRPKKSKTKKAPIKTITKAAPAAPPVPAANEIATNKPKITWQALNLPVITQIKPGFTYHWGNQYFKAFLVTGXPXKGHXMKKRYWPXKPXXQFPTGP

SEQ ID NO: 1016730 - protein, 306 aa, Homo sapiens
MASSGSVQQLPLVLLMLLLASAARARLYFRSGQTCYHPIRGDQLALLGRRTYPRPHEYLSPADLPKNWDWRNVNGVNYASVTRNQHIPQYCGSCWAHGSTSAMADRINIKRKGAWPSILLSVQNVIDCGNAGSCEGGNDLPVWEYAHKHGIPDETCNNYQAKDQDCDKFNQCGTCTEFKECHTIQNYTLWRVGDYGSLSGREKMMAEIYANGPISCGIMATEMMSNYTGGIYAEHQDQAVINHIISVAGWGVSNDGIEYWIVRNSWGEPWGEKGWMRIVTSTYKGGTGDSYNLAIESACTFGDPIV

SEQ ID NO: 1016731 - protein, 147 aa, Homo sapiens
  misc_feature (115)..(115): Xaa can be any naturally occurring amino acid
  misc_feature (125)..(125): Xaa can be any naturally occurring amino acid
  misc_feature (135)..(135): Xaa can be any naturally occurring amino acid
  misc_feature (140)..(140): Xaa can be any naturally occurring amino acid
SGASACVFQHEEESWPGGQHEVSGGLLVPAGLAWGPPMLTQDFQSETACWGLQKSLYQEGPPRGHFGCVNAIEFSNNGRPVGWSQEEIDLPGVLLMGPLGTNAHPTPRVKAHNSXKRTTISNIFXLAFNIGNTKXFSGGXDEQFNPP

SEQ ID NO: 1016732 - protein, 123 aa, Homo sapiens
PRIEKILKVKIMDWRPRHLTRWNRYCTSTLRHFLPLLEKSQGEDVEDDHRAELLKQLGDYRFSGFPLHMPYSEVKPLIDAVYSTGVHNIDVPNVEFALAVYIHPYPKNVLSVWIYVASLIRNR

SEQ ID NO: 1016733 - protein, 250 aa, Homo sapiens
MGDQALSFLKDFLAGGIAAAVSKTCGAQIERVKLLLQVQHASKQISAEKQYKGIIDCVVRIPKEQGFLSFWRGNLANVIRYFPTQALNFAFKDKYKQIFLGGVDRHKQFWRYFAGNLASGGAAGATSLCFVYPLDFARTRLAADVGKGSSQREFNGLGDCLTKIFKSDGLKGLYQGFSVSVQAIIIYRAAYFGVYDTAKGMLADPKNVHIIVSWMIAQSVTAVAGLVSNPFDTGRRRMMMQSGRKGADIM

SEQ ID NO: 1016734 - protein, 181 aa, Homo sapiens
  misc_feature (162)..(162): Xaa can be any naturally occurring amino acid
HRARFRAVRLAPPSPAVTMIIYRDLISHDELFSDIYKIREIADGLLLEVEGKMVSRTEGAIDDSLIGGNASAEGPEGEGTESTVVTGVDIVMNHHFTRNQLHKRGFTKSYIQRLTLKSTSKGKLGRSRNPERVKAFYDWSCRADLSTSLLIFNNYQFFYLVXNMDPDGYGLLSLDYRLKMV

SEQ ID NO: 1016735 - protein, 318 aa, Homo sapiens
  misc_feature (203)..(203): Xaa can be any naturally occurring amino acid
  misc_feature (207)..(207): Xaa can be any naturally occurring amino acid
  misc_feature (218)..(218): Xaa can be any naturally occurring amino acid
  misc_feature (225)..(226): Xaa can be any naturally occurring amino acid
MPVPRCSYRPARTAPAGTPGAPSLAGMAFVKEEETEAVIGAPPTATVGPEDQSCAYGSWEGPGAEGPRWGLTLVAAPAQGLEGVAPEGYLSPQVVARGALDDSATHLQCLPEAQAIWLLCNQCESWCHLDCHLPALQDVPGEEWSCSLCHVLPDLKEEDGSLSLDGADSTGVVAKLSPANQRKCERVLLGPIPPHHTPPPPPXPPRXPPPPPPSPPPXPPSPPPXXPPRLQEKLSPPYSSPQEFAQDVGRMFKQFNKLTEDKADVQSIIGLQRFFETRMNEAFGDTKFSAVLVEPPPMSLPGAGLSSQELSGGPGDGP

SEQ ID NO: 1016736 - protein, 307 aa, Homo sapiens
  misc_feature (72)..(72): Xaa can be any naturally occurring amino acid
  misc_feature (99)..(99): Xaa can be any naturally occurring amino acid
  misc_feature (124)..(124): Xaa can be any naturally occurring amino acid
PALKKPLVCPNLYWGVVNVDGCKELLRGLLAINELPFRDCTCIYYLVSLFEVCIKDSAWKSFPTDADAFQHXVTPQLVEDKLMLHGPRSFCLIGDDTPXKVRMGTPEVGHQLVQILSEKGRPCXEKRALFLTPTPWWPHPPVPHDMVFTSVDLIKTSPVQQKKKKKKKKHRADEQEHEGHRQNTNNWLRPRALSRPSKEGALPTPTEPGRARSATNWSRRRTLGRANRSSSQQTSGEKKRGEVPPKIKSTPGGRNDVVEQTPRGDSRGTTRGHTTERKRGDKKNQPCGTTSATQQHTSERTQPHGDG

SEQ ID NO: 1016737 - protein, 317 aa, Homo sapiens
MPVPRCSYRPARTAPAGTPGAPSLAGMAFVKEEETEAVIGAPPTATVGPEDQSCAYGSWEGPGAEGPRWGLTLVAAPAQGLEGVAPEGYLSPQVVARGALDDSATHLQCLPEAQAIWLLCNQCESWCHLDCHLPALQDVPGEEWSCSLCHVLPDLKEEDGSLSLDGADSTGVVAKLSPANQRKCERVLLGPILSRSLPPPASAGYRLHLLLEQPGGNLDLTRDPVTRAAQEKLSPPYSSPQEFAQDVGRMFKQFNKLTEDKADVQSIIGLQRFFETRMNEAFGDTKFSAVLVEPPPMSLPGAGLSSQELSGGPGDGP

SEQ ID NO: 1016738 - protein, 203 aa, Homo sapiens
IPQEWESGHQGVGHQEWSQATREWGWGDSHSLVAPSPSSSRYGFYFCGFNKNFTSSTKKKKKKKKTQGGRTRARRTQTEHKQLVAAARVKPPLQRRCSPNTHRTGEGEERHKLERRRTLGRANRSSSQQTSGEKKRGEVPPKIKSTPGGRNDVVEQTPRGDSRGTTRGHTTERKRGDKKNQPCGTTSATQQHTSERTQPHGDG

SEQ ID NO: 1016739 - protein, 298 aa, Homo sapiens
  misc_feature (12)..(12): Xaa can be any naturally occurring amino acid
GFIEWLRERAVXLTGEPQPIEFTDRVVAVVRYRDGSVIDVVHQVKEEAMHLLPELASHHAVSIPELLVSRDERQARQHVWLKRHPVSTGSPFNRGLRLGPIKDSEVTRRIFNHGVTALRALSRKTGLANSGAGCTGFRQRAGGHVEHCRPGSRLKLATIELEHSHPLGRLWDIDVLTPEGENSLPPDYSLPPRRCCCANKAQRLRAWKNHQLTDLLNRMEALLKRMSECLETINKEHKSLRRTFQSMSTPWWDWAAPADWKQPVPRTRLGIALTARRTRSWRGRFNEGADITGITGTD

SEQ ID NO: 1016740 - protein, 265 aa, Homo sapiens
FRGTTPSKKEDHHQEVGVLLLRDLHLQDQFACSSGMGRNELLYHVEEIRYGGRPRRERAALSEQMSICPQEMMGIYVTDSYSSRDDPSARDTRDYAPPPRDYTYRDYGHSSSRDDYPSRGYSDRDGYGRDRDYSDHPSGGSYRDSYESYGNSRKCSDPTKKGPAPLLMDGKQVDYDDYTQLTVTDMVEVEDKLTQAARSDLYFKWSVIRVGQPRTEVLRTFYGKGVPTLHVDYRNRKYQAVENREVVGRGGSRSDRGGRQKQILD

SEQ ID NO: 1016741 - protein, 104 aa, Homo sapiens
  misc_feature (81)..(81): Xaa can be any naturally occurring amino acid
MSFCHVNGLCYLSGGNCVEARREMTILYSSSTLEEDQDGERLSAVKSSDLINKMDLQRAAIILGYRTQGVIAQRKSLRCCXLSCAVLGTKARLVLTVSSECKAF

SEQ ID NO: 1016742 - protein, 157 aa, Homo sapiens
  misc_feature (10)..(10): Xaa can be any naturally occurring amino acid
  misc_feature (155)..(155): Xaa can be any naturally occurring amino acid
VSSSSGLACXSLLSRTFLLQQNGIRHGSYTASRKHIYIDKNTKIICQGFTGKQGTFHSQQALEYGTKLVGGTTPGKGGQKHLGLPSFNTVKEAKEKTGATASVIYVPPPFAAAAINEAIDAEIPLVVCITEGIPAAGYGAGQAQTDTPGNDEANXAN

SEQ ID NO: 1016743 - protein, 134 aa, Homo sapiens
  misc_feature (5)..(5): Xaa can be any naturally occurring amino acid
  misc_feature (8)..(8): Xaa can be any naturally occurring amino acid
TEGAXKDXFTGGNASPEGPEGEGTESTVVTGVDIVMNHHLQETSFTKEASKKYIKDYMKSLKGKLEEQKPERVKPFMTGAAEQIKHILANFNNYQFFIGENMNPDGMVALLDYREDGVTPFMIFFKDGLEMEKC

SEQ ID NO: 1016744 - protein, 89 aa, Homo sapiens
  misc_feature (69)..(69): Xaa can be any naturally occurring amino acid
  misc_feature (72)..(72): Xaa can be any naturally occurring amino acid
LPQTLSTSHRHCPPPTDTIHLPQTLPTSHRHCPPPTDTVHLPQTLSTSHRHCPPPTDTIHLPQTLSTSXRHXPPPTDTVHLPQTLSTSH

SEQ ID NO: 1016745 - protein, 283 aa, Homo sapiens
GFLSLLLRGPRRFLSPVPGGLPTQSVQGNVINNMEQGSRTHLSTRLAAARLHPPSGKTRSSLANFEVLRMNPACQACKGDPKSTERRSRVFCLPKDELAVKELGFQRLLRCRAVFGEAVLCSHERFCNPMPVAKVQDRRGDLNRYYGPDQSGLRKLEGAEAQRPSNTSARGNWACAHGGRTGPTAVLGAHGSGLCSLTGLSIALDSAAAWTGPQRLPDKPTDGLQTHMHFAEGMSGQSRLPLGVLGDALHQTCPEVTAEKTKGIRPHAARQKYPLVSIREELQ

SEQ ID NO: 1016746 - protein, 174 aa, Homo sapiens
  misc_feature (152)..(152): Xaa can be any naturally occurring amino acid
DFGLSRVLEDDPEAAYTTRGGKIPIRWTSPEAIAYRKFTSASDVWSYGIVLWEVMSYGERPYWEMSNQDVIKAVDEGLSLANLPLGFAQLAFVISLMVGLAWQEKDQGTTDPKFRSKIVSILGQTHPGIQASLKIITSAAARPSNLLLDQSXVDIATFHTTGDWLNGMRTAPVR

SEQ ID NO: 1016747 - protein, 170 aa, Homo sapiens
SVVLTFTTPETDIMVHLTDAEKAAVSGLWGKVNADEVGGEALGRLLVVYPWTQRYFDSFGDLSSASAIMGNAKVKAHGKKVITAFNDGLNHLDSLKGTFASLSELHCDKLHVDPENFRLLGNMIVIVLGPPPWARISPPLHKLAFQKGWWLGVAACPGSQVPLNPLSCSC

SEQ ID NO: 1016748 - protein, 236 aa, Homo sapiens
MHANNTSRFRQLSILVHPDKQSRCMLTAAPTRLFEAVDNTLTSCYLDSGRKQTDGPCDVIHGTDTEYVEPAPVKEGDKNKPYLTERTRTQPSNLVRRNGLIPDDWFNQPTLALLQPGPTEYLLLARRLAHLSRLGHDDDDTPTTTIALTHGNTDPTRPRPDASQAHSQTPAAHHAATIDAGGQQTTITLCLVTCSDTLALVLRPLLASWKRSHNVHIANRCECTTSRRSTLREPVP

SEQ ID NO: 1016749 - protein, 72 aa, Homo sapiens
LPGKDQDYFIIPVITFEKSFTVTELRTMIYKDVPENLHKMAEHNLLLHLRKLEKDGKIFYTTTPVKKWKAVL

SEQ ID NO: 1016750 - protein, 76 aa, Homo sapiens
MAYYADGSKEGLLALLEFAEEKMKVNYVFICFRKGREDKSSTPEDFSFLGFEIVLSRPSLCPLSARCDVHGYPLDQ

SEQ ID NO: 1016751 - protein, 71 aa, Homo sapiens
MGATEGLLALLEFAEEKMKVNYVFICFRKGREDKSSTPEDFSFLGFEIVLSRPSLCPLSARCDVHGYPLDQ

SEQ ID NO: 1016752 - protein, 111 aa, Homo sapiens
LNLATFCKKRCLDSFPSGLLKMSILCLSVLNPRGRSHGAYRCTQGQQPVGREVLPAWEHLQPAASSLSLHSGPDRKCSVFLYPTPGLLEWWANTCELVFWGKGLSLRPFRS

SEQ ID NO: 1016753 - protein, 81 aa, Homo sapiens
MDLAAAREACTCRLQRQVFDWVMLRRTAGSPMHMSLALRAHTQSPSPGLPGRADRVQTAATPGPERTVVPVAASLRPPCCG

SEQ ID NO: 1016754 - protein, 81 aa, Homo sapiens
  misc_feature (7)..(7): Xaa can be any naturally occurring amino acid
  misc_feature (23)..(23): Xaa can be any naturally occurring amino acid
APVSGFXRCRLVLLCACLFAARXWLGPAPLPLVPCPSRGDSTQSPSPGLPGRADRVQTAATPGPERTVVPVAASLRPPCCG

SEQ ID NO: 1016755 - protein, 115 aa, Homo sapiens
  misc_feature (1)..(1): Xaa can be any naturally occurring amino acid
XFLQRIEQLSSRVVRVLGCNPGPMTLQGTNTYLVGTGSRRILIDTGEPSVPEYISCLKQALVEFDTAIQEILVTHWHSDQSWKALYDNFVKTSINDTTYCIKKLRPESPRGERNY

SEQ ID NO: 1016756 - protein, 67 aa, Homo sapiens
NGRAKKGRGHVQPIRCTNCARCVPKDKAIKKFVIRNIVEAAAVRDISEGTSSTPTCFPSSMSSCIIA

SEQ ID NO: 1016757 - protein, 155 aa, Homo sapiens
  misc_feature (153)..(153): Xaa can be any naturally occurring amino acid
MTKMPNHLHHSTQANAILAIEQFEGLLGTHCSPDLLFFLCAMYAPICTIDFQHEPIKPCKSVCERARQGCEPILIKYRHSWPENLACEELPVYDRGVCISPEAIVTADGADFPMDSSNGNCRGASSERCKCKPFRATQKTYFRNNYNYVIRAXVK

SEQ ID NO: 1016758 - protein, 183 aa, Homo sapiens
MVCGSPGGMLLLRAGLLALAALCLLRVPGARAAACEPVRIPLCKSLPWNMTKMPNHLHHSTQANAILAIEQFEGLLGTHCSPDLLFFLCAMYAPICTIDFQHEPIKPCKSVCERARQGCEPILIKYRHSWPENLACEELPVYDRGVCISPEAIVTADGADFPMDSSNGNCRGASSERCKCKPI

SEQ ID NO: 1016759 - protein, 136 aa, Homo sapiens
RLHALSYGVRDQAILALHVLLFLCVGGRKKILIKHVTVIGGGLMGAGIAQVAAATGHTVVLVDQTEDILAKSKKGIEESLKRMAKKKFTENPKAGDEFVEKTLSCLSTSTDAGIRGFTAKNLVVEAIVENLKLKNE

SEQ ID NO: 1016760 - protein, 87 aa, Homo sapiens
MAGASLGARFYRQIKRHPGIIPMIGLICLGMGSAALYLLRLALRSPDVCWDRKNNPEPWNRLSPNDQYKFLAVSTDYKKLKKDRPDF

SEQ ID NO: 1016761 - protein, 114 aa, Homo sapiens
MQATASQPIHFFHSSPQAPRHHSGHPVPLLLTQAGFPRRGEAAPPLLSSLAPSSGSASDPWLESHVGEEEAGSTSRGPPRAQTSPSALLPGPRRVWHRLRVERGLREPTRSRGL

SEQ ID NO: 1016762 - protein, 176 aa, Homo sapiens
MAGASLGARFYRQIKRHPGIIPMIGLICLGMGSAALYLLRLALRSPDVWKRHGLELTGAWVRQDGVEIGGPSGDPVPCCMHLRLYRPASTGLEPTAALGDPRIPSSPPGGSLLSLARPEMRTRASPGLVAMTTPLSQRWDRKNNPEPWNRLSPNDQYKFLAVSTDYKKLKKDRPDF

SEQ ID NO: 1016763 - protein, 114 aa, Homo sapiens; identical to SEQ ID NO: 1016761

SEQ ID NO: 1016764 - protein, 214 aa, Homo sapiens
YISNSARGAMVIKTGRAAAKQLVGYIMANADDHPATSATQHGSPCDLVASQSPVLLVEIIRLQEPSCRSKIEVATYAYLLTLTSSKGHLSAILAIKGKLSNSEVKRIRSILDVQHGGAGALPAPIFPYKAQGRRERDSAMVEWKTELEEKEGKDELSSGRGFEGPVASCEHRQRYDVTSGGPRPYRLPCNWGPEPSLFIPQGSTRGWSPRAGVY

SEQ ID NO: 1016765 - protein, 127 aa, Homo sapiens
IPGHLCPEPLHSRPHDCPPRGMARALFSSLETGPSLTHLPSAPRAAVSGIQQWWNGRQNWKRKNGKDELSSGRGFEGPVASCEHRQRYDVTSGGPRPYRLPCNWGPEPSLFIPQGSTRGWSPRAGVY

SEQ ID NO: 1016766 - protein, 298 aa, Homo sapiens
SGTRLCCQNPVTSVISKRHITMLSIKSGERIVFTFSCQSPENHFVIEIQKNIDCMSGPCPFGEVQLQPSTSLLPTLNRTFIWDVKAHKSIGLELQFSIPRLRQIGPGESCPDGVTHSISGRIDATVVRIGTFCSNGTVSRIKMQEGVKMALHLPWFHPRNVSGFSIANRSSIKRLCIIESVFEGEGSATLMSANYPEGFPEDELMTWQFVVPAHLRASVSFLNFNLSNCERKEERVEYYIPGSTTNPEVFKLEDKQPGNMAGNFNLSLQGCDQDAQSPGILRLQFQVLVQHPQNESSE

SEQ ID NO: 1016767 - protein, 128 aa, Homo sapiens
  misc_feature (5)..(5): Xaa can be any naturally occurring amino acid
  misc_feature (9)..(9): Xaa can be any naturally occurring amino acid
STGAXKALXKVIPRAERGSSNGMAFRFLPPNVSVVDLTCPPGETCPSMMTFKKVVKQASEGPLKGILGYTEDQVVSCDFNSNSHSSTFDAGAGIALNDNFVKLISWYDNEYGYSNRVVDLIAYMASKE

SEQ ID NO: 1016768 - protein, 75 aa, Homo sapiens
MLVEAYGNQTEVARRLKCSRGTVRKHVDDKDGKMHAILTTFSWFIADGVKEMRYYEKIDGSKYRNIWVVGDLHGC

SEQ ID NO: 1016769 - protein, 136 aa, Homo sapiens
  misc_feature (115)..(115): Xaa can be any naturally occurring amino acid
MVKVGVNGFGRIGRLVTRAAICSGKVWRFVAINDPFIDLNYMVYMFQYDSTQGKFNGTVKAENGKLVINGKPSPSSRSETPLTSNGVKAGAEYVVESTGVFTTMEKAGAHLKGGXKKVIISAPSAVPPWFVIGFNH

SEQ ID NO: 1016770 - protein, 103 aa, Homo sapiens
RASRKFATSAEQGRVERGVRWYGHFFRLPCLRPSQNFQQRHVGPEYPEFTTSVVRRSHYEEGPGKNLPFSVENKWRLLAMMTVYFGSGFAAPFFIVRHQLLKK

SEQ ID NO: 1016771 - protein, 126 aa, Homo sapiens
  misc_feature (118)..(118): Xaa can be any naturally occurring amino acid
FITRKKLGVDFVNRGVIFPVGNKDAVEGHIRHRATRRLDHLADSFQNVAGLRLWVIGKQHVIMLIKSQRTGDIHHAISQRAGNEGGQRCAACQRGIIYGILGIVKLLKAILSKGRGRXARRRMFRR

SEQ ID NO: 1016772 - protein, 114 aa, Homo sapiens
PSGVVHWWSCGDEMLHHIGLLVKETAPAAADGTVITGGIRYQKYPTHPLNSGADSYRSPGLHCPDDRIAVRQTCPAITFIQRIVPRHAVYGAVATVLHVIANPTTVTEGSEIDR

SEQ ID NO: 1016773 - protein, 77 aa, Homo sapiens
NNRAKMLRNLLALRQIAQRTISTTSRRHFENKVPEKQKLFQEDNGMPVHLKGGASDALLYRATMALTLGGTAMPSIC

SEQ ID NO: 1016774 - protein, 47 aa, Homo sapiens
MAKLPLLPPRGPCGGMNASARLAASRGPGWGVYNTSPPRLLLSSSGT

SEQ ID NO: 1016775 - protein, 196 aa, Homo sapiens
GLPHAPQVAPPPAAQSALRQQQLPDKRRAAEMTAEEMKATESGAQSARMPMEGVDISPKQDEGVLKVIKREGTGTEMPMIGDRVFVHYTGWLWSGTKLLAPVWDRRDKFLLLTCGTRGGHSRLGTLAIATHEGGGRWCHITPAKPEYAYRFKPGQSSKDSPQMPRLYNEVRACTEFNGRTIVPRNEEDGGKSFRRT

SEQ ID NO: 1016776 - protein, 143 aa, Homo sapiens
LLSTEITARELLLCKLIPYYFLGMLAMLLCMLVSVFIHRRAVSRVAADSVFYLQPVSTQYPGDGAADFHDYPQPVQCRSGRPERRFSAVDYAFRLYFSDRQYAPVIRAVDVHSSRSLFRQHPAKPVPRREYSSGAGGFIFEQI

SEQ ID NO: 1016777 - protein, 730 aa, Homo sapiens
HSSPGLTQTMHFPKSSTASGRSEESRTSHSSTTHTISSPPSTTSALVEERTSYYSSPGSIATTHFPESSTTSGRSEESTASHSSPDTNGITPLPAHFTTSGRIAESTTFYISPGSMETTLASTTTTPGLSAKSTILYSSSRSPDQTLSPASMTSSSISGEPTSLYSQAESTHTTAFPASTTTSGLSQESTTFHSKPGSTETTLSPGSITTSSFAQEFTTPHSQPGSALSTVSPASTTVPGLSEESTTFYSSPGSTETTAFSHSNTMSIHSQQSTPFPDSPGFTHTVLPATLTTTDIGQESTAFHSSSDATGTTPLPARSTASDLVGEPTTFYISPSPTYTTLFPASSSTSGLIEESTTFHTSPSFTSTIVSTESLETLAPGLCQEGQIWNGKQCVCPQGYVGYQCLSPLESFPVETPEKLNATLGMTVKVTYRNFTEKMNDASSQEYQNFSTLFKNRMDVVLKGDNLPQYRGVNIRRLLNGSIVVKNDVILEADYTLEYEELFENLAEIVKAKIMNETRTTLLDPDSCRKAILCYSEEDTFVDSSVTPGFDFQEQCTQKAAEGYTQFYYVDVLDGKLACVNKCTKGTKSQMNCNLGTCQLQRSGPRCLCPNTNTHWYWGETCEFNIAKSLVYGIVGAVMAVLLLALIILIILFSLSQRKRHREQYDVPQEWRKEGTPGIFQKTAIWEDQNLRESRFGLENAYNNFRPTLETVDSGTELHIQRPEMVASTV

SEQ ID NO: 1016778 - protein, 579 aa, Homo sapiens
MTSSSISGEPTSLYSQAESTHTTAFPASTTTSGLSQESTTFHSKPGSTETTLSPGSITTSSFAQEFTTPHSQPGSALSTVSPASTTVPGLSEESTTFYSSPGSTETTAFSHSNTMSIHSQQSTPFPDSPGFTHTVLPATLTTTDIGQESTAFHSSSDATGTTPLPARSTASDLVGEPTTFYISPSPTYTTLFPASSSTSGLTEESTTFHTSPSFTSTIVSTESLETLAPGLCQEGQIWNGKQCVCPQGYVGYQCLSPLESFPVETPEKLNATLGMTVKVTYRNFTEKMNDASSQEYQNFSTLFKNRMDVVLKGDNLPQYRGVNIRRLLNGSIVVKNDVILEADYTLEYEELFENLAEIVKAKIMNETRTTLLDPDSCRKAILCYSEEDTFVDSSVTPGFDFQEQCTQKAAEGYTQFYYVDVLDGKLACVNKCTKGTKSQMNCNLGTCQLQRSGPRCLCPNTNTHWYWGETCEFNIAKSLVYGIVGAVMAVLLLALIILIILFSLSQRKRHREQYDVPQEWRKEGTPGIFQKTAIWEDQNLRESRFGLENAYNNFRPTLETVDSGTELHIQRPEMVASTV

SEQ ID NO: 1016779 - protein, 87 aa, Homo sapiens
PLHSDLTPESRLNARSSVAPASTPACGGLLLRSLLFRGPAGGSPDQNLRESRFGLENAYNNFRPTLETVDSGTELHIQRPEMVASTV

SEQ ID NO: 1016780 - protein, 596 aa, Homo sapiens
DLEDPADSRKNTLSPASMTSSSISGEPTSLYSQAESTHTTAFPASTTTSGLSQESTTFHSKPGSTETTLSPGSITTSSFAQEFTTPHSQPGSALSTVSPASTTVPGLSEESTTFYSSPGSTETTAFSHSNTMSIHSQQSTPFPDSPGFTHTVLPATLTTTDIGQESTAFHSSSDATGTTPLPARSTASDLVGEPTTFYISPSPTYTTLFPASSSTSGLTEESTTFHTSPSFTSTIVSTESLETLAPGLCQEGQIWNGKQCVCPQGYVGYQCLSPLESFPVETPEKLNATLGMTVKVTYRNFTEKMNDASSQEYQNFSTLFKNRMDVVLKGDNLPQYRGVNIRRLLNGSIVVKNDVILEADYTLEYEELFENLAEIVKAKIMNETRTTLLDPDSCRKAILCYSEEDTFVDSSVTPGFDFQEQCTQKAAEGYTQFYYVDVLDGKLACVNKCTKGTKSQMNCNLGTCQLQRSGPRCLCPNTNTHWYWGETCEFNIAKSLVYGIVGAVMAVLLLALIILIILFSLSQRKRHREQYDVPQEWRKEGTPGIFQKTAIWEDQNLRESRFGLENAYNNFRPTLETVDSGTELHIQRPEMVASTV

SEQ ID NO: 1016781 - protein, 705 aa, Homo sapiens
HSSPGLTQTMHFPKSSTASGRSEESRTSHSSTTHTISSPPSTTSALVEERTSYYSSPGSIATTHFPESSTTSGRSEESTASHSSPDTNGITPLPAHFTTSGRIAESTTFYISPGSMETTLASTTTTPGLSAKSTILYSSSRSPDQTLSPASMTSSSISGEPTSLYSQAESTHTTAFPASTTTSGLSQESTTFHSKPGSTETTLSPGSITTSSFAQEFTTPHSQPGSALSTVSPASTTVPGLSEESTTFYSSPGSTETTAFSHSNTMSIHSQQSTPFPDSPGFTHTVLPATLTTTDIGQESTAFHSSSDATGTTPLPARSTASDLVGEPTTFYISPSPTYTTLFPASSSTSGLIEESTTFHTSPSFTSTIVSTESLETLAPGLCQEGQIWNGKQCVCPQGYVGYQCLSPLESFPVETPEKLNATLGMTVKVTYRNFTEKMNDASSQEYQNFSTLFKNRMDVVLKGDNLPQYRGVNIRRLLNGSIVVKNDVILEADYTLEYEELFENLAEIVKAKIMNETRTTLLDPDSCRKAILCYSEEDTFVDSSVTPGFDFQEQCTQKAAEGYTQFYYVDVLDGKLACVNKCTKGTKSQMNCNLGTCQLQRSGPRCLCPNTNTHWYWGETCEFNIAKSLVYGIVGAVMAVLLLALIILIILFSLSQRKRHRDQNLRESRFGLENAYNNFRPTLETVDSGTELHIQRPEMVASTV

SEQ ID NO: 1016782 - protein, 191 aa, Homo sapiens
RVPAHSSDEKWRGLLSWWSLTLHGTRSSRWHREPGLGLRHSPRRLSGALHLEAGCDRNATTVRPLRAKARGRSAVRRSGSPLCEMRSGLFESAVQENISINGQAWKEASDNCLMEFVTVKATLKISLDESSSIDIASKDVSQYPSERSCECVFNEHNKENYEILERSDLALCVTSHLDLNNSDPDAKSLIW

SEQ ID NO: 1016783 - protein, 206 aa, Homo sapiens
SRREIGSTPTPGSSSSNTFGSPTRVQARPSFCFIPPESLPASVPVNGPRDVNSSRRAKVCLRASPVTLRKSAYRFEVLPFTVRSFITDQISAGILTEHGVKARRSFLIGSKPITVALPLSGFSNPANIRISVVLPAPPAPPTPSHNRREWYNRAADGGLVHARKPFSQAVHRDNGIIHVLPRHRIVPSLHSLRNASSASVTTIRRR

SEQ ID NO: 1016784 - protein, 146 aa, Homo sapiens
  misc_feature (80)..(80): Xaa can be any naturally occurring amino acid
ITPGTVLIILLGATGAKRVVFLKQLDSGLLLVTGPLVINRVPLRRTHQKFVIANLLQKVDISDVKIPKHLTDAYFKKKAXRKPRHQEGEIFDTEKEKYEITEQRKADQKAVDLQILPKIKAVPQLQGYLRSQFSLTNGMYPHKLVF

SEQ ID NO: 1016785 - protein, 188 aa, Homo sapiens
  misc_feature (188)..(188): Xaa can be any naturally occurring amino acid
MEEHYVAAVYRVELSNGDKNDVANRGPPPSVGVVALEMIIVGGVLHLVADSPSCLFSAPSESALASQLALSASLVTSGGPFSLAGVVSHDPVLGKSVTVAQTLGSRACCNSQPSLQLNQIGSTAPRPTHKFWQTAHLIIYHIVSHNNHSTRLPRNNKHEQITKTPFASQLNPRTFSYKLDTKSPGPTX

SEQ ID NO: 1016786 - protein, 129 aa, Homo sapiens
MEEHYVAAVYRVELSNGDKNDVANRGPPPSVGVVALEMIIVGGVLHLVADLQEGEASLAAGAGPFLEIGEERDRCLGREITSRPDPSSRSRSRSRSNEREMEEQFAGEVVYRTLLHFDQEYVPENSSFV

SEQ ID NO: 1016787 - protein, 134 aa, Homo sapiens
QHPNSTGSGNSPPSSSLTPPSHVNLSPNTVPEFSYSSSEDEFYDADEFHQSGSSPKRLIDSSGSASVLTHSSSGNSLKRPDTTESLNSSMSNGTSDADLFDSHDDRDDDGEAGSVEEHKSVIMHLLSQVRLGMD

SEQ ID NO: 1016788 - protein, 178 aa, Homo sapiens
  misc_feature (4)..(4): Xaa can be any naturally occurring amino acid
RSLXQRWQNVGFQSADLIGKRAISTSVCLRAHGSVVKSEDYAFPNLRLIGVTTPCLMWPHVTMLSASQKRLKEKEKADWSSLSRDEKVQLYRIQFNESFAEMNRGTNEWKTVVGMAMFFIGFTALVLIWEKSYVYGPIPHTFDRDWVAMQTKRMLDMKANPIQGFSAKWDYDKNEWKK

SEQ ID NO: 1016789 - protein, 274 aa, Homo sapiens
SGAPTPDAAWHQAQPPLPHFPLVLITSQPRAAGSPERTAAARQPLAAPEQSGSGRKLLGSALSGVPSALCSVFLSAWEEEEEEEEEEEEEEEEEEEEEEEDVWSRLGGGAAAAAAAAAPPPLPPPPERERQESPRLGNPKVSATLHGRLPSSFMGKVWKQQMYPQYATYYYPQYLQAKQSLVPAHTPWPLPVPSSTSSNNNSSSSSNSGWDQLSKNETLYSEDCLPKTNDQELEKTLNNHMGKIVSTKARKDKTTNKCKGYGKVDYDSPAAAQQ

SEQ ID NO: 1016790 - protein, 123 aa, Homo sapiens
FENHGVGTSGVRSGRVDASAIAVEPCDLYGRFLIPRYPPGRLSEYLRRVQIEAAQCPDVVVAQIDPKKLTKEAKCEYFSFRMPTLPLQVIPQHFNVQQQQVAQFSLFDMNVNNMKSLEITTVG

SEQ ID NO: 1016791 - protein, 317 aa, Homo sapiens [sequence omitted]

SEQ ID NO: 1016792 - protein, 324 aa, Homo sapiens
GGSRCGAWLSELSGAILVAAATLASTAAMTEQMTLRGTLKGHNGWVTQIATTPQFPDMILSASRDKTIIMWKLTRDETNYGIPQRALRGHSHFVSDVVISSDGQFALSGSWDGTLRLWDLTTGTTTRRFVGHTKDVLSVAFSSDNRQIVSGSRDKTIKLWNTLGVCKYTVQDESHSEWVSCVRFSPNSSNPIIVSCGWDKLVKVWNLANCKLKTNHIGHTGYLNTVTVSPDGSLCASGGKDGQAMLWDLNEGKHLYTLDGGDIINALCFSPSIVDELKQEVISTSSKAEPPQCTSLAWSADGQTLFAGYTDNLVRVWQVTIGTR

SEQ ID NO: 1016793 - protein, 285 aa, Homo sapiens
  misc_feature (151)..(151): Xaa can be any naturally occurring amino acid
THDLQEMKEESRQMMREKKVTILELFRSPAYRQPILIAVDAAGDPRQTDLAVNSWSSSVLPTTRSLEKAGGACEPCVMPASRHPDIVSDRAIQLLQVSPDIDEWKLSRAVLDPDSLSRAFLGIGVDCRHSFMSHRAYATCSETDKPVDVPXLDHACATLGLSVASLWNVGSCAPLPLDSVVGLNLFRPGSTVHADYCQLAGFQSKLDSQEFHSRAVLRSQICGSKVMWNPYDLSSVFHLVHPWVPDSYHYCYLTFKRFLEQRSGRNLRIEDRFRVPGKGGSQSKS

SEQ ID NO: 1016794 - protein, 162 aa, Homo sapiens
  misc_feature (21)..(21): Xaa can be any naturally occurring amino acid
VGVVNPILASPPTLGLLEPKXEKEEEELFPESERPEMLSEQEHMSISGSSARHMVMQKLLRKQESTVMVLRNMVDPKDIDDDLEGEVTEECGKFGAVNRVIIYQEKQGEEEDAEIIVKIFVEFSMASETHKPSSLNGRWFGGRKVVAEVYDQERFDNSDLSA

SEQ ID NO: 1016795 - protein, 99 aa, Homo sapiens
KRRPEKSQGHEHREAMPFLDIQKRFGLNIDRWLTIQSGEQPYKMAGRCHAFEKEWIECAHGIGYTRAEKECKIEYDDFVECLLRQKTMRRAGTHQEAAG

SEQ ID NO: 1016796 - protein, 99 aa, Homo sapiens; identical to SEQ ID NO: 1016795

SEQ ID NO: 1016797 - protein, 196 aa, Homo sapiens
  misc_feature (32)..(32): Xaa can be any naturally occurring amino acid
  misc_feature (37)..(37): Xaa can be any naturally occurring amino acid
  misc_feature (183)..(183): Xaa can be any naturally occurring amino acid
  misc_feature (185)..(185): Xaa can be any naturally occurring amino acid
AGNFPRSFAEIVRLFPQPLLAVIEVLRIVNKXVAPVXNLRRPEDFFIAIPGKHQVILRLCHRNTRFRLHQGNLIRLVIQFAQHLARFDSITFVHRQRFNGPPNTETKIYRTNIHGAIQRQAVILAALIPPVASATTAASTTTANPITTGFFITTNSFAIILAKSGRYDKVTVWLTVRSFFIDXVXPVRNRIVSLQG

SEQ ID NO: 1016798 - protein, 136 aa, Homo sapiens
RIPYVSMLGVVGEWARQHVAQVWNESLDQVEAEGSALQAGEKDESKGQVQAQNVWKAFLVRDCQFGDVDSGKQGDRGQQSELSCCPQSRLHCPEAKRYHQAADNWQVRKKCHSSLDNRVRPHLLRKRKKQHQNCAP

SEQ ID NO: 1016799 - protein, 103 aa, Homo sapiens
  misc_feature (19)..(19): Xaa can be any naturally occurring amino acid
QSPMHRECGFIRLKPDTNXSGLCQCPEPQGLWKVEEGEVNGQELCVSSHSVSRISFAKEPHVEQITRKFRLNSEGKLEQTVSMATTTQPMTQHLHITYKKVTP

SEQ ID NO: 1016800 - protein, 112 aa, Homo sapiens
MSLEVYVVSTVVLLRDHKYVIWREVWKSVLQHPGRLIDFLECGKTNPEKDNPTLSLDEADRDALKWALNPNYSKIVDSNTAPDRQTLMWSATWPKEVRQLAEDFLKDYIHIN

SEQ ID NO: 1016801 - protein, 459 aa, Homo sapiens
ADPSFARQPARTTMATVQQLEGRWRLAGTATGFAGYTDTELASWELALAKTLAALAKPDLYHSTVLTGYKTVTTNTHLQQPPLANSKHSFFLCYPCARATLCNEDHQPDWHATNLTTLLLHTSYQHCVHSGLHAIQARWRLGDRDTANKITNGHTLCTHDLGAQLYACAGTLAAPMQPNWSTRAHLGALPTCNNTRYRHLTPTSQLNLQPSLRTTGTALNFYTEGHVERQRPSTALNRWKPTSFLRRLACTIQSLRSSHRAPRATTTLGWLLPQPPSSFTILQITHRTSLRTKVANAPYLFPHKPAWLRELLPSHAHSNSPYGGLLHTSHNLTRGAFKTAPTLNQPPDAHHQNQHDHATHTDSGARTRASTTTRRTHPHNTRGAAPTTPEARPPDHQGGPPHTPPHSATTTDTYNCAHTPGRATTEDHRAPLSKQQAQPTARPHATNTNPQHKRQQTPR

SEQ ID NO: 1016802 - protein, 144 aa, Homo sapiens
KDGRGAGNHWLVDDRGFLYHHQGVYFLHHPGCVRLSLEITLTSVFKKKGQMQWLMPVILALWKAGAGGSPGVGSSEPAWPTGRNPVSAKGARISQAWWWAPITPATWGLGQENCLNLGGRGCSEPRPLCCTPAWATRVKLCLKK

SEQ ID NO: 1016803 - protein, 283 aa, Homo sapiens
MGRLNHGARRSSSAIGGPQRLGPAQARYGLTEPDTAPLPGSRNSRAPGAAGAGLGGRKRRPLREPAGPSLNPTLAATAALIPLHRRAGDIRPGPLPGGSDAPSQLPVQETRPRLCAGQLKGTTTPRRIEGDREAAGVDRGKAGLGLGGRPPPQPPREERAQQLLDAVEQRQRQLLDTIAACEEMLPAAWAAGARSLAGGGNVSAKPGAPPQPAVSARGGFPKDAGRWSLREPLTIPEQTSPDFSRSPGPVPGPLNNFPSSKKGPGLHWQWLVPWLSALSGSSA

SEQ ID NO: 1016804 - protein, 196 aa, Homo sapiens
GRGRSLLNALTQRWEWVAGRKGGGGRAAQAEMEWCALGSDWSRGEAAGVDRGKAGLGLGGRPPPQPPREERAQQLLDAVEQRQRQLLDTIAACEEMLPARLGRRRPEPGWWRERLSQTWSAPPAGCLRQKAAFQRIAGRWSLREPLTIPEQTSPDFSRSPGPVPGPLNNFPSSKKGPGLHWQWLVPWLSALSGSSA

SEQ ID NO: 1016805 - protein, 75 aa, Homo sapiens
IAYRGLFIIDAKGVLRQITVNDLPVGRSVDGALRLVQAFQYTDEHGEVCPACWKPGSDTIKPNVDDSKEYFSKHN

SEQ ID NO: 1016806 - protein, 217 aa, Homo sapiens
SGGAAAGSGAQSSGGRRRTRGNSGSSPGGGSNSGGGIGPSRRPPSQPSPTRGSPSSLHLAPLVPLARPGAALCFISLILQRQDPAPGTEQPTPWGRGLDVISMSLQLFTEQGDKKGKKGKKDRDMDELKKEVSMDDHKLSLDELHRKYGTDLSRGLTSARAAEILARDGPQKTLNSTLPTYSMKWITVCRQLFGGSPMLLWIGANLVSWLIASKLLH

SEQ ID NO: 1016807 - protein, 205 aa, Homo sapiens
SGGAAAGSGAQSSGGRRRTRGNSGSSPGGGSNSGGGIGPSRRPPSHLADYPYAPAVADALCFISLILQRQDPAPGTEQPTPWGRGLDVISMSLQLFTEQGDKKGKKGKKDRDMDELKKEVSMDDHKLSLDELHRKYGTDLSRGLTSARAAEILARDGPQKTLNSTLPTYSMKWITVCRQLFGGSPMLLWIGANLVSWLIASKLLH

SEQ ID NO: 1016808 - protein, 221 aa, Homo sapiens
MSKMLTEEFEWIAYRRVNNTLSSQKLAVYRISGIPWKRRGNLAEAKRVAHVENTERLIERSHPENLRKQKSRCCQVCRVDSARIYEGDPDKPGLFGQKRLESLLNVINRKLMTCSSGKDSQMMTSTEAYNLRVVRTRQEKIKQHLRLKSLIGSMNKRRTSHQDLEKQAARVHEEAKRAGDKAVEIYASCGSAEPVGTLRHLENEANNMKMEAGNRNNDDQN

SEQ ID NO: 1016809 - protein, 166 aa, Homo sapiens
GEKAPDTKEKKPAAKKAGSDAAASLAPAPKVAKKVHPKGKKPKKANPIAAETLSLVRGIGRYSRSAMYSRKALYKRKYSAAKTKVEKKKKKEKVLATCHQNSWLGTKNGGTRVVKLRKMPRYLSHPEDCFLGNLLEATAKKALSGQHVKKGYAPSITSRNCPDYPH

SEQ ID NO: 1016810 - protein, 318 aa, Homo sapiens
MSSLPGSREPLLRVAVTGGTHGNEMCGVYLARYWLQNPGELQRPSFSAMPVLANPAATAACCRYLDRDLNRSCTLTFLGSTATPDDPYEVKRARELNQLLGPKGTGQAFDFTLDLHNTTANTGVCLISESNISFNLHLCHYLQRQNPGMPCRLFLYEPAGTETFSVESISKNGICLEMGPQPQGVLRADLFSRMRALVASILDFIELFNQGMDLPAFEMDIYRNLGSVDFPRTADGDLAGTVHPQLQDHDFEPLRPGEPIFKLFSGEDVLYEGDSIVYPVFINEAAYYEKHVAFLKSEKIRVTVPALLRLTPRSTQTP

SEQ ID NO: 1016811 - protein, 318 aa, Homo sapiens; identical to SEQ ID NO: 1016810

SEQ ID NO: 1016812 - protein, 275 aa, Homo sapiens
ALANVIIMLCMTVWALYLIFRNKKEITQHLLNFAEHSLAFFSLFNAAFALVWHWLASAYFIVLFFFSLFDPGNSLKFMMGATVRSLAIIGIAAFVSGMFSRWLAKTITLSPHTQRNYPELQKRLNGWLSAALKTARILTVCVAVMLLLSAWGLFDFWNWLQNGAGQKTVDILIRIALILFFSAVGWTVLASLIENRLASDIHGRPLPSARTRTLLTLFRNALAVIISTITIMIVLSEIGVNIAPLLAGAGALGLAISFGSQTLVKDIITGVFIQF

SEQ ID NO: 1016813 - protein, 103 aa, Homo sapiens
TSTHLLRFWQQPLPAPGHRTTTCLETSSCIRLLITGRRPVSQPVWTPDRPVTLCSPLALCELLPVSWLSVQSPEWGGRYGGPPPPICEPSLPCPWPLDPGKGF

SEQ ID NO: 1016814 - protein, 137 aa, Homo sapiens
PFRKAGLLVGLLTRTQQRERFPKPTENCICPQLRPLQAISTKGPCPTNPQPPSGRGVFSHSEERREPRKGTGRKKKKSKACAIVITGFVLPRLPSPNPFKTSDLQSLKKPGPVARSKEARLGGKEAKPLGALPFQAL

SEQ ID NO: 1016815 - protein, 92 aa, Homo sapiens
FRGPSLQSRKNEDLKYEAMAKHLKFIARTVMVQEGNVEGAYRTLNRILTTDGLTEVISRRRYYEKPCRRRQRKSYETCRRSTTWKWLERLTS

SEQ ID NO: 1016816 - protein, 89 aa, Homo sapiens
  misc_feature (3)..(3): Xaa can be any naturally occurring amino acid
FRXEPREATPLHRCLIAAASPRDEIFLTPNLSLPLWEWRPDWLEDMEVSHTQRLGRGMPPWPPDSQISSQRSQLHCRMPKAGASPVDYS

SEQ ID NO: 1016817 - protein, 89 aa, Homo sapiens; identical to SEQ ID NO: 1016816
  misc_feature (3)..(3): Xaa can be any naturally occurring amino acid

SEQ ID NO: 1016818 - protein, 137 aa, Homo sapiens
TRIIDVVYNAIQPTEFVPHPRPLVKNCIVLYLTSTPYRQWYRVPLMHFPWARKKGAKLTPEEEEILNKKRSKKIQKKYDERKKNAKISSLLEEQFQQGKLLACIASRPGQCGRADGYVLEGKELEFYLRKIKARKGK

SEQ ID NO: 1016819 - protein, 184 aa, Homo sapiens
GAPEHLLASSRPEPANERKMADNFSLHDALSGSGNPNPQGWPGAWGNQPAGAGGYPGASYPGAYPGQAPPGLILDRHLQAPTLEHLELIPEHLHLESTQGHPAALGGLPNLLGTAKVPPEPTLPTGPYGGPVGPLICALYNLPLAGESGGLECVITNSGAAVKPHVQQNCFRFPKEGIDVGLPL

SEQ ID NO: 1016820 - protein, 135 aa, Homo sapiens
  misc_feature (40)..(40): Xaa can be any naturally occurring amino acid
SPLPQPWGPPILRLGKAHPEVLLPSWWYQLPAVSTLPSPXVAMGPCPLSRLSRGRQVLGIPSLQAEAGQLPSSAHRDTWHLLLMKKCTRHKCVHFPWDHRPSSALLKTKHKGLEEWTFPGPWHLPLSQLHCYLFM

SEQ ID NO: 1016821 - protein, 102 aa, Homo sapiens
KSEMGVKLEVFRMSLYLTFPVVMFWISNQAEWFEDYVVQRKRELWPREKEGQRQELEEFKQKIRKQKEERLLQSCQKAPETFSFLKSQGPFPNTENNTHSTL

SEQ ID NO: 1016822 - protein, 157 aa, Homo sapiens
MSLLTSCRWTMLDVKGKRVVHESRLQCSYDKNNQITNNQRIKAAVPSIKFCLDNGAKSVVLMSHLGRPDGVPNALTSSSLEPVSVELTSLLGQGMFCLFEVTVLRPMEVDNSCANPAAGSIHTCWRPPFHVEEEGGKGLLEQVKPPQNGASGSLPAR

SEQ ID NO: 1016823 - protein, 81 aa, Homo sapiens
  misc_feature (4)..(4): Xaa can be any naturally occurring amino acid
SGIXPVCLYPEFAGQRSLPSVLPLSHEHMVITGPASENVDNLGFFIYRLCHDKETYKLQRRETIRGIQKREASNCFTIRHI

SEQ ID NO: 1016824 - protein, 153 aa, Homo sapiens
DLPLLTKMNSLVSWQLLLFLCATHFGEPLEKVASVGNSRPTGQQLEFPCLLAPGEQSLPCTERKPAATARLSPPGNFVVPTPRELREPPAAGPVRPPQPPEFPHPRARCWCSGRRTCRTTTGTSSACASASGRRPQGTTAEALGGAEGAGAGQ

SEQ ID NO: 1016825 - protein, 75 aa, Homo sapiens
DEADDISDENQEKVNDQAKLIVGIVVGLLLAALVAGVVYWLYMKKSKTASKHVNKDLGNMEENKKLEENNHKTEA

SEQ ID NO: 1016826 - protein, 129 aa, Homo sapiens
MASGRWASPGPAWASRRPLQAQVVLKSASPGPVPASQQASSFGSAPAQLPPAFVDPELSPAKLLSPTSCLPVACTGPGLAGEQPLQAPLLPPRGVSRPSSGLTAASRDQVPACLPAACVRPSSSVTVAC

SEQ ID NO: 1016827 - protein, 304 aa, Homo sapiens
TGVDESGPSSLFVVSTCTQYLMTKGFTNILYRRCTIDDTLKKQLEKDFKSMEEVLPVIRIIAHTQMRLRSIYSQKKAHLMEIHGEWRHCVPEKLDWARERLEQQVPVNQVFGQDEMIDVIGVTKGKGYKGVTSRWHTKKLPRKTHRGLRKVACIGAWHPARVAFSVASSWDRQATITEQRLTSKIYKIGQGYLIKDGKLIKNNASTDYDLSDKSINPLGGFVHYGEVTNDFIMLKGCVVGTKKRVLTLRKSLLVQTKRRALEKIDLKFIDTTSKFGHGRFQTMEEKKAFMGPLKKDRIAKEEGA

SEQ ID NO: 1016828 - protein, 84 aa, Homo sapiens
GRISASEGDSRRSRLLVREFEAMQAWYSKLGEEWRSRRPEVALSSKTSVVEIERLGMEASSQKRNIGIFSFEADRIPELYSSGI

SEQ ID NO: 1016829 - protein, 212 aa, Homo sapiens
MAREITTELLCKGKERTDGRSGNTDTGLNEFQNSRVLNLVDSQSGERKRTSKKPTRSNMQRSTNAEGPPQDKKTAGPQHAKILNQISQEDGVVSSEGEPPFKDPCKEDQKRNQQKTPWKSEMVAVTSEGPPEPPRKKRAGADPTWMKVTEASHTIEMEGQRDEDLTTADQGSRGTGTQATQPEQPDQPSQDNSTRQPEAVANCSNAAKMCNS

SEQ ID NO: 1016830 - protein, 234 aa, Homo sapiens
MSFSISHFTLLNLIPEDLYRLSWLREITTELLCKGKERTDGRSGNTDTGLNEFQNSRVLNLVDSQSGERKRTSKKPTRSNMQRSTNAEGPPQDKKTAGPQHAKILNQISQEDGVVSSEGEPPFKDPCKEDQKRNQQKTPWKSEMVAVTSEGPPEPPRKKRAGADPTWMKVTEASHTIEMEGQRDEDLTTADQGSRGTGTQATQPEQPDQPSQDNSTRQPEAVANCSNAAKMCNS

SEQ ID NO: 1016831 - protein, 138 aa, Homo sapiens
RCGSEAPVFLLVLPQARTPDGIQLRVKSGRCICLRMPPKKQAQAGASKKAEQTKRREKIIEDKTSGGKNQRKEQTQQKVSSGPAHPFHVTIGVQTNFHVRRHQEVTACTTQIRKRADKKGKGLQGAKVRWYKLCSCWL

SEQ ID NO: 1016832 - protein, 87 aa, Homo sapiens
TDVLLSVTGEQYGRPISGQKEVHGMAQPSQNNYWKAMEGIFMKPSELLRAEVPSCRAVTLNTLSHCRHTVFVDICCCFTAGSLLQVL

SEQ ID NO: 1016833 - protein, 231 aa, Homo sapiens
MCHSRSCHPTMTILQAPTPAPSTIPGPRRASGPEIFTFDPLPEPAAAPAGAPASSRGHRKRSRRVLYPRVVRRQHDQSRNRTQPKGFSFCVLTIVFCQILMAEEGVPAPFASRGSAPKRRIPWVHPPRVVPASFEALKSLDLRSPRSTLVDLSTFLQQHPGRLSNCDSPRISPKKNPKNHKETPGVPGARERIPKWDFRGNVNSEHYSRRRHPVLEAGPRRTETEAHRDRG

SEQ ID NO: 1016834 - protein, 133 aa, Homo sapiens
  misc_feature (4)..(4): Xaa can be any naturally occurring amino acid
  misc_feature (9)..(9): Xaa can be any naturally occurring amino acid
  misc_feature (33)..(33): Xaa can be any naturally occurring amino acid
SARXGYFMXEKLAFIPAAATNGFLGEAWRLQCXCVDSAYEVIKLKGYTNWAIGLSVADLIESMLKNLSRIHPVSTMVKGMYGIENEVFLSLPCILNARGLTSVINQKLKDDEVAQLRKSADTLWDIQKDLKDL

SEQ ID NO: 1016835 - protein, 50 aa, Homo sapiens
MLHGQLNHTPFTPRSRAFYRCSDTVGGYVVCLAYWVTGVNSLCWARHLLY

SEQ ID NO: 1016836 - protein, 220 aa, Homo sapiens
  misc_feature (12)..(12): Xaa can be any naturally occurring amino acid
  misc_feature (29)..(30): Xaa can be any naturally occurring amino acid
  misc_feature (32)..(32): Xaa can be any naturally occurring amino acid
  misc_feature (42)..(43): Xaa can be any naturally occurring amino acid
  misc_feature (47)..(48): Xaa can be any naturally occurring amino acid
  misc_feature (51)..(51): Xaa can be any naturally occurring amino acid
  misc_feature (53)..(53): Xaa can be any naturally occurring amino acid
  misc_feature (59)..(59): Xaa can be any naturally occurring amino acid
  misc_feature (63)..(63): Xaa can be any naturally occurring amino acid
  misc_feature (81)..(81): Xaa can be any naturally occurring amino acid
  misc_feature (95)..(95): Xaa can be any naturally occurring amino acid
  misc_feature (111)..(111): Xaa can be any naturally occurring amino acid
  misc_feature (113)..(113): Xaa can be any naturally occurring amino acid
  misc_feature (124)..(125): Xaa can be any naturally occurring amino acid
  misc_feature (131)..(131): Xaa can be any naturally occurring amino acid
  misc_feature (140)..(140): Xaa can be any naturally occurring amino acid
  misc_feature (143)..(143): Xaa can be any naturally occurring amino acid
  misc_feature (146)..(146): Xaa can be any naturally occurring amino acid
  misc_feature (160)..(160): Xaa can be any naturally occurring amino acid
  misc_feature (162)..(163): Xaa can be any naturally occurring amino acid
  misc_feature (166)..(166): Xaa can be any naturally occurring amino acid
  misc_feature (171)..(171): Xaa can be any naturally occurring amino acid
  misc_feature (177)..(177): Xaa can be any naturally occurring amino acid
PPPRRRHDGLAXSTPGSRAFWAARCRGIXXPXLYWAPLAVVXXLKEXXPFXGXNWGIGXAISXSVVGAAWGIYITGSSIIXWRSEGPPGFKTQEXWSCIILSVRAVAILRXSXIGNLSLGNIGXXLSCATXPQGPFGPFXTTXAGXSMFGAGLTRKACLXLXXVKXLRWAXGGHVGXAPGRCSEPQPLVKDLIVEIFGSAIGLFGVIVAILQTSRVKMGD

SEQ ID NO: 1016837 - protein, 167 aa, Homo sapiens
AGAFDHPLFQGLVEFAQGLFGFAQGRDVPGHAEDFFRQAVTAHDRADVHVPPFQVAGQGVGGADKAGVATGLGGIHGGLGVEIALVLPEVGPRTAANRIEVADFHDLLAAFAHEGQAGVQVQHLDAVIDAGKHALSEGFTVSEARGGQITLARFRWAICIGALPDSA

SEQ ID NO: 1016838 - protein, 257 aa, Homo sapiens
  misc_feature (13)..(13): Xaa can be any naturally occurring amino acid
PADFAVAPLPQRXRRASSFLDKMATLKEKLIASVADDEAAVPNNKITVVGVGQVGMACAISILGKSLADELALVDVLEDKLKGEMMDLQHGSLFLQTPKIVADKDYSVTANSKIVVVTAGVRQQEGESRLNLVQRNVNVFKFIIPQIVKYSPDCTIIVVSNPVDILTYVTWKLSGLPKHRVIGSGCNLDSARFRYLMAEKLGIHPSSCHGWILGEHGDSSVAVWSGVNVAGVSLQELNPEMGTDNDSENWKEVHKMV

SEQ ID NO: 1016839 - protein, 137 aa, Homo sapiens
MAAMSLLRRVSVTAVAALSGRPLGTRLGFGGFLTRGFPKAAAPVRHSGDHGKRLFVIRPSRFYDRAFLGSSWRFYIGIDWGFHVAIFHNSGECIHVVKAELAEIPEGYVPEHWEYYKHPHINDGFARNFYDSPEKII

SEQ ID NO: 1016840 - protein, 442 aa, Homo sapiens
RIIVAIMETNPSILEVKRGRKVQPELDSGLQHPGVVPSDHEEPRPAGPTADSAQSMQGTLVQLSWGRQRPGLPKGQRVVERRGRKGSPRARGPQRMRVVAGPSISADLPGAQSFPALSQAGHERYTSVQQDGLESLSVQRCGVSPAVASLWWSLFPRAALLGRKEENRSLQGCCCLSHPHKYAGAVSPMLSRSCWLTGSQTLTSDMVVGEGRVGKAGAFPSSPYAARAIAQPDVVTSVQLWGLQAMWLFPRPSPRCSNPWGLLTTYGGRAGASGASTPTSGPGDDRCVALSPWAGWMPQAPLAPRCCFSTGAAWPGLLKATPSPRTSQARIQTSGTLFSSGCVSLRNRGSSPRVHVAGGRGPGKTHSRAGGGLRFSGSAPQAQRCHPAGPRACPNPQHSRVGPDPITKTGHPLRVWCARVCVRACVRACTCGPTSAAFHARM

SEQ ID NO: 1016841 - protein, 442 aa, Homo sapiens; identical to SEQ ID NO: 1016840

SEQ ID NO: 1016842 - protein, 312 aa, Homo sapiens
FSLAEVRVGYQSQNISCFFRLVDRDSVWGYDLGLRSLIPAVLTVSMLGYPFILPDMVGGNAVPQRTAGGDVPERELYIRWLEVAAFMPAMQFSIPPWRYDAEVVAIAQKFAALRASLVAPLLLELAGEVTDTGDPIVRPLWWIAPGDETAHRIDSQFLIGDTLLVAPVLEPGKQERDVYLPAGKWRSYKGELFDKTPVLLTDYPVDLDEIAYFTWAPDPAQGPVTAKPPVFMQTLNPPSHPHHVLPGTSTSIPPIKWLLTSMCWNQLLKVGPREGALKQSPAPTHNPYCALSTPTLTPICRNLFPGAGSQRA

SEQ ID NO: 1016843 - protein, 188 aa, Homo sapiens
  misc_feature (18)..(19): Xaa can be any naturally occurring amino acid
  misc_feature (157)..(157): Xaa can be any naturally occurring amino acid
DPDTTFNSRALTQGPGGXXEAPSLDHLWTAAAEVNKNKNSIVDPKVIVEIHVVARMWPSRQTAVITNNGFNPRWDTEFEFVVAVPDLALVRFMVEDYDSSSKNDFIGQSTIPWNSLKQGVPPIVPPLGLRMETCIHQPLSFVKISIQGLSLGGLTQXPLSGRKLVVHNCLGNVAPLARSLRPLNCLQL

SEQ ID NO: 1016844 - protein, 177 aa, Homo sapiens
MVSDEYEQLSSEALEAARICANKYMVKSCGKDGFHIRVRLHPFHVIRINKMLSCAGADRLQTGMRGAFGKPQGTVARVHIGQVIMSIRTKLQNKEHVIEALRRAKFKFPGRQKIHISKKWGFTKFNADEFEDMVAEKRLIPDGCGVKYIPNRVLWTSGEPCIPEGFNSSPIPYQIVQ

SEQ ID NO: 1016845 - protein, 78 aa, Homo sapiens
IQFVQTPRGSPFLNGCPLSKASPVTEHLVVQARATVLPKSIIPDLCQASVVMHKEKGTAHYLQQRVREKQLEKGASTS

SEQ ID NO: 1016846 - protein, 503 aa, Homo sapiens
ADQFLPGREDLAAGSLLQQLYLEGLHALCHPDAAWVPEVLLPAVVCPPVCLMMGVALDGKMRWWGVLPLAPDALCVLCAMVTCAVPVCAVPLCCADTDTVLCDNGWGCAYPAAAGLRDDSASPPWLPVQLTAEPGLTQELAWVLQCVTCVVVRGQVERQALLVSSPAMGCKSFFKRSIRRNLSYTCRSNRDCQIDQHHRNQCQYCRLKKCFRVGMRKEAVQRGRIPHSLPGAVAASSGSPPGSALAAVASGGDLFPGQPVSELIAQLLRAEPYPAAAGRFGAGGGAAGAVLGIDNVCELAARLLFSTVEWARHALLPRAAGGRPGGAAAPELERALRAERGAGGLTPAHWRRYWPPPASTPRHMAAERAVAFMDQGARLPGARCYKLGRLQVDSGEYGCSRHRATSQPEGLLDFSRTGPTFESLQETAQVAITIRAGQNRQASARGMQVEPRPEGRVQLPGTQGGGEPGNKTGKENRQVEDQGGREGNQRGRRKHAPKKTVEK

SEQ ID NO: 1016847 - protein, 353 aa, Homo sapiens [sequence omitted]

SEQ ID NO: 1016848 - protein, 231 aa, Homo sapiens
  misc_feature (6)..(6): Xaa can be any naturally occurring amino acid
FRAARXCCGSRMMETERLVLPPPDPLDLPLRPWSSDARGTGSCLNLPGAPESSLPHGLPPCCPKSAARMHEQLFLVIPSLADSAWCGALSPENGRVKTVIPVSLFGCPGDAPVPSDTTCAQMTPNHMCQILVLQRGLAWRTQISRAYNLLVSSPVPPVASLPVLMGKSNSCIPSGQWGMDEHHHNMICNTREEAEEEIDYRQRSFLLFHLGFKKGMDFAPKDCPNSSSLDY

SEQ ID NO: 1016849 - protein, 148 aa, Homo sapiens
  misc_feature (133)..(133): Xaa can be any naturally occurring amino acid
SSLPIFIFYKTSYKYFFLLPPPQGKTTQHSRTPICEREVGWSDSKLLHKGGFSVHISFWPGNGTGVCWEGHPAPACCVRCFCSRLQEKVFFPPYHAGQGYWSSWDSMCDFHQDSGNLLELRLHRIKLREGYVXHMWAALCGPCLPDPK

SEQ ID NO: 1016850 - protein, 67 aa, Homo sapiens
MTSALGQPLKEADQIVQTPEVAVLTVALCPRQPVTEHLVVRQGHCLAEVNHPDLGQAVWSCTKRREL

SEQ ID NO: 1016851 - protein, 97 aa, Homo sapiens
LQDSARGNLRDFLLVYNRMTELCFQRCVPSLHHRALDAEEEACLHSCAGKLIHSNHRLMAAYVHLMPALVQRRIADYEAASAAPAVKKNCCEPRGRR

SEQ ID NO: 1016852 - protein, 98 aa, Homo sapiens
LQDSARGNLRDFLLVYNRMTELCFQRCVPSLHHRALDAEEEACLHSCAGKLIHSNHRLMAAYVHLMPALVQRRIADYEAASAAPGIPAEQTRDSPSGS

SEQ ID NO: 1016853 - protein, 70 aa, Homo sapiens
EDTTMFYSKILGMEVTTFKGNRKALCFGDQKFNLHEVGKEFDPKAAHPVPGSPGCLFDHRSTPGGGDRGA

SEQ ID NO: 1016854 - protein, 83 aa, Homo sapiens
IMDTSRVQPIKLARVTKVLGRTGSQGQCTQVELEFMDDTSRSIIRNVKGPVREGDVLTLFGVRKRSSKVALILQLVGFWISTT

SEQ ID NO: 1016855 - protein, 38 aa, Homo sapiens
MIIVDPAAPIQPCSLTPEKHLLKTSTKTPSASVYYSTE

SEQ ID NO: 1016856 - protein, 97 aa, Homo sapiens
RFRHPYHLTSMSQAEFDKAAEEVKRLKTQPTDEEMLFIYSHFKQATVGDVNTDRPGLLDLKGKAKWDSWNKLKGTSKESAMKTYVEKVDELKKKYGI

SEQ ID NO: 1016857 - protein, 77 aa, Homo sapiens
HWDQNERYLVVLNFRDSGRSARLGAPTSLLAKLPASAKLLLSTDSARKAVEEDTSLKLENLSLNPYEGLLLQFPFVA

SEQ ID NO: 1016858 - protein, 135 aa, Homo sapiens
MLERVQPLVSFTKPPHLFLLRPSLKSSLLYLVKWDALFPIQLKQKLLTMRRMRMHLCICSAWLIPSKISHYSCLAVSFSSFASKSTVVALITDLFTLLIPAISPISVLRKFCSQNYLLNPHLEIEIVLCGHFFPL

SEQ ID NO: 1016859 - protein, 192 aa, Homo sapiens
MADDAGAAGGPGGPGGPGLGGRGGFRGGFGSGLRGRGRGRGRGRGRGRGARGGKAEDKEWIPVTKLGRLVKDMKIKSLEEIYLFSLPIKESEIIDFFLGASLKDEVLKIMPVQKQTRAGQRTRFKAFVAIGDYNGHVGLGVKCSKEVATAIRGAIILAKLSIVPVRRGYWGNKIGKPHTVPCKVTGRCGSVL

SEQ ID NO: 1016860 - protein, 95 aa, Homo sapiens
MRVSSGERWIKGDKSELNDIKDNQRSPVRVKERQITDHRNVSQSPNRKPDKEKKLSHNSNSKERDIRGHSDKDDRFITTVRKGQFYSGVEQGSHG

SEQ ID NO: 1016861 - protein, 125 aa, Homo sapiens
PQVQLGAHQDDEEDYDRLRPLSYPQTDVFLICFSLVIPASYENVRAKWFPEVRHHCPSTPIILLVPTKLDLRDDKDTIEKLKEKKLGSITLPSGPWHLAKKIDSVELPGVLSSHPMMRSCKPVFD

SEQ ID NO: 1016862 - protein, 208 aa, Homo sapiens
LNCFVSVQFYSIYTHPICWVVISFYASLQLFFFFTQYFTNLFEILSGIDKSTSLSVPTTNTSVSYTAMQATSALDLASSLHMDSRADMRNVTTILSPRLLIFNGEGGIALVAMIPLKSQHFGMLTWEGCLRPRVRHQLGNESEIPFSTKNLKSIQVWYTPVVPATQEPEARGSLEPEEFDAAVTYDHTTALQLGRQNKTPSRPQLIPL

SEQ ID NO: 1016863 - protein, 150 aa, Homo sapiens
AEQAQLGMAMVKRFFESYHEVPDGTQCHRKTYITTALGGICGIIGSAYSVSLNPADSTLEAVARVGRYTFTAAAIGAMFGLTTCVSAQVREKPDDPLNYFHWWLRGRPDIGSSHSQLWDSTMGCVYMGTAAALFKIGKLEGWELFPTPKV

SEQ ID NO: 1016864 - protein, 194 aa, Homo sapiens
  misc_feature (75)..(75): Xaa can be any naturally occurring amino acid
  misc_feature (129)..(129): Xaa can be any naturally occurring amino acid
  misc_feature (156)..(156): Xaa can be any naturally occurring amino acid
  misc_feature (182)..(182): Xaa can be any naturally occurring amino acid
FPHKRPHFLYPKSRLVRSLMSPSHYGPPSFHNMFQPFFEMIHQAQQAMDVQLHSPAFQFPDVDFLREGEDDRTVXMEIRRNSTGCPEDEGPVLKSAKEILSVDCSTNNPAQANLRQELERLAPGGRDVXQEQYKELLQSFQSKMLNTSSLLEQLNXQFNWVFQLANLTQGEDKYYLRVSTVXTIPLTQRSLPCY

SEQ ID NO: 1016865 - protein, 59 aa, Homo sapiens
  misc_feature (2)..(2): Xaa can be any naturally occurring amino acid
  misc_feature (19)..(20): Xaa can be any naturally occurring amino acid
MXDRVLGLLTPARWWPRLXXEQGLRRQKSSFTVDCSKAGNNMLLVGVHGPRTPCEEEKQ

SEQ ID NO: 1016866 - protein, 204 aa, Homo sapiens
RAALPSTHFSLPDSAVATNALSQPSESVPKPNQKGGEQTRLQPATENREAARLGERGPEAIRANTGQCRRKLSPLPARPRPPCFRRRNPRRYGTPPGSNCAARLLPEARPPPRPNPRAATHSGEQGAARVSTAPPKAPAFLKPKSTPGTWNQQLRTDSGKTTKDQADGAHQASRPPPRAGPNGDRVDRTATRGLVNTAGGVAAH

SEQ ID NO: 1016867 - protein, 230 aa, Homo sapiens
MCTGGCARCLGGTLIPLAFFGFLANILLFFPGGKVIDDNDHLSQEIWFFGGILGSGVLMIFPALVFLGLKNNDCCGCCGNEGCGKRFAMFTSTIFAVVGFLGAGYSFIISAISINKGPKCLMANSTWGYPFHDGDYLNDEALWNKCREPLNVVPWNLTLFSILLVVGGIQMVLCAIQVVNGLLGTLCGDCQCCGCCGGRWTRLNLRDELLRLYSMTTTISFLKPSLFLGL

SEQ ID NO: 1016868 - protein, 212 aa, Homo sapiens
MCTGGCARCLGGTLIPLAFFGFLANILLFFPGGILGSGVLMIFPALVFLGLKNNDCCGCCGNEGCGKRFAMFTSTIFAVVGFLGAGYSFIISAISINKGPKCLMANSTWGYPFHDGDYLNDEALWNKCREPLNVVPWNLTLFSILLVVGGIQMVLCAIQVVNGLLGTLCGDCQCCGCCGGRWTRLNLRDELLRLYSMTTTISFLKPSLFLGL

SEQ ID NO: 1016869 - protein, 170 aa, Homo sapiens
MSTNQEERPQEKPTLPWRLDLAFPASRTMFTSTIFAVVGFLGAGYSFIISAISINKGPKCLMANSTWGYPFHDGDYLNDEALWNKCREPLNVVPWNLTLFSILLVVGGIQMVLCAIQVVNGLLGTLCGDCQCCGCCGGRWTRLNLRDELLRLYSMTTTISFLKPSLFLGL

SEQ ID NO: 1016870 - protein, 160 aa, Homo sapiens
MVLPFHASSLRNEATPPHNLEEEAWNGRRQQALSLERWPLWTSHPLRTPPLMPVAVARRCILPGLWPLLCPPSCSVSPVSERPRCLLVWLNIFYEDHFPVHQGDTSWKSGVMTVSLSKPVSAGLVTVLVTLELLSSIRVSAREASSVSMFHLMRGVDLLE

SEQ ID NO: 1016871 - protein, 256 aa, Homo sapiens
QPSCLEPEKGRRDRRNRRQWSQWPLRGASRTGGSPGAAAWRTRQRRKAGEWPRCWQQVLAVDARYNAYRTPTFPQFRTQYIRRRKQLAAGECQGWAPPSACVGSTLRLSGGSCFGQRYGPLFRARAVFVPISNSIVSAVTALTLERIEDFEDEFLRALGGPWAPSFCQGEGPNRCRRRLNRGVYEDRAPFSVVATSAAEGKSGHGRGTRLLSENYGFAGMYHVFEQHVDEAVPRGALRNDDRHGWAVVTRREIFLC

SEQ ID NO: 1016872 - protein, 356 aa, Homo sapiens
KSDQSKARGIKVEKQIFGEATKQPGIVFVAAKFEGTMALGYHHISVNNVLPVFDNLMQQKLVDKNIFSFYLNRDPEGQPGGELMLGGTDSKYYHGELSYLNVTRKAYWQVHMDQLEVGNELTLCKGGCEAIVDTGTSLLVGPVEEVKELQKAIGAVPLIQGEYMIPCEKVSSLPTVYLKLGGKNYELHPDKYILKVSQGGKTICLSGFMGMDIPPPSGPLWILGDVFIGSYYTVFDRDNNRVGFAMLSYSNLLLLHCQGTGSESSRGSQAAPSSTAPLTHSHTRYVAGPWGETWLELVQLFCSVVPHPGFRLLPSACLKEAKATQYTRLPSKAPTGLIAAEMDCLVLPAFAVWAVL

SEQ ID NO: 1016873 - protein, 167 aa, Homo sapiens
HTVRSPQGALVDGSLCISQSFRHNLHQMRNSSGVWLINYFKFRVKVFSFLEDLISLDQDLGSYGSVDIYMCDLKYLAFQPSSGHLHFNHAACSVSIPLLLSVPAELGFSWVILHVALVLPIPVSTIPLCLRPRFLNFWYEFYGHLAGALVGMRKPMALVLNKTQKLK

SEQ ID NO: 1016874 - protein, 200 aa, Homo sapiens
MEARDKQVLRSLRLELGAEVLVEGLVLQYLYQEGILTENHIQEIKAQTTGLRKTMLLLDILPSRGPKAFDTFLDSLQEFPWVREKLGEGERGKSQPSCLQGDWMAGIPSHILSSSPSDQQINQLAQKLGPEWEPVVLSLGLSQTDIYRCKANHPHNVHSQVVEAFVRWRQRFGKQATFLSLHKGLQAVEADPSLLQHMLE

SEQ ID NO: 1016875 - protein, 134 aa, Homo sapiens
RGSRGGAGRRGRATSCPAREQLQRQRQHPAAAPAVPVRCFTFCFTDIVIMPKRKSPENTEGKDGSKVTKQEPTRRSARLSAKPAPPKPEPKPRKTSAKKEPGAKISRGAKGKKEEKQEAGKEGTAPSENGETKS

SEQ ID NO: 1016876 - protein, 136 aa, Homo sapiens
RGSRGGAGRRGRATSCPAREQLQRQRQHPAAAPAVPVRCFTFCFTDIVIMPKRKSPENTEGKDGSKVTKQEPTRRSARLSAKPAPPKPEPKPRKTSAKKEPGAKISRGAKGKKEEKQEAGKEGEAQKTESVDNEGE

SEQ ID NO: 1016877 - protein, 120 aa, Homo sapiens
RGSRGGAGRRGRATSCPAREQLQRQRQHPAAAPAVPVRCFTFCFTDIVIMPKRKSPENTEGKDGSKVTKQEPTRRSARLSAKPAPPKPEPKPRKTSAKVILCISWGQLLKAIFTKYLCKC

SEQ ID NO: 1016878 - protein, 134 aa, Homo sapiens; identical to SEQ ID NO: 1016875

SEQ ID NO: 1016879 - protein, 260 aa, Homo sapiens
EALGTRPCSAGKMGKVRGLRARVHQAAVRPKGEAAPGPGPLPRRRPLRRLGRGKDWAFINTNIFARTKIDPSALVQKLELDVRSVTSVRRGAEAKTVLPKKEKMKLRREQWLQKIEAIKLAEQKHREERRRRATVVVGDLHPLRDALPELLGLEAGSRRQARSEEERTRFQELLASPAYRASPLVAIGQTLARQMQLEDGGSSDQGSGHATNPQDTCGPSRERRPLKDHGLSLVDALPSGQVVGLNKWLCELPLHCQGRS

SEQ ID NO: 1016880 - protein, 283 aa, Homo sapiens
EALGTRPCSAGKMGKVRGLRARVHQAAVRPKGEAAPGPGPLPRRRPLRRLGRGKDWAFINTNIFARTKIDPSALVQKLELDVRSVTSVRRGAEAKTVLPKKEKMKLRREQWLQKIEAIKLAEQKHREERRRRATVVVGDLHPLRDALPELLGLEAGSRRQARSRESNKPRPSELSRMSAAQRQQLLEEERTRFQELLASPAYRASPLVAIGQTLARQMQLEDGGSSDQGSGHATNPQDTCGPSRERRPLKDHGLSLVDALPSGQVVGLNKWLCELPLHCQGRS

SEQ ID NO: 1016881 - protein, 230 aa, Homo sapiens
MGKVRGLRARVHQAAVRPKGEAAPGPAPPAPEATPPPASAAGKDWAFINTNIFARTKIDPSALVQKLELDVRSVTSVRRGEAGSSARSVPSIRRGAEAKTVLPKKEKMKLRREQWLQKIEAIKLAEQKHREERRRRATVVVGDLHPLRDALPELLGLEAGSRRQARSRESNKPRPSELSRMSAAQRQQLLEEERTRFQELLASPAYRASPLVAIGQTLARQMQLEDGGQL

SEQ ID NO: 1016882 - protein, 92 aa, Homo sapiens
NHGCKGGLPSQAFEYILYNKGIMEEDSYPYIGKDSSCRFNPQKAVAFVKNVVNITLNDEAAMVEAVALYNPVSFAFEVTEDFLMYKSGVYSK

SEQ ID NO: 1016883 - protein, 140 aa, Homo sapiens
DGVVLPKDPKEILAEKNFNTVPYIVGINKQECGWLLPTMTGFLPADVKLDKKKAIALLEQFASMTGIPEDIIPVAVEKYTKGSDDPDQIREGVLDAMGDVAFGVPSVIVSRGHRDTGAPTYMYEYQYYPSFSITPKDPRM

SEQ ID NO: 1016884 - protein, 102 aa, Homo sapiens
MSHKIRQSRPSSPAALSTYRSLMTSHSLLDTTETPYLMKSIDCIRAFREEAIKFSEEQRFNNFLKPFKEKVEIKQLNHSQGNCCSRMELPLITKGGGLWSSF

SEQ ID NO: 1016885 - protein, 76 aa, Homo sapiens
TRAPTRQWRRTALASLPGRGTRRERAGRSRLRPGDPVLSSVISLSTTSVEHVHQGPDDVYRRKASERQYQRRLEDE

SEQ ID NO: 1016886 - protein, 84 aa, Homo sapiens
TDPSTPGFPAHAPREMLWSFLATSTGFPTKFLFPAQNRSPLAFLLLRSVFRARTHTRLCSGSGGGRPSSRGPCRRGASWARVVF

SEQ ID NO: 1016887 - protein, 120 aa, Homo sapiens
LVRLPDSGGGRRSLVSQVAVHGENGRGGLGCVRAIQCLVPSYPSPRPRSSMFTRAQVRRILQRVPGKQRFGIYRFLPFFFVLGGTMEWIMIKVRVGQETFYDVYRRKASERQYQRRLEDE

SEQ ID NO: 1016888 - protein, 87 aa, Homo sapiens
LVRLPDSGGGRRSLVSQVAVHGENGRGGLGCVRAIQCLVPSYPSPRPRSSMFTRAQMMSTVEKPQKDSIREGWKMNETELQQSIKSI

SEQ ID NO: 1016889 - protein, 98 aa, Homo sapiens
  misc_feature (21)..(21): Xaa can be any naturally occurring amino acid
LVYIDFRDEDGLLRQSREAAXMGFTGKQVIHPNQIAVVQEQFTPPQEKIQWAEELIAAFKEHQQLGKGAFTFRGSMIDMPLLKQAQNIVTLATSIKEK

SEQ ID NO: 1016890 - protein, 82 aa, Homo sapiens
EDKVAVKGSRKERKKEVVEEEENGAEEEEEETAEDGEEEDEGEEEDEEEEEEDDEGPALKRAAEEEDEADPKRQKTENGASA

SEQ ID NO: 1016891 - protein, 123 aa, Homo sapiens
MGKEKTHINIVVIGHVDSGKSTTTINLIYKCGGIDKRTIEMFEKEAAEMGKGSFKYAWVLDKLKAERERGITIDISLWKFETSKYYVTIIDAPGHRDFIKNMITGTFQACWAVLIVGGGVGEI

SEQ ID NO: 1016892 - protein, 69 aa, Homo sapiens
SPKLLHKFNDVVWHVSWSITANILAVSGGDNKVTLWKESVDGQWVCISDVNKGQGSVSASITEGQQNEQ

SEQ ID NO: 1016893 - protein, 87 aa, Homo sapiens
ITPLNLTQWLMVLKISLPVILMDETLKFVARNYLEQPGKECVQPATKSSCSLSACTDGISWPFVLLIMPLVVWVYSTDTNFSDMFWS

SEQ ID NO: 1016894 - protein, 208 aa, Homo sapiens
MLSSQPFHIHAAPTTHLSALANANPPPWPARPTRPTRTSPTPTKGAVAHPNLQHTAHPAETSPYDNPLHPTTAHGHTYPTPDIPYTPAPHNRAHGPCNPHRNQPTPQRNYPSAPRDHNTPPANMAPAPAKPGHNLQNGPDKTWRTALTPPPRATWGHYYAAPTGGPPTPPTGPPPPRTTPPPNPPPTYSTTTPPHTPAQHTPPAPPAP

SEQ ID NO: 1016895 - protein, 208 aa, Homo sapiens; identical to SEQ ID NO: 1016894

SEQ ID NO: 1016896 - protein, 108 aa, Homo sapiens
GSSSGQNGDGTNVRTPGASALATVRASGPQRRRALAMAWETADHTVLFPVAPCCCRQTTSSLRVPGPRSLSTSAISLCRSPGSGPSCWFAAIPSPTAVPEVVLERLQM

SEQ ID NO: 1016897 - protein, 84 aa, Homo sapiens
TGILKDAGVNNLTIQVEKEAYFQHMSGLSTGFHDVLAMTKQMESLKYCKDGTYIMLRRSPAAMNSEQRRSDEVDNVRARVKVAH

SEQ ID NO: 1016898 - protein, 210 aa, Homo sapiens
  misc_feature (180)..(180): Xaa can be any naturally occurring amino acid
  misc_feature (195)..(195): Xaa can be any naturally occurring amino acid
  misc_feature (205)..(205): Xaa can be any naturally occurring amino acid
TDRHECTRSSRDGAMLRVRCLRGGSRGAEAVHYIGSRLGGSLTGWVQRTFQSTQAATASSRNSCAAEDKATHPLPKDCPVSSYNEWDPLEEVIVGRAENACVPPFTVEVKANTYEKYWPFYQKNGGLYFPKDHLKKAVAEVEEMCNILSMEGVTVKRPDPIDWSLKYKTPDFESTGLYSXMPRDHPDGCGETEIXEAPLALRSTXLLSYR

SEQ ID NO: 1016899 - protein, 99 aa, Homo sapiens
SRTRRSTSIVKRWRGVTGHGGDRCVPLTYSWIENQVYFKYEGMWDQGRTAVGQPVVPLEPAIQVDAVIPAPTGSKARLIGLPWPKLGLPKEKLQDSKAW

SEQ ID NO: 1016900 - protein, 142 aa, Homo sapiens
RGMQGGSPLEAVPGLSHIQCHPQPHPSCHRLCLHPAVSSPISASSLIRKPGLDSGPLVLFVFCFLFFVFLRQGLALLPRLECSGVISAHCNLHLPGCSSTASASLVAGIARCPPPLLAGFSVFSGDGVSPRWPGWSRTPDFR

SEQ ID NO: 1016901 - protein, 86 aa, Homo sapiens [sequence omitted]

SEQ ID NO: 1016902 - protein, 299 aa, Homo sapiens
ACFKMAVQESAAQLSMTLKVQEYPTLKVPYETLNKRFRAAQKNIDRGDQPRHHEMVAELEKTVERLSRRWNSVVSLLDMAWWRSSASSRGMCGRNPYQARGRAADQDCARAGSRHLKEHSRRPARGGQSVAEEAHGSHDGGAPDCVADTYKTGMFQAWRMQRRNQRTYSEYRQLLLTEPTRGGGQSLVEAVKDHTVHIGPECHMTTQSRNPDSMKELTWQYKHHKKSRTVHLNIIRHALPIHGNAKWRTMEQQSDNSTKAGKGRPTRNEEERTRTMETRMAQARPDNEAPPQQRTQLGT

SEQ ID NO: 1016903 - protein, 205 aa, Homo sapiens
NIKDWPELGALTLNIVLKVCSKILDEVTTTDELIPSGETSSYRSNPIGLAEFTLSRRDPGYVSRSKATAELENQRLAGNVSELTEVFARIKQIAGQEHIDPLQTEIGSMVYAVKPGDGSAREQAASCQRVIGGLANIAEEYATKRYRSNVINWGMLPLQMAEVPTFEVGDYIYIPGIKAALDNPGTTFKGYVIHEDAPVTEITLY

SEQ ID NO: 1016904 - protein, 54 aa, Homo sapiens
MGSTEALAHAPRKVYDTRDDDRTAGIHGDCDDDKYRRRPCSGLAGPAAQEPGWV

SEQ ID NO: 1016905 - protein, 77 aa, Homo sapiens
MRTYEREALKKKFTRVHDAESSDEDGYDGVRPMTFDLLAGCQLVPPPSPTLGLGLSFPYRTHNLTSLRLVFNKQSIF

SEQ ID NO: 1016906 - protein, 181 aa, Homo sapiens
  misc_feature (180)..(180): Xaa can be any naturally occurring amino acid
KVENGRLKVQQGIIAGCSGGNYENVIAAANALRGQSCGNDTFSLAVYPSSQPVFMDLAKKGVVADLIGAGAIIRTAFCGPCFGAGDTPINNGLSIRHTTRNFPNREGSKPANGQMSAVALMDARSIAATAANGGYLTSASELDCWDNVPEYAFDVTPYKNRVYQGFVKGNSATPDLRADXK

SEQ ID NO: 1016907 - protein, 66 aa, Homo sapiens
  misc_feature (11)..(11): Xaa can be any naturally occurring amino acid
  misc_feature (18)..(18): Xaa can be any naturally occurring amino acid
  misc_feature (28)..(28): Xaa can be any naturally occurring amino acid
  misc_feature (38)..(38): Xaa can be any naturally occurring amino acid
KAFARHRIRLXEKGPGYXKEWSDINLTXVSFLAAIFFXFLYGMSLAVCLLFWCWIPEFFIDKSSYK

SEQ ID NO: 1016908 - protein, 272 aa, Homo sapiens
  misc_feature (252)..(252): Xaa can be any naturally occurring amino acid
  misc_feature (263)..(263): Xaa can be any naturally occurring amino acid
MQALVLLLCIGALLGHSSCQNPASPPEEGSPDPDSTGALVEEEDPFFKVPVNKLAAAVSKFGYDLYRVRSSMSPTTRVCLSHVQASALEATCSCLLSDVATALSALSLGAEQRTESIISPGLSHYDLISSPDIHGTYKELLDTVTDPQKNIKSASRIVFEKKLRIKSSFVAPLDKVIWDQAQSPDGQPSLWTCKRSTHWVQAQMKGKLAASTKEIPMEISILLLGVAHFKGQWVQSLTPKDFLEDFYLDEEXTVRVPMMSGPXAVLRYGLDS

SEQ ID NO: 1016909 - protein, 258 aa, Homo sapiens
  misc_feature (238)..(238): Xaa can be any naturally occurring amino acid
  misc_feature (249)..(249): Xaa can be any naturally occurring amino acid
MQALVLLLCIGALLGHSSCQNPASPPEEGSPDPDSTGALVEEEDPFFKVPVNKLAAAVSKFGYDLYRVRSSMSPTTNVLLSPLRCGHGPLGPLAGSGAANRIHHFTGLSQYDLISSPDIHGTYKELLDTVTDPQKNIKSASRIVFEKKLRIKSSFVAPLDKVIWDQAQSPDGQPSLWTCKRSTHWVQAQMKGKLAASTKEIPMEISILLLGVAHFKGQWVQSLTPKDFLEDFYLDEEXTVRVPMMSGPXAVLRYGLDS

SEQ ID NO: 1016910 - protein, 78 aa, Homo sapiens
  misc_feature (1)..(1): Xaa can be any naturally occurring amino acid
  misc_feature (16)..(16): Xaa can be any naturally occurring amino acid
XQGSNLCLMMQRLSPXNSRMPPDKIPVKYLEFISECIIQVLQRSIPGTLVLMPRAHEQGLELFRKTMASNYKELGFQG

SEQ ID NO: 1016911 - protein, 93 aa, Homo sapiens
  misc_feature (1)..(1): Xaa can be any naturally occurring amino acid
  misc_feature (17)..(17): Xaa can be any naturally occurring amino acid
  misc_feature (37)..(37): Xaa can be any naturally occurring amino acid
XQGSNLCLMDAEIKPLXQSHATRYFTGILCLVACDCXHKIPVKYLEFISECIIQVLQRSIPGTLVLMPGRIEQGLELFRKTMASNYKELGFQG

SEQ ID NO: 1016912 - protein, 138 aa, Homo sapiens
  misc_feature (4)..(4): Xaa can be any naturally occurring amino acid
  misc_feature (17)..(17): Xaa can be any naturally occurring amino acid
  misc_feature (19)..(19): Xaa can be any naturally occurring amino acid
  misc_feature (22)..(22): Xaa can be any naturally occurring amino acid
  misc_feature (28)..(28): Xaa can be any naturally occurring amino acid
  misc_feature (86)..(86): Xaa can be any naturally occurring amino acid
SVPXPAPASPQHAAPPXAXALXGACIMXPSLLVALDICSKNPMPQRWFMRGDFQEVRGDVFPSYTCTCLKGYAGNHCETKCVEPLXMENGNIANSQIAASSVRVTFLGLQHWVPGAGPPDPSQCMVNAWTPSSNDDHP

SEQ ID NO: 1016913 - protein, 241 aa, Homo sapiens
YVRSRCEAWLLGDPSAVTQWMSMARGRKMSKPRAVEAAAAAAAVAATAPGPEMVERDGALGDVPRTDGGELYLPVQSKIYSYMSPEQMLWNAFPPSGRELSYTLRIQMPGGKPISLESTCETEKKKRNAGNCSTDAATEVLRNRRSNDCQERSPVYLFQSKNLKQQNLQKLHPHLVNSTNCSHSPSNALKKPIMVQTVPPKNSSRKNCNRIANLRISTLSEGAPVKSKAELQSEERNRIDE

SEQ ID NO: 1016914 - protein, 175 aa, Homo sapiens
KQAVSASGKWLDGIRKWYYNCCTDSHYTLGLKCENDTIYAGLEMLNRSHNEDFLSNLYYMTGCSRIKQGTGTCNLQALQTLALTRATCDQNTERANTFPTPWQPATHATRSAYFRGNTHTMHNARQQPGATPATLTPLLRLWTRSCCRFATPLPLLHTNCAFKHVCHTPTHRSSL

SEQ ID NO: 1016915 - protein, 98 aa, Homo sapiens
  misc_feature (2)..(2): Xaa can be any naturally occurring amino acid
  misc_feature (25)..(25): Xaa can be any naturally occurring amino acid
  misc_feature (29)..(29): Xaa can be any naturally occurring amino acid
  misc_feature (68)..(68): Xaa can be any naturally occurring amino acid
  misc_feature (73)..(73): Xaa can be any naturally occurring amino acid
IXSPFSYTPPFPPTGGAALSARGIXGPEXEPAAAAVARGKREEAATGEKKRSRHRREVDTQAAAAARXARPPXRPSPRPVHKAARLRKGVRTKGQSLQ

SEQ ID NO: 1016916 - protein, 115 aa, Homo sapiens
  misc_feature (23)..(23): Xaa can be any naturally occurring amino acid
ATALRMLFSQIKEVDMGLAADFXKHCQRLPKVIGNQSLVNELTFSARKMMADEALDSGLVSRVFQDKDAMLNAAFAWRLIFPARALWLCRGQKSISSTPETILWTRALTTWPPGT

SEQ ID NO: 1016917 - protein, 119 aa, Homo sapiens
  misc_feature (9)..(9): Xaa can be any naturally occurring amino acid
KSWEASNRXLAAPLLRNLVDSPRGLQEFRATEGNFILGPVTFLEIGAQWSILCKDIPSFERYMAQLKCYYFDYKEQLPESAYMHQLLGLNLLFLLSQNRVAEFHTELERLPAKDIQTNV

SEQ ID NO: 1016918 - protein, 66 aa, Homo sapiens
FTVIRPFPGLVINNQLDDQSESKGPVIQESAEPSQLEVPATEEIKETDGSSQISKNQTPRGRPLPS

SEQ ID NO: 1016919 - protein, 139 aa, Homo sapiens
PTLTTVPGPALGAHPPQGPCCFHWLCSPYAPCSEGAGPTSPQWTASSPPFVAHHRAAHTQGRGPGNFQQEQKFAICLACIWNPPWARFLALLYSLVIALWPAGFSLGQARHRLHRFPKHLIFLPNIFSRPCNLHGTFQI

SEQ ID NO: 1016920 - protein, 126 aa, Homo sapiens
FFKMFFVRDRVSLPFPKLFLKLVASQMILSPWPPKVLGLQWYEPPHPATGRFCNRWQCLRQEAPSPVCSKEPLSSGSLLLSNSCLLSSSLLFCPIFLPLNPALSFFYFFETEFHCVAQAGVRPYLY

SEQ ID NO: 1016921 - protein, 137 aa, Homo sapiens
MDILVSECSARLLQQEEEIKSLTAEIDRLKNCGCLGASPNLEQLQEENVYITCIEREIFFERGLPAQKGDRKRTKQLCINIISRHTERSIGHAYLEACISQHLEESSLCYMTPRSDRTTWWGLSGVIGDYGVFVRMM

SEQ ID NO: 1016922 - protein, 286 aa, Homo sapiens
MDILVSECSARLLQQEEEIKSLTAEIDRLKNCGCLGASPNLEQLQEGNLKLKYRLNILRKSLQAERDKPTKNMITFISAYKQVFGPCQLGCISRFGKSSSASDTKSAAKFGDYQCNSAMGISQMLKTKEQKVNQEKLLNKHYQTPTQTMTVLKNVEIAGPGSDYCPTYGRGYEYQNNVTSLLVHMGVQNNLSLGTRIHNTVIARQDSAYVIAQQRCIVGRQRSKKHRQQSIRPTIRQLARDDRAPGYIEKETGGRQNDMGKRQRQTSTKTYTGTPPTGEQGNNRNQ

SEQ ID NO: 1016923 - protein, 180 aa, Homo sapiens
MDILVSECSARLLQQEEEIKSLTAEIDRLKNCGCLGASPNLEQFPQHSTHIFKHIQQSSALDIIRSQSSSSSASTHVQPEPETHTHIIAFNHSLAAYKQVLWSMPIKAAYPDLENPPLLVTPSQQAKFGDYQCNSAMGISQMLKTKEQKVNPREIAEQTLPNTYPDNDCIEKRGNCWSWF

SEQ ID NO: 1016924 - protein, 108 aa, Homo sapiens
ERELSTMTQSYRAMKQSWKEAPKHIKETYGQQYFDALYNIMKEGLLNCSTNLNLVTDCMEHALTSVHPRTRYSAGWDAKFFFIPLSYLPTSLADYILTRSWPKPAQAV

SEQ ID NO: 1016925 - protein, 100 aa, Homo sapiens
  misc_feature (15)..(15): Xaa can be any naturally occurring amino acid
VNFLEEYYSEDLEEXVAAALKNGNDFYIVYNIMKEGLLNCSTNLNLVTDCMEHALTSVHPRTRYSAGWDAKFFFIPLSYLPTSLADYILTRSWPKPAQAV

SEQ ID NO: 1016926 - protein, 108 aa, Homo sapiens; identical to SEQ ID NO: 1016924

SEQ ID NO: 1016927 - protein, 346 aa, Homo sapiens
LELTDDNFESRISDTGSVGLMLVEVLRVPGVDTARDLHLSMKLQYQIRGIVPLAKVDGELRTLTPVINMESGISNPEDIYEMVKKRGAYDGPRTADGIVSHLKKQADQLQCLSGLRKNLQKFISDTDASIVGFFDDSFSEAHSEFLKAASNLRDNYRFAHTNVESLVNEYDDNGDGIILFRPSHLTNKLEDRLWHIQCKKMTSGKIKKFIQENIFGICPHMTEDNKDLIQGKDLLIAYYDVDYEKNAKGSNYWRNRVMMVAKKFLDAGHKLNFAVASRMLSELLKERSLHAGGFSRDGNALEKVLQDTLMASEEIPEAETIPESNDGPVKVVVAEKYDEIVNEICV

SEQ ID NO: 1016928 - protein, 369 aa, Homo sapiens
ASELTDDNFESRISDTGSVGLMLVEVLRVPGVDTARDLHLSMKLQYQIRGIVPLAKVDGELRTLTPVINMESGISNPEDISEMVKKRGAYDGPRTADGIVSHLKKQADQLQCLSGLRKNLQKFISDTDASIVGFFDDSFSEAHSEFLKAASNLRDNYRFAHTNVESLVNEYDDNGDGIILFRPSHLTNKLEDRLWHIQCKKMTSGKIKKFIQENIFGICPHMTEDNKDLIQGKDLLIAYYDVDYEKNAKGSNYWRNRVMMVAKKFLDAGHKLNFAVASRKTFSHELSDFGLEKHCWRDSCCAIRTAKGEKFDMQEDSRVMGMLWRRSCKSTLMASEEIPEAETIPESNDGPVKVVVAEKYDEIVNEICV

SEQ ID NO: 1016929 - protein, 267 aa, Homo sapiens
TSTINLYFGSKVLSRVSGILFNDEMDDFSSPNFINQFRVAPSPANFIKPGKQPLSSMCPSIILDKDGQVRMVVGASGGTQITTSVALAIINSLWFGYDVKRAVEEPRLHNQLLPNTTTVEKDIDQVVTAGLKIRHHHTEVTPTFIAVVQAVVRASGGWAAASDSRKGGEPAGYCVPGRGKIDPQPRDENGNRSKSGTLENMPPLGWDKRERNKLEATAKAAGKPLRADKKTDTSDPPTTTHNINQNTGGRPKHPAGAQSTAHFFTGP

SEQ ID NO: 1016930 - protein, 207 aa, Homo sapiens
  misc_feature (174)..(174): Xaa can be any naturally occurring amino acid
MTVSSKLRGLLMQQLRGTSQLYFNISLRSLSSSAQEASKRAPEEVSDHNYESIQVTSAQKHVLHVQLNRPEKRNAMNRAFWRELVECFQKISKDSDCRAVVVSGAGKMFTSGIDLMDMASELMQPSGDDAARIAWYLRDLISKYQKTFTVIEKCPKPVIAAIHGGCIGGGVDLXFLPVTFRYCTQDAFFPDQGGEIMGLAADVGTLQ

SEQ ID NO: 1016931 - protein, 142 aa, Homo sapiens
  misc_feature (4)..(4): Xaa can be any naturally occurring amino acid
  misc_feature (19)..(19): Xaa can be any naturally occurring amino acid
GFHXGESRSCCVSAAAAGXPSRQDKYSVLLPTYNERENLPLIVWLLVKSFSESAINYEIIIIDDGSPDGTREVAEQLGRDLWARQNSPKTTREKAGSRNLPTFIGIKHATGNYVIIMDADLSPPSQILFLNLSGNKKEGNFD

SEQ ID NO: 1016932 - protein, 148 aa, Homo sapiens
  misc_feature (117)..(117): Xaa can be any naturally occurring amino acid
PWCGMWSAAFLFVAEQASTVRVDCMLFFRASVDGRLGWWLPGAVLLGARMFGNSLGFCFQWSPFMPSFPSPLSLFSPPCPCAHPLCGCVCKPECVLWNFVASPKISGACKVLGSRYXPCLLLLCDHGQAFESLVSGGCLSLHGRQRLQ

SEQ ID NO: 1016933 - protein, 172 aa, Homo sapiens
  misc_feature (34)..(34): Xaa can be any naturally occurring amino acid
  misc_feature (41)..(41): Xaa can be any naturally occurring amino acid
  misc_feature (90)..(90): Xaa can be any naturally occurring amino acid
  misc_feature (123)..(123): Xaa can be any naturally occurring amino acid
  misc_feature (133)..(133): Xaa can be any naturally occurring amino acid
  misc_feature (137)..(137): Xaa can be any naturally occurring amino acid
  misc_feature (139)..(140): Xaa can be any naturally occurring amino acid
GGARGGGAGAGERGGRGVAGGGGGAGGGAGGAAXGEAAGRXRARAAGGAGRGGGGGWGGGGGGGGGRGRAGGGGRGWGVGAGGGWGVGGXAGRGGTCGARGAAGGGRAAAGGRGALRGGVAGXVGRVRGGACXLVGXGXXGQPCFSNKQTNKQPCFSSHIMCIQGSQEYRFS

SEQ ID NO: 1016934 - protein, 359 aa, Homo sapiens
MACRGGAGNGHRASATLSRVSPGSLYTCRTRTHNICMVSDFFYPNMGGVESHIYQLSQCLIERGHKVIIVTHAYGNRKGIRYLTSGLKVYYLPLKVMYNQSTATTLFHSLPLLRIDLLSGIIPELCQKYPDLNFIIGGEGPKRIILEEVRERYQLHDRVRLLGALEHKDVRNVLVQGHIFLNTSLTEAFCMAIVEAASCGLQVVSTRVGGIPEVLPENLIILCEPSVKSLCEGLEKAIFQLKSGTLPAPENIHNIVKTFYTWRNVAERTEKVYDRVSVEAVLPMDKRLDRLISHCGPVTGYIFALLAVFNFLFLIFLRWMTPDSIIDVAIDATGPRGAWTNNYSHSKRGGENNEISETR

SEQ ID NO: 1016935 - protein, 169 aa, Homo sapiens
MAIVEAASCGLQVVSTRVGGIPEVLPENLIILCEPSVKSLCEGLEKAIFQLKSGTLPAPENIHNIVKTFYTWRNVAERTEKVYDRVSVEAVLPMDKRLDRLISHCGPVTGYIFALLAVFNFLFLIFLRWMTPDSIIDVAIDATGPRGAWTNNYSHSKRGGENNEISETR

SEQ ID NO: 1016936 - protein, 315 aa, Homo sapiens
MACRGGAGNGHRASATLSRVSPGSLYTCRTRTHNICMVSDFFYPNMGGVESHIYQLSQCLIERGHKVIIVTHAYGNRKGIRYLTSGLKVYYLPLKVMYNQSTATTLFHSLPLLRVRLLGALEHKDVRNVLVQGHIFLNTSLTEAFCMAIVEAASCGLQVVSTRVGGIPEVLPENLIILCEPSVKSLCEGLEKAIFQLKSGTLPAPENIHNIVKTFYTWRNVAERTEKVYDRVSVEAVLPMDKRLDRLISHCGPVTGYIFALLAVFNFLFLIFLRWMTPDSIIDVAIDATGPRGAWTNNYSHSKRGGENNEISETR

SEQ ID NO: 1016937 - protein, 464 aa, Homo sapiens
MACRGGAGNGHRASATLSRVSPGSLYTCRTRTHNICMVSDFFYPNMGGVESHIYQLSQCLIERGHKVIIVTHAYGVMYNQSTATTLFHSLPLLRYIFVRERVTIIHSHSSFSAMAHDALFHAKTMGLQTVFTDHSLFGFADVSSVLTNKLLTVSLCDTNHIICVSYTSKENTVLRAALNPEIVSVIPNAVDPTDFTPDPFRRHDSITIVVVSRLVYRKGIDLLSGIIPELCQKYPDLNFIIGGEGPKRIILEEVRERYQLHDRVRLLGALEHKDVRNVLVQGHIFLNTSLTEAFCMAIVEAASCGLQVVSTRVGGIPEVLPENLIILCEPSVKSLCEGLEKAIFQLKSGTLPAPENIHNIVKTFYTWRNVAERTEKVYDRVSVEAVLPMDKRLDRLISHCGPVTGYIFALLAVFNFLFLIFLRWMTPDSIIDVAIDATGPRGAWTNNYSHSKRGGENNEISETR

SEQ ID NO: 1016938 - protein, 169 aa, Homo sapiens; identical to SEQ ID NO: 1016935

SEQ ID NO: 1016939 - protein, 484 aa, Homo sapiens
MACRGGAGNGHRASATLSRVSPGSLYTCRTRTHNICMVSDFFYPNMGGVESHIYQLSQCLIERGHKVIIVTHAYGNRKGIRYLTSGLKVYYLPLKVMYNQSTATTLFHSLPLLRYIFVRERVTIIHSHSSFSAMAHDALFHAKTMGLQTVFTDHSLFGFADVSSVLTNKLLTVSLCDTNHIICVSYTSKENTVLRAALNPEIVSVIPNAVDPTDFTPDPFRRHDSITIVVVSRLVYRKGIDLLSGIIPELCQKYPDLNFIIGGEGPKRIILEEVRERYQLHDRVRLLGALEHKDVRNVLVQGHIFLNTSLTEAFCMAIVEAASCGLQVVSTRVGGIPEVLPENLIILCEPSVKSLCEGLEKAIFQLKSGTLPAPENIHNIVKTFYTWRNVAERTEKVYDRVSVEAVLPMDKRLDRLISHCGPVTGYIFALLAVFNFLFLIFLRWMTPDSIIDVAIDATGPRGAWTNNYSHSKRGGENNEISETR

SEQ ID NO: 1016940 - protein, 219 aa, Homo sapiens
RVPPLARLTPGAPSSGLEASGFLPPGGGTAPPRARVVPGPSHSYPGSLGGIPRRLKPAAPSLPRLLPQAWHRASPHYGSSTDSTLDFMLGAKADGETILQRLQSIFQEQGMAESVHTWQDHGYLATYTNKNGSFANLRIYPHGLVLLDLRVMMVMRKAKEEIDSILPTARGKAMHQNRDQDQILERSAHALPHIVRGGASEDTGHARALVEYDIDEVAY

SEQ ID NO: 1016941 - protein, 505 aa, Homo sapiens
LVCWSSGGGAEARLGSPRRRRCQALVCGYPGRSAVPNAMSVVVQHVEEKAVHSWSRISTAGKKALEEALLVFNPMSQDLSATEAQLVAFLQGLRDDGFQPTILRSGDVYGYSSCTANPPSQTKLQARAPNPTATSPPASAPRTAMRLPAGRATLLPMPLSGRLAKASTPALAKHATTNLLLSSLKQSSASHARGAAVGFPTHLYPGVYPAMRLSVVLEALVPLKTPMPCLGAKHKAQSLQLSLADSPLKLRKSSGKGPGNPRPKAPRKTTSKGPKCLTRKGPGAGPRRGSGHQSKTNRATGSPSVRRMKGGSALGTKTAQAKVARTLAKAARAQAKVARTQAKAAKARAKAKAAQVKAKAKAKAAQVKAKAKVMAAWAKAKAKAKAVRAKAKVARTQPRGRGRPKGSAKARTTRKGQKNRPETVGQKRKRAEEAKDLPPKKRTRLGPRSPKAWLGPGTAKLLKFRAIKVDRRSSDDEVRQRAQRILRVNLSPVIRLQPLLPYSAV

SEQ ID NO: 1016942 - protein, 104 aa, Homo sapiens
  misc_feature (2)..(2): Xaa can be any naturally occurring amino acid
KXPYVLFYQRRDDECSSTSSLGSFPGSDGGVKLSSSHQGMGDEEAYNMDTNCCGLCDPATLPTPASSPRRISVALLKTAHINLKPDEDITSFYEKRKEKRNPAF

SEQ ID NO: 1016943 - protein, 107 aa, Homo sapiens
  misc_feature (8)..(8): Xaa can be any naturally occurring amino acid
  misc_feature (102)..(103): Xaa can be any naturally occurring amino acid
GRSISKRXVSCQFGPDVTKAFLEENNLDYIIRSHEVKAEGYEVAHGGRCVTVFSAPNYCDHISTNPPTSTSRALTTASVPPVHSSASSQRQSHVLFQHPSPXXNHLT

SEQ ID NO: 1016944 - protein, 106 aa, Homo sapiens
TRFPAPRTIMALPLRPLTRGLASAAKGGHGGAGARTWRLLTFVLALPSVALCTFNSYLHSGHRPRPEFRPYQHLRIRTKPYPWGDGNHTLFHNSHVNPLPTGYEHP

SEQ ID NO: 1016945 - protein, 97 aa, Homo sapiens
VGGMRDDHIYFSQIHLELTLPGRPQPMGKNYVNGKTFLEKRYNEDLELEDAIHTAILTLKESFEGQMTEDNIEVGICNEAGFRRLTPTEVKGLPGLP

SEQ ID NO: 1016946 - protein, 104 aa, Homo sapiens
NVKARTCEKDVDFIQPPVLLTLGPKVGNVECGEGHFCHDNQTCCKDSAGVWACCPYLKGVCCRDGRHCCPGGFHCSARGTKCLRKKIPPLGHVFEGSGPKTAYL

SEQ ID NO: 1016947 - protein, 81 aa, Homo sapiens
WDGRGALFLSRLRAPFSSMAKSPLEGVSSSRGLHAGPPPKALHRRQHWPALPKVCGKFVDMMYGSQHDGVLHIPDYFPFER

SEQ ID NO: 1016948 - protein, 80 aa, Homo sapiens
WDGRGALFLSRLRAPFSSMAKSPLEGVSSSRGLHAGPPPKALHRRQHWPALPKVCGKLAGYDVPGASTMVSYTFQTIFLL

SEQ ID NO: 1016949 - protein, 82 aa, Homo sapiens
KPIADHIQRHLVWNPQRESSVSMGVTSDGNSYGVPDDLLYSFPVVIKNKTWKFVEGLPINDFSREKMDPDSKGADRGKGDRF

SEQ ID NO: 1016950 - protein, 79 aa, Homo sapiens
MPEVFFTAFGASTLDHELRLYVRELRDRSRTVDELNRTIDQLCRENDINIAFNQLEVHLHNEKGDEVTEVKRDYKGDDP

SEQ ID NO: 1016951 - protein, 78 aa, Homo sapiens
QPHQAFASPAEASFAAQFSDLRSPCQDCILTALLAVSFHQYRSCHHDFQLPSGTGCQMMWLETEAHSDCCCTTMEMPV

SEQ ID NO: 1016952 - protein, 48 aa, Homo sapiens
GTSFFAGDTDKLLHIRIEDSPEAQILPFLRHMCHFIEFTITLALSSDI

SEQ ID NO: 1016953 - protein, 108 aa, Homo sapiens
  misc_feature (3)..(3): Xaa can be any naturally occurring amino acid
  misc_feature (27)..(27): Xaa can be any naturally occurring amino acid
  misc_feature (31)..(31): Xaa can be any naturally occurring amino acid
  misc_feature (36)..(36): Xaa can be any naturally occurring amino acid
  misc_feature (45)..(45): Xaa can be any naturally occurring amino acid
GGXRMLPDCKLPATMPLVWVHVPMPLXLPLXWLHAXQVQQHAPCXARNGSSRSEARPWLSLEGHPETPSSSCAPMAAGDSAPELQQGGNKGWSCVCFAITMLTLLSNK

SEQ ID NO: 1016954 - protein, 229 aa, Homo sapiens
GNSDNYESLEVMQLIKGQTQNFKDAFSGRDSSITRLPLAFYYGMYAYAGWFYLNFVTEEVENPEKPFLSGYWEISALAVPIFVALSCFGSMNGGVFAVSSTLLTMIMLFSGDLDSLVNFLSFARWLFIGLAVAGLIYLRYKCPDMHRPFKVPLFIPALFSFTCLFMVALSLYSDPFSTGIGFVITLTGVPAYYLFIIWDKKPRWFRIMSEKITRTLQIILEVVPEEDKL

SEQ ID NO: 1016955 - protein, 114 aa, Homo sapiens
SGVRINCVAPGTIYSQTAVDNYGEMGQTLFEMAFDSIPAKRLGVPEEISPVVCFLLSPAASYITGQLINVDGGQALYTHAFSIPDHDNWPVGSWGPFYCQEDKRNLLRRKPSSN

SEQ ID NO: 1016956 - protein, 102 aa, Homo sapiens
DRRQNELLEPLQNLAFSPATMAHAFLPTMPEDLLAQARRWKGLERVHWYSKCWGLDDPHSFELQRVSRCYEALGSTWGPRGLCLRVQNHLHSTGGVCRRRMA

SEQ ID NO: 1016957 - protein, 139 aa, Homo sapiens
QAGCNQVDAILISTQMKLLDFCKSKDIVLVAYGVLGTQRYGGWVDQNSPVLLDEPVLGSMAKKYNRTPALIALRYQLQRGIVVLNTSLKEERIKENMQVFEFQLSSEDMKVLDGLNRNMRYIPAAIFKGHPNWPFLDEY

SEQ ID NO: 1016958 - protein, 264 aa, Homo sapiens
VKRLGKCRFIFAPLAFLPRLAGQVKRDCKTRQPCRLSRNRSRPEGVGVLVLRLLPQAPWDPRFRESLAQGPFPAVRRRPPSLCPRRPPSWAIPAVSAPCEAEWVGHKTPRRGSSGGTKDGDRPKILMDSPEDADLFHSEEIKAPEKEEFLAWQHDLEVNWINAPGQARPTVSRWTGGGHSDSYLSGSFNNWSKLPLTMKPPITFVAILDSCRKESIMYQVLRGLVSVDATNPLPEPISKPAKVVHTLNNNSVTVNDHLTFDVLE

SEQ ID NO: 1016959 - protein, 107 aa, Homo sapiens
ILWRPSRWSFHRTFTSPAWGRLRFSGSLARSWLALTSALWEAQTFPRNEEPVLDDCRLCPSVPPGPSLVGDMALLLEVHSLVPRGPHPDFLSLYTRAPVTFREALVK

SEQ ID NO: 1016960 - protein, 128 aa, Homo sapiens
MMDIQRTLNVNMVSNSEIPINNLSPGPKTLGTNDHGFLQNLMTMKKQELMIASCKDRVLEVRTLEKAMRVSPTLSTLSGRTIGLKHCLKKAECQDEENQKQCQDLGAFTGHGCLWVPQLTTPPFPHSR

SEQ ID NO: 1016961 - protein, 155 aa, Homo sapiens
MWLLRRRWPWPVALLLRRSKFISAPGLSCPTSGLRHPLLIPWPWPCSVATMDKILEGLVSSSHPLPLKRVIVRKVVESAEHWLDEAQCEAMFDLTTRLILEGQDPFQRQVGHQVLEAYARYHRPEFESFFNKTFVLGLLHQGYHSLDMVVFGCPN

SEQ ID NO: 1016962 - protein, 92 aa, Homo sapiens
SHLFPSKPQARAGTPWLLRTSDTSSSSYHGQVVPGWQCKGTENPFEYDYETVRKGGLIFAGLAFVVGLLIILSKRFRCGGGKKHRQVNEDEL

SEQ ID NO: 1016963 - protein, 92 aa, Homo sapiens; identical to SEQ ID NO: 1016962

SEQ ID NO: 1016964 - protein, 252 aa, Homo sapiens
  misc_feature (6)..(6): Xaa can be any naturally occurring amino acid
  misc_feature (31)..(31): Xaa can be any naturally occurring amino acid
  misc_feature (35)..(35): Xaa can be any naturally occurring amino acid
  misc_feature (40)..(40): Xaa can be any naturally occurring amino acid
  misc_feature (44)..(44): Xaa can be any naturally occurring amino acid
  misc_feature (51)..(51): Xaa can be any naturally occurring amino acid
  misc_feature (140)..(140): Xaa can be any naturally occurring amino acid
  misc_feature (142)..(142): Xaa can be any naturally occurring amino acid
  misc_feature (144)..(144): Xaa can be any naturally occurring amino acid
  misc_feature (146)..(146): Xaa can be any naturally occurring amino acid
  misc_feature (152)..(153): Xaa can be any naturally occurring amino acid
MKGASXMICINVFISLVHLREATLSSRAQMXRRFXAVGSXLPRXGVGKKIXLRVLIYFIQFVLRVWPQPSEQSDSRREMLRTSAAMRNVALGGREVLPMCPLTLSASRPGLSVTSYLSSLWGPGPQFNLVAPDATSLWYXGXNXFXGVTGKXXPPRTKAVFLRTSSEAGPLGWDQGWGMGQGLPKWEQRSKVSNLLIVYYVVQNAISGGILIYLTVKDIRILTSVSQFLVTVPPGASPSDDLSTVALDLFDA

SEQ ID NO: 1016965 - protein, 96 aa, Homo sapiens
AGCFMINNCTTLSPDSGDIANTLKSRHAMQERTLQQFLCQRQARGEIPPHCDVTHLAEFLNCIIQGMSISAREGASLEKLMQIAGTTLRLWPELVK

SEQ ID NO: 1016966 - protein, 238 aa, Homo sapiens
MALEGGMKCVKFLLYVLLLAFCACAVGLIAIGVAVQVVLKQAITHETTAGSLLPVVIIAVGAFLFLVAFVGCCGACKEELLSHDYICHLPVSYHACGGGCGIAGYVFRDQVKSEFNKSFQQQMQNYLKDNKTATILDKLQKENNCCGASNYTDWENIPGMAKDRVPDSCCINITVGCGNDFKESTIHTQGCVETIAIWLRKNILLVAAAALGIAFVEVLGIIFSCCLVKSIRSGYEVM

SEQ ID NO: 1016967 - protein, 96 aa, Homo sapiens
AVVAVLRGGRRGHRRRKDDAVGASSSRSGHRPGFVSPSSPVRVGGRHSGGPAHRSLSRCSRPRHGATAAHGLLGGIQVIIGRPKGGPREAGSRRRS

SEQ ID NO: 1016968 - protein, 121 aa, Homo sapiens
AEKALGKAASTIRSIKNVTELRLSDNPAWEGDKGNTKGDKHDDLQRARFICPVVGLEMNGRHRFCFLRCCGCVFSERALKEIKAEVCHTCGAAFQEEDIIVLNGTKEDVEMLKKRMEERRL

SEQ ID NO: 1016969 - protein, 123 aa, Homo sapiens
  misc_feature (2)..(2): Xaa can be any naturally occurring amino acid
SXYGLAGRGKLIAVIGDEDTVTGFLLGGIGELNKNRHPNFLVVEKDTTINEIEDTFRQFLNRDDIGIILINQYIAEMVRHALDAHQRSIPAVLEIPSKEHPYDAAKDSILRRAKGMFTAEDLR

SEQ ID NO: 1016970 - protein, 67 aa, Homo sapiens
  misc_feature (4)..(4): Xaa can be any naturally occurring amino acid
  misc_feature (14)..(14): Xaa can be any naturally occurring amino acid
  misc_feature (50)..(50): Xaa can be any naturally occurring amino acid
QEDXARPKMSVRMXTGTGDLQRDADDFSDVTGSSTAGTNMTLDAWQSGAXRIRHEEREKRTSSLSTI

SEQ ID NO: 1016971 - protein, 168 aa, Homo sapiens
MKPAHSAVCPGHLASCRTKRICTPLRAHVVGALPWQGHPVLGGHLGHMAHPAPPLQNTAHAYLNHPGCGVCLNHAGALKGRFVCRDGARAQVLDVVCIERPKAGGKCTGHSGVCPVTRKFEGLGGGRLGLCISGCPAALPSTNIVTGDVSSRRQKAKHESLEIKLVNP

SEQ ID NO: 1016972 - protein, 68 aa, Homo sapiens
  misc_feature (1)..(1): Xaa can be any naturally occurring amino acid
  misc_feature (14)..(14): Xaa can be any naturally occurring amino acid
XVARVAGLEIDPTXCLLLVTTSYGTVDTTYLTHPTDLTAHMDSPHTPEGPARLQRESRNVPADTHPTD

SEQ ID NO: 1016973 - protein, 94 aa, Homo sapiens
VMCLPVAMDREGAPMSTGTGEQAFGIYRVTVCIFYPQAEGDSDNGQWIALTRECLMLQQTHQEGDKWLFRMEAFSADNVCTVNFSRVHLFSPEA

SEQ ID NO: 1016974 - protein, 158 aa, Homo sapiens
  misc_feature (156)..(156): Xaa can be any naturally occurring amino acid
ELNDGHSIPVLGFGTYATEEHLKKKSMESTKIAIDVGFCHIDCSHLYQNEEEIGQAILSKIEDGTVKREDIFYTSKLWSTSHRPELVRPSLENSLRKLNLDYVDLYLIHFPVSLKPGNELLPKDEHGNLIFDTVDLCDTWEAMEKCKDAGLAKSIXGV

SEQ ID NO: 1016975 - protein, 104 aa, Homo sapiens
MDLLFGKDQPIILVLLDITPMMGVLDGVLMELQDCALPLLQDVIATDKEEIAFKDLDVAVLSGLHAKKGRHGEEETYLKANVENLQIPGHSLGEIRQENQFKVI

SEQ ID NO: 1016976 - protein, 219 aa, Homo sapiens
RFHLERQMGYYLIQMYIPSLLIVILSWVSFWINMDAAPARVALGITTVLTMTTQSSGSRASLPKVSYVKAIDIWMAVCLLFVFSALLEYAAVNFVSRQHKELLRFRRKRKNKTEAFALEKFYRFSDMDDEVRESRFSFTAYGMGPCLQAKDGMTPKGPNHPVQVMPKSPDEMRKVFIDRAKKIDTISRACFPLAFLIFNIFYWVIYKILRHEDIHQQQD

SEQ ID NO: 1016977 - protein, 143 aa, Homo sapiens
  misc_feature (109)..(109): Xaa can be any naturally occurring amino acid
  misc_feature (114)..(115): Xaa can be any naturally occurring amino acid
  misc_feature (119)..(119): Xaa can be any naturally occurring amino acid
  misc_feature (141)..(141): Xaa can be any naturally occurring amino acid
FLLYAHLTYVTLPLHRILTDILEVRQKPILMTYRVDLAQSPGRAHALGVLPSAYLSTATGVCDGTPVLEPQPGEATRLPGPGRLHEHQPKLKCLFPPLLALLRLCPPPXGPHPXXESPXHPKRTRDAELAMKRERKEQLIXQS

SEQ ID NO: 1016978 - protein, 198 aa, Homo sapiens
FLLYAHLTYVTLPLHRILTDILEVRQKPILMTYRVDPAQAPHAARSSGWASCVRSLRRAPAGPMPSECCQVPTCPPPPGSAMARQCWSRSQARPLDSRGRGRLHEHQPKLKCLFPPPANARIRTKGAQNEGTRALRTPRTDNEKKRPTRQTHTQKRDVLPTYSCNPTSANPALTLDTTTNNNGPPGSPRQKNKRERPP

SEQ ID NO: 1016979 - protein, 333 aa, Homo sapiens
  misc_feature (298)..(298): Xaa can be any naturally occurring amino acid
  misc_feature (300)..(302): Xaa can be any naturally occurring amino acid
  misc_feature (332)..(332): Xaa can be any naturally occurring amino acid
GGDCIYRSGSRERAKSRRVSRLKSESHVPALPSPTQAHRGARKPLPGHALPPASQRLLPPGGGPGRVGEETCSRSSSWHCGEVEPQGGHACRAQAGLAFSLYQAMAKDQAVENILVSPVVVASSLGLVSLGGKATTASQAKAVLSAEQLRDEEVHAGLGELLRSLSNSTVRNVTWKLGSRLYGPSSVSFADDFVRSSKAATTTGEQSKINFRDKRSRWQVHQRSGPLRPPTAKLPEVTKDVERTDRGPVVNAMFFQPHWDEKFHHKMVDNRGFMVTRSYTVGVMMMHRTGLYNYYDDXNXXXEIVEMPLAHKLSSLIILMPHHVEPLERLEXC

SEQ ID NO: 1016980 - protein, 192 aa, Homo sapiens
RLSEHFQIMAFNIIAMFFVIAPDQQYLRFSRLAVLFRFVMTSPPASCRALSRQVFQLKLENIFDNRPFKAYRVILFSLWTVAGHMLGGVIQPANKGYTRVDHHNFAMHPAKHIGAHTKKARAGIVVAEHYASCRQFIDKLIAEIRRTVAIQQDFPLLTPALGLLASSSRMQLFAAVIPKPDKRFKNVRSCAS

SEQ ID NO: 1016981 - protein, 516 aa, Homo sapiens
MPTNGLHQVLKIQFGLVNDTDRYLTAESFGFKVNASAPSLKRKQTWVLEPDPGQGTAVLLRSSHLGRYLSAEEDGRVACEAEQPGRDCRFLVLPQPDGRWVLRSEPHGRFFGGTEDQLSCFATAVSPAELWTVHLAIHPQAHLLSVSRRRYVHLCPREDEMAADGDKPWGVDALLTLIFRSRRYCLKSCDSRYLRSDGRLVWEPEPRACYTLEFKAGKLAFKDCDGHYLAPVGPAGTLKAGRNTRPGKDELFDLEESHPQVVLVAANHRYVSVRQGVNVSANQDDELDHETFLMQIDQETKKCTFYSSTGGYWTLVTHGGIHATATQVSANTMFEMEWRGRRVALKASNGRYVCMKKNGQLAAISDFVGPPPRPAWTGKVAGGAAQQTLSPPGKDEEFTLKLINRPILVLRGLDGFVCHHRGSNQLDTNRSVYDVFHLSFSDGAYRIRGRDGGFWYTGSHGSVCSDGERAEDFVFEFRERGRLAIRARSGKYLRGGASGLLRADADAPAGTALWEY

SEQ ID NO: 1016982 - protein, 492 aa, Homo sapiens
MPTNGLHQVLKIQFGLVNDTDRYLTAESFGFKVNASAPSLKRKQTWVLEPDPGQGTAVLLRSSHLGRYLSAEEDGRVACEAEQPGRDCRFLVLPQPDGRWVLRSEPHGRFFGGTEDQLSCFATAVSPAELWTVHLAIHPQAHLLSVSRRRYVHLCPREDEMAADGDKPWGVDALLTLIFRSRRYCLKSCDSRYLRSDGRLVWEPEPRACYTLEFKAGKLAFKDCDGHYLAPVGPAGTLKAGRNTRPGKDELFDLEESHPQVVLVAANHRYVSVRQGVNVSANQDDELDHETFLMQIDQETKKCTFYSSTGGYWTLVTHGGIHATATQVSANTMFEMEWRGRRVALKASNGRYVCMKKNGQLAAISDFVGKDEEFTLKLINRPILVLRGLDGFVCHHRGSNQLDTNRSVYDVFHLSFSDGAYRIRGRDGGFWYTGSHGSVCSDGERAEDFVFEFRERGRLAIRARSGKYLRGGASGLLRADADAPAGTALWEY

SEQ ID NO: 1016983 - protein, 317 aa, Homo sapiens
SARSAAGEERSVNSSTMVAQQKNLEGYVGFANLPNQVYRKSVKRGFEFTLIVVGNLALESRINQSHYCLTAFVFCQSIQVLLIELRKTVQVEQSKVFIKEGGVQLLLTSSCIPQDLEMQWIIVMAGSLLTDYLDTLNFEELPKMQKSRVRHDVRCLIKRGASVVNTFIRLLQDMALDHVDIELMKRLHEERDYHPTYAKSRHTHTNEECLQVMTADMQASQERKGRCSNFRERCVAQLRANRIGPVHLRAGETMQLKFRDRPRRNPGVRTGRATEPHNSVKQREAIHETQHWYEVKRNPKKRPNAQTAFVASLFSFL

SEQ ID NO: 1016984 - protein, 68 aa, Homo sapiens
YEKGPHGSPSEEPANGEPGRKDHQQPASLCHPVTEEMILGSLVLGFKPFLVVTLGIPLPLAPHLALGN

SEQ ID NO: 1016985 - protein, 123 aa, Homo sapiens
MKLLTGLVFCSLVLGVSSRSFFSFLGEAFDGARDMWRAYSDMREANYIGSDKYFHARGNYDAAKQGTWGCLGCRKRSAMPERISRDSLAMVRRTRWLIRLPMNGAGVAKTPITSDPAGLPEKY

SEQ ID NO: 1016986 - protein, 107 aa, Homo sapiens
MKLLTGLVFCSLVLGVSSRSFFSFLGEAFDGARDMWRAYSDMREANYIGSDKYFHARGNYDAAISDARENIQRFFGHGAEDSLADQAANEWGRSGQDPNHFRSCWPA

SEQ ID NO: 1016987 - protein, 123 aa, Homo sapiens; identical to SEQ ID NO: 1016985

SEQ ID NO: 1016988 - protein, 106 aa, Homo sapiens
MTLVLSSPRIHEVQCCHHLLGSTMTLVLSSPRIHEVQLLSPPTRIHHNPGVIPESTATMCHHPPRAIILGAKYRDGLYFSCPLGPHGTYSCSLKGNQHNRPYSRFH

SEQ ID NO: 1016989 - protein, 130 aa, Homo sapiens
  misc_feature (5)..(5): Xaa can be any naturally occurring amino acid
  misc_feature (14)..(14): Xaa can be any naturally occurring amino acid
  misc_feature (37)..(37): Xaa can be any naturally occurring amino acid
  misc_feature (50)..(50): Xaa can be any naturally occurring amino acid
RIAEXKRGPERLLXFQNDSRGRALFQDVQKPSQDEWXKTPGGHGSCLGHXRRTLNQALLDLHALGSARADPHLCDFLESHYLDKEVKLHQEDGQPSDQPPQGAGPQPAQTGAPQGSLGEYLFERLTLKHD

SEQ ID NO: 1016990 - protein, 106 aa, Homo sapiens
MIALGISGSLFAITFCPAFCEKTTAFHWPQLWQIVVLQKAAFCGLLSDTFLCTKDGPSPNNYSYSKPNSCCSQVQLMRKFSFVFWSMVLWEVASTAGKQNEQSQQN

SEQ ID NO: 1016991 - protein, 121 aa, Homo sapiens
MATIGQIVLPQKAAFCGLLSDTFLCTKDGPSPNNYSYSKPNSCCSQVQLMRKDSLENPLLAEVFLDFSSSLLFFGAWFFGKWHPLQESRMSRASRTDGVAQIPSVWMVPHWRLITRLTSRN

SEQ ID NO: 1016992 - protein, 101 aa, Homo sapiens
  misc_feature (6)..(6): Xaa can be any naturally occurring amino acid
  misc_feature (10)..(11): Xaa can be any naturally occurring amino acid
  misc_feature (17)..(17): Xaa can be any naturally occurring amino acid
  misc_feature (21)..(21): Xaa can be any naturally occurring amino acid
FVRTNXDALXXWPHTVXDNLXVAPLLRAIPGWALAWAITFVLIATKKIGTHLPQTNYSYSKPNSCCSQVQLMRKFSFVFWSMVLWEVASTAGKQNEQSQQN

SEQ ID NO: 1016993 - protein, 135 aa, Homo sapiens
TQVESHLYLNQSKLLAYCKMNDIVLVAYGALGTQGYKYCINEDTPVLLDDPVLCAMAKKYKRTPALIALRYQLDRGIVALAKSFNEERIRENMQVFDFQLASDDMKILDGLDRNLRYFPADMFKAHPNFPFFDEY

SEQ ID NO: 1016994 - protein, 121 aa, Homo sapiens [sequence omitted]

SEQ ID NO: 1016995 - protein, 121 aa, Homo sapiens [sequence omitted]

SEQ ID NO: 1016996 - protein, 343 aa, Homo sapiens
YVRGPGVYSACSPRHGGACVGTCVAAALLVGFILFLTRSRGRAASAGQEPLHNDGAGMEQAGVAQPGAPVMPDVMPEMLDGRPLAAWTVTWCMPAYMALAVLSPCWVAWARMQMTNEEECCHPSPGWRKVVGECQLETHLSGENWTLRNCGSSEEKQARKAQREADGELNVRMRKRLESQREAEWKKEEERLRLEEEQNGGGGEEVAGEEHVPEREHEEYLKLKEAFVVEEEGVGETMTEEQSQSFLTEFINYIKQSKVVLLEDLASQVGLRTQDTINRIQDLLAEGTITGGFDDRGKFIYITAEELGGVELAYDKRGEVSIAELAQSMKSLIAWAGVPRQPS

SEQ ID NO: 1016997 - protein, 149 aa, Homo sapiens
QGLMDPMGFNGNFRRLRVPRLAVKEYLKLKEAFVVEEEGVGETMTEEQSQSFLTEFINYIKQSKVVLLEDLASQVGLRTQDTINRIQDLLAEGTITGGFDDRGKFIYITAEELGGVELAYDKRGEVSIAELAQSMKSLIAWAGVPRQPS

SEQ ID NO: 1016998 - protein, 199 aa, Homo sapiens
  misc_feature (45)..(46): Xaa can be any naturally occurring amino acid
  misc_feature (48)..(50): Xaa can be any naturally occurring amino acid
  misc_feature (80)..(80): Xaa can be any naturally occurring amino acid
  misc_feature (158)..(158): Xaa can be any naturally occurring amino acid
MRYAEGGCFSFQYFFEAEEEIRVHLNNNPKLLATTNTWGKPQGKXXRXXXLHEALDEMTTPQQTTPQTKKNDMMQSSGKXEDILNKLTPEKFDKLCLELLNVGVESKLILKGVILLIVDKALEEPKYAHCMLSYVCDWQKMHQTLMAQQQMGQPGQKXSTTFRRLLISKLQDEFENRTRNVDVYDKRENPSSPREEQRA

SEQ ID NO: 1016999 - protein, 79 aa, Homo sapiens
EVARDTAIETLPLYLFAPPIPGVSLGPQHSLGICSPQKPSLRNEYLVSILGLEVLQGSPLEVEYPGLSHRTGFTLSSDA

SEQ ID NO: 1017000 - protein, 120 aa, Homo sapiens
LQASPIFCVDFLMQNMQLPRCSGICKSNGCCFHHARISSFSKSDSSARYLIPGFGFSAFGSSALMPIHVVLIPSPEMGHHSIWVKGNEFLIWSVAGTAPPTYGELPYFFTISINGFRTGI

SEQ ID NO: 1017001 - protein, 120 aa, Homo sapiens
  misc_feature (37)..(37): Xaa can be any naturally occurring amino acid
FEEVSVLGFEEFDKAVKEHEGKTIFAYFSGSKDTEGXSWCPDCVEAEPVIREGLKHVTEDCVFIYCQVGDKPYWKDPNNDFRQKLKITAVPTLLKYGTPQKLVESECCQSSLVEMIFSED

SEQ ID NO: 1017002 - protein, 202 aa, Homo sapiens
PTPTPTPTPTVGNYSIRNGNTTCLLATMGLQLNITEEKVPFIFNINPATTNFTGSCQPQSAQLRLNNSQIKYLDFIFAVKNEKRFYLKEVNVYMYLANGSAFNISNKNLSFWDAPLGSSYMCNKEQVLSVSRAFQINTFNLKVQPFNVTKGQYSTAEECAADSDLNFLIPVAVGVALGFLIIAVFISYMIGRRKSRTGYQSV

SEQ ID NO: 1017003 - protein, 201 aa, Homo sapiens
PTPTPTPTPTVGNYSIRNGNTTCLLATMGLQLNITEEKVPFIFNINPATTNFTGSCQPQSAQLRLNNSQIKYLDFIFAVKNEKRFYLKEVNVYMYLANGSAFNISNKNLSFWDAPLGSSYMCNKEQVLSVSRAFQINTFNLKVQPFNVTKGQYSTAQDCSADEDNFLVPIAVGAALGGVLILVLLAYFIGLKRHHTGYEQF

SEQ ID NO: 1017004 - protein, 186 aa, Homo sapiens
  misc_feature (14)..(14): Xaa can be any naturally occurring amino acid
  misc_feature (28)..(28): Xaa can be any naturally occurring amino acid
  misc_feature (143)..(143): Xaa can be any naturally occurring amino acid
WALLLMILLQSVQXRVQQEIDEVIGQVXHPEMADQAHMPYTNAVIHEVQRFGDIVPLHLPRITSRDIEVQDFLIPKGTILLPNMSSVHMDDTVWEKPLRFHPEHFLDAQGHFVKHEAFITFSAGRRSCLGDPWPEWSSSSSSXCLLQRFSFSVPDGQPQPSDHRVFSIMVAPSPYQLCAVIREQGH

SEQ ID NO: 1017005 - protein, 103 aa, Homo sapiens
  misc_feature (5)..(5): Xaa can be any naturally occurring amino acid
RWWRXAWTQQALPAADTGSDTRDKGRGECSGRAADFDLLVIRWGIRWPSLCQGSCSSWERRWLWLTMWNLLPEAPSGALVAPVSTWVAYPKKLDASGFTAWGA

SEQ ID NO: 1017006 - protein, 430 aa, Homo sapiens
MELLKALLLLSGVFGALAEFCVIPRIDSQLVEKLGQRLLPWMDRLSSEQLNPSVFVGLRLSSMQAGTKEDLYLHSLKIHYQQCLLRSTSSDDNSSCQPKLSGGSLALYLLALRANCEFFGSRKGDRLISQLKWFLEDEKKAIGHNHEGHPNTNYYQYGLSILALCVHQKRLHDSVVGKLLYAVEHDYFTYQGHVSVDTEAMAGLALTCLERFNFNSDLRPRITMAIETVREKILKSQAPEGYFGNIYSTPLALQMLMTSPASGVGLGTACIKAGTSLLLSLQDGAFQNPLMISQLLPILNHKTYLDLIFPDCQASRVMLVPAVEDPVHISEVISVTLKVASALSPYEQTFFVFAGSSLEDVLKLAQDGGGFTYGTQASLSGPYLTSVLGKDAGDREYWQLLRAPDTPLLQGIADYKPQDGETIELRLVRW

SEQ ID NO: 1017007 - protein, 115 aa, Homo sapiens
  misc_feature (55)..(55): Xaa can be any naturally occurring amino acid
NPVLGFLYLPPAGSIPIILALPIQHYVFHFSPLSIWYLSICTNYVGICPMSRFSXTFDSVFKAKPCSVSQAGVLWRDFGSLQPPPSKFKRFSCLSFQVAGITGMWYHAWLIFLYF

SEQ ID NO: 1017008 - protein, 162 aa, Homo sapiens
MHLSLGLLTLRTNPTLRYKIYERLTGRGTNPRHPYTASPHPTTRHRRYHSAQHINAVSAVMAQQWNHVATQNHGPRWPPYYGNYDYGSLLREHHRVAQVHSSQCDPEAPRRPLPAFRPPSACHRPLLVPPARSRGVCAMGSSQGCHPYQPTASPHEGLPSPP

SEQ ID NO: 1017009 - protein, 92 aa, Homo sapiens
VVVYLPVLLPIGEDGPGDSAEGPAVICAACVLCSLVKTIDQFEYDGCDNCDAYLQMKGNREMVYDCTSSSFDGIIAMMSPEDSWVSKWQRVT

SEQ ID NO: 1017010 - protein, 92 aa, Homo sapiens; identical to SEQ ID NO: 1017009

SEQ ID NO: 1017011 - protein, 194 aa, Homo sapiens
  misc_feature (192)..(192): Xaa can be any naturally occurring amino acid
KAKELTKIAIDAGFHHFDSASVYNTEDHVGEAIRSKIADGTVRREDIFYTSKVWCTSLHPELVRASLERSLQKLQFDYVDLYLIHYPMALKPGEENFPVDEHGKLIFDRVDLCATWEAMEKCKDAGLTKSIGVSNFNYRQLEMILNKPGLKYKPVCNQVECHPYLNQMKLLDFCKSKDIVLGAKVSRTHDMXDG

SEQ ID NO: 1017012 - protein, 90 aa, Homo sapiens
KKGEKQIPGEEKGRKRRRVKEDKKKRDRDRLENEAEKISSVHAPFRLDLPPEKPLTSSLANKKSRQTPFRALITHETLQRKIQCFFHSCD

SEQ ID NO: 1017013 - protein, 81 aa, Homo sapiens
RLSSFAQSARLLPATMSDKPDMAEIEKFDKSKLKKTETQEKNPLPSKETIEQEKKLANRNEASAPICTVHSTSIAFLFYFF

SEQ ID NO: 1017014 - protein, 67 aa, Homo sapiens
RHCFGCTGVRKALIDTPLDGYETARYGTGVFGQNEYLRYQEALSELATAVKARIGALSDITSQQPKT

SEQ ID NO: 1017015 - protein, 67 aa, Homo sapiens; identical to SEQ ID NO: 1017014

SEQ ID NO: 1017016 - protein, 107 aa, Homo sapiens
MELVLVFLCSLLAPMVLASAAEKEKEMDPFHYDYQTLRIGGLVFAVVLFSVGILLILSRRCKCSFNQKPRAPGDEEAQVENLITANSNRAPESRELKCSHQVEASGT

SEQ ID NO: 1017017 - protein, 96 aa, Homo sapiens
EAAQKAVRAMAALTDHPYASLTLPDDAASDCLFLRPGLPGATPFLLHRGGGDLPNSQEALQKLSDVTLVPVSCSELEKAGAGLSSLCLVLSTRPHC

SEQ ID NO: 1017018 - protein, 279 aa, Homo sapiens
LGLIGEAELSHYYQTQGEGYAKPNEGAIVEVALEGYYKDKLFDQRELRFEIGEGENLDLPYGLERAIQRMEKGEHSIVYLKPSYAFGSVGKEKFQIPPNAAAEYMNYTSRVLKQARGVLGDEFRSSKLEHQSHPSVAQAAAGHWCHFPLDRSQSPQPQLSLTVHTARIVSWLAIMSLVFFQVSEAPGKQQCPFDWALSAYNLAMCPSDNIAGLLCLTIGKLYTEALTTGQASNEKGLFRRGEDHLAENDYEPGTACIPERACSIYPKQGQAPRPSMDDV

SEQ ID NO: 1017019 - protein, 269 aa, Homo sapiens
LGLIGEAELSHYYQTQGEGYANPNEGAIVEVALEGYYKDKLFDQRELRFEIGEGENLDLPYGLERAIQRMEKGEHSIVYLKPSYAFGSVGKEKFQIPPNAAAEYMNYTSRVLKQARGVLGDEFRSSKLEQSTIVKERGTVYFKEGKYKRAGLQYKKIVSSAGHHAVLVFFQVSEAPGKQQGPFDWALSASNLGHVSSDNIAGLLCLTIGKLYTEALRTGQASNEKGLFRRGEDHLAENDFEPGTACIPRTGLQHLPPARTGAKTQLDDV

SEQ ID NO: 1017020 - protein, 136 aa, Homo sapiens
SRSQALPVVPTSLSFRLAGVHSSLSDCGVFAEGHIELQVESGVPLGFSTMAEDMETKIKNYKTAPFDSRFPNQNQTRNCWQNYLDFHRCQKAMTAKGGDISVCEWYQRVYQSLCPPSWVTDWDEQRAEGTVSPGKI

SEQ ID NO: 1017021 - protein, 147 aa, Homo sapiens
MALRACGLIIFRRCLIPKVDNNAIEFLLLQASDGIHHWTPPKGHVEPGEDDLETALRETQEEAGIEAGQLTIIEGFKRELNYVARNKPKTVIYWLAEVKDYDVEIRLSHEHQAYRWLGLEEACQLAQFKEMKAALQEGHQFLCSIEA

SEQ ID NO: 1017022 - protein, 147 aa, Homo sapiens; identical to SEQ ID NO: 1017021

SEQ ID NO: 1017023 - protein, 147 aa, Homo sapiens; identical to SEQ ID NO: 1017021

SEQ ID NO: 1017024 - protein, 147 aa, Homo sapiens; identical to SEQ ID NO: 1017021

SEQ ID NO: 1017025 - protein, 147 aa, Homo sapiens; identical to SEQ ID NO: 1017021

SEQ ID NO: 1017026 - protein, 147 aa, Homo sapiens; identical to SEQ ID NO: 1017021

SEQ ID NO: 1017027 - protein, 93 aa, Homo sapiens
RRRLSQCSIAVKRHLDHSNSYKGKHFIGAGLPFLRFGRENDNMQVNMVLEEVAKSSTSEYTGKPGVVAHAFNPSILEAEVGRFLSSRPAWSTE

SEQ ID NO: 1017028 - protein, 105 aa, Homo sapiens
EGQQFAEGVNAQMLQHAESRVVTYQTFKKRTTGVFNIDIAVSYRRDDLSGDGAFQCTTTGNSNSTGYRQRAMARMRHKITHINCPAFLRWRNKHRFRDNHITDIT

SEQ ID NO: 1017029 - protein, 225 aa, Homo sapiens
  misc_feature (212)..(212): Xaa can be any naturally occurring amino acid
MDGGCRSPQVPKGGGLPMTTEVLKSLAAPPALEKKPQVAYKTEIIGGVVVHTPISQNGGDGQEGSEPGSHTILRRSQSYIPTSGCRASTGPPLIKSGYCVKQGNVRKSWKRRFFALDDFTICYFKCEQDREPLRTIFLKDVLKTHECLVKSGDLLMRDNLFEIITSSRTFYVQADSPEDMHSWIKEIGAAVQALKCHPREELPFLDASVNSXMNSSQAGMFYLVM

SEQ ID NO: 1017030 - protein, 178 aa, Homo sapiens
MDGGCRSPQVPKGGGLPMTTEVLKSLAAPPALEKKPQVAYKTEIIGGVVVHTPISQNGGDGQEGSEPGSHTILRRSQSYIPTSGCRASTGPPLIKSGYCVKQGNVRKSWKRRFFALDDFTICYFKCEQDREPLRTIFLKDVLKTHECLVKSGDLLMRDNLFEIITSSRTFYVQVQCTI

SEQ ID NO: 1017031 - protein, 98 aa, Homo sapiens
HYGSSSFGSLTFFMAVCKEQFLMNCCKELSGDQNEISLKNIKCNEHFIIMRLETLKAMLKPIRGMRLILSYCVGELAASHRYVGIVTHWLIHLKQQCE

SEQ ID NO: 1017032 - protein, 220 aa, Homo sapiens
RADAERPDQVRGAGPASAPPAEAEPETRGGSTDAGAGMATPRPCADGPCCSHPSAVLGVQQTLEEMDFERGIWSAALNGDLGRVKHLIQKAEDPSQPDSAGYTALHYASRNGHYAVCQFLLESGAKCDAQTHGGATALHRASYCGHTEIARLLLSHGSNPRVVDDDGMTSLHKAAERGHGDICSLLLQHSPALKAIRDRKARLACDLLPCNSDLRDLLSS

SEQ ID NO: 1017033 - protein, 175 aa, Homo sapiens
MATLRPCADGPCCSHPSAVLGVQQTLEEMDFERGIWSAALNGDLGRVKHLIQKAEDPSQPDSAGYTALHYASRNGHYAVCQFLLESGAKCDAQTHGGATALHRASYCGHTEIARLLLSHGSNPRVVDDDGMTSLHKAAERGHGDICSLLLQHSPALKAIRDRKARLACDLLALQQ

SEQ ID NO: 1017034 - protein, 185 aa, Homo sapiens
SGRTPSGQIRYAGRALRPPLPPRLSLRPGADRLTPGPGWRRLGPARTGPAARIPARCSAYSRRWRRWTSRHYASRNGHYAVCQFLLESGAKCDAQTHGGATALHRASYCGHTEIARLLLSHGSNPRVVDDDGMTSLHKAAERGHGDICSLLLQHSPALKAIRDRKARLACDLLPCNSDLRDLLSS

SEQ ID NO: 1017035 - protein, 220 aa, Homo sapiens; identical to SEQ ID NO: 1017032

SEQ ID NO: 1017036 - protein, 211 aa, Homo sapiens
RADAERPDQVRGAGPASAPPAEAEPETRGGSTDAGAGMATPRPCADGPCCSHPSAVLGVQQTLEEMDFERGIWSAALNGDLGRVKHLIQKAEDPSQPDSAGYTALHYASRNGHYAVCQFLLESGAKCDAQTHGGATALHRASYCGHTEIARLLLSHGSNPRVVDDDGMTSLHICSLLLQHSPALKAIRDRKARLACDLLPCNSDLRDLLSS

SEQ ID NO: 1017037 - protein, 245 aa, Homo sapiens
RADAERPDQVRGAGPASAPPAEAEPETRGGSTDAGAGMATPRPCADGPCCSHPSAVLGVQQTLEEMDFERGIWSAALNGDLGRVKHLIQKAEDPSQPDSAGYTALHYASRNGHYAVCQFLLESGAKCDAQTHGGATALHRASYCGHTEIARLLLSHGSNPRVVDDDGMTSLHKAAERGHGDICSLLLQHSPALKAIRDRKARLACDLHRPVLQAPALVSIHAAGQGTEARPPRKSPSLVTVEARE

SEQ ID NO: 1017038 - protein, 211 aa, Homo sapiens
RADAERPDQVRGAGPASAPPAEAEPETRGGSTDAGAGMATPRPCADGPCCSHPSAVLGVQQTLEEMDFERGIWSAALNGDLGRVKHLIQKAEDPSQPDSAGYTALHYASRNGHYAVCQFLLESGAKCDAQTHGGATALHRASYCGHTEIARLLLSHGSNPRVVDDDGMTSLHKAAERGHGDSRELRPDHPGRAPVWSLWKRGSRFGVAKSV

SEQ ID NO: 1017039 - protein, 297 aa, Homo sapiens
MATPRPCADGPCCSHPSAVLGVQQTLEEMDFERLLRGVTGTANSPALQGTIRGTAIGYGSAHVHCCLATVTCGTCYPAEPPPYLQLPLKGKWRRVEGKVLGFGHGVPDPGAWPSDWRRGPQEAVAREKLKLDLKDASRRKLDPIYPRYQDFKFWTYTWNDLEKKIESYNKKENSDLSNQVVHQTQATMQQHEKKGRQNHTGEKQEQERTGADVHEEEHKERTGSNRRTDKAKTEKGTKTTKTRSHSPATDGTDTEGQHKPEATNADRRQQKRGPLQGRLKEPHNEDTQKKKRKRTRR

SEQ ID NO: 1017040 - protein, 220 aa, Homo sapiens; identical to SEQ ID NO: 1017032

SEQ ID NO: 1017041 - protein, 221 aa, Homo sapiens
RADAERPDQVRGAGPASAPPAEAEPETRGGSTDAGAGMATPRPCADGPCCSHPSAVLGVQQTLEEMDFERGIWSAALNGDLGRVKHLIQKAEDPSQPDSAGYTALHYASRNGHYAVCQFLLESGAKCDAQTHGGATALHRASYCGHTEIARLLLSHGSNPRVVDDDGMTSLHKAAERGHGDICSLLLQHSPALVSIHAAGQGTEARPPRKSPSLVTVEARE

SEQ ID NO: 1017042 - protein, 208 aa, Homo sapiens
RADAERPDQVRGAGPASAPPAEAEPETRGGSTDAGAGMATPRPCADGPCCSHPSAVLGVQQTLEEMDFERGIWSAALNGDLGRVKHLIQKAEDPSQPDSAGYTALHYASRNGHYAVCQFLLESGAKCDAQTHGGATALHRASYCGHTEIARLLLSHGSNPRVVDDDGMTSLHKAAERGHGDICSLLLQHSPVWSLWKRGSRFGVAKSV

SEQ ID NO: 1017043 - protein, 133 aa, Homo sapiens
TLAGDVHIVRGDFDEKSELPQNKRLWTVGQFKIGLIHGHQVIPWGDMASLALLQRQFDVDILISGHTHKFEAFEHENKFYINPGSATGAYNALETNIIPSFVLMDIQASTVVTYVYQLIGDDVKVERIEYKKS

SEQ ID NO: 1017044 - protein, 255 aa, Homo sapiens
SGVPPGSRQGAELRSRLVSRVHRSIPASFCPSERTLQEQPRGWHGSEHRHGMGWRRASASCQSMGDPKGPVGEEMNGKRNVGQAVQRTARVADGKSVTGTDVDIVLLPKSTGKSSSGHQAMRESEKALDRSWRPQKIQGERAADGGLLMPSASWWQAKEPDRMWASLKQNPGGAVERTDGPPGDTQGLPQGSASMRSGKGQRHWRDRQDILDDSGYVTPPTRMTAPTMPRGNKLRLGKDRLPSADDTDKRLKAGY

SEQ ID NO: 1017045 - protein, 76 aa, Homo sapiens
  misc_feature (5)..(5): Xaa can be any naturally occurring amino acid
SCARXLGGAVEPPEGDRGIQKPLPGLPWEEADPGPASDRGMGWSCRKALGRGRQRGHWLLLCCRRRTGSSAYTELY

SEQ ID NO: 1017046 - protein, 83 aa, Homo sapiens
SGGSCQSKAKRKEAGPLEVVVTTPAMWRSLWLALALCLLPSGGTESQDQSSLCKQPPAWSIRDQDPMLNFNGSVTVVALLQAS

SEQ ID NO: 1017047 - protein, 83 aa, Homo sapiens; identical to SEQ ID NO: 1017046

SEQ ID NO: 1017048 - protein, 104 aa, Homo sapiens
  misc_feature (11)..(11): Xaa can be any naturally occurring amino acid
LDSFPHRRQSXGPAPLRSFPPIGPLWPVGEFRREAFPLEVVVTTPAMWRSLWLALALCLLPSGGTESQDQSSLCKQPPAWSIRDQDPMLNFNGSVTVVALLQAS

SEQ ID NO: 1017049 - protein, 83 aa, Homo sapiens; identical to SEQ ID NO: 1017046

SEQ ID NO: 1017050 - protein, 379 aa, Homo sapiens [sequence omitted]

SEQ ID NO: 1017051 - protein, 281 aa, Homo sapiens; identical to SEQ ID NO: 766224

SEQ ID NO: 1017052 - protein, 84 aa, Homo sapiens
  misc_feature (5)..(5): Xaa can be any naturally occurring amino acid
  misc_feature (18)..(18): Xaa can be any naturally occurring amino acid
  misc_feature (75)..(75): Xaa can be any naturally occurring amino acid
MKWVXALLLLAAWAAARXTAEVSSFRVKENFDKARFSGTWYAMAKKDPEGLFLQDNIVAEFSVDETGQMSATAKXESSLLNNLG

SEQ ID NO: 1017053 - protein, 255 aa, Homo sapiens
FDRVLLNDGGYYDPETGVFTAPLAGRYLLSAVLTGHRHEKVEAVLSRSNQGVARVDSGGYEPEGLENKPVPDEQPSPGTPGAVFPSLNSCRAAGLGTRSAVTTWSIGRQRGSTREEPLTIFQAVALLYGGPRSLKQRVELGSQPKCLRSGEDDMVGVLAGSWGVFSLKTGGTYGPGQMRLTPWAPQAGHTAPQEDGLLPTPPGRARLQGRARGPAIGRLFAPECGSPTRKPPSQGPALPEGQPDSIGNTVQVPVT

SEQ ID NO: 1017054 - protein, 120 aa, Homo sapiens
MSSSDSSDSSFFASTFFSSAGAAAVDGAAPPAGAVQLLERPTSPYIADEAPNVDIGQSLGKQARPERFDADTSCFNEGIDLILRDRHLVVVQDEGGVDASELGDGSHAVDCRHGASRRMK

SEQ ID NO: 1017055 - protein, 110 aa, Homo sapiens
IYPTVQYPLEVLGLHLIESGNLTDEGQQYCCRLVEMDSKSGPGLIGLGIKALQDKKYEDAVRNLTEGLKESPVCTSGWYHLAEAQVKMHRPKEAVLSCSQGIFDTFWVDI

SEQ ID NO: 1017056 - protein, 77 aa, Homo sapiens
RGGGIQDEEREESPSPPPPPPPVGGGLREETVADLGMFWKKRIYPKIENWKQPLMCMMVVLIQSVGMTRENIFIGLR

SEQ ID NO: 1017057 - protein, 141 aa, Homo sapiens
  misc_feature (137)..(137): Xaa can be any naturally occurring amino acid
  misc_feature (141)..(141): Xaa can be any naturally occurring amino acid
LQDNSSYPDEPWRITEEQREYYVNQFRSLQPDPSSFISGSVAKNFFTKSKLSIPELSYIWELSDADCDGALTLPEFCAAFHLIVARKNGYPLPEGLPPNSGSQEYLEGKLFLKAQNGDFSIYFEFLIPEVTAGQINXLVNX

SEQ ID NO: 1017058 - protein, 148 aa, Homo sapiens
  misc_feature (10)..(10): Xaa can be any naturally occurring amino acid
RWKAQCMRKXGSHERECPTKLVSGGCPSWAPLAAIGFILILVFTHLALAKEGPGSAKQTAVPSEGSGVNDPKQPQLGGWPQLPLNSLRKDPVPKMHWGPRQSKSPSPCWSEDIITGMSPKPEHLLYGMTMGTLQMAALCPIKAQRARL

SEQ ID NO: 1017059 - protein, 99 aa, Homo sapiens
VLERRRSSMGKSKLGRSCRAGIMMRDFTPSGIAGAFRRGYDRYYNKYINVRKGSISGISMVLAAYVVFSYCISYKELKHERRRKYHLKRGRWRALHGRA

SEQ ID NO: 1017060 - protein, 120 aa, Homo sapiens
MTRMSVFPQGNSFLPDALFGHDADPESISSIHIPLGCRNEDIFHQPHGSVQRQGDVLYILHIFEANLVVEQRLQHGIAEPPALKESLWVRAHWVKAVHSSLSFFIKSSNDVVNIVREEAP

SEQ ID NO: 1017061 - protein, 198 aa, Homo sapiens
MAAPAPLTAKEAQGWGAPLPSNDRPCHILTLAQQENTAGPSERCRPLQPAMPLDHEGDPAVHVMRFPFTTIAYRAEVWVAFESSLGVLLVYKIAIMPSDELTDICFPTVLGGWRPEIEVPDTISVMPEPRRSRAKPQRGHKHLRRTTESLQVFSPVESGSRCRWSQLSNSSSPASTTEQTQLHFSVEPPVDTESHWGV

SEQ ID NO: 1017062 - protein, 142 aa, Homo sapiens
APTPSPPHARPLAFAEPKWINYTLSVSLRAVLSRCAPARLSLSSLPLCPLFRSRPFSVLHICLSTAYHLAPFYSLIQEVTSVSQSTRYAPTTIEGTNDLVQPQRHGEDKRVIPWKKGTRMDRLKDRKHERYTHKKENGRGVH

SEQ ID NO: 1017063 - protein, 114 aa, Homo sapiens
  misc_feature (1)..(1): Xaa can be any naturally occurring amino acid
  misc_feature (9)..(9): Xaa can be any naturally occurring amino acid
  misc_feature (15)..(15): Xaa can be any naturally occurring amino acid
  misc_feature (18)..(18): Xaa can be any naturally occurring amino acid
XFENLMESXSKKAFXIFXQTPKLSKFLPCPAVFVEKYHQSFQNLGRNQMKRKLFVETGKALLAEGHHFKEEVREARTVSVRLQASSEGHEPQEDDDLAQRGQVKQEPETAPSPP

SEQ ID NO: 1017064 - protein, 195 aa, Homo sapiens
  misc_feature (129)..(129): Xaa can be any naturally occurring amino acid
  misc_feature (131)..(131): Xaa can be any naturally occurring amino acid
  misc_feature (144)..(144): Xaa can be any naturally occurring amino acid
  misc_feature (149)..(149): Xaa can be any naturally occurring amino acid
  misc_feature (162)..(162): Xaa can be any naturally occurring amino acid
  misc_feature (189)..(189): Xaa can be any naturally occurring amino acid
MAASTSMVPVAVTAAVAPVLSINSDFSDLREIKKQLLLIAGLTRERGLLHSSKWSAELAFSLPALPLAELQPPPAITEEDAQDMDAYTLAKAYFDVKEYDRAAHFLHGCNSRKAYFLYMLFQISVWGKXTXGDETVDCLGPLGXGQVKXGALGGLWVGLSKXHQARELDGFGLSLSGVVLRKLGLVNEXIDVFVE

SEQ ID NO: 1017065 - protein, 125 aa, Homo sapiens
MAASTSMVPVAVTAAVAPVLSINSDFSDLREIKKQLLLIAGLTRERGLLHSSKWSAELAFSLPALPLAELQPPPAITEEDAQDMDAYTLAKAYFDVKEYDRAAHFLHGCNSRKAYFLYMLFQISG

SEQ ID NO: 1017066 - protein, 126 aa, Homo sapiens
RRNGPRLRPRDLRGKKKEELLKQLDDLKVELSQLRVAKVTGGAESKLSKIRVVRKSIARVLTVINQTQKENLRKFYKGKKYKPLDLRPKKTRAIARRLTKHEEKLKTKKQQRKERLYPLRKYAVKA

SEQ ID NO: 1017067 - protein, 157 aa, Homo sapiens
  misc_feature (23)..(23): Xaa can be any naturally occurring amino acid
  misc_feature (25)..(25): Xaa can be any naturally occurring amino acid
  misc_feature (31)..(32): Xaa can be any naturally occurring amino acid
QAHRASGKVSARSRVSSPHCGRXGXDSERPXXLDEIAKAQVAQPAATRIFGKIIRKEIPAKIIFEDDRCLAFHDISPQAPTHFLVIPKKHISQISVADDDDESLLGHLMIVGKKCAADLGLKRGYRMVVNEGADGGQSVYHIHLHVLGGRQMNWPPG

SEQ ID NO: 1017068 - protein, 282 aa, Homo sapiens
LAPVPETRAMSSKGSVVLAYSGGLDTSCILVWLKEQGYDVIAYLANIGQKEDFEEARKKALKLGAKKVFIEDVSREFVEEFIWPAIQSSALYEDRYLLGTSLARPCIARKTSEKSPSGRVAKYVSHGATGKGNDQVRFELHAATHLDLHQIQGHLLPGGCLNSTTVFKGRNDLDGVRKATLGIPNTRVHSQRNPWSMDENLNATSATRLESWKNPKKPSASRSLHEEARTQTKPQTPLTFSQIEFKERVPVRVTNVTDGTNAQTSLELLHVPERSRGQHGLG

SEQ ID NO: 1017069 - protein, 284 aa, Homo sapiens
GQHAFPVYNASYSRGSVTAETPWGGLDTSCILVWLKEQGYDVIAYLANIGQKEDFEEARKKALKLGAKKVFIEDVSREFVEEFIWPAIQSSALYEDRYLLGTSLARPCIARKTSEKSPSGRVAKYVSHGATGKGNDQVRFELHAATHLDLHQIQGHLLPGGCLNSTTVFKGRNDLMEYAKATLGIPNTRVHSQRNPWSMDENLNATSATRLESWKNPKKPSASRSLHEEARTQTKPQTPLTFSQIEFKERGPCEVTNVTDGTNAQTSLELLHVPERSRGQHGLG

SEQ ID NO: 1017070 - protein, 50 aa, Homo sapiens
DTSLHSFLRALRSLLSPDMANKGPSYGMSREVQSKIEKKYSRQLEERLGG

SEQ ID NO: 1017071 - protein, 123 aa, Homo sapiens
YSRRSKMNPLWNTMVIGGYADGESFLGYVDMLGVAYEAPSLATGYGAYLAQPLLREVLEKQPVLSQTEARELVERCMRVLYYRDARSYNRFQIATVTEKGVEIEGPLSAQTNWDIAHMISGFE

SEQ ID NO: 1017072 - protein, 140 aa, Homo sapiens
VFSRTRDLMRAGVLKEKPLWYDIYKAFPPLREPVFRSPAAIRQSKADIQDIFYQEDQIRAKFFATYGSGQKAFDLFNPNFKSTCQRFVEKVHRASESLEKQIEEKLFVETGEGSVGQEGIILKKSSEKPRTVSVRLQASS

SEQ ID NO: 1017073 - protein, 99 aa, Homo sapiens
  misc_feature (1)..(2): Xaa can be any naturally occurring amino acid
XXPDVQTMSHLVEPPPPLHNNNNNCEEGEQPLPPPAGLNSSWVELPMNSSNGNENGNGKNGGLEHVPSSSSIHNGDMEKILLDAQHESGTEQLKRQFAL

SEQ ID NO: 1017074 - protein, 76 aa, Homo sapiens
VTTLPDMPTVGGDITPAQTSIKTTTPPTTPPPFTGGDFTHFFQNLLSSDAHGLGFLRHKFDDLRFCDELSLLSANP

SEQ ID NO: 1017075 - protein, 159 aa, Homo sapiens
RHEGGVSSVLVPKWISAGLRQMQAWGKSPFWTEKRRMEKPLFPLVPLHWFGFGYTALVVSGGIVGYVKTGSVPSLAAWLLFGSLAGLGAYQLLSSDPEETVYEAILLASYILLLLSRVLWRMRSYYYGKFMPVGLDVQVPGLLMAAKSGSSVCWTDNLT

SEQ ID NO: 1017076 - protein, 180 aa, Homo sapiens
  misc_feature (6)..(6): Xaa can be any naturally occurring amino acid
  misc_feature (45)..(45): Xaa can be any naturally occurring amino acid
PHTHLXAYARARGADRMSSFGDFVALSDVCDVPTAKIISREVSDXIIPPGYEEEALTILSKKKNGNYCVLQMDQSYKPDENEVRTLFGLHLSQKRNNGVVDKSLFSNVVTKNKDLPESALRDLIVATIAVKYTQSNSVCTPRTGRLSALEQDSSLVYTALALQEIRQTIGGLDTIHKCFR

SEQ ID NO: 1017077 - protein, 180 aa, Homo sapiens; identical to SEQ ID NO: 1017076
  misc_feature (6)..(6): Xaa can be any naturally occurring amino acid
  misc_feature (45)..(45): Xaa can be any naturally occurring amino acid

SEQ ID NO: 1017078 - protein, 125 aa, Homo sapiens
MRRHTPRDTRRVGNSHKPLHPAFTPHYVLLRAGRGPCPSGSLVSSEASLSRKCGEVPAPGARPRPPPFFPTLRTRGRQGRGGGGEAGASRPPGSPPPAGPEPRGGAGRGRRRGPGVESDFLLRGR

SEQ ID NO: 1017079 - protein, 138 aa, Homo sapiens
MEKHFKNGMAVARFLETNPRVEKVVYPGLPSHPQHELAKRQCSGCPGMVSFYIKGALQHAKAFLKNLKLFTLAESLGGYESLAELPAIMTHASVPEKDRATLGINDTLIRLSVGLEDEQDLLEDLGSSFERQRTLKKF

SEQ ID NO: 1017080 - protein, 365 aa, Homo sapiens
TSSNHLWAPPACTFISTFSQHLRQTPAMANHAPFETDISTLTRFVMEQGRKAQGTGELTQLLNSLCTAIKAISSAVRQAGIAQLYGIAGLNQCDWGSSKKLDILSNDLVINMLKSSYATCVLVSEENTNAIIIEPEKRGKYVVCFDPLDGSSNIDCLVSIGTIFGIYRKKSTDEPSEKDALQPGRDLVAAGYALYGSATMLVLAMDCGVNCFMLDPSIGEFIMVDRDVKMKKKGNIYSLNEGYAKDFDPAINEYLQRKKFPPDGSAPYGARYVGSMVADIHRTLVYGGIFLYPANKKSPSGKLRLLYECNPIAYVMEKAGGLATTGDKDILDIVPTEIHQKAPVVMGSSEDVQEFLEIYRKHKAK

SEQ ID NO: 1017081 - protein, 114 aa, Homo sapiens
  misc_feature (4)..(4): Xaa can be any naturally occurring amino acid
DEVXREAAAPEPRAHQTGSREETDRAGPMKADVEIPFEEVLEKAKAGDPKAQTEVGKHYLRLANDADEELNSCSAVAWLILPALSLLCVGFVFQICVYVDFMVVFLIYLVAAKP

SEQ ID NO: 1017082 - protein, 68 aa, Homo sapiens
ARALERWRQRRQRRKCSPRGPALMVAGIWEPARARRRRQKLPAKILGGVCWWYSQKKDNVGSEARFQG

SEQ ID NO: 1017083 - protein, 100 aa, Homo sapiens
VEIDHHRGLHPYLHLEQTDEEEEGLVLLSWVAQLEENPHISGLSSSSNSCCSRVDCIYFSEAKFQNFDQIPQSPLKKLESLFQNGIAGRPWGIWFLDFTT

SEQ ID NO: 1017084 - protein, 242 aa, Homo sapiens
ARADMLCEAGRFGQKTGKGWYQYDKPLGRIHKPDPWLSEFLSQYRETHHIKQRSISNEEILERCLYSLINEGIPHLGGGDGRYAMSTSDVIYFAWVWVAKARGWAHVLCCLSWAATVLEKLQKYYRQNPDIPQLEPSDYLRRLGCPGKPSSERMAKLGKDPIAANCDSAFCILPCMVASNFSVIIPKIQTDFSEVQMIDLLLLLLLLVVVVLNGQQKPLSVSSYLIILMARFQECVFYTSDG

SEQ ID NO: 1017085 - protein, 107 aa, Homo sapiens
RVNRIGDCGGRAEPWPPHNGPRVWESDADAHVISYSLSPFEQRAYPHVFTKGIPNVLRRIRESFFRVVAAVCSVLSYLHMGGLKSSRDPRGRIQLPMKMTNEQRTSG

SEQ ID NO: 1017086 - protein, 126 aa, Homo sapiens
  misc_feature (8)..(8): Xaa can be any naturally occurring amino acid
  misc_feature (37)..(37): Xaa can be any naturally occurring amino acid
FPGILSGXLFFLMDSFCIKYSLVLKLGVGGSAFSPQXLRRQRQRGQRERQRERPERQRQRQVDILEYSLVYRSSSRTARATQRNPVLKKKKKIPLVLKQNHGYHCVHTESKSGWAQGFQLHLYVWI

SEQ ID NO: 1017087 - protein, 203 aa, Homo sapiens
GLRMRHDVRGVSQELGEGKRAPGPVPEARIRIYSMRFCPFAERTRLVLKAKESGMKSSDIKPEHISPELGSFTDKIRYGSCVPRFLGKNKSRGSSVGILRKILGPSPTVDDVACDERITQWKKLLPDDPYEKACQKMILELFSKVPSLVGSFIRSQNKEDYDGLKEEFRKEFTKLEEVLTNKKTTFYGGNSISMIDNLIWPWY

SEQ ID NO: 1017088 - protein, 68 aa, Homo sapiens
ARIRPRVEDEDHFPEKSKVIISKEVYKCLVGMENEDKKKRRTMEKAQLGTEQQPAAKVTNSWDSRRVV

SEQ ID NO: 1017089 - protein, 185 aa, Homo sapiens
  misc_feature (41)..(41): Xaa can be any naturally occurring amino acid
CYCCRKCCHWKCRGKCIQCTSASSLVLDHISKGATTPPASXSQSVAKGSHQPFDVSAFNASYSDSGLFGIYTISQAAAAGEVINAAYNQVKAVAQGNLSSADVQAAKNKLKAGYLMSVETSEGFLSEIGSQALAAGSYMPPSTVLQQIDSVADADVVKAAKKFVSGKKSMAASGNLGHTPFLDEL

SEQ ID NO: 1017090 - protein, 153 aa, Homo sapiens
  misc_feature (52)..(52): Xaa can be any naturally occurring amino acid
EEPRYKKDKASSNEENPSLSAATSPKLEVDAIVNAANSSLLGGGGVDGLQFXSRRPPASDECRTLQSCKTGKAKITGGYRLPAKYVIHTVGPIAYGEPSASQAARLRSCYLSSLDLLLVMTLRSVAFPCISTGVFGYPCELAAEIVLATLREW

SEQ ID NO: 1017091 - protein, 121 aa, Homo sapiens
IATVEISIVENSWAPLEPVHLAENLKVVYPHSIAQVHWSGGDVHYQLESQPPGPFDVDTEGMLHVTMEPGPGAQAEYQLQVRAQNSHGEDYAEPLELQVVVMDENDNAPVCSPHDPTVNIP

SEQ ID NO: 1017092 - protein, 119 aa, Homo sapiens
MKLLAELVLLLTICSLEGALVRRQAKEPCVETLVSQYFQTVTDYGKDLMEKVKEPRSFQAEAKSLLFEKFKGAADTPGSKKDWKRNWLTSLAISVELGTQPCHPVKCARPFSSNPSWPL

SEQ ID NO: 1017093 - protein, 73 aa, Homo sapiens
QEGTALHLQTSLPALSEADTQELTQILRRMKGLALEAESELERQDEALDGVAAAVDRATLTIDKHNRRMKRLT

SEQ ID NO: 1017094 - protein, 105 aa, Homo sapiens
QEGTALHLQTSLPALSEADTQELTQILRRMKGLALEAESELERQDEALDGVAAAVDRATLTMFCGCCRSVDHGGTPRTLGTGLEEAALVLSRLPFMDRLAFLAVL

SEQ ID NO: 1017095 - protein, 73 aa, Homo sapiens; identical to SEQ ID NO: 1017093

SEQ ID NO: 1017096 - protein, 156 aa, Homo sapiens
  misc_feature (151)..(151): Xaa can be any naturally occurring amino acid
MLLSPDPSHSATGNLLNLEVGGDCPCRPRHLVAPAPLLGFADDVPQEPVPTLWNEPAELPSGEGPVESTSPGREPVDTGPPAPTVAPGPEDSTAQERLDQGGGSLGPGAIAAIVIRRPAGHLAWVLALGGSFALKKVFLAFLKRIKVVARXGATRL

SEQ ID NO: 1017097 - protein, 81 aa, Homo sapiens
MVERIDEGVFIVEEGDALVTKNLVPGESVYGERRVSISEEMTNEDRAWTLPSKLAAAILGGVDQIHINRGLRSLPGAPGTK

SEQ ID NO: 1017098 - protein, 76 aa, Homo sapiens
MPAPDPATPTVAAPAPMNLAAVSMSREMTLVWNSVGPPGRGELLQEGCLDGASGLLRREADTGLIRPLVQERIRAG

SEQ ID NO: 1017099 - protein, 123 aa, Homo sapiens
RRRTQPLPTSGVFFQATQDIFSFCYPRFPLFSTSLWLASPPRGAPIRGGVLRLPYGDNSTFEVSVLGNICGLQGQSQVWGSPSPYDQCWGIPWEPRFFEAPAPLLTTLEWVVPVFIEIKDPFP

SEQ ID NO: 1017100 - protein, 151 aa, Homo sapiens
ATSGAKKITIFTDAKESSTVFELKRIVGGASSKRPPEEQRAFTRMTSSLMMAKTLGECGFTSQTAPPQAPATVGLAFRADDTFEALRIEPFSSPPELSRCDESHRILEAVPMNKLCSEGPRPTPLETHFPNKKILAVYLIDFFWFPSWFTE

SEQ ID NO: 1017101 - protein, 74 aa, Homo sapiens
  misc_feature (23)..(23): Xaa can be any naturally occurring amino acid
  misc_feature (72)..(72): Xaa can be any naturally occurring amino acid
MELILLTDPAAAACVPLERQTSXAPPIRFPFLPPQLAESSRAHRSAPYENEVVTGPRMTPRHHCEAYSSAGXGG

SEQ ID NO: 1017102 - protein, 187 aa, Homo sapiens
MMKLWVPSRSLPNSPNHYRSFLSHTLHIRYNNSLFISNTHLSRRKLRVTNPIYTRKRSLNIFYLLIPSCRTRLILWIIYIYRNLKHWSTSTVRSHSHSIYRLRPSMRTNIILRCHSYYKPPISHPIYWNNPSRMNLRGLLSRQSHLDPILRFPLHLTIYYRGPSNRSPPLPPRNRIKQPNRIKLRCR

SEQ ID NO: 1017103 - protein, 284 aa, Homo sapiens
MMKLWVPSRSLPNSPNHYRSFLSHTLHIRYNNSLFISNTHLSRRKLRVTNPIYTRKRSLNIFYLLIPSCRTRLILWIIYIYRNLKHWSTSTVRSHSHSIYRLRPSMRTNIILRCHSYYKPPISHPIYWNNPSRMNLRGLLSRQSHLDPILRFPLHLTIYYRGPSNRSPPLPPRNRIKQPNRIKLHVSVSWEFAGTDYKVLLSRQMGMVFALDYDPVESKIYFAQTALKWIERANMDGSQRERLITEGVDTLEGLALDWIGRRIYWTDSGKSVVGGSDLSGKHHR

SEQ ID NO: 1017104 - protein, 153 aa, Homo sapiens
FKYRKQDLLHFMQFGVHAAMEMSTIFNVLKNKTVARAVHKVLVLLDLGEKGWGGNQLSVENEFMAHRQEMFPHLLDAEGSGEGAEKNAGGKGSDPFSFSEGRTGRVEILYTLGKEEHRLPCPLAVVVSAQARKHTRELFLQPHVSRKCHKYVI

SEQ ID NO: 1017105 - protein, 135 aa, Homo sapiens
FKYRKQDLLHFMQFGVHAAMEMSTIFNVLKNKTVARAVHKVLVLLDLGEKGWGGNQLSVENEFMAHRQEMFPHLLDAEGSSEGRTGRVEILYTLGKEEHRLPCPLAVVVSAQARKHTRELFLQPHVSRKCHKYVI

SEQ ID NO: 1017106 - protein, 169 aa, Homo sapiens
RSDSELKDEETKETLRWSGRDYREREREYERDQERILRERERLKRQEEERRRERYEKEKTFKRKEEEMKTEKDTLRDKGKKAESTESIGSSEKTEQKEEVVKRDRIRNKDRPAMQLYQPGARSRNRLCAPDDSTKSGDSRSRKEAGPVVLAIDKEGGEALIRPDALRVS

SEQ ID NO: 1017107 - protein, 239 aa, Homo sapiens
RSDSELKDEETKETLRWSGRDYREREREYERDQERILRERERLKRQEEERRRQKERYEKEKTFKRKEEERRRQKERYEKEKTFKRKEEEMKTEKDTLRDKGKKAESTESIGSSEKTEQKEEVVKRDRIRNKDRPAMQLYQPGARSRNRLCAPDDSTKSGDSRSRKEAGPVVLAIDKEGGEALIRPDALGCPDCLGSQKSTTLSNSTQLPFRGKAIERKGAAVLVGYTARGVSLVSTAGI

SEQ ID NO: 1017108 - protein, 228 aa, Homo sapiens
  misc_feature (5)..(5): Xaa can be any naturally occurring amino acid
  misc_feature (64)..(64): Xaa can be any naturally occurring amino acid
  misc_feature (93)..(93): Xaa can be any naturally occurring amino acid
PSTAXTNSHPEMFHQVWAALLSLYGLLFNSMNQCPEHSQLTALGMDDTETPEPHLGLWYFIAGXPSTTEELATFDPVDNIVFNMAAGSAQGGXQLRATIRTKSGVCVPRKWTYRLTEGKGNMELRTEGRPDMKTDLFSSSCPGGIMLKETGQGYQRFLLYNRSPHPPEKCVEEFQSLTSCLDFKAFLVTPRNQEACPLSSKLTSDFTRVLDRQDRSPASSGEASDSCP

SEQ ID NO: 1017109 - protein, 78 aa, Homo sapiens
  misc_feature (75)..(75): Xaa can be any naturally occurring amino acid
SETVRLTARILAKQKIHPERTPSEKLLAVKEFESHLDKLDNEKKDLIQSDIAALHHFYSKHLGFPDNDSLVVLFXQGE

SEQ ID NO: 1017110 - protein, 211 aa, Homo sapiens
MPPKKGGDGIKPPPIIGKIWNLTEQLVLLDCQTVGKSTFLQCVNQIAQASASKTSRSAPIDPNEEQSTCARLNRFDFSLSSTTKPASKDSCPFYNVSGLSLAFVTGAHNGQGLGNAFLSHISACDGIFHLNTCYRQQLMTIPRPGLQGTDGSIPIPQPYQTINHMNDSFQFNDCRHMIGANTAQYTKVAVTRRAYKPQPDHDTTPQPTLGT

SEQ ID NO: 1017111 - protein, 271 aa, Homo sapiens
YGRLWLRVRACLQRADGDPAAPAGLRVPVQGTGWSSCAREAGSMQSPEKYQQRVVRVKLASDDRGELAVPDAAHPHPQLHTSSSKTLGGVLPGALGPSIALLSHATHRSASAATHRLWGRTKSSRLAVADCLGPWVACLTPLVPPWRAWPYLILVGTAALAQASSASLNRHLLPTSSLGRLHMLPADPSWGPLRICSWEQRDTSLAPSVCAPRVTQLQGGAGLPGVPFTTVPGPSGPPLDAEFLPQNCISWAQQHEVPEAIVSEAITRLSG

SEQ ID NO: 1017112 - protein, 279 aa, Homo sapiens
MDTGPLNAASLREEQLHLSLLVSSGWRTISFHVVPVVRRKLGAPALEGVQQMPGFPEGSLRRILSQGVDLVPASAQLWRTSTDYLLTRLLGELGSLQGHRLDSLSILDRVNHESWRDSGQTDGLTFGHLKMVLLWASVLFPAPEDWAEPQGAVYRLLVVLLCCLATRKLPHFLHPQRNLLQGSGLDLGAIYQRVEGFASQPEAALRIHATHLGRSPPPRIGSGLKALLQLPASDPTYWATAYFDVLLDKFQVFNIQDKDRISAMQSIFQKTRTLGGEES

SEQ ID NO: 1017113 - protein, 326 aa, Homo sapiens
RWTTEDTFTASSEGDAKCRGHIVPSKVLCVLKDLLVAAIVHCKHHSLIAPGPLNAASLREEQLHLSLLVSSGWRTISFHVVPVVRRKLGAPALEGVQQMPGFPEGSLRRILSQGVDLVPASAQLWRTSTDYLLTRLLGELGSLQGHRLDSLSILDRVNHESWRDSGQTDGLTFGHLKMVLLWASVLFPAPEDWAEPQGAVYRLLVVLLCCLATRKLPHFLHPQRNLLQGSGLDLGAIYQRVEGFASQPEAALRIHATHLGRSPPPRIGSGLKALLQLPASDPTYWATAYFDVLLDKFQVFNIQDKDRISAMQSIFQKTRTLGGEES

SEQ ID NO: 1017114 - protein, 150 aa, Homo sapiens [sequence omitted]

SEQ ID NO: 1017115 - protein, 188 aa, Homo sapiens
  misc_feature (36)..(36): Xaa can be any naturally occurring amino acid
MAAMSCCSGFGLRADSVALAAALVLDSESEVFSRGXSEDCRSCAAQWGHGKRLFVVKPSLYYDARFLRLMKFYLMLTGIPVIIGITLVNIFIGEAELAEIPEGYIPEHWEYYKHPISRWIARNFYDGPEKNYEKTLAILQIESEKAELRLKEQEVRRLMRARGDGPWYQFPTPEKEFIDHSPKATPDN

SEQ ID NO: 1017116 - protein, 366 aa, Homo sapiens
  misc_feature (5)..(5): Xaa can be any naturally occurring amino acid
  misc_feature (25)..(25): Xaa can be any naturally occurring amino acid
  misc_feature (30)..(30): Xaa can be any naturally occurring amino acid
TPFQXQTLVYSKRSGKPQLLSFIEXEHEQXMNPLKKTQMARKLMAEGPCERGEGRTVKGWRPRRLGGGLGGTRRGGADVNIRHSGRVDTSRYDERPGPSPLPHRDRDRDRERERRERSRERDKERERRSSRSREPAEALTKSQTRRSGRRSRERSKNKDRDRKQAKQPKSGARPGGSGSARRSCVAAVATWRSPPRRVTRPLMMGLQGRHSLTALTVQRKRAGIVTGSDGGSHRSERERRRDRDRDRDRDREHKRGERGSERGRDKARGGGGGQDNGLEGLGNDSRDMYMESEGGDGYLAPRDGYLMEVRRSEEFVLSICCVSDAFLHQPLAVIPSPNLGHLSLSSKGRCLICSGPLDLKIKLISC

SEQ ID NO: 1017117 - protein, 324 aa, Homo sapiens
  misc_feature (2)..(2): Xaa can be any naturally occurring amino acid
  misc_feature (22)..(23): Xaa can be any naturally occurring amino acid
  misc_feature (26)..(27): Xaa can be any naturally occurring amino acid
  misc_feature (30)..(30): Xaa can be any naturally occurring amino acid
  misc_feature (32)..(32): Xaa can be any naturally occurring amino acid
  misc_feature (35)..(36): Xaa can be any naturally occurring amino acid
  misc_feature (40)..(40): Xaa can be any naturally occurring amino acid
  misc_feature (45)..(45): Xaa can be any naturally occurring amino acid
  misc_feature (52)..(52): Xaa can be any naturally occurring amino acid
  misc_feature (55)..(56): Xaa can be any naturally occurring amino acid
  misc_feature (64)..(64): Xaa can be any naturally occurring amino acid
  misc_feature (78)..(78): Xaa can be any naturally occurring amino acid
  misc_feature (84)..(84): Xaa can be any naturally occurring amino acid
  misc_feature (88)..(88): Xaa can be any naturally occurring amino acid
KXWKPPAGLGEGLRWLPRKRKXXECXXSRXSXASXXLPPXLRIKXPRPPPPXSRXXGTGNREPXQRGAPEQLVARAAXTKEAEXRAVXPRSREPAEALTKSQTRRSGRRSRERSKNKDRDRKRRSSRSRERARRERERKEELRGGGGDMAEPSEADYAPPDDGPPGEALPNGPDGPEEKGRDRDRERRRSHRSERERRRDRDRDRDRDREHKRGERGSERGRDKARGGGGGQDNGLEGLGNDSRDMYMESEGGDGYLAPRDGYLMEVRRSEEFVLSICCVSDAFLHQPLAVIPSPNLGHLSLSSKGRCLICSGPLDLKIKLISC

SEQ ID NO: 1017118 - protein, 57 aa, Homo sapiens
MCCEASPDSSKTDKKLQIQEKAAQEVKLAIKPFYQNKDIYQEDYKALYGAVDKFVIV

SEQ ID NO: 1017119 - protein, 108 aa, Homo sapiens
RYPKAAELGVWARPAGEAYKLRYQEIAKRTQPPPKLPVGPSHKLSNNYYCTRDGRREVVPPSIIMSSQKALVSGKAAESSAMAATEKKAVTPAPPMKRWELSKDQPYL

SEQ ID NO: 1017120 - protein, 76 aa, Homo sapiens
ARAGTTMSKVSFKITLTSDPRLPYKVLSVPESTPFTAVLKFAAEEFKVPAATSAIITNDGIGINPAQTAGEYLKLF

SEQ ID NO: 1017121 - protein, 78 aa, Homo sapiens
ARAGTTMSKVSFKITLTSDPRLPYKVLSVPESTPFTAVLKFAAEEFKVPAATSAIITNDGIGINPAQTAGNVFLKHGS

SEQ ID NO: 1017122 - protein, 71 aa, Homo sapiens
  misc_feature (3)..(3): Xaa can be any naturally occurring amino acid
  misc_feature (22)..(22): Xaa can be any naturally occurring amino acid
RQXGRKEAGWECGGRSFSSSAXTMAPIKVGDAIPQWRYLKGNGKEGELGRLFKGKKGVFVWSPWGIYTWLF

SEQ ID NO: 1017123 - protein, 267 aa, Homo sapiens
MTGSNEFKLNQPPEDGISSVKFSPKHLPVPCCVSLLGHVGGVSTNVPANSNGGSGYQTHAAPGLDWRLLRSKGNGPGVGGLRSSNCEQIALIVNTDPRKICVGGPIDAPNPDVVEYCPKKVTCDGHLKSGGIKNSYNLWGSKELLVNAGDLLYSLKKVYTPLSVWGDPGDCGDQAGRRSVGCRGLHGTMGYVQEGRESSLKYQIGDKEGPNKQVVLSHEARAVEIGPSLGGEKSSSCAQEENMGDSDSVLIKFAGVGEMDTRGPDSE

SEQ ID NO: 1017124 - protein, 180 aa, Homo sapiens
  misc_feature (85)..(85): Xaa can be any naturally occurring amino acid
GLTQFTNKCHIAFAALEAVCFQTREILDAMNRDCGIPLSHLQVDGGMTSNKILMQLQADILYIPVVKPSMPETTALGAAWHSGAXEGGWCVEVLNLRICQACHNGSGLNLRSNAERKPKIRYLHMERKAVIEGQFGLGLQTQFSRKVGNPIKLIPSSPEFPRCKLFNVDMKILTYSGLIV

SEQ ID NO: 1017125 - protein, 121 aa, Homo sapiens
WQLGHQCKYRDSAMVLQRIFRLSSVLRSAVSVHLKRNIGVTAVAFNKELDPVQKLFVDKIREYKSKRQASGGPVDIGPEYQQDLDRELYKLKQMYGKGEMDTFPTFKFDDPKFEVIDKPQS

SEQ ID NO: 1017126 - protein, 172 aa, Homo sapiens
  misc_feature (162)..(162): Xaa can be any naturally occurring amino acid
  misc_feature (165)..(165): Xaa can be any naturally occurring amino acid
PIYEGYALPHAIMRLDLAGRDLTDYLMKILTERGYSFVTTAEREIVRDIKEKLCYSGPWTFENEMCDWPAILLLPGTKSYELPERARSITIGNERLPLTRKTPLPAPPFIRNGVGGHYTRPPYNSISEDETSNIQEGPVMQQRHVGGHTMYPGIADRMQKEXTGXNQTMSKI

SEQ ID NO: 1017127 - protein, 132 aa, Homo sapiens
  misc_feature (9)..(10): Xaa can be any naturally occurring amino acid
  misc_feature (27)..(27): Xaa can be any naturally occurring amino acid
LLAATSTAXXQDIKQIGWLTEQLPSGXKPHGALLTEKELLLYLSLPETREALSRPARTAPLIATRLVHSGPSKGFSAYDAEFSFALRTGTRHGVDTHLFSVESPQRLACLGPASLLNAVNGAAKVLKKFLKA

SEQ ID NO: 1017128 - protein, 95 aa, Homo sapiens
GDHPVELLARDFEKNYNMYIFPVHWQFGQLDQHPIDGYLSHTELAPLRAPLIPMEHCTTRFFETCDLDNDKYIALEEWAGCFGIKEQDINKDLVI

SEQ ID NO: 1017129 - protein, 139 aa, Homo sapiens
FCASQSVAQHTSKSADFLGVVGQLCLFLAMRILIRLCNLLSLDVLICQMALMIDSTYLPYMRRHVKDPWLSIVMTQINANYYLLSYAKSRCCKRLKRDCWFPSWEVWESASRSAQWLEEVSKGNDGGAPRQRWELLATP

SEQ ID NO: 1017130 - protein, 133 aa, Homo sapiens
  misc_feature (5)..(5): Xaa can be any naturally occurring amino acid
  misc_feature (42)..(42): Xaa can be any naturally occurring amino acid
MQQEXEIPRTSQVYLRWMFEVKKYRPKYCGSCVDGRCCTPQXTRTVKMRFRCEDGETFSKNVMMIQSCKCNYNCPHANEAAVSRFTGLFKDIPKFRGLKGYLGFQGNTVRPTQEEELSRIRIHGENWPGAGVA

SEQ ID NO: 1017131 - protein, 133 aa, Homo sapiens; identical to SEQ ID NO: 1017130
  misc_feature (5)..(5): Xaa can be any naturally occurring amino acid
  misc_feature (42)..(42): Xaa can be any naturally occurring amino acid

SEQ ID NO: 1017132 - protein, 172 aa, Homo sapiens
IRNEVKPPGVMGGRNREAAAPFSLPSRVRVPIPRSSVPDPQWARPSDRSRLTGFRMSQYSVCQPYNQEERWGVQAMVTNRFSAHFNRGCSPPCRQVGNTSICYHQPLPEPICPAQPCPAQPNPALPQLGEPCPGMGWQGCTQPPWKAETQETSGVLFSGRVIPGEHMGPLGV

SEQ ID NO: 1017133 - protein, 106 aa, Homo sapiens
TANKIQITLNVRPCLLIALIIKRNNSREPATVDDNSVDTATQNRDQTDNFQCSHADHSRSGVNGKSNPIMVNSINRQTHMAKLAGNVAFTGNRFAVENQPAANTGA

SEQ ID NO: 1017134 - protein, 85 aa, Homo sapiens
  misc_feature (5)..(5): Xaa can be any naturally occurring amino acid
  misc_feature (9)..(9): Xaa can be any naturally occurring amino acid
  misc_feature (84)..(84): Xaa can be any naturally occurring amino acid
ENYWXERLXPGIPRAGASGCGGEKNPEDWAPECLAERLPPFVHRGQDRVNILQQFPNSLQDVENVFAKLMPQTGAGRLEYIKNXQ

SEQ ID NO: 1017135 - protein, 230 aa, Homo sapiens
MADPEGTDGEGTGCNGWFYVQAIVDKKTGDVISDDEDENATDTGSDMVDFIDTQGTFCEQAELETAQALFHAQEVHNDAQVLHVLKRKFAGGSKENSPLGERLEVDTELSPRLQEISLNSGQKKAKRRLFTISDSGYGCSEVEATQNQVTTNGEHGGNVCSGGSTEAIDNGGTEGNNSSVDGTSDNSNIENVNPQCTIAQLKDLLKVNNKQGAMLAVFKDTYGAIIYRFS

SEQ ID NO: 1017136 - protein, 230 aa, Homo sapiens; identical to SEQ ID NO: 1017135

SEQ ID NO: 1017137 - protein, 105 aa, Homo sapiens
MHGPKATLQDIVLHLEPQNEIPVDLLCHEQLSDSEEENDEIDGVNHQHLPARRAEPQRHTMLCMCCKCEARIKLVVESSADDLRAFQQLFLNTLSFVCPWCASQQ

SEQ ID NO: 1017138 - protein, 130 aa, Homo sapiens
RILKSPEIQRALRAPRKKIHRRVLKKIPLKNLRIMLKLNPYAKTMRRNTILRQARNHKLRVKKLEAAATALATKSEKVVPEKGTADKKPAVGKKGKKVDAKKQKPAGKKVVAKKPSREEAYYQKKRSQLA

SEQ ID NO: 1017139 - protein, 51 aa, Homo sapiens
PAYALPLTKAPVDLLGVAPNNLMAMAQETEDNLYWGSVTGSQSNAVSPTPA

SEQ ID NO: 1017140 - protein, 202 aa, Homo sapiens
GSSRTPALMNFMMTGSWVTIGATFAAMIGAGMLVHSISYEQSPGPKHLAWMLHSGVMGAVVAPLTILGGPLLLRAAWYTAGIVGGLSTVAMCAPSEKFLNMGAPLGVGLGLVFASSLGSMFLPPTSVAGATLYSVAMYGGLVLFSMFLLYDTQKVIKRAEITPMYGAQKYDPINSMLTIYMDTLNIFMRVATMLATGSNRKK

SEQ ID NO: 1017141 - protein, 100 aa, Homo sapiens
HFHKLPSLLSCDDVNMRIAAGESLALLFELARGMESDFFYEDMDSLTQMLRALATDGNKHRAKVDKRKQRSVFRDVLRAVEERDFPTETVKFGPERMYID

SEQ ID NO: 1017142 - protein, 234 aa, Homo sapiens
MAKPCGVRLSGEARKQVEVFRQNLFQEAEEFLYRFLPQKIIYLNQLLQEDSLNVADLTSSGPSWTSHRRLYLFQAKGWSEMAQQIKQEKKEVPKCGFVPGNEKVAVPACLWLSTGSLDSPKEETAILAELHGYRKHRDFPQIEDVESDSFGVANPGERLLDEVNSTSKHPNSGSFPHEHHCTEVTISEGGGCCRPKASQRRTHVNGFTEALGDMSEHEAAIIGEVTGRGRWHLG

SEQ ID NO: 1017143 - protein, 637 aa, Homo sapiens
MMSYSERLGGPAVSPLPVRGRHMVHGATFAYVPSPQVLHRIPGTSTYAISSLSPVTLTEHSCPCGEVLECHDPLPTKLAQEEEQKPEPRLSQKLAQVGTKLLKVPLMLAFLYLFVCSLDVLSSAFQLAGGKVAGDIFKDNAILSNPVAGLVVGILVTVLVQSSSTSTSIIVSMVSSGLLEVSSAIPIIMGSNIGTSVTNTIVALMQAGDRTDFRRAFAGATVHDCFNWLSVLVLLPLEAATGYLHHVTGLVVASFNIRGGRDAPDLLKVITEPFTRLIIQLDKSVITSIAVGDESLRNHSLIRIWCHPDTTEASTSMSRVEAIGSLANTTMEKCNHIFVDTGLPDLAVGLILLAGSLVVLCTCLILLVKMLNSLLKGQVANVIQKVINTDFPAPFTWVTGYFAMVVGASMTFVVQSSSVFTSAITPLIGLGVISIERAYPLTLGSNIGTTTTAILAALASPREKLSSSFQIALCHFFFNISGILLWYPLPCTRLPIRMAKALGKRTAKYRWFAVLYLLVCFLLLPSLVFGISMAGWQAMVGVGTPFGALLAFVVLVNVLQSRSPGHLPKWLQTWDFLPRWMHSLQPLDGLITRATLCYARPEPRSPQLPPRVFLEELPPATPSPRLALPAHHNATRL

SEQ ID NO: 1017144 - protein, 637 aa, Homo sapiens; identical to SEQ ID NO: 1017143

SEQ ID NO: 1017145 - protein, 64 aa, Homo sapiens
  misc_feature (2)..(3): Xaa can be any naturally occurring amino acid
  misc_feature (24)..(24): Xaa can be any naturally occurring amino acid
CXXLLGRCGRRSPLTSELDIFVGXTTLIDEDVYRLWSDGYSVTDAVALRVRSGNPGADWRHGSG

SEQ ID NO: 1017146 - protein, 111 aa, Homo sapiens
HSAGLGARLELAYRAAPLTRAAPAAAACTGPGAAMPKCPKCNKEVYFAERVTSLGKDWHRPCLKCEKCGKTLTSGGHAEHEGKPYCNHPCYAAMFGPKGFGRGGAESHTFK

SEQ ID NO: 1017147 - protein, 77 aa, Homo sapiens [sequence omitted]

SEQ ID NO: 1017148 - protein, 77 aa, Homo sapiens [sequence omitted]

SEQ ID NO: 1017149 - protein, 125 aa, Homo sapiens
GIGDVPLMEGAEDLRVGCQAGRMRAEVHRALGRAGCKRRVRQWWVGAASCSVSPGPVCASAAERVTSLGKDWHRPCLKCEKCGKTLTSGGHAEHEGKPYCNHPCYAAMFGPKGFGRGGAESHTFK

SEQ ID NO: 1017150 - protein, 132 aa, Homo sapiens
GAVSPRGGVPGSLKGADQAGSTQSRACSPCRPSRCRLHRTRSRHAQVSQVQQGGVLRREGDLSGQGLAEPRATLSSKPGGGDPILGCLQGHCPGKCQALSPDAQGSLVAPNALSKPEHLENQKFKLFINTQN

SEQ ID NO: 1017151 - protein, 125 aa, Homo sapiens; identical to SEQ ID NO: 1017149

SEQ ID NO: 1017152 - protein, 111 aa, Homo sapiens; identical to SEQ ID NO: 1017146

SEQ ID NO: 1017153 - protein, 72 aa, Homo sapiens
MPKCPKCNKEVYFAERVTSLGKDWHRPGQWPCKQPRRGVSTTWLLESVATRLPPRPKPLGPNMQRRGSLSEQ

SEQ ID NO: 1017154 - protein, 104 aa, Homo sapiens
MQSLFTGKEVLYLALCNSVETCILVFAGKLFSVGGDLQSHPSPGGAWGPFPSCSQVDQELTARCWWLWDESLLLLTGNMTLPLDIKWTQYLGSSFFSIHLTVPL

SEQ ID NO: 1017155 - protein, 71 aa, Homo sapiens
  misc_feature (14)..(14): Xaa can be any naturally occurring amino acid
  misc_feature (68)..(68): Xaa can be any naturally occurring amino acid
  misc_feature (70)..(70): Xaa can be any naturally occurring amino acid
DPGSYPGPSTRAAXRWERKFPFNQWGLQPRSLLLQAARDYVVRKPAQSRLDDDPPPSTLLKDYQNVPXEXE

SEQ ID NO: 1017156 - protein, 2038 aa, Homo sapiens
KYCCNETEFQAVMQANLTASSEGYMHNNYTALLGVWIYGFFVLMLLVLDLLYYSAMNYDICKVYLARWGIQRTMDETGPPAVGEPRSGPSAGSAGPTAAASPRPAATSPTGRAHIAGRCSQPTADDLPEFVCLKTLLLCLRMGEMRSEAPGAASEKNNFYRDARDSRGSGGGQEEMLPVPKAPFRGLLRLGANSGVGAGGAGEGILSHLSASNSPILGWWLLRGDSLWTQDDQDKATLADSSQEDEACELYLWLKTEASLAPAPSSSGPLGLFVSEYGMCVCVCVCVIWGVLFVCLVGWFLLGLPPSSSLMGMSHPPAGGSHPCQCPSRKLIAKHRVRPLCVSGSTGDLKMPVRVVSYRIRSCNNSNTKGCISELTTGQVPSKVFSCTPSLTTWEAGMINPLQKNSQWGSGAGTQSPGSNSLDVTCSPAGVHPAQCWEHLLDASTITAWSADPLSTFWLSICCVPGPVLGSDGKKDELDLISAPGEPPIWWETQTRGSLLERVTRPWKPRQERSRNPSTFKKDFHARNIQPTELITPTPAPLPWDTYEMASPEIITNISKGHAASVDTLIPWVLVIPNLPQLLAREALLDQCVCPLTQFPHFIRPSVLTLTTHPFTRHDSEQGRSLLTVLAFSWGRKTVKKEGGEGSECSAGNSVPGTQFEGHVSETLVDLGWSGKAAYEQMIEAQDLNDTQEPVMGVKDRKRAFQAEGTASAKILRQPQAWWFQGSTRKPGGTRKPGGWGPRGKAEGDEGDSAQLWALLWVKLCKHNVLPLEKQNKLAEGIKHPPFCLAVHPLNSPMKKGLSPFYGQEDRLSWVKWLAQDHTGQLWKTQAPGFSLWVQLSPPGSAASVQAYGLAKWENLCLGSRLEKGMASSPLMWAVPGPCCRKGVHSLSTSPAAEATAVSHVQCLRRQRKPEVGAQDPDSDISSATENSVTSGKVCYLSFPIGKRKESDGYLRSLQPSCPAVLDNALEVLPLPKRNWWPCLPLLDTWGQRSLPNRQLELGFTYASLEMYNLLGGHSSCLPPSPQEVFSGITEKPMGFVVLLLCQVPLGQLGWGLEHSVASRRPQQRSPRPSTPGTDSLRQRQVQSADSHGILLPAGHPHEPLNLSEPLLLTCQVCEVGYQLVTVLAVSQRSRQVRTVCMWVSTLSVESRCVCIQSPNGVKGSSKCHGSQVIVINTVPILLWLWLEGPSRSRLSLRTRWMQGSDEFKHSQSYCFLATQPDFLSCLLLLFTVSFCPSPCNFVIIIIQKEKREREEDKMSTEESAFEAVCRTTAFVRTVSHWELCVINEQFYAFPLVCVRCDCCVFQNLYSEPIAGNACWLAALKLASERALHLEKQLFSPASPGCSSGQASHLTMTIADVQQALIEKTHKYNMHMRAHTQVISQVDLVPLAVSNALESSKKAADSVPRVSGISPHHQKDSVKFWPRAEEEDLENVRENMTGLGVNRLLWPGDGFQFTVNPKALFQVMANRPGLWVWLCLALTPPQAAVQVGSGFQLPSPGRPLRWLGCFHNHHVCLLETVPFKETGSPGVQTCKIFEFFNLAELVPINRKSLLEVNLQISPMFEININMNPEGRACSELEIAPVHSSLGNRVRLCLGRKVRRKEGRTDLDGVIGNMSYQCCRAPYHCRETSTWVVFVCCENLGLESWKQTAGILNHPAHVVGIRGCLLGPHSTGTVREAMVDDALITALCSPGIPHWAGAIPCALWKTSLRTYYVPDAMHSALVPCCSTNTSHAGAEMHANNFGGCGPKSSNVKVKQSGKLEEVRSLLENSFDDTRFPHLFRYLPSACHLPGPVPRAYLGAIPAIAGTTVKRLVVPNRHAQIHKMNSEHLPVPPVKVTLEVSLPPTTPVSSPSQQLVLDRCLMNEQIGLLVTLYLKLLSLHQSPDRFALDRLKSGAAAGFTSRRHHSRHCPINGNGLPGILFTETALRTVTLRFVQGGTLLNDPKPASKMCRIPHWSAPTLSTGSKTIDDMATLATAGTKLVAQERASSWNCMSVSHTQFLPIFPISRFKASGIPHSQITKWSVSRQCAVTRWGLQG

SEQ ID NO: 1017157 - protein, 96 aa, Homo sapiens
  misc_feature (2)..(2): Xaa can be any naturally occurring amino acid
DXEEEEITINAWFGPQGTISPLHQDPQQNFLVQVMGRKYIRLYSPQESGALYPHDTHLLHNTSQVGTGGLEVTLQVLPTALEMMTSFAFFRLRGES

SEQ ID NO: 1017158 - protein, 127 aa, Homo sapiens
  misc_feature (2)..(2): Xaa can be any naturally occurring amino acid
DXEEEEITINAWFGPQGTISPLHQDPQQNFLVQVMGRKYIRLYSPQESGALYPHDTHLLHNTSQVDVENPDLEKFPKFAKAPFLSCILSPGEILFIPVKYWHYVRALDLSFSVKLLVVVARIGAERG

SEQ ID NO: 1017159 - protein, 135 aa, Homo sapiens
CVQVVFVLVRGLSSVLAVSCCLLFSCGLFVCCVLCFVVVLVCIFVFLRVVVLVYGFAVGPVMSVSLSFVVVAIGSSVFMMVVLAVDNRICSGLARQTGVPVCLSGPSQLDSLQLDMGPDTMMLSPETPHPVDLGL

SEQ ID NO: 1017160 - protein, 213 aa, Homo sapiens
  misc_feature (20)..(20): Xaa can be any naturally occurring amino acid
MRSPVCALRMTEWEAATPAXQETPDIKLFGKWSTDDVQINDISLQDYIAVKEKYAKYLPHSAGRYAAKRFRKAQCPIVERLTNSMMMHGRNNGKKLMTVRIVKHAFEIIHLLTGENPLQVLVNAIINSGPREDSTRIGRAGTVRRQAVDVSPLRRVNQAIWLLCTGAREAAFRNIKTIAECLADELINAAKGSSNSYAIKKKDELERVAKSNR

SEQ ID NO: 1017161 - protein, 286 aa, Homo sapiens
MAELCNSRNNSHNISEQERQAETCGSSLPHPDPHSHRPVPGGGRRGRRQDGSGGGWTKQVTCRYFYAWGCKEGDNCRYSHDLSDSPYSVVCKYFSEGLYIVETVQIEHSKPLKQEEASATRANYKVIPCLLPQVSHRKLAHLLNLNTGEAESRNSNFATEEQVQRTWVNAIEVRPGQAYCGRTALPAMKHPAGSVTREESEKSKPPWDKGSRCAPILAVRSADTGALCFLPGSCTVCVRSGSMVCQRTRYNRGWALEGWAMGGARTRRALRAEARAVEPHAPLARG

SEQ ID NO: 1017162 - protein, 239 aa, Homo sapiens
FRVVRALPMSRPAITAAATSVFCGSSHRQLHHAVIPHGKGGRSSVSGVVATVFGATGFLGRYVVNHLGRMGSQVIIPYRCDVYDIMHLRLMGDLGQLTFLEWDARDKDSIRKAVQHSNVVINLIGREWETRNFDFEDVFVNIPQQQLFEKGDVNGEKEQKFYTFLKNSCPPTAELLGSPGRLFWEPMKIHDIRWNFEKFLVGPDGIPVMRWYHRTTVSNVKMDILSYMRRQAALSARGK

SEQ ID NO: 1017163 - protein, 82 aa, Homo sapiens
WPPQDAPQPAMARILRASCLLSLLLAGFVPPGRGQEKSKTDCHGGMSGTIYEYGALTIDGEEYIPFKQYAGKYILFVNVASY

SEQ ID NO: 1017164 - protein, 187 aa, Homo sapiens
MPPPYPYPLPIMQGPRRGSSGRKPHSQSFYPHPRFSFLLHKRQAWHNCVSEPLWTRDNCPSVCMATQPRICLLETQGWSICVYGLAQHPHIFFSFLFQMSPKETQVLGPMVLLKPEHHSWGQHLPHAHTTHHQPPSSFLKDPPEPPSPSHSAPETSQDNCERDGRVPQVRGGVSMKEGPKALWAGLP

SEQ ID NO: 1017165 - protein, 149 aa, Homo sapiens
MPPPYPYPLPIMQGPRRGSSGRKPHSQSFYPHPRFSFLLHKRQAWHNCVSEPLWTRDNCPSVCMATQPRICLLETQGWSICVYGLAQHPHIFFSFLFQMSPKETQVLGPMVLLKPEHHSWGQHLPHAHPTHTILKSKLFKKSNSIFCCC

SEQ ID NO: 1017166 - protein, 170 aa, Homo sapiens
  misc_feature (8)..(8): Xaa can be any naturally occurring amino acid
  misc_feature (22)..(22): Xaa can be any naturally occurring amino acid
  misc_feature (24)..(25): Xaa can be any naturally occurring amino acid
  misc_feature (28)..(28): Xaa can be any naturally occurring amino acid
  misc_feature (38)..(41): Xaa can be any naturally occurring amino acid
  misc_feature (44)..(44): Xaa can be any naturally occurring amino acid
  misc_feature (58)..(59): Xaa can be any naturally occurring amino acid
  misc_feature (62)..(62): Xaa can be any naturally occurring amino acid
  misc_feature (65)..(65): Xaa can be any naturally occurring amino acid
  misc_feature (72)..(72): Xaa can be any naturally occurring amino acid
MFVRKSQXRLPFKATTPVIMVXPXXGVXPFIGFIQERXXXXQQXKEVGETLLYLRCRXXDEXSLXREAVAQXHRDGALTQLNVAFSREKSKKVYVQNLLKQDREHLLEVESRGRCQHLRLWGCTDTWPGDVKNDLLASIVAELGAMENVQAVDYIKKLMTKGRYSLDVWS

SEQ ID NO: 1017167 - protein, 105 aa, Homo sapiens
  misc_feature (21)..(21): Xaa can be any naturally occurring amino acid
ASENQPLSRHARPRPPFFPLXFSLPSPPFLPLPARQGPTVAACLREGWEREGGWVRPPPPPRECDSPRPQNSSWTQAQGPAWDKAPRVGWPELFLPPASPAGPPT

SEQ ID NO: 1017168 - protein, 98 aa, Homo sapiens
WLQGYFAECERWPAQALRARGPSGAAALRSMASGGGVPTDEEQATGLEREIMLAAKKGLDPYNVLAPKEASGTREDPNLVPSISNKRLVGCICKRQYS

SEQ ID NO: 1017169 - protein, 116 aa, Homo sapiens
  misc_feature (1)..(1): Xaa can be any naturally occurring amino acid
  misc_feature (4)..(4): Xaa can be any naturally occurring amino acid
  misc_feature (8)..(8): Xaa can be any naturally occurring amino acid
  misc_feature (15)..(16): Xaa can be any naturally occurring amino acid
XGGXSIWXPPKVFLXXGKGIQSREQKAEDKAVEHKEILDQLESLKLENRHLSEMVMKLELGLHECSLPVSPLGSIATRFLEEEELRSHHILERLDAHIEELKRESEKTVRQFTALK

SEQ ID NO: 1017170 - protein, 183 aa, Homo sapiens
MNTKSQLEISTQMCKKQNDRIFKPTHSRTTEFKNTEFKPTHGQHRHDGIKTEHYKTDLHSPRGQASDSINPMSRVLSPLSPQISPCSSTRSLTSYSLCKTHSLPSALDTNEANFSDTMSESMNDQEEFISSCSLPVSPLGSIATRFLEEEELRSHHILERLDAHIEELKRESEKTVRQFTALK

SEQ ID NO: 1017171 - protein, 183 aa, Homo sapiens; identical to SEQ ID NO: 1017170

SEQ ID NO: 1017172 - protein, 116 aa, Homo sapiens; identical to SEQ ID NO: 1017169
  misc_feature (1)..(1): Xaa can be any naturally occurring amino acid
  misc_feature (4)..(4): Xaa can be any naturally occurring amino acid
  misc_feature (8)..(8): Xaa can be any naturally occurring amino acid
  misc_feature (15)..(16): Xaa can be any naturally occurring amino acid

SEQ ID NO: 1017173 - protein, 208 aa, Homo sapiens
ATISPVSLSSGGAGIRPGEKREQVCEANLSPRLTHLAGDESGSDEGRLPMDRPRKTNKMEQPMTEWRGTPPFGERGEGIAVVYGKSRVDKALSDLPLIFDGHIPNRQINDGMGGDGDDMEIFMEEMREMQKKTYGASVEELSAYAYGGAHVVHHDHHDGISPYALTSVPFSHEITYCDYPVFANSSLHFPNMPLAESVWCEPYVMSTV

SEQ ID NO: 1017174 - protein, 81 aa, Homo sapiens
TRELAQKKQPHAKRRAVWLRGSRGCVCLPVKEGLPAVPSGSKVLVSPCGADGLQESQTVTADRTGSAGAAWGRDHDDDSPM

SEQ ID NO: 1017175 - protein, 133 aa, Homo sapiens
DHYMYLNHGQQTIPNGLGIGGGSTITLGFGMDVDFGKGHSRAKPTCTTYNSPQLSAQENFQFDKMEDDGQVGDPSEEQLAKGNKSILDADPEAQALAGDQWAFAPQQKGSGKSRTMNEEPPEPSWSQDLDSSG

SEQ ID NO: 1017176 - protein, 133 aa, Homo sapiens; identical to SEQ ID NO: 1017175

SEQ ID NO: 1017177 - protein, 154 aa, Homo sapiens
MLPHVLSRDIAELGIYPAVDPLDSTSRIMDPNIVGSEHYDVARGVQKILQDYKSLQDIIAILGMDELSEEDKLTVSRARENIQRFLSQPLPGAEVFTGHMGKLVPLEGDHQRIPARFWQSEYDQSSQNEAFYMVGPIVRSCGTKLITLAEEHSS

SEQ ID NO: 1017178 - protein, 126 aa, Homo sapiens
MLPHVLSRDIAELGIYPAVDPLDSTSRIMDPNIVGSEHYDVARGVQKILQDYKSLQDIIAILGMDELSEEDKLTVSRARENIQRFLSQPLPGAEVFTKSYGEAGTLRDLKISSLQGYTFPQALIVA

SEQ ID NO: 1017179 - protein, 155 aa, Homo sapiens
MHWLRKVQGLCTLWGTQMSSRTLYINSRQLVSLQWGHQEVPAKFNFASDVLDHWADMEKRKKKNNLNGRIRKINEKKGNEITREKEKRTTRRKRTQATRNRRRDEHDDGTNRGRRHNTPSYPPNTTSKRNDKEHSNWKTRDETRKTKRSNDGNTY

SEQ ID NO: 1017180 - protein, 256 aa, Homo sapiens
MFLQYYLNEQGDRVYTLKKFDPMDNRPAQPILLGSPQMTDTLDTESPSRKRFKVLMTQNRALSSEGAAVNLYVYFLVMRGYSRRDDVPLDRRRRVGDVVYAPWSCRVVGRAQYFGVGSPGRLRGRIELLRCGRGNHGLASPIKGTHFDFFSHILNYYKIIKDRLIPRKKSEKHKGGGGLRAHEKMFNRPIAWGQQPQGLKEAGHRWVKGPRAGPRAGSRNEKRGGERLFAQSTWVWRHSRITKSQRAYRARVVLGC

SEQ ID NO: 1017181 - protein, 241 aa, Homo sapiens
MFLQYYLNEQGDRVYTLKKFDPMDNRPAQPILLGSPQMTDTLDTESPSRKRFKVLMTQNRALSSEGPLNLSVFSAAVLPLGGFRKPELFADCEPLMPFLASRYSCGIQSLVGLDYAVCEAIMGGITHKGNTFDFFSHILNYYKIIKDRLIPRKKSEKHKGGGGLRAHEKMFNRPIAWGQQPQGLKEAGHRWVKGPRAGPRAGSRNEKRGGERLFAQSTWVWRHSRITKSQRAYRARVVLGC

SEQ ID NO: 1017182 - protein, 273 aa, Homo sapiens
  misc_feature (72)..(72): Xaa can be any naturally occurring amino acid
  misc_feature (104)..(104): Xaa can be any naturally occurring amino acid
SHQFACEDGYCLHGSTRPVRSFHDSVDCSDDLLCHNVLQRCGPCEQYSAAASRPPPEVSLSRPRWYCYTRRXSREALEGSPGEGWIDDCTEDMKMLQYHILEVXSADDEYMRSRSIASTTRDTRTSYLVPSTDMMTCRHGKALRIVTFLCDCWASWGIHSNARTELFATAKPGPEDILKARYWEEMGSTCTDLPWSPPTCPVRGIAVLNNFGYLIGGDNNVQGFRAESRCWRYEPRYNPWFQIQSLQQEHADLFLCVVGRYIYAVAGVTTSND

SEQ ID NO: 1017183 - protein, 78 aa, Homo sapiens
MRPKDPLDATYRSTFLEKKPDYRKGCPGLMTTPDGCTLYILSSSSHPGPYLTGTSKGDLTLLEARILNNRDYPLHHTN

SEQ ID NO: 1017184 - protein, 162 aa, Homo sapiens
MSNLGGRRNGPVEVRLTGEGGAAWPGWAAARWASWQGCLWPWDGPGSRSVVSWGSGGVGRPSSERAIGKPLVPVWTSFNKAEDDSAAGEGGVYVAVGGYTSFAYAERISGRKVKVKEPDADLPGTRQNSPLGYRPGEIVQQDEELPCRGILELRLSHDMRCS

SEQ ID NO: 1017185 - protein, 117 aa, Homo sapiens
  misc_feature (16)..(16): Xaa can be any naturally occurring amino acid
  misc_feature (70)..(70): Xaa can be any naturally occurring amino acid
DRREQPADRGGRPGAXTTYEIRVKTNLPIFKLKESTVRRRYSDFEWLRSELERESKVVVPPLPGKAFLRXFPFRGDDGIFDDNFIEERKQGLEQFINKVAGHPLAQNEPLSSHVFTG

SEQ ID NO: 1017186 - protein, 340 aa, Homo sapiens
MFTFATYNNITKIICIEFWKKHRKHEQNETIPWAVVWTQLNPECSVADAVYPWERHTQEWPFAEKKVMAPGWPPPCRDTEATPFAPSTPCSRRPGRLLPGGDSRIWSRTRPHSDRLPGPRPISWIEGVWAWNQWVTVAASSEPKVWDPLVAVRLTSMGRSVLPIFLVFSAAVSVSDLRKSCRGRQAAVKTGAGETSPLHLRMCPRCCCWGHGCRAEACVAPEQQLTARLMLDGTPGRVDMRPLLARDAVRRPTWLPEQQLTARLTVGQGFVAWVFSSLPGAARSSCADWWRWEGLLGLMGTPASLSGVQQPCRTWPPVLSLGALAGAALSNDAGPEQLPT

SEQ ID NO: 1017187 - protein, 226 aa, Homo sapiens
MATAMYLEHYLDSIENLPCELQRNFQLMRELDQRTEDKKAEIDILAAEYISTVKTLSPDQRVERLQKIQNAYSKCKEYSDDKVQLAMQTYEMVDKHIRRLDADLARFEADLKDKMEGSDFESSGGRGLKKGRGQKEKRGSRGRGRRTSEEDTPKKKKHKGGSEFTDTILSVHPSDVLDMPVDPNEPTYCLCHQVSYGEMIGCDNPDCPIEWFHFACVDLTTKPKGK

SEQ ID NO: 1017188 - protein, 83 aa, Homo sapiens
GARPRTKMATAMYLEHYLDSIENLPCELQRNFQLMRELDQRTEDKKAEIDILAAEYISTVKTLSPDQRVERLQKIQSRGSALS

SEQ ID NO: 1017189 - protein, 207 aa, Homo sapiens
RRLLLALSDLLRFPRDTLTGQLPGPVQGSLLGFSWPEGLPCSHTRALVPAAPPDCSLEGTSDPAIGRGRRTHPVKDGRLGVKSVLLIDVYLSTSEPASCIEPHGASAHFPCGRPRPHCVCLSWCPPAGVQQPWETWGGGPWAPCALAEMAPRGLTAPFLVTGSVHGVSRKRGRRSRRSCVPGSEEQVNLSLHSCRNISLPFKTTLFG

SEQ ID NO: 1017190 - protein, 219 aa, Homo sapiens
MVSCAGLSFSPISPSDKKAEIDILAAEYISTVKTLSPDQRVERLQKIQNAYSKCKEYSDDKVQLAMQTYEMVDKHIRRLDADLARFEADLKDKMEGSDFESSGGRGLKKGRGQKEKRGSRGRGRRTSEEDTPKKKKHKGGSEFTDTILSVHPSDVLDMPVDPNEPTYCLCHQVSYGEMIGCDNPDCPIEWFHFACVDLTTKPKGKWFCPRCVQEKRKKK

SEQ ID NO: 1017191 - protein, 254 aa, Homo sapiens
MATAMYLEHYLDSIENLPCELQRNFQLMRELDQRTEDKKAEIDILAAEYISTVKTLSPDQRVERLQKIQNAYSKCKEYSDDKVQLAMQTYEMVDKHIRRLDADLARFEADLKDKMEGSDFESSGGRGLKKGRGQKEKRGSRGRGRRTSEEDTPKKKKHKGGSEFTDTILSVHPSDVLDMPVDPNEPTYCLCHQVSYGEMIGCDNPDVLSTVCPGKEEEEVGGAVCPDPRSKLICPFIRVAIFPFLLKLPCSVDT

SEQ ID NO: 1017192 - protein, 240 aa, Homo sapiens
MATAMYLEHYLDSIENLPCELQRNFQLMRELDQRTEDKKAEIDILAAEYISTVKTLSPDQRVERLQKIQNAYSKCKEYSDDKVQLAMQTYEMVDKHIRRLDADLARFEADLKDKMEGSDFESSGGRGLKKGRGQKEKRGSRGRGRRTSEEDTPKKKKHKGGSEFTDTILSVHPSDVLDMPVDPNEPTYCLCHQVSYGEMIGCDNPDCPIEWFHFACVDLTTKPKGKWFCPRCVQEKRKKK

SEQ ID NO: 1017193 - protein, 273 aa, Homo sapiens
MATAMYLEHYLDSIENLPCELQRNFQLMRELDQRTEDKKAEIDILAAEYISTVKTLSPDQRVERLQKIQNAYSKCKEYSDDKVQLAMQTYEMVDKHIRRLDADLARFEADLKDKMEGSDFESSGGRGLKSKSVNFFSLFSLLLTMEFSQEFVTVNHYQYDHYEGRGQKEKRGSRGRGRRTSEEDTPKKKKHKGGSEFTDTILSVHPSDVLDMPVDPNEPTYCLCHQVSYGEMIGCDNPDCPIEWFHFACVDLTTKPKGKWFCPRCVQEKRKKK

SEQ ID NO: 1017194 - protein, 340 aa, Homo sapiens; identical to SEQ ID NO: 1017186

SEQ ID NO: 1017195 - protein, 83 aa, Homo sapiens; identical to SEQ ID NO: 1017188

SEQ ID NO: 1017196 - protein, 127 aa, Homo sapiens
GTRKKLVAKGGKKKKQVLKFTLDCTHPVEDGIMDAANFEQFLQERIKVNGKAGNLGGGVVTIERSKSKITVTSEVPFSKRYLKYLTKKYLKKNNLRDWLRVVANSKESYELRYFQINQDEEEEEDED

SEQ ID NO: 1017197 - protein, 97 aa, Homo sapiens
HGAFFNLTIAFSLSLLGTLIFRSHLISTLLCLEGIVLSLFIITSVTSLNSNSISSIPIPITILVFAACEAAVGLALLVKVSNTYGTDYVQNLNLLQC

SEQ ID NO: 1017198 - protein, 324 aa, Homo sapiens
VGDVGKDGAAAQSRVVRVLSMSRSAITAIATSVCHGPPCRQLHHALMPHGKGGRSSVSGMVATVLGATGFLGRYVVNHLGRMGSQVIIPYRCDKYDIMHLRPMGDLGQLLFLEWDARDKDSIRRVVQHSIVVINLMGRDWETKNFDFEDVSVKIPQAIVQCPRKLELKQFIHVSHLNANIKALLDIGEIRLVAEKVVRDAFPEAIIVKPSDIFGREDRFLNSFASMHRFGPIPLGSLGWKTVEQAVYVVDVSKGIVNAVKDPDANGKSFAFVGPSRYLLFHLVKYIFAVAHRLFPPIPLAAFWLSMGSTESLKIAHLSPGKQGI

SEQ ID NO: 1017199 - protein, 150 aa, Homo sapiens
  misc_feature (21)..(21): Xaa can be any naturally occurring amino acid
  misc_feature (66)..(66): Xaa can be any naturally occurring amino acid
  misc_feature (85)..(85): Xaa can be any naturally occurring amino acid
  misc_feature (88)..(88): Xaa can be any naturally occurring amino acid
  misc_feature (121)..(121): Xaa can be any naturally occurring amino acid
  misc_feature (131)..(131): Xaa can be any naturally occurring amino acid
  misc_feature (139)..(139): Xaa can be any naturally occurring amino acid
MDKWMIYGPGGLPAHSGEPGXQHPPEQEICDAWLLEYMCSQGLLLKTPNSHSCPQLKARKQQDGKXMFCCVPTVTSLASPLSGSXSQXTMGNSSPHWWDVTNTILVILASLFLVGCVFSRXCLCVCVCVFXFCDLLSPXYVPPPPQIPYP

SEQ ID NO: 1017200 - protein, 85 aa, Homo sapiens
  misc_feature (10)..(10): Xaa can be any naturally occurring amino acid
  misc_feature (76)..(76): Xaa can be any naturally occurring amino acid
AQGKIQVPEXLIGGIQGAETKVPQANIMKGEHASSLRAKEQTGPGMEKDLGLRLCAVLLSPRRSKNQKERVRDPSXARARPCAQT

SEQ ID NO: 1017201 - protein, 333 aa, Homo sapiens
MENTSGKGSTNQQDFSSGKSEDLGTVQEKSTKSLVIGPLDFRLDSSAVHRILKMIVCALEHEYEPYSRLKSDIKDENETILNPEEVALLEEYIPTRHTSVTLLKCTCTISMAEFNLLDHLLPVIMGEKNSSNFMNTTNFQSLRPLPSIRILVDKINLEHSVPMYAEQLVHVVSSLTQPSDNLLHYCYVHCYLKIFGFQAGLTSLDCSGSYCLPVPVIPSFSTALYGKLLKLPTSWTKRSQIAITEGIFELPNLTIQATRAQTLLLQAIYQSWSHLGNVSSSAVIEALIKEIFQSIGMTNPTAEVSLYVFDGTLGLLDYSCVFMCSAHLQGPDK

SEQ ID NO: 1017202 - protein, 94 aa, Homo sapiens
AHAEAPNQPGRSEVIMDEVVADAMDEVVAAHAENPYNNGTRAEFILDSTHHKETYTEIAGMQRFGAFYMDYLYTMENTSGKGSTNLPRHFLLRK

SEQ ID NO: 1017203 - protein, 239 aa, Homo sapiens
  misc_feature (129)..(129): Xaa can be any naturally occurring amino acid
  misc_feature (143)..(143): Xaa can be any naturally occurring amino acid
  misc_feature (198)..(198): Xaa can be any naturally occurring amino acid
  misc_feature (221)..(221): Xaa can be any naturally occurring amino acid
  misc_feature (225)..(225): Xaa can be any naturally occurring amino acid
PARGDHSVKRLYGFNGLMKHPLHQMLEATAGLTPLILLGIPTEVALLLALAIAVQLLLQNSNVDMRLGPLRWVFAWAPVHRFHHMKYGRAGDVNFRLVFQSVVDWLLGNGVLQPMTIEMGAGRLGDWQXGRIFRREYVGAVAXSRFKERLQLSKEAARFPVPSKFEGFVRARFAQTTPPAVTPNKLFQWSGKNAPKSXNPGAMGAFRSGCCRPKANSKRQXANAXNKNQGEVIRQNPVG

SEQ ID NO: 1017204 - protein, 541 aa, Homo sapiens
MQLFVLRPGSYTPSEGDLASETVSAQIKGSCSLTWMWHCPVKIKVCAPVQGAAPVMDEATSVAMCGGWMALTNPWKVCHVPAMHWMCTSPIGFHCGPRCLEKVEAVVSTPKGVGTKAVSKEQTERRPGGLVLHVWAVNCHCTNSVTGYLAQNTDIVGPNTCYGGTRTLDPVVAPLKLAQTHSFKWTPLILLEVSLGPFVYITRKDINGLDFYDCTCSKSKNRASYNESENKSTGRSADIMYAWTHSGRSTQRHANRKRSVIHLEHECGGHHAGVGHKSTRCGNDPLMTHPTRQYYDSVSKPNKQLEMDPTQSQYERRRHTHAPESNVGQITRTASQPHILPRTKIKATQSGITTQPRGAQLNMNTRLPGTNHTRTAQTHDNYRQSDRHRDEQKTTQPTQHARRRMRASHEEQRYIKLTIQTARVSGTDERGTPDGRGTETEGRRKTRRARTTRHHAQSEQNASAGRARETHARETREQTRRERPSVRARTGGESREDDHNTPEDRETEDDERRREGRRDRGRQRRKEGGERGRRRRRENDK

SEQ ID NO: 1017205 - protein, 68 aa, Homo sapiens
AVQGGSKGLHRSPQAGWEECKGVLQTGSSYKALKDYKSSLSDISSLLQIEPRNGPAQKLRQEVNQNMN

SEQ ID NO: 1017206 - protein, 256 aa, Homo sapiens
  misc_feature (9)..(9): Xaa can be any naturally occurring amino acid
LALSLNGVXLLHLNNVSTGCILLGRLLMDEACWECATNVMVTVAKSFEAPIKLVFPQDLLEKGLEANNFAMLGLGDVVIPGIFIAWTLRFDISLKKNTHTYFYTSFAAYIFGLGLTIFIMHIFKHAQPALLYLVPACIGFPVLVALAKGEVTEMFSYESSAEILPHTPRLTHFPTVSGSPASLADSMQQKLSWPSPPAPAESQRHVMPSGCPPARFPPLPRGPSYEESNPKDPAAVTESKEGTEASASKGLEKKEK

SEQ ID NO: 1017207 - protein, 188 aa, Homo sapiens
  misc_feature (9)..(9): Xaa can be any naturally occurring amino acid
LALSLNGVXLLHLNNVSTGCILLGRLLMDEACWECATNVMVTVAKSFEAPIKLVFPQDLLEKGLEANNFAMLGLGDVVIPGIFIAWTLRFDISLKKNTHTYFYTSFAAYIFGLGLTIFIMHIFKHAQPALLYLVPACIGFPVLVALAKGEVTEMFSYEESNPKDPAAVTESKEGTEASASKGLEKKEK

SEQ ID NO: 1017208 - protein, 104 aa, Homo sapiens
RLPGRVSCDLTVAPQAPKPAPFFCDLVCCSGELTRPGVTVAENLCPLCGMPLPCSINSYKFSLSHTHTHTHTHTHYIYLYIYVANVLSLSSTGNQSPCCACGIL

SEQ ID NO: 1017209 - protein, 236 aa, Homo sapiens
  misc_feature (88)..(88): Xaa can be any naturally occurring amino acid
  misc_feature (97)..(97): Xaa can be any naturally occurring amino acid
  misc_feature (110)..(110): Xaa can be any naturally occurring amino acid
  misc_feature (115)..(115): Xaa can be any naturally occurring amino acid
  misc_feature (189)..(189): Xaa can be any naturally occurring amino acid
  misc_feature (196)..(196): Xaa can be any naturally occurring amino acid
  misc_feature (204)..(204): Xaa can be any naturally occurring amino acid
  misc_feature (213)..(213): Xaa can be any naturally occurring amino acid
  misc_feature (233)..(233): Xaa can be any naturally occurring amino acid
MAAAVPRAAFLSPLLPLLLGFLLLSAPHGGSGLHTKGALSPGIRSLSTRFIPKSKFVYGEVRNPVTTYGEKKDEFKRLAEKSASSDDXLVAEVGISXYGDKLNMELSEKXKLDKXSYTVFYLFRDGDFENKVQNTGAVKVGAIQSWLKGKGVYQGMPGFLPVYDALAGELIREYGVEDRKEILKKGQDXLSSVKEXQKKWAEQXLKIMGKILXQGEDFPASEMTRIARLIEKXKMS

SEQ ID NO: 1017210 - protein, 107 aa, Homo sapiens
MHWFTGSFIAMIPHASVAVLQTSQKAEWQPGTLQKLRGQSGSQAHMSLKYLSPRSGDYFLQNHHTRPSRQSWFCFSFPSPFQSLPWSEEILQWRAVSHLPKIPFNQH

SEQ ID NO: 1017211 - protein, 107 aa, Homo sapiens; identical to SEQ ID NO: 1017210

SEQ ID NO: 1017212 - protein, 112 aa, Homo sapiens
GGTPRETPRQVFLQIRPGPQRAPPPVGAPRNHVLASGERPGCIGQRTSRDPCVGNAKAPTPTLGPRPTLPRVAPGKNKVGQEEPIGETHPSFWQPSCLMVKKRLTRVNILIC

SEQ ID NO: 1017213 - protein, 148 aa, Homo sapiens
  misc_feature (4)..(4): Xaa can be any naturally occurring amino acid
MKRXLHLWGSGAHGLAGTMCASRDDWRMVHPMHEFSAKDIDGHMVNLDKYRGFVCIVPTWPPSEARPDSKGHSGSSTVHAQIRLTMWLCEILASARVTRIRKQEPGSNEEIKEIAPGYNVKFRDDQQDLRERGRRPPPVVVDEDATAR

SEQ ID NO: 1017214 - protein, 103 aa, Homo sapiens
  misc_feature (5)..(5): Xaa can be any naturally occurring amino acid
FSEGXVNGARRLAPRVMAKVLTTPFQGKLGDISRGDCEHEGAGYAGAARRLLGDQCEFRRTVVRGWRTAPKTGVLQPLMLQVGKQSELHSPNCPRDGPKWLML

SEQ ID NO: 1017215 - protein, 194 aa, Homo sapiens
  misc_feature (21)..(21): Xaa can be any naturally occurring amino acid
TATCGNVLHGGRSQALLRKLXVQDGPNDDGEMFMRPGQLSDYFPKPYPNPEAARAANNGALPPDLSYIVRARHGGEDYVFFPAPWATVSPPTGVSLQEGLYFNPYFPGQAIGMAPPIYTEVLEYDDGTPATMSQVAKDVATFLRWASEPEHDHRKRMGLKMLLMMGLLLPLTYAMKRHKWSVLKSRKLAYRPPK

SEQ ID NO: 1017216 - protein, 290 aa, Homo sapiens
RASPCSPSPLGRPSSETRAFLSPPTLLEGPLRLSPVLPGGGGRGPSSPGNPLDHQITNERGESSCDRLTDPHRAPSDTGSLSPPWDQDRRMMFPPPGQSYPDSALPPQRQDRFCSNSGRLSGPAELRSFNMPSLDKMDGSMPSEMESSRNDTKDDLGNLNVPDSSLPAENEATGPGFVPPPLAPIRGPLFPVDARGPFLRRGPPFPPPPPGAMFGASRDYFPPGDFPGPPPAPFAMRNVYPPRGFPPYLPPRPGFFPPPPHSEGRSEFPSGLIPPSNEPATEHPEPQQET

SEQ ID NO: 1017217 - protein, 266 aa, Homo sapiens
RASPCSPSPLGRPSSETRAFLSPPTLLEGPLRLSPVLPGGGGRGPSSPGNPLDHQITNERGESSCDRLTDPHRAPSDTGSLSPPWDQDRRMMFPPPGQSYPDSALPPQRQDRFCSNSGRLSGPAELRSFNMPSLDKMDGSMPSEMESSRNDTKDDLGNLNVPDSSLPAENEATGPGFVPPPLAPIRGPLFPVDARGPFLRRGPPFPPPPPGAMFGASRDYFPPYLPPRPGFFPPPPHSEGRSEFPSGLIPPSNEPATEHPEPQQET

SEQ ID NO: 1017218 - protein, 117 aa, Homo sapiens
MATKKTTIFPPRPKEVAETLSFRIPGDTDVFQCSDMCVCDACMHACMHACINMPCDMWPCCVPVNGMLCCHEPWPGSMPLTLPHALCPEQSCCCANGLYFHINQTLSGWPTSTAYST

SEQ ID NO: 1017219 - protein, 169 aa, Homo sapiens
  misc_feature (1)..(1): Xaa can be any naturally occurring amino acid
  misc_feature (13)..(13): Xaa can be any naturally occurring amino acid
XAFNRVAFGNPAXHCRLLLSIAMFLTRSEYDRGVNTFSPEGRLFQVEYAIEAIKLGSTAIGIQTSEGVCLAVEKRITSPLMEPSSIEKIVEIDAHIGCAMSGLIADAKTLIDKARVETQNHWFTYNETMTVESVTQAVSNLALQFGEEDADPGAMSRPFGVALLFGGVD

SEQ ID NO: 1017220 - protein, 110 aa, Homo sapiens
GLFPGGAWGLRPRTALAATNMETLYRVPFLVLECPNLKLKKPPWLHMPSAMTVYALVVVSYFLITGGIIYDVIVEPPSVGSMTDEHGHQRPVAFLAYRVNGQYLMGLECL

SEQ ID NO: 1017221 - protein, 165 aa, Homo sapiens
GLFPGGAWGLRPRTALAATNMETLYRVPFLVLECPNLKLKKPPWLHMPSAMTVYALVVVSYFLITGGIIYDVIVEPPSVGSMTDEHGHQRPVAFLAYRVNGQYIMEGLASSFLFTMGGLGFIILDRSNAPNIPKLNRFLLLFIGFVCVLLSFFMARVFMRMKLPG

SEQ ID NO: 1017222 - protein, 83 aa, Homo sapiens
GLFPGGAWGLRPRTALAATNMETLYRVPFLVLECPNLKLKKPPWLHMPSAMTVYALVVVSYFLITGGIIYDVIGGTLKGCGVS

SEQ ID NO: 1017223 - protein, 118 aa, Homo sapiens
MYIKMATLANGQADNASLSTNGLGSSPGSAGHMNGLSHSPGNPSTIPMKDHDAIKLFIGQIPRNLDEKDLKPLFEEFGKIYELTVLKDRFTGMHKGCAFLTYCERESALKAQSALHEQ

SEQ ID NO: 1017224 - protein, 178 aa, Homo sapiens
PLLILYLCGKSFMWTPLDDDDKIVGGYSCEERSVPYQVSLNSGYQFCGWLPHQLNQWCGISMASCYNVREIHGDDWDDALTSKSLEGELTQFTQLQPTINPPPPIPTGRLWNNDIMLIKLSSRAVIKRPRVHHLSAPPPSSHWHEVPHLWPGATLRALRPISQRAECLDAPVLSQAKC

SEQ ID NO: 1017225 - protein, 188 aa, Homo sapiens
  misc_feature (178)..(178): Xaa can be any naturally occurring amino acid
QEEGGSPQSKASESSSSFSFLLLLLLQPPRLPRHPSDSCFDRSRRGAFQADKDRVPYGRSHAAAASGALGAADWLAVQILLNPLVLRHIMEGSGGVGKSALTLQFMYDEFVEDYEPTKADSYRKKVVLDGEDVQIDVLDTAGQEDTLHLETTTYGVGKGSSGVAAIQRWNPLELQLTXGEHILRVEER

SEQ ID NO: 1017226 - protein, 294 aa, Homo sapiens
  misc_feature (6)..(6): Xaa can be any naturally occurring amino acid
  misc_feature (23)..(23): Xaa can be any naturally occurring amino acid
  misc_feature (27)..(27): Xaa can be any naturally occurring amino acid
  misc_feature (47)..(47): Xaa can be any naturally occurring amino acid
  misc_feature (73)..(73): Xaa can be any naturally occurring amino acid
  misc_feature (93)..(93): Xaa can be any naturally occurring amino acid
  misc_feature (97)..(97): Xaa can be any naturally occurring amino acid
  misc_feature (107)..(108): Xaa can be any naturally occurring amino acid
  misc_feature (110)..(111): Xaa can be any naturally occurring amino acid
  misc_feature (137)..(137): Xaa can be any naturally occurring amino acid
  misc_feature (139)..(139): Xaa can be any naturally occurring amino acid
  misc_feature (142)..(143): Xaa can be any naturally occurring amino acid
  misc_feature (151)..(151): Xaa can be any naturally occurring amino acid
HFYSYXNLNIILSYPNHIFLFTXQSFXYSIPLYTTYTYTSYHSISPXNSQSFYNNFITSYYLLIYLPPYHSYXFISLISPYHFPYSFPFSLYXNSFXTSFYFYIYLXXPXXLTQTPPTSSIIFLFIPTFPFLHSLSXQXTLXXPPFFFFFXAGAGAGSLLSLFVGGQEVPPTRLGRVGASASGLVNMYDVLCFFNQGGASGFPQHNRSLPCPGMPHHTQVSSFALRSLQGLPNPGQSPMCLVQELPGPCEGQQRAPPPPDGWGPTQPLSPLCSRLTCHCQEMAPTSTPLLQQRS

SEQ ID NO: 1017227 - protein, 156 aa, Homo sapiens
MYDVLCFFNQGGASGFPQHNRSLPCPGMPHHTQVSSFALRSLQGLPNPGQSPMCLVQELPGPCEGQQRAPHHLTAGDPPSPSPLSAPDSLAIARRWPQQAPRFCSRGAELADRAPLNLTPSHQPRPASSDIEFLQPGGSTSTRAAANEVELQVLFP

SEQ ID NO: 1017228 - protein, 142 aa, Homo sapiens
SVVNEPISTRIPADVQINRNATIFPEANIVGHQSVIRCIDEQLIADIAFLCIEGAGFNRTYPIATEQHRISWRELPGFFAIENHTDTFRIRRGQRWRVQQIVFIHFAAFRAWLQFDINSRQQRSQAANPFATNLRFHHPKDG

SEQ ID NO: 1017229 - protein, 168 aa, Homo sapiens
MSRRYDSRTTIFSPEGRLYQVEYAMEAMGHAGTCLGILANDGVLLAGRETQQSTSFLMKSFFLEKIYKLNEDMACSVAGITSDANVLTNELRLIAQRYLLQYQEPIPCEQLVTALCDINTSLYTIWRKTSLWCSLLYIGWDKHYGLQLYQSDPSGITGDGRQLLVKYR

SEQ ID NO: 1017230 - protein, 182 aa, Homo sapiens
MSRRYDSRTTIFSPEGRLYQVEYAMEAMGHAGTCLGILANDGVLLAGRETQQSTSFLMKSFFLEKIYKLNEDMACSVAGITSDANVLTNELRLIAQRYLLQYQEPIPCEQLVTALCDINTSLYTIWRKTSLWCSLLYIGWDKHYGLQLYQSDPSGITGDGRQLLVKYRVSWCHVEQTIKRGK

SEQ ID NO: 1017231 - protein, 83 aa, Homo sapiens
GQTFTGHESDINAICFFPNGNAFATGSDEATFRLFDLRADQEPMTYFHDNINLRDTSVSSSKSGRLLLAWDDDFTATSGIALK

SEQ ID NO: 1017232 - protein, 81 aa, Homo sapiens
RVELVQLVIDGVNYLIDCERRLERGQDIRIPPPLVHSKHSTPHPQRMSQDPQDFCIFNSGLVYLPWTCLSPCPSKDSTLCC

SEQ ID NO: 1017233 - protein, 125 aa, Homo sapiens
MPTGPQSASFGITGDDGSPVMAKPPSIPPFLITHLLWKICHLGFNWIRRETVGTQEQNGARRYVLLPMQHVKKCPTCPHLKIRPLTSQKIRYSGPGAVAHACNRNTSGGRGGRIIRSRVRDQPGK

SEQ ID NO: 1017234 - protein, 110 aa, Homo sapiens
MGNRALNFSLEGNLRGSRHSGGTDRPPGADRRGRQGDRTEDTWGGWKVSALGHWYLSSLPQLDQASQPVGCQGQSVLRRRHGSPHEIHQVSPGSIQVTGLEGPQQPSWTC

SEQ ID NO: 1017235 - protein, 118 aa, Homo sapiens
  misc_feature (106)..(106): Xaa can be any naturally occurring amino acid
NRYRRGNQRFNSWRLTKRRRCSSFIKVQAIKRLCFCPWAISFLTTFTAPTSVRARYNGGKFSPRDTSDVNHITCFAKLLLFSIIFFDKGDFTAFTPQLLLLAAKVXCIVFVQPQVYGV

SEQ ID NO: 1017236 - protein, 1212 aa, Homo sapiens
MYKSLLDKAGLGSITSVRFLGDQQSVFVSKDLLKPIQDVNSLRLSLTDNQTVSKEFQALIVKHLDESHLLQGDKNLVGSEVRIYSLDPSTQWFSATVVHGNPSSKTLQVNCEEIPALKIVDPALIHVEVVHDNFVTCGNSTRIGAVKRKSSENNGSSVSKQAKSCSEVSPSMCPVQSVPTTVCKEILLGCTAATPSSNRQQNTPQAANSPPNIGAKLPQGCHKQSLPEEISSCLNTKSEVLRTKPDVCKAGLLSSKSSQVGAGDLKILSEPKGSCIQPKTNTDQESRLESTPQPVTGLTKECLVTKTSSKAELDNATAPELQKRLEHTASTPDGLSDKPEVEAGVTRLNSCSEKKVGPSDLGSQSQNLKETSVKVDHDSCCTRSSNKTQTPPARKSVLTDPDKLKKLQQSGEAFVQDDSCVNIVAQLPKCRECRLDSLRKDKDQQKDSPVFCRFFHFRRLQFNKHGVLRVEGFLTPNKYDSEAIGLWLPLTKNVVGTDLDTAKYILANIGDHFCQMVISEKEAMSTIEPHRQVAWKRAVKGVREMCDVCDTTIFNLHWVCPRCGFGVCVDCYRLKRKNCQQGAAYKTFSWIRCVKSQIHEPENLMPTQIIPGKALYDVGDIVHSVRAKWGIKANCPCSNRQFKLFSKPALKEDLKQASLSGEKPSLGTMVQQSSPVLEPAAVCGEAPSKPASNVKPICPANTSPLNWLADLTSGNVNKENKEKQLTMPILKNEIKCLPPLPPLNKSSTVLHTFNSTILTPVSNNNSGFLRNLLNSSTGKTENGLKNTPKILDDIFASLVQNKTTSDLSKRPQGLTIKPSILGFDTPHYWLCDNRLLCLQDPNNKSNWNVFRECWKQGQPVMVSGVHHKLNSELWKPESFRKEFGEQEVDLVNCRTNEIITGATVGDFWDGFEDVPNRLKNEKEPMVLKLKDWPPGEDFRDMMPSRFDDLMANIPLPEYTRRDGKLNLASRLPNYFVRPDLGPKMYNAYGLITPEDRKYGTTNLHLDVSDAANVMVYVGIPKGQCEQEEEVLKTIQDGDSDELTIKRFIEGKEKPGALWHIYAAKDTEKIREFLKKVSEEQGQENPADHDPIHDQSWYLDRSLRKRLHQEYGVQGWAIVQFLGDVVFIPAGAPHQVHNLYSCIKVAEDFVSPEHVKHCFWLTQEFRYLSQTHTNHEDKLQVKNVIYHAVKDAVAMLKAVNPVLANLNLPAHWK

SEQ ID NO: 1017237 - protein, 92 aa, Homo sapiens
  misc_feature (8)..(8): Xaa can be any naturally occurring amino acid
AQPLPVSXNSWQQGARRHNKTMSRLNAPLKQMPCCPTKIGYCCLTPNDLWNWKILLPKKCMYQAIMHPDSPCAAFISILSLPLIFFANGFYV

SEQ ID NO: 1017238 - protein, 55 aa, Homo sapiens
  misc_feature (42)..(42): Xaa can be any naturally occurring amino acid
  misc_feature (53)..(54): Xaa can be any naturally occurring amino acid
MSASDPNSSIFLTDTAKQIKTKVNKHAFSGGRDTIEEHRQFXGNCDVDVSFMXXA

SEQ ID NO: 1017239 - protein, 413 aa, Homo sapiens
TGYPRCGAEAPAPGGMQGWLDPWPGVSLGVLLPDPPPTLPGSDLSLTDAPPVSRPRLSLSMAEQEPTAEQLAQIAAENEEDEHSVNYKPPAQKSIQEIQELDKDDESLRKYNGGPAWACVACFLQTPNGPQTVVVTWPDPGVQLVPRAPLELDLTGDLESFKKHVCIVLKDGCWSTGIKISFRVNREIVSGMKYIQHTYRKGVKIDKTDYMVGSYGPRAEEYEFLTPVEEAPKGMLARGSYSIKSRFHRRRQDRPPVLGVKSHHQEGLEGPDPKQRAGTGTPDRTDDRTGGTHAHNKSTKTQQKQTKTNRDTTKRNDNTKQTTHKSNTPHPHTHRATTDRPHRTTADVEQNTATHRRPAAADTHVRAETKPEGDQDGTREHTATTNDDRQTTGEEQEERVQKEVKLQSVPDST

SEQ ID NO: 1017240 - protein, 352 aa, Homo sapiens
MAEQEPTAEQLAQIAAENEEDEHSVNYKPPAQKSIQEIQELDKDDESLRKYKEALLGLRGLFPADPKRSPNSRGDWPDPGVQLVPRAPLELDLTGDLESFKKHVCIVLKDGCWSTGIKISFRVNREIVSGMKYIQHTYRKGVKIDKTDYMVGSYGPRAEEYEFLTPVEEAPKGMLARGSYSIKSRFHRRRQDRPPVLGVKSHHQEGLEGPDPKQRAGTGTPDRTDDRTGGTHAHNKSTKTQQKQTKTNRDTTKRNDNTKQTTHKSNTPHPHTHRATTDRPHRTTADVEQNTATHRRPAAADTHVRAETKPEGDQDGTREHTATTNDDRQTTGEEQEERVQKEVKLQSVPDST

SEQ ID NO: 1017241 - protein, 89 aa, Homo sapiens
VARVFVGGCLGWWDSRPKKHHDFGRELLDELMGRGPKPSPGREAHEPCGGTTRAFVNIISVVFVLRNCSQIHVLILMYLEEEITLESSA

SEQ ID NO: 1017242 - protein, 148 aa, Homo sapiens
MKNHTVHRYVQDQTMQDLSCSRKPVAASAMFQRSSLLPRLLVSAGMIHRPGAHSRRRRRRARAPPEPPAAGDAGSAGNRAGRGRAGFSFSSLIANSLKVPTSGFRGAITWPLPPRVLGPFIFIMLIFRKRRPSGAPKETPQAVTTRIS

SEQ ID NO: 1017243 - protein, 148 aa, Homo sapiens; identical to SEQ ID NO: 1017242

SEQ ID NO: 1017244 - protein, 148 aa, Homo sapiens; identical to SEQ ID NO: 1017242

SEQ ID NO: 1017245 - protein, 148 aa, Homo sapiens; identical to SEQ ID NO: 1017242

SEQ ID NO: 1017246 - protein, 148 aa, Homo sapiens; identical to SEQ ID NO: 1017242

SEQ ID NO: 1017247 - protein, 260 aa, Homo sapiens
  misc_feature (211)..(211): Xaa can be any naturally occurring amino acid
  misc_feature (216)..(216): Xaa can be any naturally occurring amino acid
  misc_feature (228)..(228): Xaa can be any naturally occurring amino acid
  misc_feature (230)..(231): Xaa can be any naturally occurring amino acid
  misc_feature (234)..(234): Xaa can be any naturally occurring amino acid
MGPRVLQPPLLLLLLALLLCGAAVRCRRGLARAPRAVHVVAAAGGDEREPAGRATQQHAHASAGGFGSALTRSFYVILGFCGLTRVYFLIRAFRLKKLQWRRYGLLANTEDPTEMASLDSDEETVFESRNLRLMLSQGGGPSSSHEGRTGDGAHPVPSNPLLHHSFPCWARGWCHPVPTRELLLEPAQPADLLPPAPTAGPCSLASWMLSXPGRGXQVKTGGTPTATXQXXEAXLPDCDLCSSLSAPVGTWQPRAKGGWE

SEQ ID NO: 1017248 - protein, 216 aa, Homo sapiens
  misc_feature (9)..(9): Xaa can be any naturally occurring amino acid
  misc_feature (23)..(23): Xaa can be any naturally occurring amino acid
  misc_feature (35)..(35): Xaa can be any naturally occurring amino acid
  misc_feature (44)..(44): Xaa can be any naturally occurring amino acid
  misc_feature (51)..(51): Xaa can be any naturally occurring amino acid
  misc_feature (55)..(55): Xaa can be any naturally occurring amino acid
  misc_feature (59)..(59): Xaa can be any naturally occurring amino acid
GCYPHPGSXLPPQALFMGEGTCXKRRDAEYGASPXQVADNGDDXSEGGLVXNHVXSTMXMLGGGGRAGRKPLKSGMKELAVFREKVTEQHRQMGKGGKHHLGLEEPKKLRPPPARTPCQQELDQVLERISTMRLPDERGPLEHLYSLHIPNCDKHGLYNLTQCKMSLNGQRGECWCVNPNTGKLIQGAPTIRGDPECHLFYNEQQEARGVHTQRMQ

SEQ ID NO: 1017249 - protein, 105 aa, Homo sapiens
INAEWPLRRGLQTYLEKGCILDIQARRRTQKAVTYIILCIYLLGEIVRLPILSLGRNGLVQPYTESSRARQYREYLTKGTWEKCSRGTLGNSRPPPPSCFPLIRQ

SEQ ID NO: 1017250 - protein, 121 aa, Homo sapiens
MSLKILHAAAYRNALANPLYCPDYRIGRMALIELAVSHTVLKQSAEQFLNMRGGLGLSGAKANYLRRRNPRTECIQTCSCCFSSTKSCRARSQANAFSVVQHVLGAVPHVERGKNTTSLLD

SEQ ID NO: 1017251 - protein, 105 aa, Homo sapiens; identical to SEQ ID NO: 1017249

SEQ ID NO: 1017252 - protein, 77 aa, Homo sapiens
  misc_feature (57)..(57): Xaa can be any naturally occurring amino acid
  misc_feature (69)..(69): Xaa can be any naturally occurring amino acid
ADSRGSRTLQPYSENSGVNTGPGRDSYKPGAGTSFEFALAIVEALNGKEVAGSSEGXTCSSRLEQQTAXDHLEKQAS

SEQ ID NO: 1017253 - protein, 120 aa, Homo sapiens
MAHRFPALTPEQKKELSEIAQRIVANGKGILAADESVGTMGNRLQRIKVENTEENRTQFRELLFSVDNSISQSIGGVILFHETLYQKDSQGNLFRNVLKEKGIVVGIKLNPGSFHEAGYG

SEQ ID NO: 1017254 - protein, 364 aa, Homo sapiens
MAHRFPALTPEQKKELSEIAQRIVANGKGILAADESVGTMGNRLQRIKVENTEENRTQFRELLFSVDNSISQSIGGVILFHETLYQKDSQGNLFRNVLKEKGIVVGIKLDQGGAPLAGTNKETTIQGLDGLSERCAQYKKDGVDFGKWRAVLRIADQCPSSLAIQENANALARYASICQQNGLVPIVEPEVLPDGDHDLEHCQYVSEKVLAAVYKALNDHHVYLEGTLLKPNMVTAGHACTKKYTPEQVAMALVTALHRTVPAAVPGICFLSGGMSEEDATLNLNAINRCPLPRPWKLSFSYGRALQASALAAWGGKAANKKATQEAFMKRAMANCQAAQGQYVHTGSSGAAATQSLFTASYTY

SEQ ID NO: 1017255 - protein, 88 aa, Homo sapiens
GTPIRSQALGNQNSENEILLEGDDDTLSSVDEKDLENLAGPVSLSTPAQLVAPSVVVKGTLSVTSSELYFEVDEEDPNFKKIDPKVRR

SEQ ID NO: 1017256 - protein, 645 aa, Homo sapiens
MAGPAPPAADELPGPAARRLYSRMEASCLELALEGERLCKAGDFKTGVAFFEAAVQVGTEDLKTLSAIYSQLGNAYFYLKEHGRALEYHKHDLLLARTIGDRMGEAKASGNLGNTLKVLGRFDEAAVCCQRHLSIAQEQGDKVGEARALYNIGNVYHAKGKQLSWNAANATQDPGHLPPDVRETLCKASEFYERNLSLVKELGDRAAQGRAYGNLGNTHYLLGNFTEATTFHKERLAIAKEFGDKAAERRAYSNLGNAHVFLGRFDVAAEYYKKTLQLSRQLRDQAVEAQACYSLGNTYTLLQDYERAAEYHLRHLLIAQELADRVGEGRACWSLGNAYVSMGRPAQALTFAKKHLQISQEIGDRHGELTARMNVAQLQLVLGRLTSPAASEKPDLAGYEAQGARPKRTQRLSAETWDLLRLPLEREQNGDSHQYTGAPGLVEHPSTGHSRSALHTGATGRPGERLAQGEHGAHRDPTLGGKGQGGPTQGANGAQGTNVPTDLAPGGRTIPGLHVPRTSIPRAPSSDEECFFDLLTKFQSSRMDDQRCPLDDGQAGAAEARRPTPGGQDRPASMTARPDRGILRASSPAPRAGGLDDQGASCGHACGAANHPQAMHGHSEATVKPLSRGTNSSDADSTSLQTMTR

SEQ ID NO: 1017257 - protein, 269 aa, Homo sapiens
AVSGGRASAWQKQLCRAQDPEDAVGKPTEAPMALGAAEGEPGPHVHVHTWETERGSRWVWGQTQEDAEAERGDLGPAETPPGAGAEWRQPPFRGLAGAQQGLATPPREEQEVPGRPWTLRGGPGRAATPRWTAPTSGCTCHARASRGPRLRTRSASLNLLTKFQSSRMDDQRCPLDDGQAGAAEARLPHTWRTGSPSLDDGSPRPRNSSTLIASSQSRGLDDQGASCGQPAGLRITHSNAGHSEATVKPLSRGTNSSDADSTSLQTMTR

SEQ ID NO: 1017258 - protein, 613 aa, Homo sapiens
MAGPAPPAADELPGPAARRLYSRMEASCLELALEGERLCKAGDFKTGVAFFEAAVQVGTEDLKTLSAIYSQLGNAYFYLKEHGRALEYHKHDLLLARTIGDRMGEAKASGNLGNTLKVLGRFDEAAVCCQRHLSIAQEQGDKVGEARALYNIGNVYHAKGKQLSWNAANATQDPGHLPPDVRETLCKASEFYERNLSLVKELGDRAAQGRAYGNLGNTHYLLGNFTEATTFHKERLAIAKEFGDKAAERRAYSNLGNAHVFLGRFDVAAEYYKKTLQLSRQLRDQAVEAQACYSLGNTYTLLQDYERAAEYHLRHLLIAQELADRVGEGRACWSLGNAYVSMGRPAQALTFAKKHLQISQEIGDRHGELTARMNVAQLQLVLGRLTSPAASEKPDLAGYEAQGARPKRTQRLSAETWDLLRLPLEREQNGDSHHSGDWLGAQQGLATPPREEQEVPGRPWTLRGGPGRAATPRWTAPTSGCTCHARASRGPRLRTRSASLNLLTKFQSSRMDDQRCPLDDGQAGAAEARLPHTWRTGSPSLDDGSPRPRNSSTLIASSQSRRIGRPGGQLWASLRGCESPTSNAGHSEATVKPLSRGTNSSDADSTSLQTMTR

SEQ ID NO: 1017259 - protein, 434 aa, Homo sapiens
MEASCLELALEGERLCKAGDFKTGVAFFEAAVQVGTEDLKTLSAIYSQLGNAYFYLKEHGRALEYHKHDLLLARTIGDRMGEAKASGNLGNTLKVLGRFDEAAVCCQRHLSIAQEQGDKVGEARALYNIGNVYHAKGKQLSWNAANATQDPGHLPPDVRETLCKASEFYERNLSLVKELGDRAAQGRAYGNLGNTHYLLGNFTEATTFHKERLAIAKEFGDKAAERRAYSNLGNAHVFLGRFDVAAEYYKKTLQLSRQLRDQAVEAQACYSLGNTYTLLQDYERAAEYHLRHLLIAQELADRVGEGRACWSLGNAYVSMGRPAQALTFAKKHLQISQEIGDRHGELTARMNVAQLQLVLGRLTSPAASEKPDLAGYEAQGEFQGCGGVLLPTGTDRIRSCGGVGSRPGQHGGGGSRQKMAPTSQFFLASGTAQA

SEQ ID NO: 1017260 - protein, 139 aa, Homo sapiens
  misc_feature (12)..(12): Xaa can be any naturally occurring amino acid
APRAPGVRPVQXPMITQYHLMEKAVVKTDIQIALPSGCYGRVAPRSGLAAKHFIDVGAGVIDEDYRGNVGVVLFNFGKEKFEVKKGDRIAQLICERIFYPEIEEVQALDDTERGSGGLVPLERIKIYAKNRKQEVIPFS

SEQ ID NO: 1017261 - protein, 139 aa, Homo sapiens; identical to SEQ ID NO: 1017260
  misc_feature (12)..(12): Xaa can be any naturally occurring amino acid

SEQ ID NO: 1017262 - protein, 133 aa, Homo sapiens
SVSSLPVFFCCSLPLCSPSCTLGLLFSFLVSVVLLRGCARLVFSRVVFLFGPLMSFSSYLRLAPVVECVSAACRLVGLVGFGVALGPRVGVCFVFACVWWVGAPILCVSGVVCPFSSRGAVLSGGAFCRRSVL

SEQ ID NO: 1017263 - protein, 111 aa, Homo sapiens
  misc_feature (2)..(2): Xaa can be any naturally occurring amino acid
IXLTVPLHPTLVTAYLSPNPFTVVPTELKTPPPKPRGHPKRDPKLYIKSHNIGPQVWWLMPCNPQHFGRLKAGGLLEPQEFKQYQPGQHGETLSPQKIQKLAGCSGTHLYS

SEQ ID NO: 1017264 - protein, 269 aa, Homo sapiens
EDLVDLMDETMALNKNHSEGGGVIVNNTESILMSYDHVELTFNDMKNVPEAFKGTKKGTVYLTPYRVIFLSKGKDASAVLHDAILSHEKTVRSSSPYLDANYIKGTVKAEAGGGWEGSASYKLTFTAGGAIEFGQRMLQVASQASRGEVPSGAYGYSYMPSGAYVYPPPVANGMYALASWLPLSSAPHLSSIQEPRMMDGAMGYVQARTTTYPGPMETPVSGPDVPSTPLRGRMPRCRTKLGRQRAITTQANPHNVYMPTEPAAAPPYT

SEQ ID NO: 1017265 - protein, 100 aa, Homo sapiens
QTGLTLLISNDPPPSASQSAGIRGVSQGALPLLPVCTFPGSWVLTPDLTISALQVVVNGNPFYEYGHRLPLQMVTHLQVDGDLQLQSINFIGGQPLRPQV

SEQ ID NO: 1017266 - protein, 120 aa, Homo sapiens
KKWGSEERKRSMPFKKGAAFELVFIVLAEHYKVVVNGNPFYEYGHRLPLQMVTHLQVDGDLQLQSINFIGGQPLRPQGPPMMPPYPGPGHCHQQLNSLPTMEGPPTFNPPVPYFGRLQGG

SEQ ID NO: 1017267 - protein, 100 aa, Homo sapiens
PGHIVERDEEYGGCELGNPFYNCWLCVLVLLETHLQVDGDLQLQSINFIGGQPLRPQGPPMMPPYPGPGHCHQQLNSLPTMEGPPTFNPPVPYFGRLQGG

SEQ ID NO: 1017268 - protein, 180 aa, Homo sapiens
  misc_feature (171)..(171): Xaa can be any naturally occurring amino acid
MQVPNSTGPDNATLQMLRNPAIAVALPVVYSLVAAVSIPGNLFSLWVLCRRMGPRSPSVIFMINLSVTDLMLASVLPFQIYYHCNRHHWVFGVLLCNVVTVAFYANMYSSILTMTCISVEASMGVTVPDSDPRRWQPPSLRGGRVCRDLAAAPERPVPAGAHRSHYTGASXGHHHCFDVL

SEQ ID NO: 1017269 - protein, 180 aa, Homo sapiens
  misc_feature (170)..(170): Xaa can be any naturally occurring amino acid
MQVPNSTGPDNATLQMLRNPAIAVALPVVYSLVAAVSIPGNLFSLWVLCRRMGPRSPSVIFMINLSVTDLMLASVLPFQIYYHCNRHHWVFGVLLCNVVTVAFYANMYSSILTMTCISVEASLGVTVPDSAPRRWRRRRYAVAACAGTWLLLLNALSPLARTDLTNRCKXWASPLLRRPQ

SEQ ID NO: 1017270 - protein, 143 aa, Homo sapiens
MSRLFSLAIQTPQDLALPFLPTLVSSHIPSSAVQQPCRLSLVLQIHQAWFHLMVLHLLFPMCAMLDLSPGSLAQGTEADTTLITPDGMEEMEVGGRMCSLAQGTEADTTLITPDGMEEMEVGGRMCNPDSSKSKGEGKQERDT

SEQ ID NO: 1017271 - protein, 143 aa, Homo sapiens; identical to SEQ ID NO: 1017270

SEQ ID NO: 1017272 - protein, 254 aa, Homo sapiens
  misc_feature (111)..(111): Xaa can be any naturally occurring amino acid
  misc_feature (249)..(249): Xaa can be any naturally occurring amino acid
MEGSLEREAPAGALAAVLKHSSTLPPESTQVRGYDFNRGVNYRALLEAFGTTGFQATNFGRAVQQVNAMIEKKLEPLSQDEDQHADLDPEPAAQLTQTAPFFRGDIHPNLXQVQGTPVRTISASLVQHKHWVDVLGDHTPGWRGRKTSIKVPGGPQYLGRSLRLRGEGAPGERGSIGSENLLVPNENYCKFEDWADAHSGPDGDGSRTQRGVKWTPSKMIARLGKEINNPESVYYWARRTTSCVESALXDGSLG

SEQ ID NO: 1017273 - protein, 252 aa, Homo sapiens
  misc_feature (98)..(98): Xaa can be any naturally occurring amino acid
  misc_feature (100)..(100): Xaa can be any naturally occurring amino acid
  misc_feature (107)..(107): Xaa can be any naturally occurring amino acid
  misc_feature (112)..(112): Xaa can be any naturally occurring amino acid
  misc_feature (247)..(247): Xaa can be any naturally occurring amino acid
MEGSLEREAPAGALAAVLKHSSTLPPESTQVRGYDFNRGVNYRALLEAFGTTGFQATNFGRAVQQVNAMIEKKLEPLSQDEDQHADLAPPPPPPPPPXPXSLRAPPXPLPTXPAPAPHHSLPFVQHKHWVDVLGDHTPGWRGRKTSIKVPGGPQYLGRSLRLRGEGAPGERGSIGSENLLVPNENYCKFEDWADAHSGPDGDGSRTQRGVKWTPSKMIARLGKEINNPESVYYWARRTTSCVESALXDGSLG

SEQ ID NO: 1017274 - protein, 124 aa, Homo sapiens
  misc_feature (15)..(15): Xaa can be any naturally occurring amino acid
WDPLNRVLANLFLLXSSILGSRTAGPHTQFVQWFMEECVDCLEQGGHGSVLQFMPFTTVSELVKVSAMSSPKVVLGHHGPQPAPVACQVAAKAIASTLSVACAWPQLVGWVTGCSPSAPPMGSM

SEQ ID NO: 1017275 - protein, 34 aa, Homo sapiens
MLAWYPSEILDPHVDAVNHSETYSEFTHYFSPKT

SEQ ID NO: 1017276 - protein, 965 aa, Homo sapiens
ISPSGTELSSLEQTRSYLLSDGTCKCGLECPLNVPKVFNFDPLAPVTPGGAGVGPASEEDMTKLCNHRRKAVAMATLYRSMETTCSHSSPGEGASPQMFHTVSPGPPSARPPCRVPPTTPLNGGPGSLPPEPPSVSQAFPTLAGPGGLFPPRLADPVPSGGSSSPRFLPRGNAPSPAPPPPPAISLNAPSYNWGAALRSSLVPSDLGSPPAPHASSSPPSDPPLFHCSDALTPPPLPPSNNLPAHPGPASQPPVSSATMHLPLVLGPLGGAPTVEGPGAPPFLASSLLSAAAKAQHPPLPPPSTLQGRRPRAQAPSASHSSSLRPSQRRPRRPPTVFRLLEGRGPQTPRRSRPRAPAPVPQPFSLPEPSQPILPSVLSLLGLPTPGPSHSDGSFNLLGSDAHLPPPPTLSSGSPPQPRHPIQPSLPGTTSGSLSSVPGAPAPPAASKAPVVPSPVLQSPSEGLGMGAGPACPLPPLAGGEAFPFPSPEQGLALSGAGFPGMLGALPLPLSLGQPPPSPLLNHSLFGVLTGGGGQPPPEPLLPPPGGPGPPLAPGEPEGPSLLVASLLPPPPSDLLPPPSAPPSNLLASFLPLLALGPTAGDGEGSAEGAGGPSGEPFSGLGDLSPLLFPPLSAPPTLIALNSALLAATLDPPSGTPPQPCVLSAPQPGPPTSSVTTATTDPGASSLGKAPSNSGRPPQLLSPLLGASLLGDLSSLTSSPGALPSLLQPPGPLLSGQLGLQLLPGGGAPPPLSEASSPHSLPATESPDSLQSSQKPPVYHPESPASALEPEPARPPLSALAPPHGSPDPPVPELLTGRGSGKRGRRGGGGLRGINGEARPARGRKPGSRREPGRLALKWGTRGGFNGQMERSPRRTHHWQHNGELAEGGAEPKDPPPPGPHSEDLKVPPGVVRKSRRGRRRKYNPTRNSNSSRQDITLEPSPTARAAVPLPPRARPGRPATLIGES

SEQ ID NO: 1017277 - protein, 967 aa, Homo sapiens
ISPSGTELSSLEQTRSYLLSDGTCKCGLECPLNVPKVFNFDPLAPVTPGGAGVGPASEEDMTKLCNHRRKAVAMATLYRSMETTCSHSSPGEGASPQMFHTVSPGPPSARPPCRVPPTTPLNGGPGSLPPEPPSVSQAFPTLAGPGGLFPPRLADPVPSGGSSSPRFLPRGNAPSPAPPPPPAISLNAPSYNWGAALRSSLVPSDLGSPPAPHASSSPPSDPPLFHCSDALTPPPLPPSNNLPAHPGPASQPPVSSATMHLPLVLGPLGGAPTVEGPGAPPFLASSLLSAAAKAQHPPLPPPSTLQGRRPRAQAPSASHSSSLRPSQRRPRRPPTVFRLLEGRGPQTPRRSRPRAPAPVPQPFSLPEPSQPILPSVLSLLGLPTPGPSHSDGSFNLLGSDAHLPPPPTLSSGSPPQPRHPIQPSLPGTTSGSLSSVPGAPAPPAASKAPVVPSPVLQSPSEGLGMGAGPACPLPPLAGGEAFPFPSPEQGLALSGAGFPGMLGALPLPLSLGQPPPSPLLNHSLFGVLTGGGGQPPPEPLLPPPGGPGPPLAPGEPEGPSLLVASLLPPPPSDLLPPPSAPPSNLLASFLPLLALGPTAGDGEGSAEGAGGPSGEPFSGLGDLSPLLFPPLSAPPTLIALNSALLAATLDPPSGTPPQPCVLSAPQPGPPTSSVTTATTDPGASSLGKAPSNSGRPPQLLSPLLGASLLGDLSSLTSSPGALPSLLQPPGPLLSGQLGLQLLPGGGAPPPLSEASSPLACLLQSLQIPPEQPEAPCLPPESPASALEPEPARPPLSALAPPHGSPDPPVPELLTGRGSGKRGRRGGGGLRGINGEARPARGRKPGSRREPGRLALKWGTRGGFNGQMERSPRRTHHWQHNGELAEGGAEPKDPPPPGPHSEDLKVPPGVVRKSRRGRRRKYNPTRNSNSSRQDITLEPSPTARAAVPLPPRARPGRPAKNKRRKLAP

SEQ ID NO: 1017278 - protein, 530 aa, Homo sapiens
MERMVGSGLLWLALVSCILTQASAVQRGYGNPIEASSYGLDLDCGAPGTPEAHVCFDPCQNYTLLDEPFRSTENSAGSQGCDKNMSGWYRFVGEGGVRMSETCVQVHRCQTDAPMWLNGTHPALGDGITNHTACAHWSGNCCFWKTEVLVKACPGGYHVYRLEGTPWCNLRYCTDPSTVEDKCEKACRPEEECLALNSTWGCFCRQDLNSSDVHSLQPQLDCGPREIKVKVDKCLLGGLGLGEEVIAYLRDPNCSSILQTEERNWVSVTSPVQASACRNILERNQTHAIYKNTLSLVNDFIIRDTILNINFQCAYPLDMKVSLQAALQPIVSSLNVSVDGNGEFIVRMALFQDQNYTNPYEGDAVELSVESVLYVGAILEQGDTSRFNLVLRNCYATPTEDKADLVKYFIIRNSCSNQRDSTIHVEENGQSSESRFSVQMFMFAGHYDLVFLHCEIHLCDSLNEQCQPSCSRSQVRSEVPAIDLARVLDLGPITRRGAQSPGVMNGTPSTAGFLVAWPMVLLTVLLAWLF

SEQ ID NO: 1017279 - protein, 408 aa, Homo sapiens
PGRFVFSSELHGKSAYSKVTCMPHLMERMVGSGLLWLALVSCILTQASAVQRDPSTVEDKCEKACRPEEECLALNSTWGCFCRQDLNSSDVHSLQPQLDCGPREIKVKVDKCLLGGLGLGEEVIAYLRDPNCSSILQTEERNWVSVTSPVQASACRNILERNQTHAIYKNTLSLVNDFIIRDTILNINFQCAYPLDMKVSLQAALQPIVSSLNVSVDGNGEFIVRMALFQDQNYTNPYEGDAVELSVESVLYVGAILEQGDTSRFNLVLRNCYATPTEDKADLVKYFIIRNSCSNQRDSTIHVEENGQSSESRFSVQMFMFAGHYDLVFLHCEIHLCDSLNEQCQPSCSRSQVRSEVPAIDLARVLDLGPITRRGAQSPGVMNGTPSTAGFLVAWPMVLLTVLLAWLF

SEQ ID NO: 1017280 - protein, 261 aa, Homo sapiens
DLTLYNPERTITVKGAIENCCRAEQEIMKKVREAYENDVAAMSLQSHLIPGLNLAAVGLFPASSSAVPPPPSSVTGAAPYSSFMQAPEQEMVQVFIPAQAVGAIIGKKGQHIKQLSRFASASIKIAPPETPDSKVRMVIITGPPEAQFKAQGRIYGKLKEENFFGPKEEVKLETHIRVPASAAGRVIGKGGKTVNELQNLTAAEVVVPRDQTPDENDQVIVKIIGHFYASQMAQRKIRDILAQVKQQHQKGQSNQAQARRK

SEQ ID NO: 1017281 - protein, 261 aa, Homo sapiens; identical to SEQ ID NO: 1017280

SEQ ID NO: 1017282 - protein, 283 aa, Homo sapiens
DLTLYNPERTITVKGAIENCCRAEQEIMKKVREAYENDVAAMSLQSHLIPGLNLAAVGLFPASSSAVPPPPSSVTGAAPYSSFMQAPEQEMVQVFIPAQAVGAIIGKKGQHIKQLSRFASASIKIAPPETPDSKVRMVIITGPPEAQFKGLQYDSYAEGKLTSCPLEPCPSPALMAQGRIYGKLKEENFFGPKEEVKLETHIRVPASAAGRVIGKGGKTVNELQNLTAAEVVVPRDQTPDENDQVIVKIIGHFYASQMAQRKIRDILAQVKQQKSRVCSPRQA

SEQ ID NO: 1017283 - protein, 261 aa, Homo sapiens; identical to SEQ ID NO: 1017280

SEQ ID NO: 1017284 - protein, 115 aa, Homo sapiens
KGKVEKAQRPGSWCFPLSLSRGSLRVCIFFLSTHAVYFPAPRRNVGLQPLFLKKRKRLQMTAQTSPELSVGWRGKWRLLATGWQECLYSLLAGSPRGASGRFFLLDRISWRPAGP

SEQ ID NO: 1017285 - protein, 317 aa, Homo sapiens
GAGRAGPGKASAGGAAAPELLERSGSPGGGGAQRRRQAAARCAPPRTVRRPGPSRELAGGRAAPAAAPTPGPLRRAMARPLVPSSQKALLLELKGLQEEPVEGFRVTLVDEGDLYNWEVAIFGPPNTYYEGGVLQGALKFPIDYPYSPAAFRFLTKMWHPNIYETGDVCISILHPPVDEPQSGGAASERWNPTQNVRTILLSVISLLNEPKTFSPGKRWTPPVMYSQVEREAGGRIREYTDIIRSLGPGWTRSVEGLKGPNKAWAELLRLRAMGRAPDRGSDVSRESNYEDGKLKEQAESCSGTMKITFGGGVLKEH

SEQ ID NO: 1017286 - protein, 73 aa, Homo sapiens
  misc_feature (3)..(4): Xaa can be any naturally occurring amino acid
  misc_feature (31)..(31): Xaa can be any naturally occurring amino acid
NCXXFSPDGNRFPTASPDGQIYIYDGKTGEXVCPLGGSKAHDGGIYAISWSPDSTHFLLLLGTKLPRFGDVSV

SEQ ID NO: 1017287 - protein, 513 aa, Homo sapiens
MELEEGKAGSGLRQYYLSKIEELQLIVNDKSQNLRRLQAQRNELNAKVRLLREELQLLQEQGSYVGEVVRAMDKKKVLVKVHPEGKFVVDVDKNIDINDVTPNCRVALRNDSYTLHKILPNKVDPLVSLMMVEKVPDSTYEMIGGLDKQIKEIKEVIELPVKHPELFEALGIAQPKGVLLYGPPGTGKTLLARAVAHHTDCTFIRVSGSELVQKFIGEGARMVRELFVMAGNMLNKVDPLVSLMMVEKVPDSTYEMIGGLDKQIKEIKEVIELPVKHPELFEALGIAQPKGVLLYGPPGTGKTLLARAVAHHTDCTFIRVSGSELVQKFIGARGKNGEGSWFVMAREHAPSIIFMDDIDSIGSSRLEGGSGGDSEVQRTMLELLNQLDGFEATKNIKVIMATNRIDILDSALLRPGRIDRKIEFPPPNEEARLDILKIHSRKMNLTRGINLRKIAELMPGASGAEVKGVCTEAGMYALRERRVHVTQEDFEMAVAKVMQKDSEKNMSIKKLWK

SEQ ID NO: 1017288 - protein, 393 aa, Homo sapiens
MALDGPEQMELEEGKAGSGLRQYYLSKIEELQLIVNDKSQNLRRLQAQRNELNAKVRLLREELQLLQEQGSYVGEVVRAMDKKKVWSCDTQLPGGSKGMTDYTLHKILPNKVDPLVSLMMVEKVPDSTYEMIWWTGDKIMIIRARSKREVIELPVKHPELFEALGIAQPKGVLLYGPPGTGKTLLARAVAHHTDCTFIRVSGSELVQKFIGARGKNGEGSWFVMAREHAPSIIFMDDIDSIGSSRLEGGSGGDSEVQRTMLELLNQLDGFEATKNIKVIMATNRIDILDSALLRPGRIDRKIEFPPPNEEARLDILKIHSRKMNLTRGINLRKIAELMPGASGAEVKGVCTEAGMYALRERRVHVTQEDFEMAVAKVMQKDSEKNMSIKKLWK

SEQ ID NO: 1017289 - protein, 295 aa, Homo sapiens
MTGYTLHKILPNKVDPLVSLMMVEKVPDSTYEMIWWTGDKIMIIRARSKREVIELPVKHPELFEALGIAQPKGVLLYGPPGTGKTLLARAVAHHTDCTFIRVSGSELVQKFIGARGKNGEGSWFVMAREHAPSIIFMDEIDSIGSSRLEGGSGGDSEVQRTMLELLNQLDGFEATKNIKVIMATNRIDILDSALLRPGRIDRKIEFPPPNEEARLDILKIHSRKMNLTRGINLRKIAELMPGASGAEVKGVCTEAGMYALRERRVHVTQEDFEMAVAKVMQKDSEKNMSIKKLWK

SEQ ID NO: 1017290 - protein, 521 aa, Homo sapiens
MALDGPEQMELEEGKAGSGLRQYYLSKIEELQLIVNDKSQNLRRLQAQRNELNAKVRLLREELQLLQEQGSYVGEVVRAMDKKKVLVKVHPEGKFVVDVDKNIDINDVTPNCRVALRNDSYTLHKILPNKVDPLVSLMMVEKVPDSTYEMIGGLDKQIKEIKEVIELPVKHPELFEALGIAQPKGVLLYGPPGTGKTLLARAVAHHTDCTFIRVSGSELVQKFIGEGARMVRELFVMAGNMLNKVDPLVSLMMVEKVPDSTYEMIGGLDKQIKEIKEVIELPVKHPELFEALGIAQPKGVLLYGPPGTGKTLLARAVAHHTDCTFIRVSGSELVQKFIGARGKNGEGSWFVMAREHAPSIIFMDDIDSIGSSRLEGGSGGDSEVQRTMLELLNQLDGFEATKNIKVIMATNRIDILDSALLRPGRIDRKIEFPPPNEEARLDILKIHSRKMNLTRGINLRKIAELMPGASGAEVKGVCTEAGMYALRERRVHVTQEDFEMAVAKVMQKDSEKNMSIKKLWK

SEQ ID NO: 1017291 - protein, 32 aa, Homo sapiens
TLEQSDQLRFLHADFPLILSIALSFRINGCKK

SEQ ID NO: 1017292 - protein, 201 aa, Homo sapiens
  misc_feature (183)..(183): Xaa can be any naturally occurring amino acid
  misc_feature (199)..(199): Xaa can be any naturally occurring amino acid
MTTPGKENFRLKSYKNKSLNPDEMRRRREEEGLQLRKQKREEQLFKRRNVATAEEETEEEVMSDGGFHEAQINNMEMAPGGVITSDMIEMIFSKSPEQQLSATQKFRKLLSKEPNPPIDEVISTPGVVARFVEFLKRKENCTLQPPPTFPRADAERLCLAFLIFPLSLLFFSFFSSPLHSSSXPQQALPVPPRLKTSPXRG

SEQ ID NO: 1017293 - protein, 184 aa, Homo sapiens
MTTPGKENFRLKSYKNKSLNPDEMRRRREEEGLQLRKQKREEQLFKRRNVATAEEETEEEVMSDGGFHEAQINNMEMAPGGVITSDMIEMIFSKSPEQQLSATQKFRKLLSKEPNPPIDEVISTPGVVARFVEFLKRKENCTLQVSLAFARNQSGTGKVASNRVLIQMEKGNQAYLNWSGKLDR

SEQ ID NO: 1017294 - protein, 164 aa, Homo sapiens
MTTPGKENFRLKSYKNKSLNPDEMRRRREEEGLQLRKQKREEQLFKRRNVATAEEETEEEVMSDGGFHEAQINNMEMAPGGVITSDMIEMIFSKSPEQQLSATQKFRKLLSKEPNPPIDEVISTPGVVARFVEFLKRKENCTLQFESAWVLTNIASGNSLQTRM

SEQ ID NO: 1017295 - protein, 141 aa, Homo sapiens
MRRRREEEGLQLRKQKREEQLFKRRNVATAEEETEEEVMSDGGFHEAQINNMEMAPGGVITSDMIEMIFSKSPEQQLSATQKFRKLLSKEPNPPIDEVISTPGVVARFVEFLKRKENCTLQFESAWVLTNIASGNSLQTRM

SEQ ID NO: 1017296 - protein, 108 aa, Homo sapiens
MKDFVWLHDTLIETTDYAGLIIPPAPTKPDFDGPREKMQKLGEGEGSITKEEVCQDETRTGKLSISLCERKTVSSHEVFFSGFRSHPVLSKRSQAFMFFLEYESGSKC

SEQ ID NO: 1017297 - protein, 35 aa, Homo sapiens
RGEALRTHGGAPGDREGPAPLFLAPQVCGPVPKLR

SEQ ID NO: 1017298 - protein, 197 aa, Homo sapiens
KLKKKDKESVALLCRAFCAERGPGRSPQRAAGPPCPVPAAVLHPSSSFCVPFRPCAQPSQAGTARVRRPWGAAGLMHASAMESSVCFGACPCLPPTSCIDFNASVNIRPLPQAGISIHKNKSKHLGQQTPGGTGGKGLSTEIEDTKQTASCLPSPFVLRTHADSSRRHGNGQAPAVYPCHNCEQLQLRNNKSLPQRQ

SEQ ID NO: 1017299 - protein, 86 aa, Homo sapiens
SVISGEIGFWRRLEDLIQGLTGEKPRADDMKWAQKIKYFSEPATWLPTFPSPQTEAICQIPASLSWPLQMERTSPGLGPGPPAHPS

SEQ ID NO: 1017300 - protein, 201 aa, Homo sapiens
MKVLLLKDAKEDDSGLDPYIQELRLCGLEATHEFLCCHLSLCLSPVCQKSCLILKALEDSFSPSPRAVEAVKLCLEKDNKTEAWEKSLEKTDGIAKSCVTWLEVANGFLLVNKIGLDAEGAGSGNAEKLAEYICSKPSSELPLLFPCGTIKGDTLPKMLKDKGIPMESMHVYQTVPHPGIQGSLKSYYEDQGIPASITFFS

SEQ ID NO: 1017301 - protein, 105 aa, Homo sapiens
SKPCGGIWRGKRPFREIGAGGGALPELSPLFLSGPLSSLDGDINYIRLGAVAHACDPSHFGRPRVYHLKPGVREQPGQHGVCLYKKNLNYPGVLALSCGPSYSGG

SEQ ID NO: 1017302 - protein, 255 aa, Homo sapiens
GEPGEKGVPGKEGVPGKPGEPGFKGERGDPGIKGDKGPPGGKGQPGDPGIPGHKGHTGLMGPQGLPGENGPVGPPGPPGQPGFPGLRGESPSMETLRRLIQEELGKQLETRLAYLLAQMPPAYMKSSQGRPGPPGPPGKDGLPGRAGPMGEPGRPGQGGLEGPSGPIGPKGERGAKGDPGAPGVGLRGEMGPPGIPGQPGEPGYAKDGLPGDPWASRGDTDQLDILGSQDLPVPQANVTLPSVPTSPALLPGRVM

SEQ ID NO: 1017303 - protein, 75 aa, Homo sapiens
ELGLPGLKGDRGEKGEAGPAGPPGLPGTTSLFTPHPRMPGEQGPKGEKGDPGQCDPSQCAYFASLAARPGNVKGP

SEQ ID NO: 1017304 - protein, 250 aa, Homo sapiens
SGGHLCAGPRFRQRRSGESAVGLPAMEWWASSPLRLWLLLFLLPSAQGRQKESGSKWKVFIDQINRSLENYEPCSSQNCSCYHGVIEEDLTPFRGGISRKMMAEVVRRKLGTHYQITKNRLYRENDCMFPSRCSGVEHFILEVIGRLPDMEMVINVRDYPQVPKWMEPAIPVFSFSKTSEYHDIMYPAWTFWEGGPAVWPIYPTGLGRWDLFREDLVRSAAQWPWKKKNFSAYFRGSRTSPKTRIFSSFC

SEQ ID NO: 1017305 - protein, 115 aa, Homo sapiens
QLTQGASRCLSRLLAPQNRCRMASQSQGIQQLLQAEKRAAEKVSEARKRKNRRLKQAKEEAQAEIEQYRPAEGRKNSRPRKLRHWDPVAVCSTEVEKETQEKMTILQTYFRQNQG

SEQ ID NO: 1017306 - protein, 84 aa, Homo sapiens
MKREPKNLSSEQVLKPTYSQSKPNRIRLYYWGLGLNLRAAASEANRMESKKVGKRLGAGKQQMGAELTEQHMARISLPAKILGY

SEQ ID NO: 1017307 - protein, 111 aa, Homo sapiens
  misc_feature (94)..(94): Xaa can be any naturally occurring amino acid
SRSGDADATKEMNQNKITLLGGGNRKEHVAITPLHPCKEARRCLEQGRPSLLQIARSELSKGSTGRTGRKVLQGTDRTVPGLGKRNTVQTQSPXYEWQAQLKISKRAFLGF

SEQ ID NO: 1017308 - protein, 155 aa, Homo sapiens
RCGDRVHNCGIVQHHALNQLSLADCPGTLFITPEEKPTPTQELPPSSGNQSHGISVERPIPNTSITAITHDPLHLAFLPGHNVFKLHPWCSLPQSLLLVFLEPGVSLCHQAGVKCHNHGSLLPPTPGFEGSSAPASRGAGTTGVCHHAQIIFKIL

SEQ ID NO: 1017309 - protein, 151 aa, Homo sapiens
MPEETQTQDQPMEEEEVETFAFQAEIAQLMSLIINTFYSNKEIFLSRAHFKIHSDALDKIRYEELDRIPGKVRLWAKSCILNLIPNKQDRTLTIVDTGIGMTKADLINNLGTIAKSGTKAFMEALQAGADISMIGQFGVGFIILLIWLLRK

SEQ ID NO: 1017310 - protein, 122 aa, Homo sapiens
MENQIMDFRMQLVRLCYNSNHENLKPQYLEQLPAQLKQFSLFLGKFTWFAGEKLTFVDFLTYDVLDQNRIFEPKCLDEFPNLKAFMCRFEALEKIAAFLQSDRFFKMPINNKMAKWGNKCLC

SEQ ID NO: 1017311 - protein, 86 aa, Homo sapiens
VEPSRKPKRRRAADVEPSSPEPKRRRVGDVEPSRKPKRRRAADVEPSSPEPKRRRVGDVEPSRKPKRRRAADVEPSLPEPKRRRLC

SEQ ID NO: 1017312 - protein, 150 aa, Homo sapiens
  misc_feature (2)..(2): Xaa can be any naturally occurring amino acid
  misc_feature (47)..(47): Xaa can be any naturally occurring amino acid
  misc_feature (53)..(53): Xaa can be any naturally occurring amino acid
  misc_feature (71)..(71): Xaa can be any naturally occurring amino acid
  misc_feature (75)..(75): Xaa can be any naturally occurring amino acid
  misc_feature (84)..(84): Xaa can be any naturally occurring amino acid
  misc_feature (116)..(116): Xaa can be any naturally occurring amino acid
WXAPISPSLGPRYRESNTAGNDVFHKFSAFIKNPVPAQDEALYQQAXRALARXDSYLRAPLEHEVGGGCRXCASXSRRFLDGDXVTLADCSLLPKLHIVDTVCAHFRQAPIPAELXVRRYLDSAMQEKEFKYTCRTAPRIRWYRPAVHPP

SEQ ID NO: 1017313 - protein, 124 aa, Homo sapiens [sequence omitted]

SEQ ID NO: 1017314 - protein, 124 aa, Homo sapiens [sequence omitted]

SEQ ID NO: 1017315 - protein, 124 aa, Homo sapiens [sequence omitted]

SEQ ID NO: 1017316 - protein, 151 aa, Homo sapiens [sequence omitted]

SEQ ID NO: 1017317 - protein, 88 aa, Homo sapiens
  misc_feature (52)..(52): Xaa can be any naturally occurring amino acid
MSQAVEILFCGKILENHQNKLLPNNILPETESERSRIVHSLPPRSLCAESRXEDMGPVIRALLPLPVGSTARRPLSAPQAWHQPQGPV

SEQ ID NO: 1017318 - protein, 110 aa, Homo sapiens
MVLVLALPRGVGVAVWGGERRPSLMEPTVPGPGLSLCEGLPCVTHSYMSSGREDISADQSFLRIFFESSRYLETSPPHLWGAGAVLGVGADGWTAAAALLGVGSPWSTQW

SEQ ID NO: 1017319 - protein, 128 aa, Homo sapiens
MEGTGAVWELPSFPPCSAWGKRWGAWSLLFAPWWDLGGLASPVCPVVGLGCLPSMALRALVQTQAKGLGGGQAQATPPLSGAEAAYHHDRAPRRPLLPSHRPLPLDTLSSIREVSDPSEIQAMSNLRS

SEQ ID NO: 1017320 - protein, 178 aa, Homo sapiens
VILEEHGYRRTTTPTTDTHHKAEAKVTYPPNVGQEALSQTTISWAPFQDTSEYIISCHPVGTDEEPLQFRVPGTSTNATLTGLTRGATYNIIVKALEDQQRHKVREEVVTVGNSVNEGLNQPTDDSCFDPYTVSQLCQWEIEWERNVWNEALNCGASADALEVVISDVIHLDGAMTMV

SEQ ID NO: 1017321 - protein, 122 aa, Homo sapiens
NECTLVHADLSEYNMLWHAGKVWLIDVSQSVEPTHPHGLEFLFRDCRNVSQFFQKGGVTEALNERELFNAVSGLNISADNEADFLAEIEALEKMNEDHIQKNGRKAASFLKDDGSPPVLSAD

SEQ ID NO: 1017322 - protein, 176 aa, Homo sapiens
MNGLPSAEAPGGAGCALAGLPPLPRGLSGLLNASGGSWRELERVYSQRSRIHDELSRAARAPDGPRHAAGAANAGPAAGPRRPVNLDSALAALRKEMLWGLYESIQDYKHLCQDLSFCQDLSSSLHSDSSYPPDAGLSDDEEPPDASLPPDPPPLTVPQTHNARDQWLQDAFHISL

SEQ ID NO: 1017323 - protein, 166 aa, Homo sapiens
MPVTSGCRMPSTSASEGLGGRGHAPMQKAQKLPLRQALRLRSLRLPPYRLTSQEGQACIPQRRNCQTLSPVLGWLALGRASRVQPLLMALGLQFFHMCAPPAWPTLSLAVGPEASSLPLGVSGIGMSAWLPSPPHLLLLSAAAGSGASHLRALGSSALEGLQDPSQ

SEQ ID NO: 1017324 - protein, 316 aa, Homo sapiens
MNGLPSAEAPGGAGCALAGLPPLPRGLSGLLNASGGSWRELERVYSQRSRIHDELSRAARAPDGPRHAAGAANAGPAAGPRRPVNLDSALAALRKEMLSAGGAAAVGHVLVVPAVGPVRVNPGLQTPVPRPELLPACLLTRHPLLCPRRTMPVTSGCRMPSTSASEGLGGRGHAPMQKAQKLPLRQALRLRSLRLPPYRLTSQEGQACIPQRRNCQTLSPVLGWLALGRASRVQPLLMALGLQFFHMCAPPAWPTLSLAVGPEASSLPLGVSGIGMSAWLPSPPHLLLLSAAAGSGASHLRALGSSALEGLQDPSQ

SEQ ID NO: 1017325 - protein, 154 aa, Homo sapiens
MNGLPSAEAPGGAGCALAGLPPLPRGLSGLLNASGGSWRELERVYSQRSRIHDELSRAARAPDGPRHAAGAANAGPAAGPRRPVNLDSALAALRKEMLSAGGAAAVGHVLVVPAVGPVRVNPGLQTPVPRPELLPGPVILPPFGQLLPTGCGPV

SEQ ID NO: 1017326 - protein, 154 aa, Homo sapiens; identical to SEQ ID NO: 1017325

SEQ ID NO: 1017327 - protein, 191 aa, Homo sapiens
  misc_feature (119)..(119): Xaa can be any naturally occurring amino acid
MPVTSGCRMPSTSASEGLGGRGHAPMQKAQKLPLRQALRLRSLRLPPYRLTSQEGQACIPQRRNCQTLSPVLGWLALGRASRVQPLLMALGLQFFHMCAPPAWPTLSLAVGPPGKKKGXISFRSIFPSAWRLWDWDECLAPISSSPFVAIGSCWLRGIPPPGSGFLCPGRAPGPVPITTHGQEGQGPVLDI

SEQ ID NO: 1017328 - protein, 281 aa, Homo sapiens
MSQQRPARKLPSLLLDPTEETVRRRCRDPINVEGLLPSKIRINLEDNVQYVSMRKALKVKRPRFDVSLVYLTRKFMDLVRSAPGGILDLNKVATKLGVRKRRVYDITNVLDGIDLVEKKSKNHIRWIGSDLSNFGAVPQQKKLQEELSDLSAMEDALDELIKDCAQQLFELTDDKENERLAYVTYQDIHSIQAFHEQIVIAVKAPAETRLDVPAPREDSITVHIRSTNGPIDVYLCEVEQGQTSNKRSEGVGTSSSESTHPEGPEEEENPQQSEELLEVSN

SEQ ID NO: 1017329 - protein, 326 aa, Homo sapiens
MSQQRPARKLPSLLLDPTEETVRRRCRDPINVEGLLPSKIRINLEDNVQYVSMRMEEWAPERRHLYYEICTFVPEVTASGLETKCDIVEVLSNRTFLTEEALKVKRPRFDVSLVYLTRKFMDLVRSAPGGILDLNKVATKLGVRKRRVYDITNVLDGIDLVEKKSKNHIRWIGSDLSNFGAVPQQKKLQEELSDLSAMEDALDELIKDCAQQLFELTDDKENERLAYVTYQDIHSIQAFHEQIVIAVKAPAETRLDVPAPREDSITVHIRSTNGPIDVYLCEVEQGQTSNKRSEGVGTSSSESTHPEGPEEEENPQQSEELLEVSN

SEQ ID NO: 1017330 - protein, 249 aa, Homo sapiens
MNPSPSKIRINLEDNVQYVSMRKALKVKRPRFDVSLVYLTRKFMDLVRSAPGGILDLNKVATKLGVRKRRVYDITNVLDGIDLVEKKSKNHIRWIGSDLSNFGAVPQQKKLQEELSDLSAMEDALDELIKDCAQQLFELTDDKENERLAYVTYQDIHSIQAFHEQIVIAVKAPAETRLDVPAPREDSITVHIRSTNGPIDVYLCEVEQGQTSNKRSEGVGTSSSESTHPEGPEEEENPQQSEELLEVSN

SEQ ID NO: 1017331 - protein, 129 aa, Homo sapiens
MEDALDELIKDCAQQLFELTDDKENERLAYVTYQDIHSIQAFHEQIVIAVKAPAETRLDVPAPREDSITVHIRSTNGPIDVYLCEVEQGQTSNKRSEGVGTSSSESTHPEGPEEEENPQQSEELLEVSN

SEQ ID NO: 1017332 - protein, 281 aa, Homo sapiens; identical to SEQ ID NO: 1017328

SEQ ID NO: 1017333 - protein, 66 aa, Homo sapiens
  misc_feature (16)..(16): Xaa can be any naturally occurring amino acid
SLHVVPTLRTGGRRGXLSAWHLDKTRSTVPAVCWYCSHFQEPATGEVRAGCFGTGSLVALGLSSLK

SEQ ID NO: 1017334 - protein, 110 aa, Homo sapiens
MGRRALLLLLLAFLAPWATIALRPALGPSQPTLANQPHIPPGCSKNYSVLYFQQKPPLVIPGKQGLEGTSSKLQQTCSSGSRLLEGKLTNRKDIHTKTPSVRHHSFKDQR

SEQ ID NO: 1017335 - protein, 71 aa, Homo sapiens
SLRLVRGRVNRQRLNKSSVIGRYIHSSQQYKSNKLLIATFDFYFLAFVLFFFRIKKTLWLWTNYMKDLEPV

SEQ ID NO: 1017336 - protein, 402 aa, Homo sapiens
GYRDRGQARHERRAPRLPRVLSNVPAPQHERHFRHPRAAVGGGAHGGGGQVGFEARPCPSPRPSRDYISRGASAVFCGDCGAETSPGSGARDFHSCVRLRGAWRRDQRPNSGSDKMAGLPRRIIKETQRLLAEPVPGIKAEPDESNARYFHVVIAGPQDSPFEGGTILKLELIPFQEGITQWEALEVRFMTKIYHPNVDKWGRICLDILKDKWSPGLRIRHGGLLIGSRPCQVLPKSEMIQFSTNDVAERTWKSNRSPSQEKNSLEHGTRLYAMSNMEHDTITQDVIILLFCKSYSSLLPLMDTVLETLQSTPEPEIFERRHMMYNIEEQSIGGLMMPGGDQGHLRGAWGKDGVRAHCFTRASWGHRMRGRKQDPVTHNIGRDPAPRETRRTRALSPKARQY

SEQ ID NO: 1017337 - protein, 230 aa, Homo sapiens
GTAKMAASVRQARSLLGVAATLAPGSRGYRARPPPRRRPGPRWPDPEDLLTPRWQLGPRYAAKQFARYGAASGVVPGSLWPSAGAAAGAWRPEEREWYPSLATMQESLRVKQLAEEQKRREREQHIAECMAKMPQMIVNWQQQQRENWEKAQADKERRARLQAEAQELLGYQVDPRSARFQELLQDLEKEGAQAPQGGKNRNGRRRRGACCIGLQLCASRPSSLWGTQAP

SEQ ID NO: 1017338 - protein, 230 aa, Homo sapiens; identical to SEQ ID NO: 1017337

SEQ ID NO: 1017339 - protein, 216 aa, Homo sapiens
GTAKMAASVRQARSLLGVAATLAPGSRGYRARPPPRRRPGPRWPDPEDLLTPRWQLGPRYAAKQFARYGAASGVVPGSLWPSAGAAGEGAAHRRVHGQDATDDCELAAAAAGELGEGPVLTRRGGPDCRLRPRSSWATRWTQGVPCFQELLQDLEKEGAQAPQGGKNRNGRRRRGACCIGLQLCASRPSSLWGTQAPEALSFPIKLLPGSYPLKEI

SEQ ID NO: 1017340 - protein, 275 aa, Homo sapiens
ERVNDHDSLDPHYSNKFVSHFQIRCKSRDGFVPTSAQGKYASHCYDVNNQGVDGEDKKNRDNIWPELRVAQAARAAAAPASSAWRQARPPGVVVGVAGRRGRGRAAGLGGAAGWKWVELPLEAAPDLGPRPDEPVGPEPSGPTEPARSRLQGESRRGAGTGQAAAGAVSVSLSFTLRPARWRARSGGGGGRLDMGKREPPKGVMINDLIDHSGCYFLMPQDILLGTTTPAPGHSDLPLLSDPLWPDYYSQSYLATNGYQGNLGEQIQFFHYWLYT

SEQ ID NO: 1017341 - protein, 247 aa, Homo sapiens
TFPRLAGECGGKNFHFVHRSADVESVVSGTLRSAFEYGGQKCSACSRLYVPHSLWPQIKGRLLEEHSRIKVGDPAEDFGTFFSAVIDAKSFARIKKWLEHARSSPSLTILAGGKCDDSVGYFVEPCIVESKDPQEPIMKEEIFGPVLSVYVYPDDKYKETLQLVDSTTSYGLTGAVFSQDKDVVQEATKVLRNAAGNFYINDKSTGSIVGQQPFGGARASGTNDKPGGGSVWTSPSLAHSFFDAANL

SEQ ID NO: 1017342 - protein, 257 aa, Homo sapiens
TFPRLAGECGGKNFHFVHRSADVESVVSGTLRSAFEYGGQKCSACSRLYVPHSLWPQIKGRLLEEHSRIKVGDPAEDFGTFFSAVIDAKSFARIKKWLEHARSSPSLTILAGGKCDDSVGYFVEPCIVESKDPQEPIMKEEIFGPVLSVYVYPDDKYKETLQLVDSTTSYGLTGAVFSQDKDVVQEATKVLRNAAGNFYINDKSTGSIVGQQPFGGARASGTNDKPGGPHYILRWTSPQVIKETHKPLGDWSYAYMQ

SEQ ID NO: 1017343 - protein, 257 aa, Homo sapiens; identical to SEQ ID NO: 1017342

SEQ ID NO: 1017344 - protein, 257 aa, Homo sapiens; identical to SEQ ID NO: 1017342

SEQ ID NO: 1017345 - protein, 121 aa, Homo sapiens
VPRAVGIRHAMGCSCCVMPRFCLPVETSTPRASLRVWDFPAGAQPPLCHGDTGQGRHWPSLLPAPRGLALGSSAWAEDVACRILLCLGVALCGPVPHWPILFLTQPICDHDSSHRCLLLGF

SEQ ID NO: 1017346 - protein, 257 aa, Homo sapiens; identical to SEQ ID NO: 1017342

SEQ ID NO: 1017347 - protein, 257 aa, Homo sapiens; identical to SEQ ID NO: 1017342

SEQ ID NO: 1017348 - protein, 257 aa, Homo sapiens; identical to SEQ ID NO: 1017342

SEQ ID NO: 1017349 - protein, 257 aa, Homo sapiens; identical to SEQ ID NO: 1017342

SEQ ID NO: 1017350 - protein, 39 aa, Homo sapiens
ASADRPKNTPTGIRAINEDSTGTKKGPQKKPNHLSTYRI

SEQ ID NO: 1017351 - protein, 302 aa, Homo sapiens
QHQKKLNSAGDGSPVSMREEGSRLVSTDPHEDFRLAVRPPGPALPLSFSYSFKTLLLLFKNELDGREVASPTLQVTHSGEGGGGGGRKSWGWGWEHGNSFLKASGSCFPWPLLEGPWTGRSACLFGNQVCEPNACQAMHSAEEPLYLAALRGARGHLPCGSRHHVGSLAPASVPAPGACLWVCEWETLLPGLILERPLVPSAEASGAGKPQQKGGTTEQLCIVIVGFGAFGGSLVTGNCLCACVGCMLPGLSCPRPAQATPSHPKPLVELLWNHLPKAQGRIQGSKTISMELMFFFSVGTFF

SEQ ID NO: 1017352 - protein, 165 aa, Homo sapiens [sequence omitted]

SEQ ID NO: 1017353 - protein, 306 aa, Homo sapiens
  misc_feature (303)..(303): Xaa can be any naturally occurring amino acid
AHSGSAALGLRRALRVGARDVVVGAQPAAPCPSPPGPEYRPPTKEEPEVSVPAAMLPRRPLAWPAWLLRGAPGAAGSWGRPVGPLARRGCCSAPGTPEVPLTRERYPVRRLPFSTVSKQDLAAFERIVPGGVVTDPEALQAPNVDWLRTLRGCSKVLLRPRTSEEVSHILRHCHERNLAVNPQGGNTGMVGGSVPVFDEIILSTARMNRVLSFHSVSGILVCQAGCVLEELSRYVEERDFIMPLDLGAKGSCHIGGKRGNQRWRPAVSSIWLTAWDCPGPGSGAGRRHLSWDCLTSLRKGQQXVMN

SEQ ID NO: 1017354 - protein, 256 aa, Homo sapiens
AQFTEACEPVKRQPRSQCLSTLVRPVFGELKEKHKQSGGSVGALEELENAFSLAEESCPGISDKLMVHLVELSAEVFTQQKPPDIHPLKRTAVQIGDGRSFVFGSELHKNCADLEGALCYVVPAGTRRIPWASHARSPGHRLLPPLQCAVVHVRDAVLYAHCPPPSPGPAVLLTGAPAAGVALMSYAWVFCRLMQPYGPLRPRRRATIRAALPPPPMRWGEATGQPPEECPGRCPPGAHDGHRFALWCWIRYCVCS

SEQ ID NO: 1017355 - protein, 87 aa, Homo sapiens
STSIGTYVLLCDGTREFGHYGRDVKTLELNLRRHHFSAYVCSLECSTGKKHVCFSCRKIIFETYQSVLYQRNREYLQGCTGRLFISP

SEQ ID NO: 1017356 - protein, 154 aa, Homo sapiens
MRCLTTPMLLRALAQAARAGPPGGRSLHSSAVAATYKYVNMQDPEMDMKSVTDRAGRTLLVGLALFLMCLVHDTMSYLFRVNRTPSSYPVLRQGPADVPSASLWVSMLLAPVPILGKGAVALALQSSAEAILPRTHGPFIPSDGLEAKRCLTWQ

SEQ ID NO: 1017357 - protein, 155 aa, Homo sapiens
  misc_feature (73)..(73): Xaa can be any naturally occurring amino acid
  misc_feature (76)..(76): Xaa can be any naturally occurring amino acid
  misc_feature (82)..(82): Xaa can be any naturally occurring amino acid
  misc_feature (102)..(102): Xaa can be any naturally occurring amino acid
  misc_feature (104)..(104): Xaa can be any naturally occurring amino acid
  misc_feature (111)..(111): Xaa can be any naturally occurring amino acid
  misc_feature (117)..(117): Xaa can be any naturally occurring amino acid
  misc_feature (121)..(121): Xaa can be any naturally occurring amino acid
MRCLTTPMLLRALAQAARAGPPGGRSLHSSAVAATYKYVNMQDPEMDMKYVCREPTCVADFQAGYWSCRTAIXRQXAVAVRXMLADIEEVMLSGACRSYSVXSXAYTVNNXRIMGLXARIXQPLVHGHRCEQGVSEVSNAQSGDLIGTPRPSLCH

SEQ ID NO: 1017358 - protein, 130 aa, Homo sapiens
KKKGKANPSDLLELGHSSACGHQSLGFLALGLQGIHQWPPEGSKDFGLELRITPSASLGLRFLGWIKSCFQHFRVSAVQMACCGTSQPPLSDALIPPISPISYIVIYPTTFQSREQHIRWWPSSKLRLIY

SEQ ID NO: 1017359 - protein, 130 aa, Homo sapiens; identical to SEQ ID NO: 1017358

SEQ ID NO: 1017360 - protein, 257 aa, Homo sapiens
GPFQAVNALLKHLVSAADPSRYFSSSGSTRWMTSARYLEQMDVTHASIHPVLVILIESCEIFMMEAATGSVEKCKRMASVDRRRPAWSMSSRVGPSEQEQVKYTARHYARWAEPSSLGSDTTLVPGASGLPLTVAFGYEVPFLTWFRMVSCDVGPQARDCFCSSRAEGGSGCHLCLIGGSLTGRPGGWLVGLLFVGLFPHGLFELLTGSRAFELDVGLELLKEFLHGGGWPGGGGPRGRGGTGPSRGRGRRRPATGR

SEQ ID NO: 1017361 - protein, 33 aa, Homo sapiens
MVAAGPAAGGRGGGGARGPVGDGAAGDQPPEEN

SEQ ID NO: 1017362 - protein, 142 aa, Homo sapiens
EDSVSEGMTLRRPGCAPSALGESYSVGAGSCPNCVGAAPSHTPLGILGLKAGALPGLLGGGLQHTGLSLRSSGRVHYAGSLGPGTSHVPSCQKREVSLLVEILNFGFALVLSFVNRVTGAVKKEMLEMILALTLPSEADAGG

SEQ ID NO: 1017363 - protein, 380 aa, Homo sapiens
MMGSCGGAGSPYMSPAGASMSVETVDGTVLTPWTRNTTYIAVVRMSSHTQSHTHERELYKDNTDCWRGPHESMGRGRDWNVDRDSRNSSWRNGQLVKMLLYTEVTRYLDFKVVEGSFVYKGGKIYKVPSTETEALASNLMGMFEKRRFRKFLVFVANFDENDPKTFEGDRTPDYQHAMTSTEKEDLGQDVIDFNMAMTTERSTDTDDYLDQTCLETDNGIHSWYSESLDPGMGRAHIYTRLYGLELSCTRVFEGLSGNILGGHIMPSTKQERRDTQYMGQQREGLVERSNNRRGHKLTGQENRRNSVNPRTQHRNQCARQRAAQGNTRSPVNHKNPHNKNKNRHIMGNKRSPRARSEKRQHSRNIESNESTERQQCNTEN

SEQ ID NO: 1017364 - protein, 97 aa, Homo sapiens
DVGVGPGGRCSGRGSRSLMNGLGHPLGDEGTLTLSVHKIWWFKRVLAPLPTPTLSCSCFCHGTRMIPLPSARTKSSLEPPQKLSDVGAMLLVQPAEP

SEQ ID NO: 1017365 - protein, 229 aa, Homo sapiens
MDNLSSEEIQQRAHQITDESLESTRRILGLAIKSQDAGIKTITILDEQKEQLNRIEEGFDQINKDIERDKEDFNRTQQMLEAMMYTTHIKKTKNKKQTKQEDNKGDGGENSPCNVVSKQPGPVTNGQLQQPTTGGKPVVDTLNSITNDAREDEMEENLTQVGSILGNLKDMALNIGNEIDAQNPQIKRITDKADTNRDRIDIAKARAKKLHLTAKATVSSLSFITSVAL

SEQ ID NO: 1017366 - protein, 258 aa, Homo sapiens
  misc_feature (234)..(234): Xaa can be any naturally occurring amino acid
  misc_feature (253)..(253): Xaa can be any naturally occurring amino acid
MTGIPEKMKKDFRAMKDLAQQINLSPKQHHSALECLLQRIAKNEAATNELMRWGLRLQKDVHKIEGRVLPMERINLKNTSFITSQELNWVKEVTRDPSILTIPMHFWALFYPKRAMDQARELVNMLEKIAGPIGMRMSPPAWVELKDDRIETYVRTIQSTLGAEGKIQMVVCIIMGPRDDLYGAINKLCCVQSPVPSQVVNVRTIGQPTRLRSVAQKILLQINCKLGGELWGVXIPLKQLMVIGMDAYHDPSXGMRSA

SEQ ID NO: 1017367 - protein, 146 aa, Homo sapiens
MLTVLIGSKQVSEGTDNGDLPSYVSAFIEKDTLEMTYKVFYTEDLDKLIEQRTVSKMQLEELGTYNFHQKMLERIRECLKKDAWKESNAFLNQCLEQETHLFSAINSHCADCADLGLDDLGTMISQIEEIERQYLLTLNGFHKLMN

SEQ ID NO: 1017368 - protein, 100 aa, Homo sapiens
VLRRRCRRSLSAPASFDRLPPPAGGAASSTATPASSLPYVPYNSSPYISFYPYPSSPHRQDRGGGRDSEQQPEFIKPLNLYRTEQRQHCSWNALFLKKKA

SEQ ID NO: 1017369 - protein, 227 aa, Homo sapiens
  misc_feature (84)..(84): Xaa can be any naturally occurring amino acid
  misc_feature (97)..(97): Xaa can be any naturally occurring amino acid
  misc_feature (101)..(101): Xaa can be any naturally occurring amino acid
  misc_feature (109)..(110): Xaa can be any naturally occurring amino acid
  misc_feature (116)..(116): Xaa can be any naturally occurring amino acid
  misc_feature (125)..(125): Xaa can be any naturally occurring amino acid
  misc_feature (133)..(133): Xaa can be any naturally occurring amino acid
  misc_feature (137)..(137): Xaa can be any naturally occurring amino acid
  misc_feature (143)..(143): Xaa can be any naturally occurring amino acid
  misc_feature (156)..(157): Xaa can be any naturally occurring amino acid
  misc_feature (160)..(160): Xaa can be any naturally occurring amino acid
  misc_feature (163)..(163): Xaa can be any naturally occurring amino acid
  misc_feature (167)..(167): Xaa can be any naturally occurring amino acid
  misc_feature (172)..(172): Xaa can be any naturally occurring amino acid
  misc_feature (175)..(177): Xaa can be any naturally occurring amino acid
  misc_feature (179)..(180): Xaa can be any naturally occurring amino acid
  misc_feature (182)..(183): Xaa can be any naturally occurring amino acid
  misc_feature (188)..(188): Xaa can be any naturally occurring amino acid
  misc_feature (192)..(192): Xaa can be any naturally occurring amino acid
  misc_feature (199)..(199): Xaa can be any naturally occurring amino acid
  misc_feature (201)..(201): Xaa can be any naturally occurring amino acid
  misc_feature (203)..(203): Xaa can be any naturally occurring amino acid
  misc_feature (207)..(208): Xaa can be any naturally occurring amino acid
  misc_feature (211)..(211): Xaa can be any naturally occurring amino acid
  misc_feature (225)..(225): Xaa can be any naturally occurring amino acid
QGSFSRPHRFFYLYHFAFYAYHYRFNGQYSSLALVTSWLFIQHSMIYFFHHYELPAILQQIRIQEMLLQAPPLGPGSPTALPDXMNNNSGAPAKAPXSAGXHPALGPVXXGASGSXGPVAAAPSXLVAAAASXAAAXGGYLGXMAETAAIITDASXXFCXISXFLEXRPAIXLGXXXGXXHXXQDIFXPIYXLSSYTTXLXAXVGGXXKEXMVPTEAPSEVGFEXHS

SEQ ID NO: 1017370 - protein, 149 aa, Homo sapiens
  misc_feature (17)..(17): Xaa can be any naturally occurring amino acid
MLSGPRKAYRRGGTCAXKPWKGAKGRARGDLRRRTHWAFSCDVAKEHDVQNTFEEMEKHLGRVNFWVNAAGIPGMVFSKNKTLKIWYLIFILTSVGSMLTCKAAMRTMIQQQGGSMVNVGSIVGLKGNSGQSVIQVPVKEDSGISTCSG

SEQ ID NO: 1017371 - protein, 68 aa, Homo sapiens
  misc_feature (21)..(21): Xaa can be any naturally occurring amino acid
HSRGRPAPALTVVDRGRRWDXPSPLLGAHLARPSSLRFAPSPRTRTRVYIAPHFIPVPGEQRWVYVFI

SEQ ID NO: 1017372 - protein, 123 aa, Homo sapiens
  misc_feature (4)..(4): Xaa can be any naturally occurring amino acid
LFFXLYMCLSFSSYHFSRSFPPLRGVGSYCLVRDPLVCLRTRASPRVLPARGDTFSPGPLSLPFLGTVGTVHPKPVFPSGFPVFLNHRPQRSFQAPVFLSSPTTLPLPSPPSHIRAALSWLAR

SEQ ID NO: 1017373 - protein, 157 aa, Homo sapiens
  misc_feature (134)..(134): Xaa can be any naturally occurring amino acid
RVTVFTGFACIQNAHHFEVHLADFHGTLKKRVHIGRPGPQPRHDFMVLGINIVVVLTENMRVFHIGRRTFQAIQAQQTQAENVFANRRFIFVRGKFCCLTLQLAEIVAHQLQVSHRVIDARVGIYSQALRFQRXAQGNRFTSVATNTRRIEVNVGQG

SEQ ID NO: 1017374 - protein, 197 aa, Homo sapiens
  misc_feature (131)..(131): Xaa can be any naturally occurring amino acid
ALSTPAQETNQPNSHHHHQMRRTPSNTPATPPNGPDTLAMHAKHRASEGLHLSNSPMTAAACAPPANSSSLLGLAPAQPPGALEPALRPHHRPPPPPPTAHVAPRSTAGGRPAESHGAIDRPEIRLNPPGXWLELGATPGLWEHRRARKGEPGEGRGFPEDRTERFYKRIFVGRGDSKLPGPRGSFRSFSGKFFLCF

SEQ ID NO: 1017375 - protein, 132 aa, Homo sapiens
  misc_feature (1)..(1): Xaa can be any naturally occurring amino acid
  misc_feature (6)..(6): Xaa can be any naturally occurring amino acid
  misc_feature (10)..(10): Xaa can be any naturally occurring amino acid
  misc_feature (57)..(58): Xaa can be any naturally occurring amino acid
  misc_feature (61)..(61): Xaa can be any naturally occurring amino acid
  misc_feature (63)..(63): Xaa can be any naturally occurring amino acid
  misc_feature (70)..(70): Xaa can be any naturally occurring amino acid
  misc_feature (81)..(81): Xaa can be any naturally occurring amino acid
  misc_feature (96)..(96): Xaa can be any naturally occurring amino acid
XCRARXVGPXPEKIQSPKEIVPFVCWSGPRSQTTSSSHSLTAFSPGPGHPKSTLTTXXGAXGXKEGFTFXYRYPGGPGPPXKPAPPSTHPLPPHAXPPAQVEPCPRKDWKGSAHKPLGHSTLSTRKSGKRGR

SEQ ID NO: 1017376 - protein, 117 aa, Homo sapiens
  misc_feature (42)..(42): Xaa can be any naturally occurring amino acid
DTCRQGRGESQVETMRSRLALAYTRADGVNVCHRSTVGRGRXNKWCPGMRPVERGSSGLSLSAKGTKRRPGNLDGACASAKPHVEMPARGPQRFLQQSPHPQPSTTQLALTQPPLRR

SEQ ID NO: 1017377 - protein, 53 aa, Homo sapiens
MRRFLRPGHDPVRERLKRDLFQFNKTVEHGFPHQPSALGYSPSLRILAIGTRS

SEQ ID NO: 1017378 - protein, 53 aa, Homo sapiens; identical to SEQ ID NO: 1017377

SEQ ID NO: 1017379 - protein, 81 aa, Homo sapiens
AFPTPIIRPQVVTAFSPEVSSGGCRLSKMRRFLRPGHDPVRERLKRDLFQFNKTVEHGFPHQPSALGYSPSLRILAIGTRS

SEQ ID NO: 1017380 - protein, 235 aa, Homo sapiens
  misc_feature (187)..(187): Xaa can be any naturally occurring amino acid
  misc_feature (202)..(202): Xaa can be any naturally occurring amino acid
MNNRINRNTWNDNARSSPVVIDASTAIDAPSNLRFLATTPNSLLVSWQPPPAKSTGYIIKYEKPGSPAREVVPGPGADVTEATITGLEPGTEYTIYVIALKNNQKSEPLIGRKKTDELPQLVTLPHPNLHGPEILDVSFHSSKDPFPHPTPGYDTGKWYSSFWHFWSATQCWGNKMILLREHGFLGXDHTGPQTGHPHKGIXPKTIPRPNVGEEIQIGHIPREDVDYHLVPTRSG

SEQ ID NO: 1017381 - protein, 245 aa, Homo sapiens
MNNRINRNTWNDNARSSPVVIDASTAIDAPSNLRFLATTPNSLLVSWQPPPAKSTGYIIKYEKPGSPAREVVPGPGADVTEATITGLEPGTEYTIYVIALKNNQKSEPLIGRKKTDELPQLVTLPHPNLHGPEILDVSFHSSSWHFWSVTQCWATVIFEEHGFRRTTPPTPLTPEGIGQAIPPNVGQEGLFQNEHMMAPFQDTCEYTNLCSAVATDEEPFQLGVLDFYKGTVTGLTEVPPQQHNG

SEQ ID NO: 1017382 - protein, 118 aa, Homo sapiens
  misc_feature (116)..(116): Xaa can be any naturally occurring amino acid
MLGIQTTGQSRYFNSILQIRVRFREMIELVRTEPGLKLELTTSTSSLHSVTHERDFPARPGAFYFKGQRDLFFLSCLSMAHSFILGFRVASLGWQSSGHWGRVTPGGVHISHHFKXGE

SEQ ID NO: 1017383 - protein, 61 aa, Homo sapiens
MRNQLELAARGPLRQTFTHNPLLQPGKDNPPNISPSLQENGGVQWEPALCLLCAVHLLCAV

SEQ ID NO: 1017384 - protein, 239 aa, Homo sapiens
HEGGSVRWGPAHPNTRVQLDSGVPHLLPILRVLLPHGEPQPWQVHLESRKQATGLTHETVWRPSSRCRCGPQEPTGVSAAEPPPCCVGGEQAGSLSVFFYTACACTSPNNLSWFSAKKSSDSPGVLGHHVELDPRLSWARTDHSGGGSGRRCLSAHGLCVSAVGGLAMPGPSLSVHWGRSMEAEAAVRRPSIGASLLPSSLWQENRDGLVMNYHSQTRVHLEHQDGTMFENRVFPNVIK

SEQ ID NO: 1017385 - protein, 110 aa, Homo sapiens
PQLQSNETKAVPELSKTDSKPGGHESSGIPPTGRSFSGLNSRLKATPSTYSGVFRTQRVDLDQQAYLPDALGWRHKPWKRTVPPPREGPSRREEEPGSRGDKEAEKPPPR

SEQ ID NO: 1017386 - protein, 271 aa, Homo sapiens
  misc_feature (1)..(1): Xaa can be any naturally occurring amino acid
  misc_feature (36)..(37): Xaa can be any naturally occurring amino acid
  misc_feature (51)..(51): Xaa can be any naturally occurring amino acid
  misc_feature (59)..(59): Xaa can be any naturally occurring amino acid
  misc_feature (61)..(62): Xaa can be any naturally occurring amino acid
  misc_feature (64)..(65): Xaa can be any naturally occurring amino acid
  misc_feature (67)..(67): Xaa can be any naturally occurring amino acid
  misc_feature (69)..(69): Xaa can be any naturally occurring amino acid
  misc_feature (71)..(71): Xaa can be any naturally occurring amino acid
  misc_feature (73)..(73): Xaa can be any naturally occurring amino acid
  misc_feature (77)..(79): Xaa can be any naturally occurring amino acid
  misc_feature (81)..(81): Xaa can be any naturally occurring amino acid
  misc_feature (85)..(85): Xaa can be any naturally occurring amino acid
XCHISCYTEVPIISTSSRSVMLHYRSDLLQMLDTLXXLAPCIWVLQSRSSXWEWKSHTXLXXNXXCXTXGXIXDIHXXXIXLYGXYLRIHAQLHWAQIPAIQLPQMTSRFYKCCPAISPSHRLLLLFHYLQWVWGGIWPRHRFSLQVNIRKRDNSRKEVQRRIFAHQPGPEGQEESTPQSDVTEDGESPEDPSGTEGQLSEEEKPDQQPLSGEEELEPEASDGSGSWEDAALLTEANLPAPAPASASAPVLETLGSSEPAWGCSPTAPHLL

SEQ ID NO: 1017387 - protein, 147 aa, Homo sapiens
  misc_feature (1)..(1): Xaa can be any naturally occurring amino acid
  misc_feature (36)..(37): Xaa can be any naturally occurring amino acid
  misc_feature (51)..(51): Xaa can be any naturally occurring amino acid
  misc_feature (59)..(59): Xaa can be any naturally occurring amino acid
  misc_feature (61)..(62): Xaa can be any naturally occurring amino acid
  misc_feature (64)..(65): Xaa can be any naturally occurring amino acid
  misc_feature (67)..(67): Xaa can be any naturally occurring amino acid
  misc_feature (69)..(69): Xaa can be any naturally occurring amino acid
  misc_feature (71)..(71): Xaa can be any naturally occurring amino acid
  misc_feature (73)..(73): Xaa can be any naturally occurring amino acid
  misc_feature (77)..(79): Xaa can be any naturally occurring amino acid
  misc_feature (81)..(81): Xaa can be any naturally occurring amino acid
  misc_feature (85)..(85): Xaa can be any naturally occurring amino acid
XCHISCYTEVPIISTSSRSVMLHYRSDLLQMLDTLXXLAPCIWVLQSRSSXWEWKSHTXLXXNXXCXTXGXIXDIHXXXIXLYGXYLRIHAQLHWAQIPAIQLPQMTSRFYKCCPAISPSHRLLLLFQLPAVGVGGHLAQTPLLFAG

SEQ ID NO: 1017388 - protein, 163 aa, Homo sapiens
ERSRLGLGVSVHQRSGPKCIAVFTRVSEPRIQISTLPGSYPHPIPAKTLNAVSGQSNYGGSQGSGQTLNRPPVASNPVTPSLHSGPAPRMPLPASQNPATTPMPSSSFLPEANLPPPLNWQYNYPSTASQTNHCPRASSQPTVSGNTSLTTNHQYVSSGYPSL

SEQ ID NO: 1017389 - protein, 103 aa, Homo sapiens
RVPWNLGSRWLSGLCSGFHAEVRRVPWNLGSRWLSGSSGCVARGQKTPGAFQSLFQEWDMDRKRVITTSLNFLDCSRKRGIQKPGTARRWPVRQIGLAWMSKL

SEQ ID NO: 1017390 - protein, 125 aa, Homo sapiens
  misc_feature (85)..(85): Xaa can be any naturally occurring amino acid
LRANPLAQQARAALRKLVIDVVPPKFLGDLLLLLQLPVRSFSKEEQAPLRLVKPPRARRLACSKRVCSNPGAAVPPARSPEGKGXVPRARGQRSPAPTGAGPRPQPAAGRTAECFSPLIKIIRLL

SEQ ID NO: 1017391 - protein, 112 aa, Homo sapiens
MAVLWRLSAVCGALGGRALLLRTPVVRPAHISAFLQDRPIPEWCGVQHIHLSPSHHSGSKAASLHWTSERVVSVLLLGLLPAAYLNPCSAMDYSLAAALTLHGHWGPWTSCY

SEQ ID NO: 1017392 - protein, 118 aa, Homo sapiens
  misc_feature (4)..(4): Xaa can be any naturally occurring amino acid
  misc_feature (13)..(13): Xaa can be any naturally occurring amino acid
CTLXSDGRYDLTXASTELALHVLPQGCSLKTECCHVSHKTKCAIHLVDDWCPTGFQVGFNFQPSNSSSPGKVLSNTTTITGAWAFITSLPSKHLQNQNESEGMEKGMFYEGFNGLAAL

SEQ ID NO: 1017393 - protein, 317 aa, Homo sapiens
MSTDEAGGRTEPKSELEPEERVFKKEVYLHTSPHLKADVLCQSDPTAEMAAESLAFLLWDTVQLVKLEAWYEDLQEVLSSDENGGNYVSPPGNGTMEESKNLQAILTLHSHGLADMRRRQKQQRSQDDRPRSPHSPDSSQSSLAQEDSRRTDKGEPGNGNSSGRYPSRAGKAAHERRKNKENDRASGTNKLQQTDRIHAGKSQRREHGTERRTRRTLHRPDMVTTGANASTNREAKSPPNQRPHIPHTLPQNEGYWNTALHKWTMLVTLKSTIRREKRMQKTQKGQRHKCVSRKAPSLHTEHQQTQQERDHKKIDNH

SEQ ID NO: 1017394 - protein, 84 aa, Homo sapiens
  misc_feature (48)..(48): Xaa can be any naturally occurring amino acid
  misc_feature (54)..(54): Xaa can be any naturally occurring amino acid
  misc_feature (64)..(64): Xaa can be any naturally occurring amino acid
  misc_feature (81)..(81): Xaa can be any naturally occurring amino acid
MTLHSPAGFLDECIAKRILIAIAPIKEASRAVGYVMCSLLYPLVTFFXLCLCIXYWGSTAVLPXHFPTKRSIRSFDDSPCXFNC

SEQ ID NO: 1017395 - protein, 72 aa, Homo sapiens
ELPPAHAMESIRLDLDILGGKCLEPGRWLGEEPQEESPGFSAVENVTRCCTPNSKGGTWHVVSNSLCICCMI

SEQ ID NO: 1017396 - protein, 85 aa, Homo sapiens
  misc_feature (38)..(39): Xaa can be any naturally occurring amino acid
  misc_feature (81)..(82): Xaa can be any naturally occurring amino acid
TLSRELEPELRRRRYEYDHWDAAIHGSLYILRGSARYXXSHEILRDEESFFGERRIPRGRRISVICRSLPEGMGPGESGQXXPAC

SEQ ID NO: 1017397 - protein, 41 aa, Homo sapiens
  misc_feature (38)..(38): Xaa can be any naturally occurring amino acid
MARAPEHREAIRTSLLATMRPPSSLPAAKTKGGLGSPXGRR

SEQ ID NO: 1017398 - protein, 146 aa, Homo sapiens; identical to SEQ ID NO: 830300

SEQ ID NO: 1017399 - protein, 146 aa, Homo sapiens; identical to SEQ ID NO: 830300

SEQ ID NO: 1017400 - protein, 146 aa, Homo sapiens; identical to SEQ ID NO: 830300

SEQ ID NO: 1017401 - protein, 146 aa, Homo sapiens; identical to SEQ ID NO: 830300

SEQ ID NO: 1017402 - protein, 183 aa, Homo sapiens
TFPQGRTLVTNQPSGNVEFISVQSPPTVSGLTKNPVSLPSLPNPTKPNNVPSVPSPSIQRNPTASAAPLGTTLAVQAVPTAHSIVQATRTSLPTVGPSGLYSPSTNRGPIQMKIPISAFSTSSAAEQNSNTTPRIENQTNKTIDASVSKKAADSTSQHPPKPAVSPGKTVNDVNSNNNMSYRN

SEQ ID NO: 1017403 - protein, 256 aa, Homo sapiens
TFPQGRTLVTNQPSGNVEFISVQSPPTVSGLTKNPVSLPSLPNPTKPNNVPSVPSPSIQRNPTASAAPLGTTLAVQAVPTAHSIVQATRTSLPTVGPSGLYSPSTNRGPIQMKIPISAFSTSSAAEQNSNTTPRIENQTNKTIDASVSKKAADSTSQCGKATGSDSSGVIDLTMDDEESGASQDPKKLNHTPVSTMSSSQPVSRRIATHTTSTALQPSGCHKGTILDTYIYYLQLHYREFKNRPVLRDPRFLYQGS

SEQ ID NO: 1017404 - protein, 72 aa, Homo sapiens
  misc_feature (5)..(5): Xaa can be any naturally occurring amino acid
  misc_feature (15)..(15): Xaa can be any naturally occurring amino acid
MGVGXPPRKRKMVFXGIPEFPVGRRVEVSTFLEKGWVPDKLPQPHVNGTVMPAVPPYKWVKMFQFYIHPYPQ

SEQ ID NO: 1017405 - protein, 120 aa, Homo sapiens
DPRAPDTGASPWLNQLTEEQIAEFKEAFSLFDKDGDGTITTKELGTVMRSLGQNPTEAELQDMINEVDADGNGTIDFPEFLPMMARKMKDTDSEEEIREAFRVFDKDGNGYIQRSQSCVT

SEQ ID NO: 1017406 - protein, 120 aa, Homo sapiens; identical to SEQ ID NO: 1017405

SEQ ID NO: 1017407 - protein, 109 aa, Homo sapiens
LDGDFDLAEEAVHEAFFIAIERWQAMVPANPRAWLVSTGRFKAIDVLRRRGFCRIPGAVDRPGRSVGADRWNDEDVEDDRLRLIFTCCHPALSADAQVPLTLREVCELV

SEQ ID NO: 1017408 - protein, 69 aa, Homo sapiens
MCQLMHRTEEEKNGGNERRLEVGRNVSGSLTSGRPPSVFTPIGLDLTGHLFLTERLLKRLQQTRPSEIP

SEQ ID NO: 1017409 - protein, 148 aa, Homo sapiens
EEHYHLVNKCCQGKECSNTSDALDPPLKNVSSNAECPACYESNGTSCCGKPWKCYEEEQCVFLVAELKNDIESKSLVLKGCSNVSNATCQFLSGENKTLGGVIFRKFECANVNSLTPTSAPTTSHNVGSKASLYLLALASLLLRGLLP

SEQ ID NO: 1017410 - protein, 166 aa, Homo sapiens
EEHYHLVNKCCQGKECSYTSDALDPPLKNVSSNAECPACYESNGTSCCGKPWKCYEEEQCVFLVAELKNDIESKSLVLKGCSNVSNATCQFLSGENKTLGGVIFRKFECANVNSLTPTSAPTTSHNVGSKASLYLLALASLLLRGLAAPRTSRARKSPEERRPGKR

SEQ ID NO: 1017411 - protein, 139 aa, Homo sapiens
EEHYHLVNKCCQGKECSYTSDALDPPLKNVSSNAECPACYESNGTSCCGKPWKCYEEEQCVFLVAELKNGNQVMVQIELETHLDKYPLGVHFLPKKLDEAVAEVHLHRLNVKLTKLTEKQAQYLGMSCDGPFKLDDYHY

SEQ ID NO: 1017412 - protein, 155 aa, Homo sapiens
EEVAALELLPGTSDPGSKHVVLHRLFLQPLSRPFSPCPRAGTVPEAPPLEPEDSGTFSLGKMITAKPGKTPIQVLHEYGMKTKNIPVYECEQHLTVQIHVPTFTVQQVTVGDITCTGDTVQRYRSLADNIELHEAAINILAKPMHSYMLRSFLTP

SEQ ID NO: 1017413 - protein, 120 aa, Homo sapiens
YYYYIRGRVDSAHTVGLGVQKNSGNSDFPYLDSGLNSGAELQGPGSGADSPALTNMQLNKFQHAGERSWLAQYKYDFAQLGVNGLVFATTYVHGDQIRTPADPNAKEWERDISLASTRPR

SEQ ID NO: 1017414 - protein, 111 aa, Homo sapiens
EHPRDLKFSIDYILSSPDPFPGLKPPCLHKRADTRGWRTWDSTFGQCDVEPPWRPLQFSLGSSPDPPWKDDSSPTLSQEARVRQILQFLLQTEGQVPHQAWTGGTGGGGAP

SEQ ID NO: 1017415 - protein, 619 aa, Homo sapiens
MPWQAFRRFGQKLVRRRTLESGMAETRLARCLSTLDLVALGVGSTLGAGVYVLAGEVAKDKAGPSIVICFLVAALSSVLAGLCYAEFGARVPRSGSAYLYSYVTVGELWAFTTGWNLILSYVIGTASVARAWSSAFDNLIGNHISKTLQGSIALHVPHVLAEYPDFFALGLVLLLTGLLALGASESALVTKVFTGVNLLVLGFVMISGFVKGDVHNWKLTEEDYELAMAELNDTYSLGPLGSGGFVPFGFEGILRGAATCFYAFVGFDCIATTGEEAQNPQRSIPMGIVISLSVCFLAYFAVSSALTLMMPYYQLQPESPLPEAFLYIGWAPARYVVAVGSLCALSTSLLGSMFPMPRVIYAMAEDGLLFRVLARIHTGTRTPIIATVVSGIIAAFMAFLFKLTDLVDLMSIGTLLAYSLVSICVLILRYQPDQETKTGEEVELQEEAITTESEKLTLWGLFFPLNSIPTPLSGQIVYVCSSLLAVLLTALCLVLAQWSVPLLSGDLLWTAVVVLLLLLIIGIIVVIWRQPQSSTPLHFKVPALPLLPLMSIFVNIYLMMQMTAGTWARFGVWMLIGFAIYFGYGIQHSLEEIKSNQPSRKSRAKTVDLDPGTLYVHSV

SEQ ID NO: 1017416 - protein, 619 aa, Homo sapiens; identical to SEQ ID NO: 1017415

SEQ ID NO: 1017417 - protein, 238 aa, Homo sapiens
MPWQAFRRFGQKLVRRRTLESGMAETRLARCLSTLDLVALGVGSTLGAGVYVLAGEVAKDKAGPSIVICFLVAALSSVLAGLCYAEFGARVPRSGSAYLYSYVTVGELWAFTTGWNLILSYVIGTASVARAWSSAFDNLIGNHISKTLQGSIALHVPHVLAEYPDFFALGLVLLLTGLLALGASESALVTKVFTGVNLLVLGFVMISGFVGDVPWSSGGSIARDSSRFVALTGALLGK

SEQ ID NO: 1017418 - protein, 132 aa, Homo sapiens
MTVRISSQSGGINSPELTIGLIGKQPKPNNVNALLITIFTGSLFYTSYKPQEYFESPFTISDGIYGSTFPVAHRLPRTSRPSLAQTFLTHLAFIRQLIFHFSIQSITLASKPSPDTGIPSMWLDYFCMSPSS

SEQ ID NO: 1017419 - protein, 102 aa, Homo sapiens
MYGQHPVSLALAFLACIVFLVVYKAFTYDHSCPEGFVYKHKRCIPASLDAYYSSQDPNSRSRFYTVISHYSVAKQSTARAIGPWLSAAAVIHEPKPPKTQGH

SEQ ID NO: 1017420 - protein, 102 aa, Homo sapiens; identical to SEQ ID NO: 1017419

SEQ ID NO: 1017421 - protein, 114 aa, Homo sapiens
  misc_feature (106)..(106): Xaa can be any naturally occurring amino acid
LHAAFALEPGKEYLIMGLDGATYDLEGHPQYLLDSNSWIEEMPSESLCPEHRQRAACAQLNDFLQEYGTSGVQGVRACPPTSAGRNLEPGEPWKLEELAVSAFHGXQPGDQGMI

SEQ ID NO: 1017422 - protein, 107 aa, Homo sapiens
FEMWTVVNPMGLLVEELKKRNISAPESRLTRQSGSTTAHAIYILLAYTCDRKHDCRGTWGKLYSLPEEEAAPVALRKLYGFTENRRPWDYSKPKESPKRAEQTSVAS

SEQ ID NO: 1017423 - protein, 81 aa, Homo sapiens
GENKKNRAVIRESRKGVTDPKELKFCVQDLSDQLLEVVGLEGVIEYDVDLYLPDDCRQKVSSSYVFFHSSGTIHAVSSHAY

SEQ ID NO: 1017424 - protein, 100 aa, Homo sapiens
GENKKNRAVIRESRKGVTDPKELKSCVQDLSDQLLEVVGLEQPLCMDFKMVIFSSVTRTPLCMDFKMATFSSVTKMPLCMDFKMVIFSSVTKMPLCSDTP

SEQ ID NO: 1017425 - protein, 72 aa, Homo sapiens
QAFGSRTYPSGHPASQALRLRLHYCTSDPAAPAHRQQIPGPPSLHTCMSQFPHKSHLTQLDGAYWFCFSGKP

SEQ ID NO: 1017426 - protein, 176 aa, Homo sapiens
MSEHSLKAGADITPREGDELARLPYLRTWFRTRSAIILHLSNGSVQIHFFPDPPQLILGPLMATLTYIDENREFRTFRLVLLEEYGCCKELASRLRYARTMVDHSCLSSRSASNRLKASIIAALPIRSWCPPHSHPAFWGPHNWLAPAVPLSARVPTTPRWLGTEAASSLQVGVAV

SEQ ID NO: 1017427 - protein, 119 aa, Homo sapiens
MSEHSLKAGADITPREGDELARLPYLRTWFRTRSAIILHLSNGSVQIHFFPDPPQLILGPLMATLTYIDENREFRTFRLSSPGGVRLLQGAGQPGPLRPHYGGPQLLSSRSASNRLKAS

SEQ ID NO: 1017428 - protein, 98 aa, Homo sapiens
PTRPRNHRHIGGAFLKRFPASSIGMEAKLRIDDCFVEVKSCTESQEQGQGRDAPRMILCQFLLESSDVISAVLSILDTVIVAPTGLAVFYKEPRKGRA

SEQ ID NO: 1017429 - protein, 70 aa, Homo sapiens
PPRTRNNKARKTESEPRGLLATGRGGSSMETGERARLILILVLQLLLRIRRNRQQRCRRVLSHRSLFPRM

SEQ ID NO: 1017430 - protein, 128 aa, Homo sapiens
  misc_feature (39)..(39): Xaa can be any naturally occurring amino acid
  misc_feature (84)..(84): Xaa can be any naturally occurring amino acid
  misc_feature (96)..(96): Xaa can be any naturally occurring amino acid
  misc_feature (99)..(99): Xaa can be any naturally occurring amino acid
FLNEVAKKEKQLRKMLEGPFSTPVPFLQSVPLYPCGAFXSEVEKRKLNSQTRGNFIETSSGPVGGQYGEAGTASGEGQSGQPLXLQLHAALGGPAXGAXPSALKPRVPPNLQYPNGSAPKQAHAPPSM

SEQ ID NO: 1017431 - protein, 276 aa, Homo sapiens
MCGIWALFGSDDCLFCSVSECYEDAHRGPDAFRFENVNGYTNCCLWISPVGGSGPAVGNAANSSEEISGICGSDTMVKSTTISKMQQHFEFEYQSKVDGEIILHLYDKGGMSKQFVMLDGVFALFYWILPIKETCSLGRRYIMESDPFVKAMTRKMDLWCMCQKAKGLVNVGKDSGIPFYNGGAYFFPWTLCSLDFKARWARLHPSEMVNIITGGMKPLSLYEMWETPSGFELNWGNTQDLFIRCTNVARTTLGLTGGTQGGPCTLQPTTPKMGNP

SEQ ID NO: 1017432 - protein, 385 aa, Homo sapiens
MGRWCQTVARGQRPRTSAPSRAGALLLLLLLLRSAGCWGAGEAPGALSTADPADQSVQCVPKATCPSSRPRLLWQTPTTQTLPSTTMETQFPVSEGKVDPYRSCGFSYEQDPTLRDPEAVARRWPWMVSVRANGTHICAGTIIASQWVLTVAHCLIWRDVIYSVRVGSPWIDQMTQTASDVPVLQVIMHSRYRAQRFWSWVGQANDIGLLKLKQELKYSNYVRPICLPGTDYVLKDHSRCTVTGWGLSKADGMWPQFRTIQEKEVIILNNKECDNFYHNFTKIPTLVQIIKSQMMCAEDTHREKFCYELTGEPLVCSMEGTWYLVGLVSWGAGCQKSEAPPIYLQVSSYQHWIWDCLNGQALALPAPSRTLLLALPLPLSLLAAL

SEQ ID NO: 1017433 - protein, 103 aa, Homo sapiens
  misc_feature (17)..(17): Xaa can be any naturally occurring amino acid
WTSHSLSHRYHEGFRGXLAVILIATALCAPASASPYSWDTTPLLTLSYIARPLPRAHIKEYFYTSGKCSNPAVRLCHPKEPPSVAANPEKKWVWEYINSLEMR

SEQ ID NO: 1017434 - protein, 92 aa, Homo sapiens
RSASVSRYFVLVLMYRIILQFHVFILDTTPLLDFVLHMPAHLPRAHIKEYFYTSGKCSNPAVRLCHPKEPPSVAANPEKKWVWEYINSLEMR

SEQ ID NO: 1017435 - protein, 180 aa, Homo sapiens
MRAWIFFLLCLAGRALAAPQQEALPDETEVVEETVAEVTEVSVGANPVQVEVGEFDDGAEETEEEVVAENPCQNHHCKHGKVCELDENNTPMCVCQDPTSCPAPIGEFEKVCSNDNKTYRLFLPLTLPQSAPCEGTKKGHKLHLDYIGPCKYIPPCLDSELTEFPLRMRDWLKERPGHPV

SEQ ID NO: 1017436 - protein, 247 aa, Homo sapiens
  misc_feature (39)..(39): Xaa can be any naturally occurring amino acid
  misc_feature (43)..(44): Xaa can be any naturally occurring amino acid
  misc_feature (54)..(54): Xaa can be any naturally occurring amino acid
  misc_feature (56)..(56): Xaa can be any naturally occurring amino acid
AGIFRHHLLFGFLCTIIKFSYFHLDRISSTRYLITSATXSSNXXCLIRQGLLLXGXSLPAWIFFLLCLAGRALAAPQQEALPDETEVVEETVAEVTEVSVGANPVQVEVGEFDDGAEETEEEVVAENPCQNHHCKHGKVCELDENNTPMCVCQDPTSCPAPIGEFEKVCSNDNKTYRLFLPLTLPQSAPCEGTKKGHKLHLDYIGPCKYIPPCLDSELTEFPLRMRGLAQGTSWSPCMRGMRTTTSD

SEQ ID NO: 1017437 - protein, 132 aa, Homo sapiens
MVQRKPKRRWWRKIPARTTTANTARCASWMRTTPPCACARTPPAAQPPLASYEKVCSNDNKTYRLFLPLTLPQSAPCEGTKKGHKLHLDYIGPCKYIPPCLDSELTEFPLRMRDWLKERPGHLYERDEDNNF

SEQ ID NO: 1017438 - protein, 99 aa, Homo sapiens
  misc_feature (78)..(78): Xaa can be any naturally occurring amino acid
MRAWIFFLLCLAGRALAAPQQEALPDETEVVEETVAEVTEVSVGANPVQVEVGEFDDGAEETEEEVVAENPCQNHHCXLPLIPMEHCTTRFFETCDLGN

SEQ ID NO: 1017439 - protein, 132 aa, Homo sapiens
  misc_feature (18)..(18): Xaa can be any naturally occurring amino acid
GGGGAGCCSGSPAAARRXPLEEDEEGDDEFDDEAPESLSYSPAPRQSREEERRVRETVRRDKTLHEGEEEATHGVVTIEQKRRKLLPDTILEKLTYELHKTNIKKSPGKVKEVNLQKKNEDCEKGNDSKKVK

SEQ ID NO: 1017440 - protein, 638 aa, Homo sapiens
GFKRRRLLRSVGKAPWAAGTSSSGPQAQQHRGGGPRRSLHGGGPACRIPRGEPLPRDVGEERRGGGGTELGPPAPPRPRNGYQSPPGTWWVWRGAKRRNSCSCSGEAGEASNIRTFKRRRRVNSDCDSVLPSNFLLGGNIFDPLNLNSLLDEEVSRTLNAETPKSSPLPAKGRDPVEILIPKDITDPLSLNTCTDEGHVVLASPLKTGRKRHRHRGQHHQQQQAAGGSESHPVPPTAPLTPLLHGEGASQQPRHRGQNRDAPQPYELNTAINCRDEVVLPFHLLCRVPQAPYQPLQLPQLSLHPHLPPPDIANVAGLPASRRQGLGVEARVPRKRAEGVGEAATTTTTHCLQQASKSNSSKFQYGNYCKYYGYRNPSCEDGRLRVLKPEWFRGRDVLDLGCNVGHLTLSIACKWGPSRMVGLDIDSRLIHSARQNIRHYLSEELRLPPQTLEGDPGAEGEEGTTTVRKRSCFPASLTASRGPIAAPQVPLDGADTSVFPNNVVFVTGNYVLDRDDLVEAQTPEYDVVLCLSLTKWVHLNWGDEGLKRMFRRIYRHLRPGGILVLEPQPWSSYGKRKTLTETIYKNYYRIQLKPEQFSSYLTSPDVGFSSYELVATPHNTSKGFQRPVYLFHKARSPSH

SEQ ID NO: 1017441 - protein, 142 aa, Homo sapiens
KGWVWGHRPQGSAFLPCSLGCCCLGEHSFGETAWQAEAEKPGRIEEKRAWAPGPEDAGAQVGDPNEVECKYSQIGLEHNGGGGTTAGLAPHIPGDWRSDFGAMGSRHYAFIFSVSLAFERRRPGALFMDPVDPRSDVQALSS

SEQ ID NO: 1017442 - protein, 74 aa, Homo sapiens
SRGPLYAQPSDANPTPTTLVPPVAFQMLTLRMAFQVEKEKEAVVVEAATGKKGKSRRPRLIPGIVGLSCPVLER

SEQ ID NO: 1017443 - protein, 103 aa, Homo sapiens
MAEGGFDPCECVCSHEHAMRRLINLLRQSQSYCTDTECLQELPGPSGDNGISVTMILGSLDGLLAWICVLNEDSYILKRIQPNLKANQSSKVGHDPTSSSLLD

SEQ ID NO: 1017444 - protein, 103 aa, Homo sapiens; identical to SEQ ID NO: 1017443

SEQ ID NO: 1017445 - protein, 93 aa, Homo sapiens
DDSEREKRGQREHYVWEVPEAASAEEQKALEDKVTSPEKAEEAKLKARYPHLGQKPGGSDFLRKRLQKGQKYFDSGDYRMAKQMKNSNSTAVG

SEQ ID NO: 1017446 - protein, 291 aa, Homo sapiens
LLDVDMDGSSGTYWPVNSDQAVLSLIWAGSDLRLQGTEDDTLVQPPPPDSPSIKDEARRMIRSAQQVVAVVMDMFTDVDLLSEVLEARPRVPVYILLDEMNAQHFLDMADKCRVNLHHVDFLRVRTVAGPTYYCRTGKSFKGHVKEKFLLVDCAVVMSGSYSFMWSFEKIHRSLAHVFQGELVSSFDEEFRILFAQSEPLVPSAAALARMDAYALAPYAGAGPLVGVPGVGAPTPFSFPKRAHLLFPPPREEGLGFPSFLDPDRHFLSAFRREEPPRMPGGALEPHAGLRP

SEQ ID NO: 1017447 - protein, 124 aa, Homo sapiens
PVVCPEQGTQWCCSSPLATFRATPAPGQWEAQVSGKCGCGNGQVRGWGNYGAAHADPLRLGPVSNTPAEVAHGGPRPGSALEGSGIGEGSWAESPTSSQKTEEASQGPREASTVREGFQRGGMA

SEQ ID NO: 1017448 - protein, 120 aa, Homo sapiens
MKIFLPVLLAALLGVEREEQSVLPEADHLRTEQDNYCVTVSASAGIGNLVTFGHSLSKTCSPACPIPEGVNVGVASMGISCCQSFLCNFSAADGGLRASVTLLGAGLLLSLLPALLRFGP

SEQ ID NO: 1017449 - protein, 131 aa, Homo sapiens
MKIFLPVLLAALLGVERASSLMCFSCLNQKSNLYCLKPTICSEQDNYCVTVSASAGIGNLVTFGHSLSKTCSPACPIPEGVNVGVASMGISCCQSFLCNFSAADGGLRASVTLLGAGLLLSLLPALLRFGP

SEQ ID NO: 1017450 - protein, 131 aa, Homo sapiens; identical to SEQ ID NO: 1017449

SEQ ID NO: 1017451 - protein, 131 aa, Homo sapiens; identical to SEQ ID NO: 1017449

SEQ ID NO: 1017452 - protein, 203 aa, Homo sapiens
IRPRREDDRRGQSMAAGELEGGKPLSGLLNALAQDTFHGYPGITEELLRSQLYPEVPPEEFRPFLAKMRGILKSIASADMDFNQLEAFLTAQTKKQGGITSDQAAVISKFWKSHKTKIRESLMNQSRWNSGLRGLSWRVDGKSQSRHSAQIHTPVAIIELELGKYGQESEFLCLEFDEVKVNQILKTLSEVEESISTLISQPN

SEQ ID NO: 1017453 - protein, 185 aa, Homo sapiens
IRPRREDDRRGQSMAAGELEGGKPLSGLLNALAQDTFHGYPGITEELLRSQLYPEVPPEEFRPFLAKMRGILKSIASADMDFNQLEAFLTAQTKKQGGITSDQAAVISKFWKSHKTLSWRVDGKSQSRHSAQIHTPVAIIELELGKYGQESEFLCLEFDEVKVNQILKTLSEVEESISTLISQPN

SEQ ID NO: 1017454 - protein, 203 aa, Homo sapiens; identical to SEQ ID NO: 1017452

SEQ ID NO: 1017455 - protein, 250 aa, Homo sapiens
IRPRREDDRRGQSMAAGELEGGKPLSGLLNALAQDTFHGYPGITEELLRSQLYPEVPPEEFRPFLAKMRGILKRQNLPIIVQGGLKFLGLSNPLSLASQLLGLQQLFWAWKLDLGERSGWSIASADMDFNQLEAFLTAQTKKQGGITSDQAAVISKFWKSHKTKIRESLMNQSRWNSGLRGLSWRVDGKSQSRHSAQIHTPVAIIELELGKYGQESEFLCLEFDEVKVNQILKTLSEVEESISTLISQPN

SEQ ID NO: 1017456 - protein, 106 aa, Homo sapiens
GHSRFARVDPELPEAAVLLSRVGFSNSIAFFRFSRAQPSLEPDIRAGRFRGLGLGLNSSHRNGGAGNNTTTSSHLFPYPSHHQAARRPGTGALEKMADDIDIEAMP

SEQ ID NO: 1017457 - protein, 106 aa, Homo sapiens; identical to SEQ ID NO: 1017456

SEQ ID NO: 1017458 - protein, 162 aa, Homo sapiens
MTVDIGPRRGCIGGAVPGGILDAGLFDRWRQPSPPARHWLHSRPLWHTAAHSCLLGVLFFNACISLPPQAGGFEPPFCPANLQLPDSMCTALFAAEFARPRLTWRGIRVPFHTEAPSTWLSNNPVFPCICLTGCLSASFLKNHTITAICRSKRRPNNADGSD

SEQ ID NO: 1017459 - protein, 280 aa, Homo sapiens
NLNLKRFEKPKLKPRPPPPPPAPPKEDVKEKIFQLKAIPKKKVPEKTQVPEKRVELTPLKVPGGERGKFANYFRNVKPEPKEEVVLKSVLGKRPEEEEPKVEPKKLEKVKKSLQDQNQQAPKPVEEVEVPTVTPTGTWKIPEPTKVPEIKPAIPLPAPEPKPKPEAEVKTIKPPPVEPEPTPIAAQYTVPVVGKKQKPKAPKEEGCKPKVLIKVYPKSQKLHLLKYQRSQEGVPEKKGPRVLLKAESPEGRGPKKWRKKGAAPKAESPGGRRQRPKGRPQ

SEQ ID NO: 1017460 - protein, 90 aa, Homo sapiens
  misc_feature (2)..(2): Xaa can be any naturally occurring amino acid
  misc_feature (52)..(52): Xaa can be any naturally occurring amino acid
  misc_feature (55)..(55): Xaa can be any naturally occurring amino acid
  misc_feature (57)..(57): Xaa can be any naturally occurring amino acid
AXKCEELLEKTVKNCLALADDKKLKSIAFPSIGSGRNGFPKQTAAQLILKAXSSXSXATMSSSIKTVYFVLFDSERIGIYVQEMAKLDAN

SEQ ID NO: 1017461 - protein, 235 aa, Homo sapiens
  misc_feature (11)..(11): Xaa can be any naturally occurring amino acid
  misc_feature (21)..(21): Xaa can be any naturally occurring amino acid
  misc_feature (38)..(38): Xaa can be any naturally occurring amino acid
  misc_feature (42)..(42): Xaa can be any naturally occurring amino acid
  misc_feature (45)..(45): Xaa can be any naturally occurring amino acid
  misc_feature (50)..(50): Xaa can be any naturally occurring amino acid
LKLGFRLAGCXSHPHHNPPSXFYRAVWAPNWGWWNSPXAFCXRLXLALPXVPNGAFVGTPAEVALIRITADGRLPANQRRGYKNVFNALIQITREEGGLKLWRGCIPTMARAVVVNAAQLASNSQTKQIKLNSGYFSNNFLCNFCASMISGLVTTAASMPVDIAKTQIQNMRMIDGKPEHKNVLYVLFKVVRYECFFSLWKGFTPYYARLGPHTVLTFIFLEQMNKANKRLFLSG

SEQ ID NO: 1017462 - protein, 115 aa, Homo sapiens
RHSGAAIFVVRFYIVQNIMDDVTAFLLQQLTLSKEVHIRSVWMATHGLLSSDAPRRCEESAIDEVVVTNTIPHEVQKLQCPKIKTVDISMILSEAIRRIHNGESMSYLFLESIGR

SEQ ID NO: 1017463 - protein, 280 aa, Homo sapiens
  misc_feature (10)..(10): Xaa can be any naturally occurring amino acid
RNLLKTRHKXRSPTKDMDSEEKEIVVWVCQEEKFVCGLTKRTTSADVIQALLEEHEATFGEKRFLLGKPSDYCIIEKWRGSERVLPPLTRILKLWKAWGDEQPNMQFVLVKADAFLPVPLWRTAEAKLVQNTEKLWELSPANYMKTLPPDKQKRIVRKTFRKLAKIKQDTVSHDRDNMETLVHLIISQDHTIHQQVKRMKELDLEIEKCEAKFHLDRVENDGENYVQDAYLMPSFNEVEQNLDLQYEENQTLEDLSESDGIEQLEERLKYYRILIDKLSA

SEQ ID NO: 1017464 - protein, 128 aa, Homo sapiens
  misc_feature (11)..(11): Xaa can be any naturally occurring amino acid
TEPPPLPEAQXPLVATFIPLHPPRTRSVVVAPARRGQRHERGPRDGTESIMGSTVPRSALRAASAAAPAPGRAALRGRSSPSSCRTTPSRCFHEEVEQGVKFSLELPGSFTGRATTDVELLILEGPPG

SEQ ID NO: 1017465 - protein, 114 aa, Homo sapiens
  misc_feature (109)..(109): Xaa can be any naturally occurring amino acid
MLFVLKWHVLLLKPEKGGKVFKAAALLVNEILNSRLLLGKEASPGSPVLPRAVGLSSGETAPIPEAEGGNRFGAALSQGVEAQGRSRAFLLSKSEIMATPGARSPSTKXTAIAV

SEQ ID NO: 1017466 - protein, 107 aa, Homo sapiens
QGAGREQPPESSVALPVTSPASPPSTSSLHQLLPRSLPADLQTLPVQSRPKDTALAVPSWERLCPDVPGIPFPRWTPFPPSLSHWARDIYSSLRIPRCPPPTRTSAP

SEQ ID NO: 1017467 - protein, 191 aa, Homo sapiens
AVGVVACICKSKLLKRSSHVSLPRLQVHTIIHGTGSRYVAQTGKFRFLNQVWGLQILFSHRVTIYPDNAPFHAVFPHLQYCSPIPPPLGVKVTRRDLSSLALTPRWPQWKVSKGNRFGFTGRAAAGVWVLEAQECRSLQLTDSTRLSSQTLSEISSQLPPLFHLHALPAVFCPFQHWPFLWVGGQRIQFPA

SEQ ID NO: 1017468 - protein, 95 aa, Homo sapiens
HFYYYPTLITRISIDEQILVSNLCYLRSLPEPVLTFHTINNIISGRHIYLFRVYSITATPRRDCINRYSSYSFSYVYAVFYLHSTAGRLKYQEPL

SEQ ID NO: 1017469 - protein, 74 aa, Homo sapiens
LCGGVPCIAGHPAAITLAFLLRAKLAPAPPPVVTAQVFPGVQQCPLVMLRGTGVLPPGFERCLTPTSGVSLPCV

SEQ ID NO: 1017470 - protein, 118 aa, Homo sapiens
MEVNAGGVIAYISSSSSASSPASCHSEGSENSFQSSSSSVPSSPNSSNSDTNGNPKNGDLANIEGILKNDRIDCSMKTSKSSAPGMTKSHSGVTVSDFGFLKIAAINCKWGLFYQLFI

SEQ ID NO: 1017471 - protein, 725 aa, Homo sapiens
MEVNAGGVIAYISSSSSASSPASCHSEGSENSFQSSSSSVPSSPNSSNSDTNGNPKNGDLANIEGILKNDRIDCSMKTSKSSAPGMTKSHSGVTKFSGMVLLCKVCGDVASGFHYGVHACEGCKGFFRRSIQQNIQYKKCLKNENCSIMRMNRNRCQQCRFKKCLSVGMSRDAVRFGRIPKREKQRMLIEMQSAMKTMMNSQFSGHLQNDTLVEHHEQTALPAQEQLRPKPQLEQENIKSSSPPSSDFAKEEVIGMVTRAHKDTFMYNQEQQENSAESMQPQRGERIPKNMEQYNFKSMIMRLMGLAAIFPVGESQQHLNGQFKGRNIMHYPNGPGHLVLHNGHCTEPSPMLILNAAHAAYSFPISTALSLQYLQTPTIAPPVPTTCAGTAMPSGSRPTAAKSPLLWILITSRHMQHLGQQLLACTPSLQASGHEPGRDTPAHPATPWALTTTLILPATEPQGSTPAHRASRTSHAAPQPAPPSEPALHSNPDSPSDNDTKTRLPNSWQQEHTTARPDITPHVHTGRNHSGEPTPPKPPTATQPQAQKAQTPPHPPQETPSNKQPATPTSPPTALRRTRLAPTHATQRANTTHASTLHPTHTATTPRQPRPERAPTPRPRHPPGATRDSTTSTPRQQDTAPATADQQHPPRTQPRTSTTTRSTAHTTRTDNTSEHTPQQPTQTHRHRVPQHRHAHPTPPPPVSTPAADPPAQRPRHARPATQPPP

SEQ ID NO: 1017472 - protein, 157 aa, Homo sapiens
  misc_feature (23)..(23): Xaa can be any naturally occurring amino acid
  misc_feature (30)..(30): Xaa can be any naturally occurring amino acid
  misc_feature (55)..(55): Xaa can be any naturally occurring amino acid
  misc_feature (127)..(127): Xaa can be any naturally occurring amino acid
  misc_feature (130)..(130): Xaa can be any naturally occurring amino acid
MEASALTSSAVTSVAKVVRVASXLRSFAPXRIATVVKGGVVAMAGNANGCSVPWXHCGGNRFVLHSKPRMMSGGGQLPNGGGVASGALWLTLQSLGSNWTLRIDQVHPGLHWVCHCGCHCEVLLAPXPSXCREENHARGEGTSILTQRGANYPKILG

SEQ ID NO: 1017473 - protein, 256 aa, Homo sapiens
  misc_feature (240)..(240): Xaa can be any naturally occurring amino acid
MPSWLMENFIRGRRIIFLGSEPIISRNSSHSPLRTEYAIPWPNEPSFVFADVIRKSPDSPDGEDDRVYFFFTEVSVEYEFVFRVLIPRIARVCKGDQGGLRTLQKKWTSFLKARLICSRPDSGLVFNVLRDVFVLRSPGLKVPVFYALFTPQLNNVGLSAVCAYNLSTAEEVFSHGKYMQSTTVEQSHTKWVRYNGPVPKPRPWSVHRQRGTGRQLHQLFEFASPDPAAVFKEGPADIRXVCEKNGRALETCVPVQ

SEQ ID NO: 1017474 - protein, 124 aa, Homo sapiens
EDKILLENYVRSIENERDTLEFEMRHLQREYLSLSDKICNQHNDPSKTTYISRREKFHFDNYTHEDTSSPQSRPLASDLKGGNNTHACPGSRGNTISSFQGCKHTCSVLQRHSVFQDCYSNIPC

SEQ ID NO: 1017475 - protein, 61 aa, Homo sapiens
  misc_feature (41)..(41): Xaa can be any naturally occurring amino acid
MDSASVHLRSEEVHWLHVDMGVSSVREKYELAHPPEEWKYXLRIRYLPKGFLNQFTEDKPT

SEQ ID NO: 1017476 - protein, 131 aa, Homo sapiens
  misc_feature (116)..(116): Xaa can be any naturally occurring amino acid
GIQTRNRKMSSKSKKCKKVHDSLEDFPKNSSFNPAALSRHMSSLSHISPFSHMSSLSHISPFSHSSHIADHAHADAPAIQPVLWTTPPLQHGHRHGLEPCSMLTGPPARVPAVLSXCIFAGAVFMEGLNAM

SEQ ID NO: 1017477 - protein, 81 aa, Homo sapiens
  misc_feature (4)..(4): Xaa can be any naturally occurring amino acid
  misc_feature (75)..(75): Xaa can be any naturally occurring amino acid
QWQXRGHPASPDEHPAMCLHPPALTQPDPPAERTCRVDLGSEVYRMLRDQPSPWRGPKQSGSFRYLQGMLEAGEXGDWPGL

SEQ ID NO: 1017478 - protein, 78 aa, Homo sapiens
  misc_feature (3)..(3): Xaa can be any naturally occurring amino acid
  misc_feature (20)..(20): Xaa can be any naturally occurring amino acid
  misc_feature (24)..(24): Xaa can be any naturally occurring amino acid
  misc_feature (29)..(29): Xaa can be any naturally occurring amino acid
  misc_feature (34)..(34): Xaa can be any naturally occurring amino acid
  misc_feature (41)..(41): Xaa can be any naturally occurring amino acid
  misc_feature (54)..(54): Xaa can be any naturally occurring amino acid
NVXMPLDVEIPTYRNLLEGXESGXNLPIXTYSAXNFRETSXEQKGSEVHTKKTXMIKTIETRDGEVVSEPTQQQHEVL

SEQ ID NO: 1017479 - protein, 147 aa, Homo sapiens
QRVGPDVLDPNLTPEVVKERLLSPRFRNRQFAGLLLDQAFLAGLGNYLRVEILWQVGLTGNHKAKDLNAAQLDALAHALLEIPRFSYATRRQVDENKHHGALFRFKVFHRDGEPCERCGSIIEKTTLSSRPFYWCPGCQHEADRFGA

SEQ ID NO: 1017480 - protein, 146 aa, Homo sapiens
MQHFNRCFKHLNEFHDPLIGAAQRTGIAVGVRVILRVVFEFTNIGVSQPAREMSWLFSSPGSVLAIAIVAELTADLQYPELSDIGTKYMQAVGRQGDMRVREYREDGLVLQNLALPGMEGDGKREGKHDGKITAAKEEAKEVTQAI

SEQ ID NO: 1017481 - protein, 146 aa, Homo sapiens
MQHFNRCFKHLNEFHDPLIGAAQRTGIAVGVRVILRVVFEFTNIGVSQPAREMSWLFSSPGSVLAIAIVAELTADLQYPELSDIGTKSCRRFAAKDDMMVREYRENGLVLQNLALPGMEGDGSREGKHDGKITAAKEEAKEVTQAI

SEQ ID NO: 1017482 - protein, 77 aa, Homo sapiens
MPSVPTGEWALMAGPRRPQTRRRGIGKIFTPFRKERRNLRSLPCPTSVEQLPLTERRAPLENVLIVGSEAGLSYVYM

SEQ ID NO: 1017483 - protein, 175 aa, Homo sapiens
  misc_feature (92)..(92): Xaa can be any naturally occurring amino acid
  misc_feature (96)..(96): Xaa can be any naturally occurring amino acid
VPYLVGPVVAGAPALQLFESPAGHLGPQLFNQFALPYIRDVAQPVKARLREAGLAPVPLIIFAKDGHFCPGGTGPSWLMSVVMGVELDTLAXHRKXRGVCWGKTVTIARAHLEPLCLVCTLRRRSGSLVKQMLDDFGPHRYIANLGHGLYPDMDPEHVGAFVDAVHKHSRLLRQN

SEQ ID NO: 1017484 - protein, 104 aa, Homo sapiens
MPTYALSLVNRETKACGPPDLPVGPPEEIGQLGEQMLDDFGPHRYIANLGHGLYPDMDPEHVGAFVDAVINTHVCFDRTECIPLPSSTTTQMIDRFQDNKSFGV

SEQ ID NO: 1017485 - protein, 151 aa, Homo sapiens
YICEFCARSFRTSSNLVIHRRIHTGEKPLQCEICGFTCRQKASLNWHRRKHAETAAALRFPCEFCGKRFEKPDSVVAHCSKSHPALLPAQEPPGSLVSSPSISAPESLQSPEGASISTTSDSNPCLLNIHFFTWGARPQEQREKLGECSGG

SEQ ID NO: 1017486 - protein, 154 aa, Homo sapiens
SGFARHLATKWRARGRRAEPQGREAPGPAGGGGGGSRWAESGSGTSPESGDEEVSGAGSSPVSGGVNLFANDGSFLELFKRKDGGGAAAAGRRSLPPGSAADPDQSACRRWAPGDPKEGMGGPGSTLSFVGKTQRREQTSPQDGNSSQEAEDGG

SEQ ID NO: 1017487 - protein, 72 aa, Homo sapiens
RGADEVRRRWQLTFADGASLKGNSKYSWVLQRLECELVGCGYEGASSAMPLAPGEAVASHSLPSQCGEASSM

SEQ ID NO: 1017488 - protein, 72 aa, Homo sapiens; identical to SEQ ID NO: 1017487

SEQ ID NO: 1017489 - protein, 92 aa, Homo sapiens
FLSGPELLALAEMGKFMKPGKVVLVLAGRYSGRKAVIVKNIDDGTSDRPYSHALVAGIDRYPRKVTADHGQEEDRQEIKDKIFCEQCITTIT

SEQ ID NO: 1017490 - protein, 92 aa, Homo sapiens; identical to SEQ ID NO: 1017489

SEQ ID NO: 1017491 - protein, 178 aa, Homo sapiens
  misc_feature (177)..(178): Xaa can be any naturally occurring amino acid
PRIPISFPWLQDRPNKKTNNSNSYMNIFASLFLENVELEFPEEFRSHFLWLQDRPNKKTNNSNSYMNIFASLFLENVELEFPEEFRSHFLWLQDRPNKKTNNSNSYMNIFASLFLENVELEFPEEFRSHFLWLQDRPNKKTNNSNSYMNIFASLFLENVELDSLRIQCSLRIQWTSXX

SEQ ID NO: 1017492 - protein, 131 aa, Homo sapiens
  misc_feature (118)..(118): Xaa can be any naturally occurring amino acid
IAALLSILLTTSANSECWIVTNLHGYGAMNGDRYEFTKDSTEDSVFNVTINGDKSSVYESVSGVYPEMKYTALSSNTMVGEYQSGGGITVETWSITTDKKALYSKVMNIPGMQQLTSXKSFVGDVVGTSNQ

SEQ ID NO: 1017493 - protein, 376 aa, Homo sapiens
AGGQGARMRGVAEGVLLRLRERRGVGAGWGHRDPGQGGESPSSSPTCPKRENSRDVFIDSGGVRRVAELLLAKAAGPELRVEGWKALHELNPRAADEAAVNWVFVTDTLNFSFWSEQDEHKCVVRYRGKTYSGYWSLCAAVNRALDEGIPITSASYYATVTLDQVRNILRSDTDVSMPLVEERHRILNETGKILLEKFGGSFLNCVRESENSAQKLMHLVVESFPSYRDVTLFEGKRVSFYKRAQILVADTWSVLEGKGDGCFKDISSITMFADYRLPQVLAHLGALKYSDDLLKKLLKGEMLSYGDRQEVEIRGCSLWCVELIRDCLLELIEQKGEKPNGEINSILLDYYLWDYAHDHREDMKGIPFHRIRCIYY

SEQ ID NO: 1017494 - protein, 160 aa, Homo sapiens
MHLVVESFPSYRDVTLFEGKRVSFYKRAQILVADTWSVLEGKGDGCFKDISSITMFADYRLPQVLAHLGALKYSDDLLKKLLKGEMLSYGDRQEVEIRGCSLWCVELIRDCLLELIEQKGEKPNGEINSILLDYYLWDYAHDHREDMKGIPFHRIRCIYY

SEQ ID NO: 1017495 - protein, 142 aa, Homo sapiens
  misc_feature (52)..(53): Xaa can be any naturally occurring amino acid
PRTQLLNDSRLPAPQTLMLEMTFFVAESVGSHVWGPRSLCFCGERAHSPLCXXSPGWQGVSDRLLTGMKQSCGTGVQGWPQGPCVSSNHAALFTAGFIPFVPLYVDCRPLCGRAVTYQHTDSMARDIPGDNLEALTLEGKSC

SEQ ID NO: 1017496 - protein, 118 aa, Homo sapiens
VNIDVEVGHLGVHVVILLHLQAERGGEGQVFHLDGVDVYLLYEAGVGNQLFEVHHIHQGFLDGHIFDARYIEAINVLPPVDLVVFVLRSSVAVTYSVARSGKMRLLGASHLSGHRAQC

SEQ ID NO: 1017497 - protein, 103 aa, Homo sapiens
MAQFVRNLVEKTPALVNAAVTYSKPRLATFWYYAKVELVPPTPAEIPRAIQSLKKIVNSAQTGSFKQLTVKEAVLNGLVATEVWMWFDVGEIIGKRGIIGYDV

SEQ ID NO: 1017498 - protein, 103 aa, Homo sapiens; identical to SEQ ID NO: 1017497

SEQ ID NO: 1017499 - protein, 163 aa, Homo sapiens
  misc_feature (2)..(2): Xaa can be any naturally occurring amino acid
GXPGNAAIMARGFLFFSEGGVLAGERGGRADANMQIFVKTLTGKTITLEVEPSDTIENVKAKIQDKEGIPPDQQRLIFAGKQLEDGRTLSDYNIQKESTLHLGVCACEVGIIEPSRPTSLPRKYNCDKMICRKCYARLHPRAVNCRKKKCGHTNNLRPKKKVR

SEQ ID NO: 1017500 - protein, 163 aa, Homo sapiens; identical to SEQ ID NO: 1017499
  misc_feature (2)..(2): Xaa can be any naturally occurring amino acid

SEQ ID NO: 1017501 - protein, 74 aa, Homo sapiens
  misc_feature (3)..(3): Xaa can be any naturally occurring amino acid
  misc_feature (15)..(15): Xaa can be any naturally occurring amino acid
  misc_feature (20)..(20): Xaa can be any naturally occurring amino acid
GTXQTPKGTPGASNXNPPVXRPETIKLSHFGAIRGNLEIKNSWGLVWKKSSQGGIRESMGRIILTLCGRKMSFK

SEQ ID NO: 1017502 - protein, 319 aa, Homo sapiens
AGGQMERRWPHFPSGRECNMAKTYDYLFKLLLIGDSGVGKTCVLFRFSEDAFNSTFISTIGIDFKIRTIELDGKRIKLQIWDTAGQERFRTITTAYYRGAMGIMLVYDITNEKSFDNIRNWIRNIEEHASADVEKMILGNKCDVNDKRQVSKERGEKLALDYGNPSSLEDQVQRPNINVGKNAFFTLARDIKAKMDKNLEGNRPPGEQPGESKITVEQQKEEQLFPDAVFCEDTVSAYSEPVLSQADCAARAAPALMLHPVAGSIGTCYLSVPAGLSTSKWRSPHCRSMSLQIGNGLLLGEGKWGGAEGQQGGPTQDEG

SEQ ID NO: 1017503 - protein, 298 aa, Homo sapiens
AGGQMERRWPHFPSGRECNMAKTYDYLFKLLLIGDSGVGKTCVLFRFSEDAFNSTFISTIGIDFKIRTIELDGKRIKLQIWDTAGQERFRTITTAYYRGAMGIMLVYDITNEKSFDETSLETCGSPTLVGAPRSCVRAVLKKDYYILRGNPRLVWLVDLGPRRTQVFPRERGEKKSWHFDYGNPSSLEDQVQRPNINVGKNAFFTLARDIKAKMDKNLEGNRPPGEQPGESKITVEQQKEGAAFSRCRSPVRTQSLPTLSLRSAKLTVPVLSEPLTQPGSLPPPKPRHARATGPRPPN

SEQ ID NO: 1017504 - protein, 127 aa, Homo sapiens
PSADCKRVYCTRATLGHKRTELVQSAGGPGQRDCFGCKKGGHFSRRSRRGDVPGLLRLITDGSTQSDSLSRPSASLTSAPAGVVGARAGLLWTSASSFFSLRFSLRILFFLPLRSHGAGVSRKMASC

SEQ ID NO: 1017505 - protein, 123 aa, Homo sapiens
  misc_feature (121)..(121): Xaa can be any naturally occurring amino acid
MHAGAAPVASPIWAGCPLPAPRPPHLALRLDDVRVSEVVDAVAAHVVAGRRPPAPPSALRVVGRQVPEFSDHALLRPGPGVAWQRQEAECDQGQAQRQREVRTRHGRQCRRSPQSRECPVXGR

SEQ ID NO: 1017506 - protein, 118 aa, Homo sapiens
  misc_feature (2)..(2): Xaa can be any naturally occurring amino acid
  misc_feature (9)..(9): Xaa can be any naturally occurring amino acid
  misc_feature (14)..(14): Xaa can be any naturally occurring amino acid
KXAELPFIXTDTAXGLEMPSTMPKTQIAFAFGDLSHLHTVVLLGVERSSAREPQGPQKSTRQASSFCAPAARGQSGEVDVVSSDPGLAAVCAPHLHRQEVLDAGHQLLCALMMCVSRK

SEQ ID NO: 1017507 - protein, 90 aa, Homo sapiens
GHQSWPSTGKGIRFVATDVGWGGSGPQILHLFTRWTQEGYEPLCRGAPLAGAEPGLGEAGGPIGPCSAPPLPDDRAICLPRVYTLTDSRM

SEQ ID NO: 1017508 - protein, 131 aa, Homo sapiens
TTTKFAAASTDGCEERNHKRPLPKKTDMYTGITESPRKAKQSPQSQLSSPPNKNNTERPPMTHPTEAFRAAYRTSITPHYNPWLHAGFVLGYGLLCITLFWSTTQQIHPLEWLTIPFTLIFFNLCVDAAAN

SEQ ID NO: 1017509 - protein, 259 aa, Homo sapiens
MQAWLLPPGGLPVSSVMLEMCHDAWMDLMLGESGAPVLLCVCCVLSCAAKHDLYVCAGGREPGGCVLCDLKADALVNVGCGWSQWSLWLGGVWMHAFRLPLCGVPWTPACSVAAITGLPVWTMRTGPRRHELMPHPRRYHFLMMRGRPWGCYREHYRSRKHKLTKKSLRGQVVVTWTRRRSADEDMLPCPFSKAVMMIVRPTGGCMTGDTVAATDGNDYSRDRGDAYYDTDYRHSYEYQRGEQQLPQPAQQSGGSTIRA

SEQ ID NO: 1017510 - protein, 74 aa, Homo sapiens
KVRGPVKVLDSRRLYSCKWVQFQDNFSLQDALLLLLVSFLTFDLLHEARRSHFASSCGMPLTLLGLAFCLHPWA

SEQ ID NO: 1017511 - protein, 103 aa, Homo sapiens
MAQKPKVDPHVGRLGYLQALVTEFQETQSQDAKEQVLAKPRQLRLHDTQTTTEYHADKIAGPEIYYHRLRMSEETRAPGGRLAIGGHDDNTVTKTGDKKGAPY

SEQ ID NO: 1017512 - protein, 108 aa, Homo sapiens [sequence omitted]

SEQ ID NO: 1017513 - protein, 172 aa, Homo sapiens
ARGCVDPLWGTRYVRPFLMPETMAKAAEPKAPQSFEAAMAELEGLVASMEGGQLTLEASLAAYKRGAELLKYCQAALEDAQQQIKVLEATRWQTGPVQTIPSDFAGWMQAHQARIEAALERVLPAADIAPQRLHEAMRYAVLGGGKRIRPLLAYAGGEATGAPVDAVDRIAA

SEQ ID NO: 1017514 - protein, 740 aa, Homo sapiens
MPLAQLADPWQKMAVESPSDSAENGQQIMDEPMGEEEINPQTEEVSIKEIAITHHVKEGHEKADPSQFELLKVLGQGSFGKVFLVKKISGSDARQLYAMKVLKKATLKVRDRVRTKMERDILVEVNHPFIVKLHYAFQTEGKLYLILDFLRGGDLFTRLSKEVMFTEEDVKFYLAELALALDHLHSLGIIYRDLKPENILLDEEGHIKLTDFGLSKESIDHEKKAYSFCGTVEYMAPEVVNRRGHTQSADWWSFGVLMFEMLTGTLPFQGKDRKETMTMILKAKLGMPQFLSPEAQSLLRMLFKRNPANRLGAGPDGVEEIKRHSFFSTIDWNKLYRREIHPPFKPATGRPEDTFYFDPEFTAKTPKDSPGIPPSANAHQLFRGFSFVAITSDDESQAMQTVGVHSIVQQLHRNSIQFTDGYEVKEDIGVGSYSVCKRCIHKATNMEFAVKIIDKSKRDPTEEIEILLRYGQHPNIITLKDVYDDGKYVYVVTELMKGGELLDKILRQKFFSEREASAVLFTITKTVEYLHAQGVVHRDLKPSNILYVDESGNPESIRICDFGFAKQLRAENGLLMTPCYTANFVAPEVLKRQGYDAACDIWSLGVLLYTMLTGYTPFANGPDDTPEEILARIGSGKFSLSGGYWNSVSDTAKDLVSKMLHVDPHQRLTAALVLRHPWIVHWDQLPQYQLNRQDAPHLVKGAMAATYSALNRNQSPVLEPVGRSTLAQRRGIKKITSTAL

SEQ ID NO: 1017515 - protein, 740 aa, Homo sapiens; identical to SEQ ID NO: 1017514

SEQ ID NO: 1017516 - protein, 740 aa, Homo sapiens; identical to SEQ ID NO: 1017514

SEQ ID NO: 1017517 - protein, 690 aa, Homo sapiens
QKFFYHHHGFVAMFKFLSFRVRSIQEEVSIKEIAITHHVKEGHEKADPSQFELLKVLGQGSFGKVFLVKKISGSDARQLYAMKVLKKATLKVRDRVRTKMERDILVEVNHPFIVKLHYAFQTEGKLYLILDFLRGGDLFTRLSKEVMFTEEDVKFYLAELALALDHLHSLGIIYRDLKPENILLDEEGHIKLTDFGLSKESIDHEKKAYSFCGTVEYMAPEVVNRRGHTQSADWWSFGVLMFEMLTGTLPFQGKDRKETMTMILKAKLGMPQFLSPEAQSLLRMLFKRNPANRLGAGPDGVEEIKRHSFFSTIDWNKLYRREIHPPFKPATGRPEDTFYFDPEFTAKTPKDSPGIPPSANAHQLFRGFSFVAITSDDESQAMQTVGVHSIVQQLHRNSIQFTDGYEVKEDIGVGSYSVCKRCIHKATNMEFAVKIIDKSKRDPTEEIEILLRYGQHPNIITLKDVYDDGKYVYVVTELMKGGELLDKILRQKFFSEREASAVLFTITKTVEYLHAQGLRAENGLLMTPCYTANFVAPEVLKRQGYDAACDIWSLGVLLYTMLTGYTPFANGPDDTPEEILARIGSGKFSLSGGYWNSVSDTAKDLVSKMLHVDPHQRLTAALVLRHPWIVHWDQLPQYQLNRQDAPHLVKGAMAATYSALNRNQSPVLEPVGRSTLAQRRGIKKITSTAL

SEQ ID NO: 1017518 - protein, 740 aa, Homo sapiens
MPLAQLADPWQKMAVESPSDSAENGQQIMDEPMGEEEINPQTEEVSIKEIAITHHVKEGHEKADPSQFELLKVLGQGSFGKVFLVKKISGSDARQLYAMKVLKKATLKVRDRVRTKMERDILVEVNHPFIVKLHYAFQTEGKLYLILDFLRGGDLFTRLSKEVMFTEEDVKFYLAELALALDHLHSLGIIYRDLKPENILLDEEGHIKLTDFGLSKESIDHEKKAYSFCGTVEYMAPEVVNRRGHTQSADWWSFGVLMFEMLTGTLPFQGKDRKETMTMILKAKLGMPQFLSPEAQSLLRMLFKRNPANRLGAGPDGVEEIKRHSFFSTIDWNKLYRREIHPPFKPATGRPEDTFYFDPEFTAKTPKDSPGIPPSANAHQLFRGFSFVAITSDDESQAMQTVGVHSIVQQLHRNSIQFTDGYEVKEDIGVGSYSVCKRCIHKATNMEFAVKIIDKSKRDPTEEIEILLRYGQHPNIITLKDVYDDGKYVYVVTELMKGGELLDKILRQKFFSEREASAVLFTITKTVEYLHAQGVVHRDLKPSNILYVDESGNPESIRICDFGFAKQLRAENGLLMTPCYTANFVAPEVLKRQGYDAACDIWSLGVLLYTMLTGYTPFANGPDDTPEEILARIGSGKFSLSGGYWNSVSDTAKDLVSKMLHVDPHQRLTAALVLRHPWIVHWDQLPQYQLNRQDAPHLVKGAMAATYSALNRNQSPVLEPVGRSTLAQRRGCLHFAGLPK

SEQ ID NO: 1017519 - protein, 723 aa, Homo sapiens
QKFFYHHHGFVAMFKFLSFRVRSIQEEVSIKEIAITHHVKEGHEKADPSQFELLKVLGQGSFGKVFLVKKISGSDARQLYAMKVLKKATLKVRDRVRTKMERDILVEVNHPFIVKLHYAFQTEGKLYLILDFLRGGDLFTRLSKEVMFTEEDVKFYLAELALALDHLHSLGIIYRDLKPENILLDEEGHIKLTDFGLSKESIDHEKKAYSFCGTVEYMAPEVVNRRGHTQSADWWSFGVLMFEMLTGTLPFQGKDRKETMTMILKAKLGMPQFLSPEAQSLLRMLFKRNPANRLGAGPDGVEEIKRHSFFSTIDWNKLYRREIHPPFKPATGRPEDTFYFDPEFTAKTPKDSPGIPPSANAHQLFRGFSFVAITSDDESQAMQTVGVHSIVQQLHRNSIQFTDGYEVKEDIGVGSYSVCKRCIHKATNMEFAVKIIDKSKRDPTEEIEILLRYGQHPNIITLKDVYDDGKYVYVVTELMKGGELLDKILRQKFFSEREASAVLFTITKTVEYLHAQGVVHRDLKPSNILYVDESGNPESIRICDFGFAKQLRAENGLLMTPCYTANFVAPEVLKRQGYDAACDIWSLGVLLYTMLTGYTPFANGPDDTPEEILARIGSGKFSLSGGYWNSVSDTAKDLVSKMLHVDPHQRLTAALVLRHPWIVHWDQLPQYQLNRQDAPHLVKGAMAATYSALNRNQSPVLEPVGRSTLAQRRGIKKITSTAL

SEQ ID NO: 1017520 - protein, 482 aa, Homo sapiens
QKFFYHHHGFVAMFKFLSFRVRSIQEEVSIKEIAITHHVKEGHEKADPSQFELLKVLGQGSFGKVFLVKKISGSDARQLYAMKVLKKATLKVRDRVRTKMERDILVEVNHPFIVKLHYAFQTEGKLYLILDFLRGGDLFTRLSKEVMFTEEDVKFYLAELALALDHLHSLGIIYRDLKPENILLDEEGHIKLTDFGLSKESIDHEKKAYSFCGTVEYMAPEVVNRRGHTQSADWWSFGVLMFEMLTGTLPFQGKDRKETMTMILKAKLGMPQFLSPEAQSLLRMLFKRNPANRLGAGPDGVEEIKRHSFFSTIDWNKLYRREIHPPFKPATGRPEDTFYFDPEFTAKTPKDSPGIPPSANAHQLFRGFSFVAITSDDESQAMQTVGVHSIVQQLHRNSIQFTDGYEVKEDIGVGSYSVCKRCIHKATNMEFAVKVNFFYLKCNSYSSCSCMSVPVKNYTPLVVKSAFCYKKVKYLASDLQRS

SEQ ID NO: 1017521 - protein, 740 aa, Homo sapiens; identical to SEQ ID NO: 1017514

SEQ ID NO: 1017522 - protein, 740 aa, Homo sapiens; identical to SEQ ID NO: 1017514

SEQ ID NO: 1017523 - protein, 238 aa, Homo sapiens
MAVELGVLLVRPRPGTGLGRVMRTLLLVLWLATRGSALYFHIGETEKKCFIEEIPDETMVIGNYRTQLYDKACSGGCTSRPPRGLGMFVEGEGPRVTLVILARAVCAPMGRFTFTAHIPGEHQICLHSNSTKFSLFAGGMLRVHLDIQVGEHANDMQKIAAKDKLSDVAATKCDSWWNKVEQIQKRAELPGVAERSASGRPRESTNQRVLVVVHSERPFILRWLIELSGMMRDLKELL

SEQ ID NO: 1017524 - protein, 218 aa, Homo sapiens
GLPPSLPSSYSHSFHTHWLTHLLSLSISLTMTILGTTFGMVFSLLQVVSGESGYAQNGDLEDAELDDYSFSCYSQLEVNGSQHSLTCAFEDPDVNTTNLEFEICGALVEVKCLNFRKLQEIYFIETKKFLLIGKSNICVKVGEKSLTCKKIDLTTIVKPEAPFDLSVIYREGANDFVVTFNTSHLQKKYVKVLMHDVAYRQEKDENKWTVCSSTTLIK

SEQ ID NO: 1017525 - protein, 231 aa, Homo sapiens
GLPPSLPSSYSHSFHTHWLTHLLSLSISLTMTILGTTFGMVFSLLQVVSGESGYAQNGDLEDAELDDYSFSCYSQLEVNGSQHSLTCAFEDPDVNTTNLEFEICGALVEVKCLNFRKLQEIYFIETKKFLLIGKSNICVKVGEKSLTCKKIDLTTIVKPEAPFDLSVIYREGANDFVVTFNTSHLQKKYVKVLMHDVAYRQEKDENKWTACEFIQHKADTPAEKAPTGSNV

SEQ ID NO: 1017526 - protein, 131 aa, Homo sapiens
LGAGCVRWLAGAARRSPCSLCSVCCVLRRLELMPHDPGAWCGGGRPAGAALYVSAPTLTCAGESGKSTIVKQMRILHVNGFNGDSEKATKVQDIKNNLKEAIETIVAAMSNLVPPVELAKPENQVQSGLHI

SEQ ID NO: 1017527 - protein, 175 aa, Homo sapiens
SATTVVDANAEGTSQVYRATHRLLLLGAGESGKSTIVKQMRILHVNGFNGDSEKATKVQDIKNNLKEAIETIVAAMSNLVPPMEAGPTPEKTVPELDYIHAVCINMPRLLTSAPNSISIPMLYGTINDFIPTTNTPTITILLTVPHTCLTRSTLSTNLTLSLSIQTYFAYHILTF

SEQ ID NO: 1017528 - protein, 106 aa, Homo sapiens
SATTVVDANAEGTSQVYRATHRLLLLGAGESGKSTIVKQMRILHVNGFNGDSEKATKVQDIKNNLKEAIETIVAAMSNLVPPGCPPPLCCPPPLCCPGAGDLLGCP

SEQ ID NO: 1017529 - protein, 222 aa, Homo sapiens
LGAGCVRWLAGAARRSPCSLCSVCCVLRRLELMPHDPGAWCGGGRPAGAALYVSAPTLTCAGESGKSTIVKQMRILHVNGFNGEGSQEDPQLQGATAMSEKATKVQDIKNNLKEAIETIVAAMSNLVPPMEAGPTPEKTVPELDYIHAVCINMPRLLTSAPNSISIPMLYGTINDFIPTTNTPTITILLTVPHTCLTRSTLSTNLTLSLSIQTYFAYHILTF

SEQ ID NO: 1017530 - protein, 120 aa, Homo sapiens
SATTVVDANAEGTSQVYRATHRLLLLGAGESGKSTIVKQMRILHVNGFNGEGSQEDPQLQGATAMSEKATKVQDIKNNLKEAIETIVAAMSNLVPPGCPPPLCCPPPLCCPGAGDLLGCP

SEQ ID NO: 1017531 - protein, 196 aa, Homo sapiens
MGTATPDGREDQEGLWVSVEDAQIAQRSPSWLTVRPDMTVASLRDMVCLDYGFPPVLQPVALIGAAGWHETRRPCVPMGLRQHSGQLPNSNLGVSPKHFLQPQELALGSGIADVGTIWAFTGLYAETAGAPVEPVAPKRPGGPPEPGRGTPKIESRQSPPCGWKNPRVTLYTQHSARREKCSPCTRGYMSAAYIST

SEQ ID NO: 1017532 - protein, 122 aa, Homo sapiens
MDEKTKKAEEMALSLTRGKMAGRGMNKVGKCKVVPFWLGRDNCGAPEVCKIDSLMVSPSAREQFRFLMVAKIGDISSSIPAINITRTDMGRKTTPPDFFPKEHKLKKLYTASFRKFLVDQET

SEQ ID NO: 1017533 - protein, 159 aa, Homo sapiens
SRRECGCTHEHRKVLDTVANKHKDLKTHGFTLESCRSMIALMDTDVSGTVNRQEIEHLWDKINGWQNICRRYETGQCGSIDSYEMRNAVNDAVFHLNNQLYDIITMRHADKHMNIDFDSLICCLVRLEGMFRAFHAFDKDGDGIIKLNVLEWLQLTMYA

SEQ ID NO: 1017534 - protein, 220 aa, Homo sapiens
EDFDNRMVKHVIAEFNAMLIKDIYENPESLYEMLCRTCLLNDAYSVALCIRARPGPRNWEIRVAVSYERVHLNIRVTSMYLVPRFEHLNADLFRGTLDPVEKALRDAKLDKSQIHDIVLVGGSTRIPKIQKLLQDFFNGKELNKSINPDEAVAYGAAVQAAILSGDKSENVQGFAALVMSLLFPLVLKLLVELMTVLITSVIPPDSYLEPWTTRSFSYLF

SEQ ID NO: 1017535 - protein, 46 aa, Homo sapiens
ERSIVGRQLQHQIAPRITQSLSGGTEYRPEVDVGILWARVLTVTGY

SEQ ID NO: 1017536 - protein, 165 aa, Homo sapiens
MECHLKTHYKMEYKCRICQTVKANQLELETHTREHRLGNHYKCDQCGYLSKTANKLIEHVRVHTGERPFHCDQCSYSCKRKDNLNLHKKLKHAPRQTFSCEECLFKTTHPFVFSRHVKKHQSGDCPEEDKKGLCPAPKGTRPPRGPPSLVGREASPEISWSPPVS

SEQ ID NO: 1017537 - protein, 258 aa, Homo sapiens
NSEEKPEKGFECVFCNFVCKTKNMFERHLQIHLITRMFECDVCHKFMKTPEQLLEHKKCHTCPHPVGSTQDSGEFQTPLGAHSAFISTNRPAAMECHLKTHYKMEYKCRICQTVKANQLELETHTREHRLGNHYKCDQCGYLSKTANKLIEHVRVHTGERPFHCDQCSYSCKRKDNLNLHKKLKHAPRQTFSCEECLFKTTHPFVFSRHVKKHQSGDCPEEDKKGLCPAPKGTRPPRGPPSLVGREASPEISWSPPVS

SEQ ID NO: 1017538 - protein, 143 aa, Homo sapiens
MTTREVVKAKVSLRCLCLLPMAWPECCSWAPGDELLAQAGEHPLHPPCREELGWAFSIAILRNGVPIGGMRPWDEVLHLAGHDSILIFDCHEEVLEHHDAPGEAPGWAAGSKRHGQQPSQQHCFTLGLWTLQPCTSKSLLSQT

SEQ ID NO: 1017539 - protein, 143 aa, Homo sapiens; identical to SEQ ID NO: 1017538

SEQ ID NO: 1017540 - protein, 110 aa, Homo sapiens
YQVLRIAPLGNMTGLQPVWIIIIFNYRSLSALSAYHTGLIAPMKIRTEAPGNLRLYSGSPTRSEKEQVSISSFYYKERVSARAAAFDSYPFFLGFLFLIFLPGRRGLGFS

SEQ ID NO: 1017541 - protein, 155 aa, Homo sapiens
RQRFSYRLHSPTLSLPPYRRLRGLRGLRVVPDANIPFPRTSGARFCGASYLVYFTRPMTMHRAVSPTEPTPRSLSALSAYHTGLIAPMKIRTEAPGNLRLYSGSPTRSEKEQVSISSFYYKERVSARAAAFDSYPFFLGFLFLIFLPGRRGLGFS

SEQ ID NO: 1017542 - protein, 226 aa, Homo sapiens
DGSSVPRDSPHSLPTRRARGSSSPVRVPSRQRREQTPVDMAHVPGSNAYIDNLHGWTVDLSGPAIVGYKDSPSVWAAVPEENVRQHHASMRMEFLVGKDRIKIINDEWADTLEARNVTVIRRLTAAGWRNISMDLRTKSTGGDPQLQCHYVNKTDKTLDPCVMGNRRCPRRYDQQEMYEMDSQLRSSEYKWTHRYMIPKTPTSAGIPTKEIRNHIIYTIRKDKTYK

SEQ ID NO: 1017543 - protein, 139 aa, Homo sapiens
ALDQATMRGPELGPETSMEGDVLDTLEALGYKGPLLEEQALSKAAEGGLSSPEFSELCIWLGSQIKSLCNLEESITSAGRDDLESFQLEISGFLKEMACPYSVLVSGDIKERLTKKDDCLKLLLFLSTELQALQILQKK

SEQ ID NO: 1017544 - protein, 120 aa, Homo sapiens [sequence omitted]

SEQ ID NO: 1017545 - protein, 119 aa, Homo sapiens
MYSFPTTVVEEILSLSLQLIAFPTVSCEILLEITSQTNKKQTRETCYAHSAEEIGIIAGKRIHKTQAVPYICFLLRHQFISQSSHVRVEALYSLLFLGTLLQVGMRVLTSRCRLFRSEE

SEQ ID NO: 1017546 - protein, 399 aa, Homo sapiens
ERDRATPSVDTLLVTQRRRQSGEQVVKGTLHKRQRARGYPGAHPGQGTTSDSKIEPRPVRGVSTLGTSRHHINGALRNQAGLSKFGLRMLLKNEDFWWGERVTWRTSQVCATLLWLNKQFLEPLSRQAFQYNRWFLTCINQPQFRAVLGEVKLCEKMAQFDAKKFAETQPKKDTPRKEKGSREEKQKPQAERKEEKKAAAPAPEEEMDECEQALAAEPKAKDPFAHLPKSTYVLDEFKRKYSNEDTLSVAHAIFLGAHLIRTAWSPVVYSEVSASPERTHHQTFMSCNLITGMFQRLDKLRKTCLRQCHPFLEPTIAAPFLEYWVFRGQELALSAEIQIGKVELRSQYTMADNSRSLRSEDDHRSWLRRVLLRWEGAFQHVGKAFNTGQDLQVNNNLPI

SEQ ID NO: 1017547 - protein, 239 aa, Homo sapiens
MPWLPSRNGMVLNAPLPQWTWHAVLLWPLWFNHAWPCKILHDCNVPCNANGCAASAPAAPAVWCPILAHLCCCPTGSGTTLNGARLAAGFSLEELMGVPGIHNEGGPDHRHFCGSEECCEQVHWSPCRPTCSWLKDVPVQTHPLPQWSPRAPMKGDSSAEELKLAPSCPDLVMPVRNVYKKEKARVITEEEKNFKAFASLRMARANARLFGIRAKRATEAADQVVERKISLLGTLDQSA

SEQ ID NO: 1017548 - protein, 614 aa, Homo sapiens [sequence omitted]

SEQ ID NO: 1017549 - protein, 174 aa, Homo sapiens
TGSCTSALKTSQHCFLSHTRILKVGDFWLAREYGSPLEGLHPRSLVTLWFRAPELLLLFPKEYSTAVDMWSLGCIFGELLTQKLCSPGKSEIDQINKVFKDLGTPSEKIWPGYSELPAVKKMTFSEHPYNNLPKHFGALLSDQGFDLMKKFLTYFPRRRISTEDSLKHEYFPEY

SEQ ID NO: 1017550 - protein, 44 aa, Homo sapiens
  misc_feature (24)..(24): Xaa can be any naturally occurring amino acid
  misc_feature (34)..(34): Xaa can be any naturally occurring amino acid
MRNAGISSAPQWLDTRLAKTVTTXILHSGIDMPXRIIFSIIPSF

SEQ ID NO: 1017551 - protein, 58 aa, Homo sapiens
MRAVGSGLARLYAGALWVKSAGGTFTRGSNDNALILKASGEDIRISSSTLHGYEVPLV

SEQ ID NO: 1017552 - protein, 58 aa, Homo sapiens
MRAVGSGLARLYPGALWVKSAGGTFTRGSNDNALILKASGEDIRISSSTLHGYEVPLV

SEQ ID NO: 1017553 - protein, 135 aa, Homo sapiens [sequence omitted]

SEQ ID NO: 1017554 - protein, 145 aa, Homo sapiens
MVWATRQGQPRLRAHPTRKAQAQTQGSQRGRTAEQGLGKDPTLGYLGVKMCYFTHLTRSTRPRPCACPEGKLVEPCTDNSQSVGLGRTFPCEQQHQRLERRPSRSTVEGAELPWCAGSDSQKGDGGPQGRCSHGVIEVQGHLPPR

SEQ ID NO: 1017555 - protein, 177 aa, Homo sapiens
MCYFTHLTRSTRPRPCACPEGKLVEPCTDNSQSVGLGRTFPCEQQHQRLERRPSRSTVEGAELPWCAGSDSQKGDGGPQGRCSHGVIEVQGHLPPRSVCTVITCCHNTVTDLRVFSDSQLGLHRGLLWAHLRDHWAQLPRLRSIRTGLPTPAFPGLPHSFLAMSQSSVDDQWPGVAL

SEQ ID NO: 1017556 - protein, 224 aa, Homo sapiens
DLTEVHWGLAKSASFQAPERHSSFQGDPKFHLTSRPCESSLAPCFRQPRPRRLCSWSLPFLSLQAWQHFCGCKLLTPCWLYAAHQCRSLQTGGSAALSRRPHLSLSAAEMVSWIHRSHLMSSKPWCQPHPWPRLRAAWIEHFSDPQGLVPFCLYGACLTDCFPACILLISSKEKPGGTFHTAWKSQLDVQAHQLQVPLRTQQQSSSQPSSLLPPPVPSSTVISI

SEQ ID NO: 1017557 - protein, 69 aa, Homo sapiens
ILGHKSTDRVLGAHILGPGAGEMVNEAALALEYGASCEDIARVCHAHPTLSEAFREANLAAAFGKPINF

SEQ ID NO: 1017558 - protein, 246 aa, Homo sapiens
MNDWMPIAKEYDPLKAGSIDGTDEDPHDRAVWRAMLARYVPNKGVIGDPLLTLFVARLNLQTKEDKLKEVFSRYGDIRRLRLVRDLVTGFSKGYAFIEYKEERAVIKAYRDADGLVIDQHEIFVDYELERTLKGWIPRRLGGGLGGKKESGQLRFGGRDRPFRKPINLPVVKNDLYREGKRERRERSRSRERHWDSRTRDRDHDRGREKRWQEREPTRVWPDNDWERERDFRDDRIKGREKKERGK

SEQ ID NO: 1017559 - protein, 246 aa, Homo sapiens; identical to SEQ ID NO: 1017558

SEQ ID NO: 1017560 - protein, 279 aa, Homo sapiens
PCRLSRRSSRGSHRAPTDCPSGGNDSTTQSGHFPESTPSTYSSPTSTSWGSIDGTDEDPHDRAVWRAMLARYVPNKGVIGDPLLTLFVARLNLQTKEDKLKEVFSRYGDIRRLRLVRDLVTGFSKGYAFIEYKEERAVIKAYRDADGLVIDQHEIFVDYELERTLKGWIPRRLGGGLGGKKESGQLRFGGRDRPFRKPINLPVVKNDLYREGKRERRERSRSRERHWDSRTRDRDHDRGREKRWQEREPTRVWPDNDWERERDFRDDRIKGREKKERGK

SEQ ID NO: 1017561 - protein, 246 aa, Homo sapiens; identical to SEQ ID NO: 1017558

SEQ ID NO: 1017562 - protein, 246 aa, Homo sapiens; identical to SEQ ID NO: 1017558

SEQ ID NO: 1017563 - protein, 134 aa, Homo sapiens
KIKKSILENKRNSLDLIKSFHRSLAATARVPMVRSRTGCHSHSFCPAVWRSREQRKKTSQRYTVETKRQNKTHYSQVMSLCSGKLQTISKDNLKYFPGKNIGNIKRCQHVFGDQSQYTRCHCVSVISSHAKRKL

SEQ ID NO: 1017564 - protein, 405 aa, Homo sapiens
SAPLPFEMNVPGAPSRGFWSYSSVNAVMATALPPRLQPVRGNETLREHYQYVGKLAGRLKEASEGSTLTTVLFLVICSFIVLENLMVLIAIWKNNKFHNRMYFFIGNLALCDLLAGIAYKVNILMSGKKTFSLSPTVWFLREGSMFVALGASTCSLLAIAIERHLTMIKMRPYDANKRHRVFLLIGMCWLIAFTLGALPILGWNCLHNLPDCSTILPLYSKKYIAFCISIFTAILVTIVILYARIYFLVKSSSRKVANHNNSERSMALLRTVVIVVSVFIACWSPLFILFLIDVACRVQACPILFKAQWFIVLAVLNSAMNPVIYTLASKEMRRAFFRLVCNCLVRGRGARASPIQPALDPSRSKSSSSNNSSHSPKVKEDLPHTDPSSCIMDKNAALQNGIFCN

SEQ ID NO: 1017565 - protein, 163 aa, Homo sapiens
WDKQPIERLLFRQFCDTNPTLKRHIEFLDAVAEYEVADDEDRSDCGLSILDRFFNDKLAAPLPEIPPDVVTECRLGLKEENPSKKVFEECTRVAHNYLRGEPFEEYQESSYFSQFLQWKWLERQPVTKNTFRHYRVLGKGGFGEVCACQVRATGKMYACKKLQ

SEQ ID NO: 1017566 - protein, 115 aa, Homo sapiens
  misc_feature (2)..(2): Xaa can be any naturally occurring amino acid
  misc_feature (21)..(22): Xaa can be any naturally occurring amino acid
RXRKPQRKLQSTLLREIQQFXXGARKSATDTSAKWRLSHCTVHRTDLYPNSKQLLNSGVSMPVIQTKEKMIHENLRGIHENETDSWTVMQINKNSTSGTIKETDDIDDIFALMGV

SEQ ID NO: 1017567 - protein, 102 aa, Homo sapiens
ARRPPFPLAADRVLPFQTGSPCCRRGDFPATATAAAATATTTGLICPDPFPPPAPSPTQDVRGFSKAAGKLQSSAPASCSCISGNGENEDLLQIEERFTTKL

SEQ ID NO: 1017568 - protein, 129 aa, Homo sapiens
MAEVEETLKRIQSHKGVIGTMVVNAEGKKTNTMSQSKNFRADSLWTRCSGECISYKNMLTYYSSSQLMASERFMHKNVHHHPISYKKYKVPNDQTIGDGLYVHKIVKYAVIKNNVDDIVNKDNLYVIIL

SEQ ID NO: 1017569 - protein, 122 aa, Homo sapiens
RELPGSSSLPCPGLTEDPGSRHFCSLSPGIPPLKVPTATQHGGLAQNQLTRVPIIQQAGGLEQKGCLPWGAELSWAGPAPSAVSATEATQPASCHSHLKNAQRPRRHNSYAPPQGNKGSFTP

SEQ ID NO: 1017570 - protein, 152 aa, Homo sapiens
  misc_feature (5)..(5): Xaa can be any naturally occurring amino acid
  misc_feature (43)..(43): Xaa can be any naturally occurring amino acid
  misc_feature (60)..(60): Xaa can be any naturally occurring amino acid
  misc_feature (85)..(85): Xaa can be any naturally occurring amino acid
  misc_feature (93)..(93): Xaa can be any naturally occurring amino acid
  misc_feature (108)..(108): Xaa can be any naturally occurring amino acid
  misc_feature (113)..(113): Xaa can be any naturally occurring amino acid
  misc_feature (120)..(120): Xaa can be any naturally occurring amino acid
  misc_feature (127)..(127): Xaa can be any naturally occurring amino acid
LLLPXDRGVGRRQTMWTLVSWVALTAGLVAWNAVPDGQFCPVXCMPGPRRASYSCCRPHXGQMAHNTGAGIWVAPCQVDAHCIMXATPCIFTXLRDFPVACPFPRGRXLPGMXITCCPRXVHLQCRXGRSCFQRSGNNSVGAIQCPDSQFEC

SEQ ID NO: 1017571 - protein, 148 aa, Homo sapiens
  misc_feature (20)..(20): Xaa can be any naturally occurring amino acid
LFSCAGAAGQYSTMAPSGDXSVLKPHFHKDWQRRSATWFNQPARKIRRRKARQAKARRIAPRPAPVPIRPIVRCPTVRYHTKVRAGRALKPGKELRVAGIHKKGGPGPSEFLLDSEEGGTSSTESLQANVAAAVKEYRSKLILFPQEA

SEQ ID NO: 1017572 - protein, 269 aa, Homo sapiens
NSRPRRREKTTEGGLTENHPGNPITAGHHEPHCANLLSCQQRPASQLRDAQGGAGSGYAGGAHNPAPPMSTVIHIRSETSVPDHVVWSLFNTLFIEQPAALGFIAFAYSVKSRDKEDGWRREPGPKAYAFTAKVAEPSGPWILGIFIDQFCSSSSQCGRPGPAIGSGGIIGGQDALPVTVSTYFYLTIPLPAPKRQGALPLTLLSSTPPSITRPVPTASPASALILTRFLQMAQYVFMSAKQHTRQHNKLARPQTFHHTVAGQMLRRQR

SEQ ID NO: 1017573 - protein, 192 aa, Homo sapiens
IRLTARCGPALEDCDCAQDENCKSTKRAIEPCLPRTSGGGAGGPGAGGVMGCTEARRRCDRDSRCNLALSRYLTYCGKVFNGLRCTDECRTVIEDMLAMPKAALLNDCVCDGLERPICESVKENMARLCFGAELGNGPGSSGSDGGLDDYYDEDYDDEQRTGGAGGEQPLDDDDGVPHPPRPGSGAAASGGR

SEQ ID NO: 1017574 - protein, 174 aa, Homo sapiens
RKGLVSGGLYESHVGCRPYSIPPCEHHVNGSRPPCTGEGDTPKCSKICEPGYSPTYKQDKHYGYNSYSVSNSEKDIMAEIYKNGPVEGAFSVYSGLPALQVRSVPTRHRRDDGWPCHPHPGLGMWRMAHPTGWLPTPGTLTGVTMASLKYSVGSGSSVESDADSGGWNVTQPTQ

SEQ ID NO: 1017575 - protein, 204 aa, Homo sapiens
MKQRKQQATAIMKEVHGNDVDGMDLGKKVSIPRDIMLEELSHLSNRGARLFKMRQRRSDKYTFENFQYQSRAQINHSIAMQNGKVDGSNLEGGSQQAPLTPPNTPDPRSPPNPDNIAPGYSGPLKEIPPEKFNTTAVPKYYQSPWEQAISNDPELLEALYPKLFKPEGKAELPDYRSFNRVIQWSWVTLVACNTKIFSSMVQDN

SEQ ID NO: 1017576 - protein, 197 aa, Homo sapiens
MKQRKQQATAIMKEVHGNDVDGMDLGKKVSIPRDIMLEELSHLSNRGARLFKMRQRRSDKYTFENFQYQSRAQINHSIAMQNGKVDGSNLEGGSQQAPLTPPNTPDPRSPPNPDNIAPGYSGPLKEIPPEKFNTTAVPKYYQSPWEQAISNDPELLEALYPKLFKPEGKAELPDYRSFNRVATPFGGFEKASRMVKC

SEQ ID NO: 1017577 - protein, 175 aa, Homo sapiens
MDLGKKVSIPRDIMLEELSHLSNRGARLFKMRQRRSDKYTFENFQYQSRAQINHSIAMQNGKVDGSNLEGGSQQAPLTPPNTPDPRSPPNPDNIAPGYSGPLKEIPPEKFNTTAVPKYYQSPWEQAISNDPELLEALYPKLFKPEGKAELPDYRSFNRVATPFGGFEKASRMVKC

SEQ ID NO: 1017578 - protein, 186 aa, Homo sapiens
MKQRKQQATAIMKEVHGNDVDGMDLGKKVSIPRDIMLEELSHLSNRGARLFKMRQRRSDKYTFENFQYQSRAQINHSIAMQNGKVDGSNLEGGSQQAPLTPPNTPDPRSPPNPDNIAPGYSGPLKEIPPEKFNTTAVPKYYQSPWEQAISNDPELLEALYPKLFKPEGKAELPDYRSFNRVHTIGG

SEQ ID NO: 1017579 - protein, 102 aa, Homo sapiens
GSVSPPGYRQPPFSPAQPDPRSPPNPDNIAPGYSGPLKEIPPEKFNTTAVPKYYQSPWEQAISNDPELLEALYPKLFKPEGKAELPDYRSFNRVQDFIGGSK

SEQ ID NO: 1017580 - protein, 197 aa, Homo sapiens; identical to SEQ ID NO: 1017576

SEQ ID NO: 1017581 - protein, 216 aa, Homo sapiens
ALATLIHQVLEAPGVYVFGELLDMPNVRELAESDFASTFRLLTVFAYGTYADYLAEARNLPPLTEAQKNKLRHLSVVTLAAKVKCIPYAVLLGGIYALRNVRQLEDLVIEAVYADVLRGSLDQSQTKQASRFDYSIRADIQRQDLSAIARTLQEWCVGCEVVLSGIEEQVDRDQTQHKEQQLGLKQPDWRVRLPTLRKRPINSYDGSSSRSHISGP

SEQ ID NO: 1017582 - protein, 250 aa, Homo sapiens
MAVEGGMKCVKFLLYVLLLAFCACAVGLIAVGVGAQLVLSQTIIQAATPGSLLPVVIIAVGVFLFLVAFVGCCGGLARRTMCLMITFAIFLSLIMLVEVAAAMCWLCVRDKVMSEFNNNFRQQMENYPKKNHSASILDRMQADFKCCGAVTTQIGKKIPSMSKKPSPRLLLALNVTGGAVGFNFNEKAIHKEGLCGRRIGGWLRENVLVVSCSSPGIAFGEVLGMALAAASEEFQKWARGDVGVRSASAS

SEQ ID NO: 1017583 - protein, 251 aa, Homo sapiens
MAVEGGMKCVKFLLYVLLLAFCACAVGLIAVGVGAQLVLSQTIIQAATPGSLLPVVIIAVGVFLFLVAFVGCCGGLARRTMCLMITFAIFLSLIMLVEVAAAMCWLCVRDKVMSEFNNNFRQQMENYPKKNHSASILDRMQADFKCCGAVTTQIGKKIPSMSKNPSPRLLLALNVTGGAVGFNFNEKAIHKEGLWWQKNWGLAEGKCAGGKLQQALELLLARFWELALAAASEEFQKWARGDVGVRSASAS

SEQ ID NO: 1017584 - protein, 458 aa, Homo sapiens
SRAESHCPGASPARPRPTVCARKPLPVPCCSLLLLSCLLPPGGWPWPAEVKKPAAAAAPGTAEKLSPNGWPLLCLMLQLPGLAFSLYQAMANGPGSGEHPGVTLWCVASSAGARVAGLARRPRLSQAKAVAESCLMHAAADRCDVLHCLCLVAKLLAAHSATPLVLQTVTWKLVQPDLYGPSSVSFADDFVRSSKQHYNCEHSKINFRDKRSALQSINEWAAQTTDGKLAEVTKDVERTDGALLVNAMFFKPHWDEKFHHKMVDNRGFMVTRSYTVGVMMMHRTGLYNYYDDEKEKLQIVEMPLAHKLSSLIILMPHHVEPLERLEIAANQQSQLNASGWGRCMKKAVAISLPKGVVEVTHDLQKTLAGLGLTEAIDKNKADLSRIVMSLKDLYLASVFHATAFEFGLQMATPLTRTIYGREELRSPKLFYAEHPFIFLVLGTPKAAPLLFIGAPGPA

SEQ ID NO: 1017585 - protein, 207 aa, Homo sapiens
MGVLPKDNKTFQKGGNRKKRPQVANSARSPVGQQHVGYVCVWNPGDSLRTCQPVAHQIHCLGPQGQTRGKGRRLLIKAYPDIRGCSGSHQPIQYIGVIGLENKVFETSRKETSHSEQSSQGPPGHHKRPVAVVGARGLGVPFPKMLSGPVPRATMKEGMKGDHREVKMDAYRRAKHERQTGHKMGTNAHPVPWQTVGNRKLVEQNTR

SEQ ID NO: 1017586 - protein, 134 aa, Homo sapiens
  misc_feature (15)..(15): Xaa can be any naturally occurring amino acid
  misc_feature (32)..(32): Xaa can be any naturally occurring amino acid
  misc_feature (55)..(55): Xaa can be any naturally occurring amino acid
  misc_feature (72)..(72): Xaa can be any naturally occurring amino acid
  misc_feature (84)..(84): Xaa can be any naturally occurring amino acid
ELPEGLRRAMKDCAXQMQVLWPRSRTQSSCSXPAKDREPGPEAGAAADGEYLGPXGQEGEESSRNQLHMVEXGTWEVKEPVLSXAAQATPWNRCQVGKRVLGQLVPWPEQGPCSHTELFDLELIPDSQPLPHHL

SEQ ID NO: 1017587 - protein, 134 aa, Homo sapiens; identical to SEQ ID NO: 1017586
  misc_feature (15)..(15): Xaa can be any naturally occurring amino acid
  misc_feature (32)..(32): Xaa can be any naturally occurring amino acid
  misc_feature (55)..(55): Xaa can be any naturally occurring amino acid
  misc_feature (72)..(72): Xaa can be any naturally occurring amino acid
  misc_feature (84)..(84): Xaa can be any naturally occurring amino acid

SEQ ID NO: 1017588 - protein, 123 aa, Homo sapiens
  misc_feature (106)..(106): Xaa can be any naturally occurring amino acid
GARYRFGAAHGPVRARESPSGVGQVLRLCEERQLHLPSSSWLQHPDNNELDASDRFAKVRPLIIRMNCNFQKHAPLEEFYSFGESMCEYFGHRGSKQLHRGKPVDXGYKISVWDNQQRLLGVV

SEQ ID NO: 1017589 - protein, 175 aa, Homo sapiens
MPFLELDTNLPANRVPAGLEKRLCAAAASILGKPADRVNVTVRPGLALAHERVHRALRRSCPISSIGVVWNRRRKTEAQRPLSCEFLTQGSSALAKDRNTYPVFPLGSPWQIGKIGTVNDFFNDVGTGGIQAICELACFFQRDLFARVRPGDNQLWIIPDATFLVITLILFFILI

SEQ ID NO: 1017590 - protein, 269 aa, Homo sapiens
MGRRSSDTEEESRSKRKKKHRRRSSSSSSSDSRTYSRKKGGRKSRSKSRSWSRDLQPRSHSYDRRRRHRSSSSSSYGSRRKRSRSRSRGRGKSYRVQRSRSKSRTRRSRSRPRLRSHSRSSERSSHRRTRSRSRDRERRKGRRITRTRDQEKDTGKDRELHNIKRGESGKHQSWIRTFLPPVEQAKARLQLVLEAAAKADEALKAKKEMEEEGKEHRNGGRTRPPGCTRFTEFTQLELERESLVRDIRFSRSPSRDFAVTRTSLGASCV

SEQ ID NO: 1017591 - protein, 269 aa, Homo sapiens; identical to SEQ ID NO: 1017590

SEQ ID NO: 1017592 - protein, 269 aa, Homo sapiens; identical to SEQ ID NO: 1017590

SEQ ID NO: 1017593 - protein, 64 aa, Homo sapiens
  misc_feature (15)..(15): Xaa can be any naturally occurring amino acid
  misc_feature (28)..(28): Xaa can be any naturally occurring amino acid
PDGRSSSPAMAESDXDTVTVLRKKGPTXAQGKSKQAILAAQRRGEDVETSKKWAAGQNKQHFYY

SEQ ID NO: 1017594 - protein, 276 aa, Homo sapiens
WAPGEWTVRALPLGPGPWLRPRDGSCSPRAEPVSILDAPWSLKSEKSPYPPTPPCAHFGVDHGVLQVHDGSICPSRTPVSERSKNDDPESRVTEERSQGVTEHSSVRIPSWDPHIRRSGPASTSCHTTDTSVEMARERSKNVTSFIQPVRRIDAADGEVPQSWLTPTMMALRWPLSGRQGTVLRKCWYLRDDTSSEDCSRIKGFRVPFLSIIWLGTHHTARALSYNIELTNADRLLEIKDSDEAQYAVVHSADNKEWTPGKPGTGNSKTRKKKRDD

SEQ ID NO: 1017595 - protein, 79 aa, Homo sapiens
  misc_feature (14)..(14): Xaa can be any naturally occurring amino acid
  misc_feature (53)..(53): Xaa can be any naturally occurring amino acid
KFMHPVTKASAVIXYTTDLHLEKAVWRLHHCTHLVPEQLHSCPQPMPSSPVVXVKVFPPMKVIPLKFGRGDCTQKMRKH

SEQ ID NO: 1017596 - protein, 103 aa, Homo sapiens
ANTKVNWPMFPESFGNWGQDNELLEPLSGVLPANRNVPFKLKLHGIAKVLVKGQDTWPLTLNHEGYWEGSCSTAGCQEVYVMVLENANHNFYSYILKYKVNAQ

SEQ ID NO: 1017597 - protein, 83 aa, Homo sapiens
  misc_feature (73)..(73): Xaa can be any naturally occurring amino acid
MGSRTLLLLAALLLLLSGDGAVRWDTPATCTYLDLLGTWVFQVGSSGSQRDVPCSVMGPPEKNVVVYLQKLVXPMMTLAFLAF

SEQ ID NO: 1017598 - protein, 243 aa, Homo sapiens
AVGRAEAPEFPLPRSPFHPRSPTHARRPPASPPLSRRARCPAPRDRLPWAGWLLGPWKRELFTYGGVVAPSPRTESARPLARPARGSRRRFPRSISRRCGSRCRSPGRSDQTPAAAQSRGDSYLFDDPASQHAYAGRKPGSREKTGRPARMLARFRMKELDQQQKEVEERPEKDFTEKGSRNMPGLSAATLASLGGTSSRRGSGDTVHLHLSTEASIREIKDSLAEVEEKYKKAMVSNASVRQ

SEQ ID NO: 1017599 - protein, 117 aa, Homo sapiens
QARQEPTGNAHHGGSLLHMFFVYPINLVHFRYFDIILASLIPRVETVSGAVVYAVGLQLFASSPTVFVWCQHEAELCAPYRVALDSEMSALTQRGAQLNVFTLWVTCFRTFGFAGHV

SEQ ID NO: 1017600 - protein, 1698 aa, Homo sapiens
GSGTAVAEMEAEVWEAEGYNLVLDSDLYDADGYDVPDPGLLTEKNELTFTEPSQVLPFLTSSQQWQSLTPRARARRLWLLLRTSLHEVVEKEKRAELRAARLTHGLEPLRRLEVAAGLRSVAQDPVGGRFVVLDGAGRLHLHKEDGWAQETLLAPVGLTGLVTVLGPLGAVGRFVGWGPAGLAILRPNLSLLWLSEQGVGRAPGWAPTCCLPVPDLRLLLVAEMNSSLALWQFRSGGRRLVLRGSALHPPPSPTGRLMRLAVAPVPPHHVLRCFAAYGSAVLTFDLHAWTLVDVRRDLHKTTISDLAYCEEVEAMVTASRDSTVKVWEADWQIRMVFVGHTGPVTAMTVLPNTTLVLSASQDGTLRTWDLQAAAQVGEVALGFWGQDKLSRRVGRLLAPVRPGWPVLSLCASSMQLWRVRELYSPLAQLPAKVLHVQLAPALPAPAHQSLPTRLVCACADGSVYLLSAATGRIVSSLLLEPEDCAAAVAYCLPREALWLLTRAGHLVRANAARCPMSVLHRVCPPPPPAPQPCCLHLYSHLTDLGGAFSSWEIVRQHWGELRCSSVACAWKNKNRYLPVVGHTDGTLSVLEWLSSKTVFQTEAHSPGPVVAIASTWNSIVSSGGDLTVKMWRVFPYAEESLSLLRTFSCCYPAVALCALGRRVTAGFEDPDSATYGLVQFGLGDSPRLDHRPQDDPTDHITGLCCCPTLKLYACSSLDCTVRIWTAENRLLRLLQLNGAPQALAFCSNSGDLVLALGSRLCLVSHRLYLPTSYLVKKMCRKAPDVVDDPPLPLMSQESLTSAQLQRLTNLHGAASLRSHGGLLSPPGGPPFLTLGGGLAVWGPLELIQACLSPGTPVWGWSLSQPLPQPTGMPPSIPPVPVPVCSEALSLIHRRRATSQHLVPKEDLDAIVARDRDLQQLRLGLVVPAAQPPPSWQQRQEGFDNYLRLIYGSGLLGMQSGRGSQQWSAGTLRVERETRDVCAVPQAAHCLARAEVSTAAQTVPTALSPQDLGALGQHFSQSPRVTVPIPPTHRRVHSKASQLLARSSLSHYLGISLDLQLQLEQLRGRTTMALDLPSSHLQCRIPLLPKRWDKEPLSSLRGFFPATVQPHKHCLRPICFPGYVPNSAVLQQMWLNAEPGASQDALWLWRPRPSQAQWQRKLLQWMGEKPGEEGEEDKKEEEEEKEDEELDWALASLSPHSNQQLDSWELEDQSAVDWTQEPRRRSCKVARTHPHPWHRHGSLLLDEHYGHLPKFLHFFIYQTWFKKLFPIFSLQAYPEAGTIEGLASLLVALLEKTTWVDRVHILQVLLRLLPNMSSDLQGQLQGLLVHLLNLDQPPSLQDQTQKKFVILALQLLLACSLESRDVVLELMSYFLYSPVHCRPELKKLLHGLGLQDPEGFLFKEMMTWVQGPDLDSKAGLRTCCHQKLEDMIQELQETPPQTSVVSGAPTRASVIPSGTSWSASGIFGRLSQVSEVPLMVVSPAEPHSLAPELQAQRMLAPTRSWGTPQLRLRVLSETLKSFCLEPEARLHPAGPAQLPGEPPPLEETDWSHSQLLDLGPIDALNFFCEQLRAQQRSSLQEKAAHPHPPVPYTVAPVPDMVVPPPREHWYHPILRLQEAKPQRSARSAMRLRGPMPSRLCAGRTLDGPIRTLKLPLPRVEPQPFPLDWPMPPRPLPPRLLQPALQRYFLPADADPDTYS

SEQ ID NO: 1017601 - protein, 2086 aa, Homo sapiens
GSGTAVAEMEAEVWEAEGYNLVLDSDLYDADGYDVPDPGLLTEKNELTFTEPSQVLPFLTSSQQWQSLTPRARARRLWLLLRTSLHEVVEKEKRAELRAARLTHGLEPLRRLEVAAGLRSVAQDPVGGRFVVLDGAGRLHLHKEDGWAQETLLAPVGLTGLVTVLGPLGAVGRFVGWGPAGLAILRPNLSLLWLSEQGVGRAPGWAPTCCLPVPDLRLLLVAEMNSSLALWQFRSGGRRLVLRGSALHPPPSPTGRLMRLAVAPVPPHHVLRCFAAYGSAVLTFDLHAWTLVDVRRDLHKTTISDLAYCEEVEAMVTASRDSTVKVWEADWQIRMVFVGHTGPVTAMTVLPNTTLVLSASQDGTLRTWDLQAAAQVGEVALGFWGQDKLSRRVGRLLAPVRPGWPVLSLCASSMQLWRVRELYSPLAQLPAKVLHVQLAPALPAPAHQSLPTRLVCACADGSVYLLSAATGRIVSSLLLEPEDCAAAVAYCLPREALWLLTRAGHLVRANAARCPMSVLHRVCPPPPPAPQPCCLHLYSHLTDLGGAFSSWEIVRQHWGELRCSSVACAWKNKNRYLPVVGHTDGTLSVLEWLSSKTVFQTEAHSPGPVVAIASTWNSIVSSGGDLTVKMWRVFPYAEESLSLLRTFSCCYPAVALCALGRRVTAGFEDPDSATYGLVQFGLGDSPRLDHRPQDDPTDHITGLCCCPTLKLYACSSLDCTVRIWTAENRLLRLLQLNGAPQALAFCSNSGDLVLALGSRLCLVSHRLYLPTSYLVKKMCRKAPDVVDDPPLPLMSQESLTSAQLQRLTNLHGAASLRSHGGLLSPPGGPPFLTLGGGLAVWGPLELIQACLSPGTPVWGWSLSQPLPQPTGMPPSIPPVPVPVCSEALSLIHRRRATSQHLVPKEDLDAIVARDRDLQQLRLGLVVPAAQPPPSWQQRQEGFDNYLRLIYGSGLLGMQSGRGSQQWSAGTLRVERETRDVCAVPQAAHCLARAEVSTAAQTVPTALSPQDLGALGQHFSQSPRVTVPIPPTHRRVHSKASQLLARSSLSHYLGISLDLQLQLEQLRGRTTMALDLPSSHLQCRIPLLPKRWDKEPLSSLRGFFPATVQPHKVRPPPSSWRATPLQASLLCLPSPLCYKSLCPNLTQGPCPPTTRGPGCSLPRTPHPSPFTLCLALFQYSCVCGHRLLAALGADIRQSQSPQPVMPHTPFPRGGAGRAGPLGTFPGRSESLPFRGAKSREPGPLESTVFPPSRTPGAQAGLSPSPSIFLALSPAHVGIDSLGLGATIMLFIALSPSSFLSSLAPVLLLDFLVPGLGPSPVRSLQGVRAPTSQHFSRFPFSFVRADAQLRASPLVSQGSPAICVESRGCQLSQLSEAWQAELDWRLRGSEEVIQVTKGGVQAGGIQVLSIPCCAHLQHCLRPICFPGYVPNSAVLQQMWLNAEVSSLGSPTQLASQRKLEARGRAGGFAGGEGSAVLATHQAPSLAPLQPGASQDALWLWRPRPSQAQWQRKLLQWMGEKPGEEGEEDKKEEEEEKEDEELDWALASLSPHSNQQLDSWELEDQSAVDWTQEPRRRSCKVARTHPHPWHRHGSLLLDEHYGHLPKFLHFFIYQTWFKKLFPIFSLQVGGNWGCMRSMGWVRDRGEGRGWLGCDMGAGPQHATLQAYPEAGTIEGLASLLVALLEKTTWVDRVHILQVLLRLLPNMSSDLQGQLQGLLVHLLNLDQPPSLQDQTQKKFVILALQLLLACSLESRDVVLELMSYFLYSPVHCRPELKKLLHGLGLQDPEGFLFKEMMTWVQGPDLDSKAGLRTCCHQKLEDMIQELQETPPQTSVVSGAPTRASVIPSGTSWSASGIFGRLSQVSEVPLMVVSPAEPHSLAPELQAQRMLAPTRSWGTPQLRLRVLSETLKSFCLEPEARLHPAGPAQLPGEPPPLEETDWSHSQLLDLGPIDALNFFCEQLRAQQRSSLQEKAAHPHPPVPYTVAPVPDMVVPPPREHWYHPILRLQEAKPQRSARSAMRLRGPMPSRLCAGRTLDGPIRTLKLPLPRVEPQPFPLDWPMPPRPLPPRLLQPALQRYFLPADADPDTYS

SEQ ID NO: 1017602 - protein, 95 aa, Homo sapiens
RKSSMCRFYEMKPDRDVNLTHQLNPKVKSFSQFISENQGAFKGMKKISCSDRPLHHTASFLSDPFPLYGTTFMLTEHAGMQLFATPKNFLRSPLQ

SEQ ID NO: 1017603 - protein, 168 aa, Homo sapiens
MAEPSIAWSHRCRPRGRLCLLTIVWPDSPHPEDRRGKDTTSSSSADSTIMDIQSRHEPQMQSTQNSSPPLQTQPGLLMKHHNPRPRTQQLEREPDWALLVDRIPRDNTKSTKSKFIPLMAPEVSERPIPSTRRQTRTPDLSIWFSMRMAFFFGGTPSGRGVASGCIKV

SEQ ID NO: 1017604 - protein, 271 aa, Homo sapiens
PRVAHASVVIKFVDALQERGFRDPCHRFFDKVFTSVKLMSILRKKGVKATGTVREYRTERCPLKDPKELKKMKRGSFDYKVDESEEIIVCRWHDSSVVNICSNAVGIEPVRLTSRHSGAAKTRTQVHQPSLVKLYQEKVGGVGRMDQNIAKYKVKIRGMKWYSSFIGYVIDAALNNAWQLHRICCQDAQVDLLAFRRYIACVYLESNADTTSQGRRSRRLETESRFDMIGHWIIHQDKRTRCALCHSQTNTRCEKCQKGVHAKCFREYHIR

SEQ ID NO: 1017605 - protein, 269 aa, Homo sapiens
  misc_feature (18)..(20): Xaa can be any naturally occurring amino acid
  misc_feature (23)..(23): Xaa can be any naturally occurring amino acid
  misc_feature (25)..(28): Xaa can be any naturally occurring amino acid
  misc_feature (41)..(41): Xaa can be any naturally occurring amino acid
  misc_feature (44)..(44): Xaa can be any naturally occurring amino acid
  misc_feature (48)..(48): Xaa can be any naturally occurring amino acid
MRETLRDFFFFFEFAFLXXXCLXHXXXXFFIEFFSFFEPFXLLXFLLXAWLLFLLPPPPTVFPLLFTYLLLSFPNRIMFEGPGLLEAASFFFGFCFACGFLAGSGASMGSWKFLRDLPRVPGPPTLHLLPHRPHLHVPAGPQILASFPPPGVCMVGSPGWRGLFDAGLLLRAGGGAGLFPQGARAVPSWWVMAAFKRVVSTVLRSRQGCRFSTSPSAPGPLPVPALHPLCLGHGVSALPAFLPSPLFFPAPCTFGVLPPGCELLGAGPQ

SEQ ID NO: 1017606 - protein, 282 aa, Homo sapiens
  misc_feature (26)..(26): Xaa can be any naturally occurring amino acid
  misc_feature (36)..(36): Xaa can be any naturally occurring amino acid
  misc_feature (42)..(42): Xaa can be any naturally occurring amino acid
  misc_feature (44)..(44): Xaa can be any naturally occurring amino acid
  misc_feature (51)..(51): Xaa can be any naturally occurring amino acid
  misc_feature (59)..(59): Xaa can be any naturally occurring amino acid
APARCCPAAPLCQALDMYRGFSVVVXGPISPPSSCXMTPTHXLXKGVLVVXRVCVSLLXSPPGCSFSCPLPPLCSRLLFTYLLLSFPNRIMFEGPGLLEAASFFFGFCFACGFLAGSGASMGSWKFLRDLPRVPGPPTLHLLPHRPHLHVPAGPQIPASFPPPGVCMVGSPGWRGLFDAGLLLRAGGGAGLFPQGARAVPSWWVMAAFKRVVSTVLRSRQGCRFSTSPSAPGPLPVPALHPLCLGHGVSALPAFLPSPLFFPAPCTFGVLPPGCELLGAGPQ

SEQ ID NO: 1017607 - protein, 145 aa, Homo sapiens
  misc_feature (27)..(27): Xaa can be any naturally occurring amino acid
  misc_feature (38)..(38): Xaa can be any naturally occurring amino acid
  misc_feature (49)..(49): Xaa can be any naturally occurring amino acid
PRAPEPPRHEARRPPGDLRGPVLQLRXAFLSGLGKPVXSLSLRWSRRRXRRRDPGNPLGTLNPLKLLLSSLGIPVNHLIEGSQKCVAELGPQGRGGRRSLETALAGGLDSVWLSRRLEASTPGGQDAAHPRGLENPAAGKDRPSP

SEQ ID NO: 1017608 - protein, 259 aa, Homo sapiens
SPHDNKSWEMFEEMITTAEEFYQSLGIPYHIVNIVSGSLNHAASKKLDLEAWFPGSGAFRELVSCSNCTDYQARRLRIRYGQTKKMMDKVEFVHMLNAYHVRHYPYHLQPSWRYYQTEKGITVPEKLKEFMPARPDKNLIPFVKPAPIEPVSQSKKAEESNMRAAKKKAASKRRSPLEKQAGRNNGRIHTTAFETFHWTPLFGQAFISVLREMIRALPKQQGKPKHPFIPLPPIWAGVGEEGKKCPCTTTDVPVYSAWA

SEQ ID NO: 1017609 - protein, 180 aa, Homo sapiens
  misc_feature (177)..(177): Xaa can be any naturally occurring amino acid
MAVQFDGGVVLGADSRTTTGSYIANRVTDKLTPIHDRIFCCRSGSAADTQAVADAVTYQLGFHSIELNEPPLVNTAASLFKEMCYRYREDLMAGIIISELVTLKKEGQVYSSGLMGGMMVRQFFAIGGSGSSYIYGYVDATYREGMTKEECLQFTANALALAMERDGSSGGVIRLAXIAE

SEQ ID NO: 1017610 - protein, 226 aa, Homo sapiens
ASDPGGLEPAGRVVASERLVVDCGSGEVGAEIIVCRFSCAGVGNPPGQWNCGRSSSFRVQPAWARGAGPDDTLRSPFLPGYVDCGAGLLWPQRRAEVECVPAEVASQCRERGGGRAMSRVLQESDAPKLYTQGWPLGWVKIPCLYPRFHTLVWVTGCRMNCRSRGAGGSGCEGAGMCEEAMLAVLHTVLLQPDTGKFHYKEVRATYSIGTVGQPRIVDCDFIDSLM

SEQ ID NO: 1017611 - protein, 239 aa, Homo sapiens
  misc_feature (5)..(5): Xaa can be any naturally occurring amino acid
NFGHXKENLITFPRIQPISKDDFRRYRGAIARKRIRLGRKYVISHKEEVPLCIHWDISKQIKIYTLEEHDVLSVWVEKHVGSPAHLAYRLLSDFTKRPLWDPHFVSCEVIDWVSEDDQLYHITCPILNDDKPKDLVVLVSRRKPLKDGNTYTVAVKSVILPSVPPSPQYIRSEIICAGFLIHAIDSNSCIVSYFNHMSASILPYFAGNLGGWSKSIEETAASCIQFLENPPDDGFVSTF

SEQ ID NO: 1017612 - protein, 277 aa, Homo sapiens
  misc_feature (5)..(5): Xaa can be any naturally occurring amino acid
NFGHXKENLITFPRIQPISKDDFRRYRGAIARKRIRLGRKYVISHKEEVPLCIHWDISKQASLSDSNVEALKKLAAKRGWEVTSTVEKIKIYTLEEHDVLSVWVEKHVGSPAHLAYRLLSDFTKRPLWDPHFVSCEVIDWVSEDDQLYHITCPILNDDKPKDLVVLVSRRKPLKDGNTYTVAVKSVILPSVPPSPQYIRSEIICAGFLIHAIDSNSCIVSLMKHLQINWLCQIAKNLLIYPDVLINCNLVICVHTMGILRSSFRIIYSRRSPRRLGS

SEQ ID NO: 1017613 - protein, 267 aa, Homo sapiens
  misc_feature (5)..(5): Xaa can be any naturally occurring amino acid
NFGHXKENLITFPRIQPISKDDFRRYRGAIARKRIRLGRKYVISHKEEVPLCIHWDISKQASLSDSNVEALKKLAAKRGWEVTSTVEKIKIYTLEEHDVLSVWVEKHVGSPAHLAYRLLSDFTKRPLWDPHFVSCEVIDWVSEDDQLYHITCPILNDDKPKDLVVLVSRRKPLKDGNTYTVAVKSVILPSVPPSPQYIRSEIICAGFLIHAIDSNSCIVSYFNHMSASILPYFAGNLGGWSKSIEETAASCIQFLENPPDDGFVSTF

SEQ ID NO: 1017614 - protein, 119 aa, Homo sapiens
LLTHNLLSSHVRGVGYRGYPLRLQATKVRICPVEFNPNFVARMIPKVEWPVFLEAADNLRLIQVPKGPVEGYEENEEFLRTMHHLLLEVEDIKGTLQVPGILDEYVPIKPRESQTMLLK

SEQ ID NO: 1017615 - protein, 119 aa, Homo sapiens
LLTHNLLSSHVRGVGYRGYPLRLQATKVRICPVEFNPNFVARMIPKVEWPVFLEAADNLRLIQVPKGPVEGYEENEEFLRTMHHLLLEVEDIKGTLQRPEYGPMLPIRPGILNMLVSEE

SEQ ID NO: 1017616 - protein, 322 aa, Homo sapiens
  misc_feature (264)..(264): Xaa can be any naturally occurring amino acid
MLVLSPLDPLKLQGTIPFSLGESFGSRWDTECCRGGTGQGRGGSEHKHRLRHSSKHHVHYFEDTGATEPGVEVGVARSIRPSESMMRRVRNSQEPKPSHLTCSLGGRWMRSTEARSRLHAALRPAVPLSSSDLFGDMDGAHRRQEVYLWGTCCLQRTLPSLSRVVKSGAGKMAVLANGVMNSLLRIAYRVPTDPSSVTHALLLGDGNRERPHGSQSLGTAIALWKLGRICYFGSVWCVCGVAFEALTRCDGVMVTYQALVLCLXWLSPFIARLDIHTLSVIVEDFLGPSVHAPHSVLLTYRCHTGKGGSPTMCLFWVQTFPR

SEQ ID NO: 1017617 - protein, 121 aa, Homo sapiens
  misc_feature (4)..(4): Xaa can be any naturally occurring amino acid
  misc_feature (6)..(6): Xaa can be any naturally occurring amino acid
IGTXPXKTLPDVSSPAWAKSSLAPRLGPACGQGQVFPPPGKPLPSSCPVVRRPPAVTLRVASGAKSDPPDTITRRPSSTCTHPHLPQQPLPAALAKISARPGPVAHTCNPSTLGGQGRHIT

SEQ ID NO: 1017618 - protein, 121 aa, Homo sapiens; identical to SEQ ID NO: 1017617
  misc_feature (4)..(4): Xaa can be any naturally occurring amino acid
  misc_feature (6)..(6): Xaa can be any naturally occurring amino acid

SEQ ID NO: 1017619 - protein, 73 aa, Homo sapiens
AEDGGGWGWPSEAGGIGSAAAEPPACPPGELSAPARLYHKKVVDHYENPRNVGSLDKTSKNVGTGLLGAPCMW

SEQ ID NO: 1017620 - protein, 146 aa, Homo sapiens
GGSAVRRSFAERLCLAAVMKRHSRLQEAGSSLYRDLLRAGRGKPGQRRECWAEFRQHAGLPRSDVLRIEYLYRRGRRQLQLLRSGHATAMGAFVRPRAPTGEPGGVGSQPDDGDSPGKPPGQHGGHRRPGPKDGDRRKKRIRSMAC

SEQ ID NO: 1017621 - protein, 199 aa, Homo sapiens
MLAYSSVHCFREDKMKFTIVFAGLLGVFLAPALANYNINVNDDNNNAGSGQQSVSVNNEHNVANVDNNNGWDSWNSIWDYGNGFAATRLFQKKTCIVHKMNKEVMPSIQSLDALVKEKKLQGKGPGGPPPKGLMYSVNPNKVDDLSKFGKNIANMCRGIPTYMAEEMQEASLFFYSGTCYTTSVLWIVDISFCGDTVEN

SEQ ID NO: 1017622 - protein, 112 aa, Homo sapiens
DEAGAEVRCGGHPSVELPGYAPSDPDLNASYPYCCLAALRDAAALGDPSGLLIPRAGPPSRGPRLRSTHPAPLRTPAAREDGQRGGVQARPQGRRLFHVALQPPAWPPLRAP

SEQ ID NO: 1017623 - protein, 116 aa, Homo sapiens
MAEGGIPEADSIRAEMSRSVALAVLALLSLSGLEAIQRTPKIQVYSRHPAENGKSNFLNCYVSGFHPSDIEVDLLKNGERIEKVEHSDLSFSKDWSFYLLYYTEFTPTEVKWDRDM

SEQ ID NO: 1017624 - protein, 116 aa, Homo sapiens
MAEGGIPEADSIRAEMSRSVALAVLALLSLSGLEAIQRTPKIQVYSRHPAENGKSNFLNCYVSGFHPSDIEVDLLKNGERIEKVEHSDLSFSKDWSFYLLYYTEFTPTEKMSMPAE

SEQ ID NO: 1017625 - protein, 140 aa, Homo sapiens
MAEGGIPEADSIRAEMSRSVALAVLALLSLSGLEAIQRTPKIQVYSRHPAENGKSNFLNCYVSGFHPSDIEVDLLKNGERIEKVEHSDLSFSKDWSFYLLYYTEFTPTDRQMTYCLARVATNVNFCSQGPKHSQRGDRRT

SEQ ID NO: 1017626 - protein, 202 aa, Homo sapiens
MAEGGIPEADSIRAEMSRSVALAVLALLSLSGLEAIQRTPKIQVYSRHPAENGKSNFLNCYVSGFHPSDIEVDLLKNGERIEKVEHSDLSFSKDWSFYLLYYTEFTPTDTDNLHCSWELVFLFETGLVPSAWGSSRGPAGWPRPCGVFAAAGEWPCVRRLRRTEVRSRCPGLLYRARSPAHGFCCLACFGLSRTVFVRHCCP

SEQ ID NO: 1017627 - protein, 111 aa, Homo sapiens
MAEGGIPEADSIRAEMSRSVALAVLALLSLSGLEAIQRTPKIQVYSRHPAENGKSNFLNCYVSGFHPSDIEVDLLKNGERIEKVEHSDLSFSKDWSFYLLYYTEFTPTEKR

SEQ ID NO: 1017628 - protein, 149 aa, Homo sapiens
MAVGGIPEADSIRAEMSRSVALAVLALLSLSGLEAIQRTPKIQVYSRHPAENGKSNFLNCYVSGFHPSDIEVDLLKNGERIEKVEHSDLSFSKDWSFYLLYYTEFTPTECSTRDRKTSLNAPLKKDEYACRVNHVTLSQPKIVKWDRDM

SEQ ID NO: 1017629 - protein, 111 aa, Homo sapiens; identical to SEQ ID NO: 1017627

SEQ ID NO: 1017630 - protein, 177 aa, Homo sapiens
MAEGGIPEADSIRAEMSRSVALAVLALLSLSGLEAIQRTPKIQVYSRHPAENGKSNFLNCYVSGFHPSDIEVDLLKNGERIEKVEHSDLSFSKDWSFYLLYYTEFTPTDTHRHARRVHHGASHPPPPRLASSPRPPPPSSPRGPPPHPNLRRPPPAPLPPPPPPPSDLPPGQPNLPP

SEQ ID NO: 1017631 - protein, 786 aa, Homo sapiens
MTSIFHFAIIFMLILQIRIQLSEESEFLVDRSKNGLIHVPKDLSQKTTILNISQNYISELWTSDILSLSKLRILIISHNRIQYLDISVFKFNQELEYLDLSHNKLVKISCHPTVNLKHLDLSFNAFDALPICKEFGNMSQLKFLGLSTTHLEKSSVLPIAHLNISKVLLVLGETYGEKEDPEGLQDFNTESLHIVFPTNKEFHFILDVSVKTVANLELSNIKCVLEDNKCSYFLSILAKLQTNPKLSSLTLNNIETTWNSFIRILQLVWHTTVWYFSISNVKLQGQLDFRDFDYSGTSLKALSIHQVVSDVFGFPQSYIYEIFSNMNIKNFTVSGTRMVHMLCPSKISPFLHLDFSNNLLTDTVFENCGHLTELETLILQMNQLKELSKIAEMTTQMKSLQQLDISQNSVSYDEKKGDCSWTKSLLSLNMSSNILTDTIFRCLPPRIKVLDLHSNKIKSIPKQVVKLEALQELNVAFNSLTDLPGCGSFSSLSVLIIDHNSVSHPSADFFQSCQKMRSIKAGDNPFQCTCELGEFVKNIDQVSSEVLEGWPDSYKCDYPESYRGTLLKDFHMSELSCNITLLIVTIVATMLVLAVTVTSLCIYLDLPWYLRMVCQWTQTRRRARNIPLEELQRNLQFHAFISYSGHDSFWVKNELLPNLEKEGMQICLHERNFVPGKSIVENIITCIEKSYKSIFVLSPNFVQSEWCHYELYFAHHNLFHEGSNSLILILLEPIPQYSIPSSYHKLKSLMARRTYLEWPKEKSKRGLFWANLRAAINIKLTEQAKK

SEQ ID NO: 1017632 - protein, 786 aa, Homo sapiens
MTSIFHFAIIFMLILQIRIQLSEESEFLVDRSKNGLIHVPKDLSQKTTILNISQNYISELWTSDILSLSKLRILIISHNTIQYLDISVFKFNQELEYLDLSHNKLVKISCHPTVNLKHLDLSFNAFDALPICKEFGNMSQLKFLGLSTTHLEKSSVLPIAHLNISKVLLVLGETYGEKEDPEGLQDFNTESLHIVFPTNKEFHFILDVSVKTVANLELSNIKCVLEDNKCSYFLSILAKLQTNPKLSNLTLNNIETTWNSFIRILQLVWHTTVWYFSISNVKLQGQLDFRDFDYSGTSLKALSIHQVVSDVFGFPQSYIYEIFSNMNIKNFTVSGTRMVHMLCPSKISPFLHLDFSNNLLTDTVFENCGHLTELETLILQMNQLKELSKIAEMTTQMKSLQQLDISQNSVSYDEKKGDCSWTKSLLSLNMSSNILTDTIFRCLPPRIKVLDLHSNKIKSIPKQVVKLEALQELNVAFNSLTDLPGCGSFSSLSVLIIDHNSVSHPSADFFQSCQKMRSIKAGDNPFQCTCELGEFVKNIDQVSSEVLEGWPDSYKCDYPESYRGTLLKDFHMSELSCNITLLIVTIVATMLVLAVTVTSLCSYLDLPWYLRMVCQWTQTRRRARNIPLEELQRNLQFHAFISYSGHDSFWVKNELLPNLEKEGMQICLHERNFVPGKSIVENIITCIEKSYKSIFVLSPNFVQSEWCHYELYFAHHNLFHEGSNSLILILLEPIPQYSIPSSYHKLKSLMARRTYLEWPKEKSKRGLFWANLRAAINIKLTEQAKK

SEQ ID NO: 1017633 - protein, 195 aa, Homo sapiens
MAQVLRGTVTDFPGFDERADAETLRKAMKGLGTDEESILTLLTSRSNAQRQEISAAFKTLFGRDLLDDLKSELTGKFEKLIVALMKPSRLYDAYELKHALKGAGTNEKVLTEIIASRTPEELRAINTVYEEDYGSSLEDDVVGDTSGYYQPHVGGFSFRLTENLMLEMNEAQVEQYDQALFQAGVIKWGTDEEKS

SEQ ID NO: 1017634 - protein, 151 aa, Homo sapiens
TDRSTGKANKITITNDKGRLSKEEVERMVHEAEQYKAEDEAQRDRVAAKNSLEAHVFHVKGSLQEESLRDKIPEEDRRKMQDKCREVLAWLEHNQLAEKEEYEHQKRELEQICRPIFSRLYGGPGVPGGSSCGTQARQGDPSTGPIIDEGD

SEQ ID NO: 1017635 - protein, 165 aa, Homo sapiens
IEGKSWSGEFFTCNWKMKYVTFEDEEQANLIYGNSRFTDLHSIIRNIQSCKEVKGRTAFNGVSFNLLQFVQLLETFVGEDAPLSVSETLTSFFKEGYVETEQEKMNALEQFSQNAFQVRQRLLLEAIFQKWDSDGSGFLDLKEVDELLYTYKEGMEKESMKKGKI

SEQ ID NO: 1017636 - protein, 43 aa, Homo sapiens
MARFPGAWFGSFKLGFEGPRLFHHTGPIEEACSGLLDPLVEGL

SEQ ID NO: 1017637 - protein, 281 aa, Homo sapiens
AACVLRPPLFRRRLGGDPGCQAPSCAQMDGTETRQRRLDSCGKPGELGLPHPLSTGGLPVASEDGALRAPESQSVTPKPLETEPSRETAWSIGLQVTVPFMFAGLGLSWAGMLLDYFQHWPVFVEVKDLLTLVPPLVGLKGNLEMTLASRLSTAANTGQIDDPQEQHRVISSNLALIQVQATRSVGASLACLGGLRPAVGRGCLRRRDRGLVRPRGGSLASCCQPCCSLNVALPYGKPLCPLGVAEWACIRAIGARKPRGSTQKPLPRPIGRPPGTPSFPL

SEQ ID NO: 1017638 - protein, 252 aa, Homo sapiens
  misc_feature (218)..(218): Xaa can be any naturally occurring amino acid
  misc_feature (231)..(232): Xaa can be any naturally occurring amino acid
  misc_feature (239)..(239): Xaa can be any naturally occurring amino acid
AACVLRPPLFRRRLGGDPGCQAPSCAQMDGTETRQRRLDSCGKPGELGLPHPLSTGGLPVASEDGALRAPESQSVTPKPLETEPSRETAWSIGLQVTVPFMFAGLGLSWAGMLLDYFQANTGQIDDPQEQHRVISSNLALIQVQATVVGLLAAVAALLLGVVSREEVDVATGGTLLCASSVLTAFLAAFALGVLMVWYSDWCFKSSGFNQYNMATPIXASLGDLITLSILXXVSSFFYXHKDSRYLTPLVCL

SEQ ID NO: 1017639 - protein, 288 aa, Homo sapiens
  misc_feature (254)..(254): Xaa can be any naturally occurring amino acid
  misc_feature (267)..(268): Xaa can be any naturally occurring amino acid
  misc_feature (275)..(275): Xaa can be any naturally occurring amino acid
AACVLRPPLFRRRLGGDPGCQAPSCAQMDGTETRQRRLDSCGKPGELGLPHPLSTGGLPVASEDGALRAPESQSVTPKPLETEPSRETAWSIGLQVTVPFMFAGLGLSWAGMLLDYFQHWPVFVEVKDLLTLVPPLVGLKGNLEMTLASRLSTAANTGQIDDPQEQHRVISSNLALIQVQATVVGLLAAVAALLLGVVSREDVDVATGGTLLCASSVLTAFLAAFALGVLMVWYSDWCFKSSGFNQYNMATPIXASLGDLITLSILXXVSSFFYXHKDSRYLTPLVCL

SEQ ID NO: 1017640 - protein, 141 aa, Homo sapiens
MYNVSPAKGGAKCCVSSCFFPFPGTLCPSVRGTRACCCQEWGHRVDANAPGACLVCVASQMVEGAGSWQGPSRQSQPLPAAPNRLSNKTGEGVGEPASQRAVPAGNPCDIRTSSSVTCVCVCAQVSEEDSGRPNPFDLEYS

SEQ ID NO: 1017641 - protein, 235 aa, Homo sapiens
MLEPWSSFSVTSVPALLDSVAVYVIWPPSLTALGAVSVTVVVLSVPGVSVTVVFTAVVPGTRFSKCSPPVTPLIAVVTVWSPLYTSSGAITETLTARLVYADGDGFAVIEGDGQRVGDVGHRRAVLIHKAGGVNDVAAFTHGSGGGQNYIHLVDGVVDRGGCAVACHFQFFEVAAEASVILTVCVLLSMNTSSVGAGTVTVPTVSPALIVIDEPLSNFNVTSFPALLVMARKRST

SEQ ID NO: 1017642 - protein, 107 aa, Homo sapiens
  misc_feature (17)..(17): Xaa can be any naturally occurring amino acid
MAETEALSKLREDFRMXNKSVFILGATEETGRVLLKEILEQGLFSKVTLMGRRKLTFDEEAYKNVKSQKWWTLKKVDDYASAFQGHDVDSCCLGTTRGKAGAEGLSV

SEQ ID NO: 1017643 - protein, 71 aa, Homo sapiens
PYIFIPSSITRAVKRENYFATSRFVAKIAAIFQLLDKNVTVSSHRLELLSPARDAAIAREAILHGADAVYI

SEQ ID NO: 1017644 - protein, 74 aa, Homo sapiens
  misc_feature (4)..(4): Xaa can be any naturally occurring amino acid
FWTXDRLTLADCSFLPKLHIVDTVWAHFRQGPIPAELRGVRRYLDSALQEKKFKNTCPHSAEILAAYRPPVHPR

SEQ ID NO: 1017645 - protein, 70 aa, Homo sapiens
  misc_feature (16)..(16): Xaa can be any naturally occurring amino acid
  misc_feature (60)..(60): Xaa can be any naturally occurring amino acid
  misc_feature (64)..(64): Xaa can be any naturally occurring amino acid
PSPSRGAVKQPQRGQXGPRIPQHDARAVKGSRRRGDAHGFLGGVVFSTSALRDRLEARAXAVSXLRQPFH

SEQ ID NO: 1017646 - protein, 115 aa, Homo sapiens
EIGGDWPVVLHVGGGAFGFGREWLKDSWCRFGFSGRIPRSQPFPMADPEELQVSSPPPPPPSSPSSSDASAASSPGGPVSLGWPVPSRSSGPTVDQLEEVELHDRRRSLFINQTS

SEQ ID NO: 1017647 - protein, 105 aa, Homo sapiens
HFHCQCDPGYAPPDCEPAMSSPGGSINDGFWLTVEKSVPLLPKRRAAPKNNGLLISFYIFSPLLILIAIVSLKWNKMKRFWSKVGTVSSRSISEDSSSNSSQSQS

SEQ ID NO: 1017648 - protein, 196 aa, Homo sapiens
MDKAMYAYMGSTVAVAVEKVFQIFGLINTMFSQLNMTVMLSSLEIWSDHNKISTSGHADEILQRFLPWKTKFLFQRSPDMTYLLIYRNHSTYVGATYHGMACDPKFATGIALYPKKITAEAFSVVMAQLLGINLGLTYDDIYNCYCPGTTCIMNPDAIRSHGLKWNKMKRFWSKVGTVSSRSISEDSSSNSSQSQS

SEQ ID NO: 1017649 - protein, 358 aa, Homo sapiens
MWQLWASLCCLLVLANARSRPSFHPLSDELVNYVNKRNTTWQAGHNFYNVDMSYLKRLCGTFLGGPKPPQRVMFTEDLKLPASFDAREQWPQCPTIKEIRDQGSCGSCWAFGAVEAISDRICIHTNAHVSVEVSAEDLLTCCGSMCGDRCNGGYTAEAWNFWTRKGLVSGGLYESHVGCRPYLHTLPVSTTSNGSRPPCTGEGDTPKCSKICEPGYSPSYKQDKRYGYNSYSVSNSEKDIMAEIYKNGPVEGAFSVYSDFLLYKSGVYQHVTGEMMGGHAIRILGWGVAKDTLLVVASETLTGVTWVLNTRGRTRGTAHMGGEPAEQRKNNAGVALRPQENVISTQKEEAGTTRKLTW

SEQ ID NO: 1017650 - protein, 358 aa, Homo sapiens; identical to SEQ ID NO: 1017649

SEQ ID NO: 1017651 - protein, 312 aa, Homo sapiens
MWQLWASLCCLLVLANARSRPSFHPLSDELVNYVNKRNTTWQAGHNFYNVDLKLPASFDAREQWPQCPTIKEIRDQGSCGSCWAFGAVEAISDRICIHTNAHVSVEVSAEDLLTCCGSMCGDRCNGGYTAEAWNFWTSIPPCEHHVERVPAPMHGGGRYPKCSKICEPGYSPSYKQDKRYGYNSYSVSNSEKDIMAEIYKNGPVEGAFSVYSDFLLYKSGVYQHVTGEMMGGHAIRILGWGVAKDTLLVVASETLTGVTWVLNTRGRTRGTAHMGGEPAEQRKNNAGVALRPQENVISTQKEEAGTTRKLTW

SEQ ID NO: 1017652 - protein, 338 aa, Homo sapiens
MWQLWASLCCLLVLANARSRPSFHPLSDELVNYVNKRNTTWQAGHNFYNVDMSYLKRLCGTFLGGPKPPQRVMFTEDLKLPASFDAREQWPQCPTIKEIRDQGSCGSCWAFGAVEAISDRICIHTNAHVSVEVSAEDLLTCCGSMCGDRCNGGYTAEAWNFWTSIPSCEHHVERVPAPMHGGGRYPKCSKICEPGYSPSYKQDKRYGYNSYSVSNSEKDIMAEIYKNGPVEGAFSVYSDFLLYKSGVYQHVTGEMMGGHAIRILGWGVAKDTLLVVASETLTGVTWVLNTRGRTRGTAHMGGEPAEQRKNNAGVALRPQENVISTQKEEAGTTRKLTW

SEQ ID NO: 1017653 - protein, 81 aa, Homo sapiens
GCTVRVFGSTQADHEVKRQSPSWPHGKTPFLLKIQKLAGCGGRRLWSQLLGRLRQENLFNRGGGGCGEVRSRHCTSAWATE

SEQ ID NO: 1017654 - protein, 86 aa, Homo sapiens
QKLSSKARKIYTDFIEKEAPKEINIDFETKTLIAQNIQEATSGCFTTAQKRVYSLMENNSYPRFLESEFYQDLCKKPQITTEPHAT

SEQ ID NO: 1017655 - protein, 86 aa, Homo sapiens; identical to SEQ ID NO: 1017654

SEQ ID NO: 1017656 - protein, 184 aa, Homo sapiens
  misc_feature (5)..(5): Xaa can be any naturally occurring amino acid
  misc_feature (17)..(17): Xaa can be any naturally occurring amino acid
  misc_feature (81)..(81): Xaa can be any naturally occurring amino acid
  misc_feature (92)..(92): Xaa can be any naturally occurring amino acid
  misc_feature (174)..(174): Xaa can be any naturally occurring amino acid
PRRAXGGFPLSHNLTDXHEALETTQYLNSFSHVGAGVVHLINAIVRSQRGGPGARRLSFVFLTDGVTGNDSLHESAHSMRXRYVVPTVLALXADVDMDVLTTLSLGDRAAVFHEKDYDSLAHTLASSTRFILLDLLSAAALGPSSRRVVKPTPSIGAKAGPGPTRPAPLLHSDXALGLHLSSSS

SEQ ID NO: 1017657 - protein, 147 aa, Homo sapiens
MYLLMNSLTVMRVWDHSSSVYLEPTSTGTVRQPAISWIYSKLAERHTLASSLLISVGHSTKCALHVVPFHPRPAWRGGAPCSRLCGSYTVLCSFADRAGKSGWLGCSSSLLANSLLTSFFAHFVTKLRTFEQIADSVAGGSLLDSAL

SEQ ID NO: 1017658 - protein, 67 aa, Homo sapiens
MRVKFSYLMIGLQVVGCIFMVIEGKKAAHHDSEHVMIKLELRKESSSERGSSYEGPTQSSRGIRVGW

SEQ ID NO: 1017659 - protein, 179 aa, Homo sapiens
PCPSIGAHKVGHSDFLRHVGPRRGDPYSKVWEQSGAQRRVTACQGASKDSERLAAQGVIDLLKYVVNSFYPVYQTLWMNNLYNVNTSKQCHEKTEVTDYTCRTMEQEQQLRGMTQMRPNVKMEFDGGVHDGFCLSEGTYLDDDDNEDRGEDQLELIKDDEKEAEEGEDDRDSANGEDDS

SEQ ID NO: 1017660 - protein, 133 aa, Homo sapiens
MASTDYSTYSQAAAQQGYSAYTAQPTQGYAQTTQAYGQQSYGTYGQPTDVSYTQAQTTATYGQTAYATSYGQASHWLYYSNVPPRHTASLFQGYGTGAYDTTTCVRCQHSSRLGRSLVRASRLAISGDFKPCR

SEQ ID NO: 1017661 - protein, 165 aa, Homo sapiens
MASTDYSTYSQAAAQQGYSAYTAQPTQGYAQTTQAYGQQSYGTYGQPTDVSYTQAQTTATYGQTAYATSYGQASHWLYYSNVPPRHTASLFQGYGTGAYDTTTATVTTTQASYAAQSAYGTQTCLSQPMGSSQQPLTPTRPQDGNKPTETSQPQSSTGGVQTSPA

SEQ ID NO: 1017662 - protein, 70 aa, Homo sapiens
  misc_feature (15)..(15): Xaa can be any naturally occurring amino acid
QAGRVRRLVPNFRWXIPNRHIEHNEARDDVERFVGQMMEIKRKTREQQMRHYMRFQTPEPDNHYDFCLMP

SEQ ID NO: 1017663 - protein, 155 aa, Homo sapiens
  misc_feature (1)..(2): Xaa can be any naturally occurring amino acid
  misc_feature (21)..(21): Xaa can be any naturally occurring amino acid
  misc_feature (25)..(25): Xaa can be any naturally occurring amino acid
  misc_feature (27)..(27): Xaa can be any naturally occurring amino acid
  misc_feature (42)..(42): Xaa can be any naturally occurring amino acid
  misc_feature (70)..(71): Xaa can be any naturally occurring amino acid
XXKLLQCCELEAGELGMAVPXQPWXLXLGRAARLDGPVVLSXSGPSRYVLGMQELFRGHSKTREFLAHTXXCTRWPGSCDGRPKPRGPSTRRPASSCLEKDLVGQKKTIIGDMGIVWTSFVGIQVILDLFVTASGDKTIRIWDVRTTKCIATCEH

SEQ ID NO: 1017664 - protein, 74 aa, Homo sapiens
  misc_feature (2)..(2): Xaa can be any naturally occurring amino acid
  misc_feature (6)..(6): Xaa can be any naturally occurring amino acid
  misc_feature (11)..(11): Xaa can be any naturally occurring amino acid
  misc_feature (23)..(23): Xaa can be any naturally occurring amino acid
  misc_feature (33)..(33): Xaa can be any naturally occurring amino acid
  misc_feature (41)..(41): Xaa can be any naturally occurring amino acid
YXASPXTQSPXNPQGPSVHPENXKPETYAPGMXQHEISQAXCSLYHITEDNSTMRKRNKPADTHNNTDNSQKQC

SEQ ID NO: 1017665 - protein, 346 aa, Homo sapiens
MSGVRWLTRALVRPPGTLGHGEVLSTSAAAHAASRSQAEDVRVEGSFPVTMLPGDGVGPELMHAVKEVFKAAAVPVEFQEHHLSEVQNMASEEKLEQVLQFHEGEQSGIIWKRFIPPDGSIKGGELGLLMILRVEGVTLDLFLPNGKSILKVTLPWGYMNSGTNNLDPGWFIRRARQKGEYSFSWNMHKCTRAVIDVSERFVTTSQVSADLQQFAFDYATQERGGAKVHLLSTRPNIMTLGDGCPAGCEGKLLSGTPKSIGHMDLDAWRCTGSEILPVVVSVLPPFGTFSTCARGGAWVCRGEQEKQLEGAPIRGGIHPARQAARDPNGKRGSEPPTGAPACSARR

SEQ ID NO: 1017666 - protein, 116 aa, Homo sapiens
RLLLLVMSGRGKAGRVLAKAALTRVKVLRDNIQGITKAAIPHFARRGAGKRFSGLIYEETRGVLKVFLENVIRDAVTYTEHAKRKTVTAMDVVYALKPGAAPSYEFSVVERPFLTN

SEQ ID NO: 1017667 - protein, 104 aa, Homo sapiens
SGGGFRGGANLDKRRMLLYQTLDFIATCSLPFLQSPSTPDDPGLLLHIPCMCFLWTLPASSPIPVCKVLDGRNRVFHLLSSSTNTFLPMTTHTHTHTHSHTHSI

SEQ ID NO: 1017668 - protein, 134 aa, Homo sapiens
MSEPWPAGPANMDPLFQQTHKQVHEIQSCMVRLETADKQSVHIGEKRESKQASRPDIQPSRTSGGFSPGKEPPNRERQKCQYFGLDQLKYDVQHLQLGSETSSIGAMQGSSRRDSEKSFCLETFEPANDSDSHT

SEQ ID NO: 1017669 - protein, 130 aa, Homo sapiens
MEVEKTDLNEEPEKLRSQLSHQPRWVHACGIPGPRLQDSPPRDPSDCAVTVVRHSHQPECSPHRGHVWLLQSQACREGSRKPAQAQRSGVPRMIFLSQDEHAAQRGSGMWLRPQLNASLDPIIKRTCSSE

SEQ ID NO: 1017670 - protein, 392 aa, Homo sapiens
ANTLDILFAYRPPQTPFFPTKLNRLAGRTHLVVAATPDLRKEDRLNAGIQGYRDYGQPLHSTLGQAQPLSLKKKFHNVHWFVDAGLKPLPPVLLLVTAVTAEDAFSDHVHSSARKSSGSLDFAALKVSNALAEHVQSSSTAAPCCNVSVTVFGEVTKRARSESEDSELKSVIRVTNQLRDLSANYVMCTGPGLLPVPKEPGGVSDRLGLSQLTAISNKRTSEPLRAPQSRTISCILLTLSTSRDHMASVATSCCFAFAFLSRLGFRRATIPAPLRSTSSRSQGTCLPLFTWDSPLHSQNPPRSKCRFQPIKRQLAQTFEGHPLPPMIFKSSPAPRFVGRGQPPRWPICCRKGIPGTDERTNQVKRRRGRAFLIGNCVRKRDGPRTTKLRFDW

SEQ ID NO: 1017671 - protein, 394 aa, Homo sapiens
SLMVGPVDEVRELQKAIGAVPLIQGEYMIPCEKVSTLPAITLKLGGKGYKLSPEDYTLKVSQAGKTLCLSGFMGMDIPHPAATLDLGEFIGVLMCLTVTQQGAPRCRSSSQGVARSTETEESPEQEALASGPPTHTHTLARSLSWAPWKPAAKPDLLFCSVVFPSLGFRNAALPVCLSICLVGVELIQSTDLFRALEDPTLSLAAELVYPVGSLHLQESPPRPYQRPLGLSPYPTPRPSSRALPGNLPCTEGPHLTSLGHSLGSATLPVPCTRARSTDEAVQRPDGLSCNGVTKADLNPPPLLDALDRGWLAWVHWYQSPGGQWSCTARVSSTATRRGMRAKPPTLPPGLHPSLLSTSTRSGTALTSHPSFHHMHHYKLGWPPGPYTFQPHHSH

SEQ ID NO: 1017672 - protein, 300 aa, Homo sapiens
EAMDEQSVESIAEVFRCFICMEKLRDARLCPHCSKLCCFSCIRRWLTEQRAQCPHCRAPLQLRELVNCRWAEEVTQQLDTLQLCSLTKHEENEKDKCENHHEKLSVFCWTCKKCICHQCALWGGMHGGHTFKPLAEIYEQHVTKVNEEVAKLRRRLMELISLVQEVERNVEAVRNAKDERVREIRNAVEMMIARLDTQLKNKLITLMGQKTSLTQETELLESLLQEVEHQLRSCSKSELISKSSEILMMFQQGSSEAHGIFCYPLLFHQTLPVELVPSYDSATFVLEISALCVREQILFT

SEQ ID NO: 1017673 - protein, 105 aa, Homo sapiens
EAMDEQSVESIAEVFRCFICMEKLRDARLCPHCSKLCCFSCIRRWLTEQRAQCPHCRAPLQLRELVNCRWAEEVTQQLDTLQLCSLTKHEENEKDKYVLNFFVQY

SEQ ID NO: 1017674 - protein, 181 aa, Homo sapiens
MKKMKRTGGHTFKPLAEIYEQHVTKVNEEVAKLRRRLMELISLVQEVERNVEAVRNAKDERVREIRNAVEMMIARLDTQLKNKLITLMGQKTSLTQETELLESLLQEVEHQLRSCSKSELISKSSEILMMFQQGSSEAHGIFCYPLLFHQTLPVELVPSYDSATFVLEISALCVREQILFT

SEQ ID NO: 1017675 - protein, 211 aa, Homo sapiens
EAMDEQSVESIAEVFRCFICMEKLRDARLCPHCSKLCCFSCIRRWLTEQRAQCPHCRAPLQLRELVNCRWAEEVTQQLDTLQLCSLTKHEENEKDKCENHHEKLSVFCWTCKKCICHQCALWGGMHGGHTFKPLAEIYEQHVTKVNEEVAKLRRRLMELISLVQEVERNVEAVRNAKDERVREIRNAVEMMIARLDTQLKNKLITLMVAVL

SEQ ID NO: 1017676 - protein, 127 aa, Homo sapiens [sequence omitted]

SEQ ID NO: 1017677 - protein, 248 aa, Homo sapiens
  misc_feature (40)..(41): Xaa can be any naturally occurring amino acid
  misc_feature (70)..(70): Xaa can be any naturally occurring amino acid
  misc_feature (72)..(72): Xaa can be any naturally occurring amino acid
GEGSNAVVQGAIRPPSDAKKERLRVFVVFVAGDDDSLPDXXQVGKDDKVQKASSTSFVAIKIDTKVEACXQXSQIYPVVCVPSSFFIGDSGIPLEVIAGSVSADELVTRIPQGPTRFICLKVETSVAKCQSVQKVPVSYSICVILNLNNTCENFSVPEMPELCEIPPTSDTKSDTAPGGESAGHATSSQEPSGCSDQRPAEDLNIRVERLTKKLEERREEKRKEEEQREIKKEIERRKTGKEMLDYKR

SEQ ID NO: 1017678 - protein, 267 aa, Homo sapiens
  misc_feature (40)..(41): Xaa can be any naturally occurring amino acid
  misc_feature (70)..(70): Xaa can be any naturally occurring amino acid
  misc_feature (72)..(72): Xaa can be any naturally occurring amino acid
GEGSNAVVQGAIRPPSDAKKERLRVFVVFVAGDDDSLPDXXQVGKDDKVQKASSTSFVAIKIDTKVEACXQXSQIYPVVCVPSSFFIGDSGIPLEVIAGSVSADELVTRIPQGPTRFICLKVETSVAKCQSVQKVPVSYSICVILNLNNTCENFSVPEMPELCEIPPTSDTKSDTAPGGESAGHATSSQEPSGCSDQRPAEDLNIRVERLVDARDQRPAEDLNIRVERLTKKLEERREEKRKEEEQREIKKEIERRKTGKEMLDYKR

SEQ ID NO: 1017679 - protein, 461 aa, Homo sapiens
MSSSHPEPGPWAPLSPRLQPLSQSSSSLLGEGREQRPELHKTASSTMWQAQLGEASTRPQAPEEEGNPPESMKPARASGPKARPSAGGHWRSSTVGNVSTMGGGDLCRLRAPSAAAMQRSHSDLVRSTQMRGHSGARKASLSCSALGSSPVHRAQLQPGGTSGQGGQAPAGLERDLAPEDETSNSAWMLGASQLSVPPLDLGDTTAHSSSAQAEPKAAEQLATTTCHALPPAALLCGMREMREVGAGGCCHALPATGILAFPKLVASVSESGLQAQHGVKIHCRLSGGLPGHSHCCAHLWGPAGLVPEPGSRTKDVWTMTSANDLAPAEASPLSAQDAGVQAAPVAACKAVATSPSLEAPAALHVFPEVTLGSSLEEAPSPVRDVRWDAEGMTWEVYGAAVDPEVLGVAIQKHLEMQFEQLQRAPASEDSLSVEGRRGPLRAVMQSLRRPSCCGCSGAAPE

SEQ ID NO: 1017680 - protein, 461 aa, Homo sapiens; identical to SEQ ID NO: 1017679

SEQ ID NO: 1017681 - protein, 183 aa, Homo sapiens
MQRCASTPLAPRSLRRWERPSLSTQILAVRTGPSSAMSVTAALSEEASLKRHTLQTHSDKPYKCDRCQASFRLQGQPRQPQDRPYTVRNPYRLQHLVGLQLQPGQLNRENPTPRIALWSRSHYKVRNLSEPRFDTGGPHSVPMCCSTLVRSPIHCEICGTRFRHLQTLKSHLRIPTERASGIL

SEQ ID NO: 1017682 - protein, 135 aa, Homo sapiens
  misc_feature (63)..(63): Xaa can be any naturally occurring amino acid
FGELSTFDAVRGPHRRCPPDADPVPPGLALPGRLLVSHSRRTPPASPGPLPRPIFSARASNGXPAGPRSSGFCLPRRRRLLPQLRKNVSVKTTSWPVNCFVNNNPSMPSVLQLVHKILSFAQSWAAKCLGDEEQK

SEQ ID NO: 1017683 - protein, 226 aa, Homo sapiens
MYFSNFLAQEDFDLLHMSFYNDLSSRLYRTHFADVMTRNTHTHPPHDTPPLTHRHSHINKASQPTRRSTTPPPKGTTQQGPTATSQENTCTSNTRPRNHPQSTKPRGHTDTPGTKPQTSNRGHTGRNTTAQRTRHQLPSTRTSTTAREHRRRRQHERRTHRHTHHAGSLQHTTATQHETNPPPVPTTHPTPPAAQTSRETKTRARRTAQDSHHPPQTPTQAARTQY

SEQ ID NO: 1017684 - protein, 141 aa, Homo sapiens
MFWEKKIEHHARHLQNEDIRVRRSALNKLRVGWAEQLEGRNKMLQGPGRCPDRVPEATESLHTKDKKGGLRAHELQTLHELPEGHGEGTPRVGSKHPRQSSQDLHHGNGPHLADPVIIPPRGPRCSRVPGFSSASLVPNKT

SEQ ID NO: 1017685 - protein, 279 aa, Homo sapiens
  misc_feature (271)..(271): Xaa can be any naturally occurring amino acid
TQLGAPLLSSPSPVCLPPAAATMTTSIRQFTSSSSIKGSSGLGGGSSRTSCRLSGGLGAGSCRLGSAGGLGSTLGGSSYSSCYSFGSGGGYGSSFGGVDGLLAGGEKATMQNLNDRLASYLDKVRALEEANTELEVKIRDWYQRQAPGPARDYSQYYRTIEELQNKILTATVDNANILLQIDNARLAADDFRTKFETEQALRLSVEADINGLRRVLDELTLARADLEMQIENLKEELANLKKNHEEEMNALEGRWVAEINVEKDAAPGLDXSRILNEMR

SEQ ID NO: 1017686 - protein, 281 aa, Homo sapiens
  misc_feature (273)..(273): Xaa can be any naturally occurring amino acid
IQPPSPPMAGRLRVIGRGCSAAATMTTSIRQFTSSSSIKGSSGLGGGSSRTSCRLSGGLGAGSCRLGSAGGLGSTLGGSSYSSCYSFGSGGGYGSSFGGVDGLLAGGEKATMQNLNDRLASYLDKVRALEEANTELEVKIRDWYQRQAPGPARDYSQYYRTIEELQNKILTATVDNANILLQIDNARLAADDFRTKFETEQALRLSVEADINGLRRVLDELTLARADLEMQIENLKEELANLKKNHEEEMNALEGRWVAEINVEKDAAPGLDXSRILNEMR

SEQ ID NO: 1017687 - protein, 276 aa, Homo sapiens
  misc_feature (268)..(268): Xaa can be any naturally occurring amino acid
RNSDELQPFSCVLPPAAATMTTSIRQFTSSSSIKGSSGLGGGSSRTSCRLSGGLGAGSCRLGSAGGLGSTLGGSSYSSCYSFGSGGGYGSSFGGVDGLLAGGEKATMQNLNDRLASYLDKVRALEEANTELEVKIRDWYQRQAPGPARDYSQYYRTIEELQNKILTATVDNANILLQIDNARLAADDFRTKFETEQALRLSVEADINGLRRVLDELTLARADLEMQIENLKEELANLKKNHEEEMNALEGRWVAEINVEKDAAPGLDXSRILNEMR

SEQ ID NO: 1017688 - protein, 232 aa, Homo sapiens
MFRELKKTQPHQKLLQPGKEQSSVFEDPGHQINSPTWMMIGGNKVLARSLMIQTLEAVKRKQFEKYHAASAEEQATIERNPLHHLPSSTETTVSLCIGLVPILKGGRFYQVPVTPTRRGVARFLAMKWMITEVPGYKSTSGTLMPGESLWHKLLEAFHNQGPVIKRTAMTCATLTDGQRPTVPGPHTLVVESPGGVPGPSGAKTTVCATATLKTNLVRYGWYVLRNGWARPS

SEQ ID NO: 1017689 - protein, 258 aa, Homo sapiens
  misc_feature (16)..(16): Xaa can be any naturally occurring amino acid
  misc_feature (18)..(18): Xaa can be any naturally occurring amino acid
MPVGGANLRTEKIVQXKXQRQQQTSELLFRELKKTQLIKSCSSQGKNKVLCLKTQSSDKFTNMMMIGGNKVLARSLMIQTLEAVKRKQFEKYHAASAEEQATIERNPYTIFHQALKNCEPMHWAGTHPQGEGRFYQVPVTPTRRGVARFLAMKWMITEVPGYKSTSGTLMPGESLWHKLLEAFHNQGPVIKRTAMTCATLTDGQRPTVPGPHTLVVESPGGVPGPSGAKTTVCATATLKTNLVRYGWYVLRNGWARPS

SEQ ID NO: 1017690 - protein, 241 aa, Homo sapiens
  misc_feature (13)..(13): Xaa can be any naturally occurring amino acid
  misc_feature (15)..(15): Xaa can be any naturally occurring amino acid
  misc_feature (46)..(46): Xaa can be any naturally occurring amino acid
  misc_feature (73)..(73): Xaa can be any naturally occurring amino acid
  misc_feature (129)..(129): Xaa can be any naturally occurring amino acid
  misc_feature (133)..(133): Xaa can be any naturally occurring amino acid
  misc_feature (192)..(192): Xaa can be any naturally occurring amino acid
GPHGPGILTTLVXLXAALLLALGVERGLRYPRYAPNVQGACKICQXVAFYCKTTRELMLHARCCLNQKGTILXLDLQNCSLETLVQTIIRHITTVIIDLQANPLKGDLANTSRGFTQPQTLTLPQHVNXPGGXNAWKTITSNIDNKSVKGKRTFAITLGTQKCVLRMALVYLMVPGLLQCVCADGFHGNKCXAPGLVLTAYVLRDSGSHHSIRLHSALGDPAPKSQDFMNYIGLTIDLRSI

SEQ ID NO: 1017691 - protein, 536 aa, Homo sapiens
MEVSPLQPVNENMQVNKIKKNEDAKKRLSVERIYQKKTQLEHILLRPDTYIGSVELVTQQMWVYDEDVGINYREVTFVPGLYKIFDEILVNAADNKQRDPKMSCIRVTIDPENNLISIWNNGKGIPVVEHKVEKMYVPALIFGQLLTSSNYDDDEKKVTGGRNGYGAKLCNIFSTKFTVETASREYKKMFKQTWMDNMGRAGEMELKPFNGEDYTCITFQPDLSKFKMQSLDKDIVALMVRRAYDIAGSTKDVKVFLNGNKLPVKGFRSYVDMYLKDKLDETGNSLKVIHEQVNHRWEVCLTMSEKGFQQISFVNSIATSKSSKYWSSRKSKQHILLNFFVLFKFINDAFFGICPFKGGRHVDYVADQIVTKLVDVVKKKNKGGVAVKAHQVKNHMWIFVNALIENPTFDSQTKENMTLQPKSFGSTCQLSEKFIKAAIGCGIVESILNWVKFKAQVQLNKKCSAVKHNRIKGIPKLDDANDAGGRNSTECTLILTEGDSAKTLAVSGLGVVGRDKYGVFPLRGKILNVREASHKQ

SEQ ID NO: 1017692 - protein, 581 aa, Homo sapiens
MEVSPLQPVNENMQVNKIKKNEDAKKRLSVERIYQKKTQLEHILLRPDTYIGSVELVTQQMWVYDEDVGINYREVTFVPGLYKIFDEILVNAADNKQRDPKMSCIRVTIDPENNLISIWNNGKGIPVVEHKVEKMYVPALIFGQLLTSSNYDDDEKKVTGGRNGYGAKLCNIFSTKFTVETASREYKKMFKQTWMDNMGRAGEMELKPFNGEDYTCITFQPDLSKFKMQSLDKDIVALMVRRAYDIAGSTKDVKVFLNGNKLPVKGFRSYVDMYLKDKLDETGNSLKVIHEQVNHRWEVCLTMSEKGFQQISFVNSIATSKGGRHVDYVADQIVTKLVDVVKKKNKGGVAVKAHQRELCNGAILAHCNLRLMGSSDSPASASRVAGIAGGCHHTQLIFVFLVETGFHHVGQAGLERLTSGDPPASASQSSGITDVKVKNHMWIFVNALIENPTFDSQTKENMTLQPKSFGSTCQLSEKFIKAAIGCGIVESILNWVKFKAQVQLNKKCSAVKHNRIKGIPKLDDANDAGGRNSTECTLILTEGDSAKTLAVSGLGVVGRDKYGVFPLRGKILNVREASHKQ

SEQ ID NO: 1017693 - protein, 138 aa, Homo sapiens
IDEDPANRLREHRDPLWSRRRRIPTGGEKVNKHIDYSFQMSESLSSRETSFLINEETMFQKNQQSKDSIFFRDGIRQIDFVLSYVDDVKKDAELKAERRKEFETNLRKTGLELEIEDKRDSEDGRTYFVKIHAPWEVL

SEQ ID NO: 1017694 - protein, 288 aa, Homo sapiens
LLLARAFRRCAARGYGEVAEQVSALGCRADRLDGKPCVRVYAWLLAPAPSYELRPDRASLTVDGYDSSHSTGVTKRRDVSRYRQLLTRHEAASSDEVQAASATVYIPAGIGYTKGVPLASPSVRFHDKRDAEDAMDAMDGAVLDGRGAAGANGALRLSPGPHTTAAGDRTPQVRGRWLRTPEPQALGGVAAADPGVGAVPGLAADLATAARSLGPALVLDLGRPPSPDPYEGPSPRSSAGSRSRSRSRSRSRARSLPQVSNEGIPIQGRDRKSHPKSPEEDERWSFRN

SEQ ID NO: 1017695 - protein, 222 aa, Homo sapiens
MRVVTSLKGGHTDLPHLARHGMRLRLPMNVQAASATVYHPQQGSAYTKGVPLASPSVRFHDKRDAEDAMDAMDGAVLDGRGAAGANGALRLSPGPHTTAAGDRTPQVRGRWLRTPEPQALGGVAAADPGVGAVPGLAADLATAARSLGPALVLDLGRPPSPDPYEGPSPRSSAGSRSRSRSRSRSRARSLPQVSNEGIPIQGRDRKSHPKSPEEDERWSFRN

SEQ ID NO: 1017696 - protein, 50 aa, Homo sapiens
KTRRSHLFCPGLGFPEHLSFLSQIVFSFSFKASGSAATLPGSLCKDGGVK

SEQ ID NO: 1017697 - protein, 294 aa, Homo sapiens
MSLQNPAWDRQVQDARTSQSLVVFPSHLLGKDKMSQMASVPEREPESAPSAPSAELQSTQHMEAQPVESDADHVTAGANGQHGPQAASTTKSAEEKAEHPKAPHPEAEALPSDESPVAMGANVVDSLGDLQTWFFPPLQQAVCPRRLGPTRWPGEKAPGTQLYTASEENSYMRSMNSLLDRGEGSISSLADILVWSETTMGMAIATGFLDSGHSTVADLLHSSGPSLRSVPSLVGSVSSAFSSGLVSGTSSALRTITRVLETVEQRTVEGIRSAMRYLTSHLTPRQAQADPNYD

SEQ ID NO: 1017698 - protein, 138 aa, Homo sapiens
  misc_feature (95)..(95): Xaa can be any naturally occurring amino acid
  misc_feature (117)..(117): Xaa can be any naturally occurring amino acid
  misc_feature (120)..(120): Xaa can be any naturally occurring amino acid
NGLQSNMPKFYCDYCDTYLTHDSPSVRKTHCSGRKHKENVKDYYQKWMEEQAQSLIDKTTAAFQQGILYFILCSSLQGPMIHSPSFPVSRLYDAXPIWGPPDAMMASLWICSGLSDXRHXGNAYAGPCLCRHMSIAVL

SEQ ID NO: 1017699 - protein, 96 aa, Homo sapiens
  misc_feature (82)..(82): Xaa can be any naturally occurring amino acid
MTLIGQPYRREGASVNRRRPQPLQGFQVHRCRIALMPADAITRVDQFDSCHFTITADLGQDDAAAIAGTLVSPLTSAFAGIXNFRQRVPPIIASLG

SEQ ID NO: 1017700 - protein, 173 aa, Homo sapiens
  misc_feature (3)..(3): Xaa can be any naturally occurring amino acid
  misc_feature (37)..(39): Xaa can be any naturally occurring amino acid
  misc_feature (56)..(56): Xaa can be any naturally occurring amino acid
  misc_feature (60)..(60): Xaa can be any naturally occurring amino acid
  misc_feature (62)..(62): Xaa can be any naturally occurring amino acid
  misc_feature (83)..(83): Xaa can be any naturally occurring amino acid
  misc_feature (102)..(102): Xaa can be any naturally occurring amino acid
  misc_feature (105)..(105): Xaa can be any naturally occurring amino acid
NDXARKATQPHTTRNPSKPHKPQKKTKNLRTPDPPPXXXKSSKKASSRSPAGAKAXPSRXPXPNKKKRNKPENIKRQQKRQAXTAPQEKKEKETKEAKRKAXTGXGQKQRAQFLNEPKKKGVPNNQAWPPGVCGHSGPWAGAPRLTLRCCCWVCFGFGVCWEGHQVPFPSCAL

SEQ ID NO: 1017701 - protein, 154 aa, Homo sapiens
LPGLRKMQGSGGEKKEPLLPPRLLGLGWFCPLKWSGYRTRAAPPHPAWAPRRPLLLPWPGHAGELLTPTPTVQPGLFPESASRWHQLFGPRILPGPPKGGSPEQTQGVRLLLSAGHSGPWAGAPRLTLRCCCWVCFGFGVCWEGHQVPFPSCAL

SEQ ID NO: 1017702 - protein, 202 aa, Homo sapiens
RLPHHGVWALHPPALPQPPGCIFEAAWPPGASYSDRLSLSLSRLLAPWHACKDSSERRRETWTPSCMPPRLLGLGWFCPLKWSGYRTRAAPPHPAWAPRRPLLLPWPGHAGELLTPTPTVQPGLFPESASRWHQLFGPRILPGPPKGGSPEQTQGVRLLLSAGHSGPWAGAPRLTLRCCCWVCFGFGVCWEGHQVPFPSCAL

SEQ ID NO: 1017703 - protein, 143 aa, Homo sapiens
MAAQCVTKVALNVSCANLLDKDIGSKSDPLCVLFLNTSGQQWYEVERTERIKNCLNPQFSKTFIIDYYFEVVQKLKFGVYDIDNKTIELSDDDFLGECECTLGQIVSSKKLTRPLVMKTGRPAGKGSITISAEEINTIIEWSC

SEQ ID NO: 1017704 - protein, 143 aa, Homo sapiens; identical to SEQ ID NO: 1017703

SEQ ID NO: 1017705 - protein, 132 aa, Homo sapiens
MAGMAAAHFAVDRAIIRDRGVTPVDSGGADVNRVTYQGYSPYQLTGGRPSTRIQQQLGQLTLENLQMLPESEDEESYDTESEFTEFTEDEAESVNSFGALTNEVPFPSPSQAPRAAPYQRGIYIMSLSNFCA

SEQ ID NO: 1017706 - protein, 102 aa, Homo sapiens
MAAAHFAVDRAIIRDRGVTPVDSGGADVNRVTYQGYSPYQLTGGRPSTRIQQQLGQLTLENLQMLPESEDEESYDTESEFTEFTEDELPYDDCVFGGQRLTL

SEQ ID NO: 1017707 - protein, 111 aa, Homo sapiens
MPLLRDLLHPSLEEEKKKHKKKRQYTSPKFLLYGCKHVQVATRSPRYFRHAQTVVLMCRLSTVLCQLQEERPDSQKVYHLAFSTPSDEMTDYTVSIFTCKVYQHILSDYQK

SEQ ID NO: 1017708 - protein, 285 aa, Homo sapiens
MERAGVIGRGWQQGTAAEGVPSRGPPGEVIHLNVGGKRFSTSRQTLTWIPDSFFSSLLSGRISTLKDETGAIFIDRDPTVFDPILNFLRTKELDPSGCPRFQHSLHEAQYLWAHSSRYRQTMQHSRGVGSMLLVETSSSSGYLPSTSSSQLKAADTEHSLVGASGSSGVTASPLSDGASTMTPQAWQMQGCLGRMLDEKIPPSPSGQPVGAGDGAPGVWTAIIGSLWLYPVSSLLQVAGSLWLALVYSRSPAGRGPSNDWRSQAGLHGGALGEPDQIVGPAHRAE

SEQ ID NO: 1017709 - protein, 107 aa, Homo sapiens
PEMESRCVTQAGCSGTISAHYNLHLQGSCDSPTSASQVAGITGTRHQARLIFVFLVETGFHHVGQSGLGLLTSGHPPCLSLPKCWDYRCEPRAGLQFEFQSLLYNLG

SEQ ID NO: 1017710 - protein, 327 aa, Homo sapiens
MRVSDYSTNDVFLPLLATRFPLEDATVPVTVASSRVQASPLPLGAQQLPTPPSQPRARKRRDHGDDSSDEEDKERVALVVHPGTARLGSPDEEFFHKVRTIRQTIVKLGNKVQELEKQQVTILATPLPEESMKQELQNLRDEIKQLGREIRLQLKAIEPQKEEADENYNSVNTRMRKTQVEFKKSGRGTSLGHTEEELPLHGVLSQQFVELINKCNSMQSEYREKNVERIRRQLKITNAGMVSDEELEQMIGQWASEVFCPYPDGQAGTRKANEIGRKETALNPIGADTFTFCSKEAGKTTMKHRSGGRGSQAHQEENFLCSPEGGT

SEQ ID NO: 1017711 - protein, 175 aa, Homo sapiens
MKQELQNLRDEIKQLGREIRLQLKAIEPQKEEADENYNSVNTRMRKTQHGVLSQQFVELINKCNSMQSEYREKNVERIRRQLKITNAGMVSDEELEQMIGQWASEVFCPYPDGQAGTRKANEIGRKETALNPIGADTFTFCSKEAGKTTMKHRSGGRGSQAHQEENFLCSPEGGT

SEQ ID NO: 1017712 - protein, 115 aa, Homo sapiens
MRDRTHELRQGDDSSDEEDKERVALVVHPGTARLGSPDEEFFHKALSVTLPRSGQFGRLLSNWGIKSRSWRNSRSPSWPRPFPRRVSETPAAGRMLRPRDCGGCSSTQVVARVVC

SEQ ID NO: 1017713 - protein, 121 aa, Homo sapiens
MRDRTHELRQGDDSSDEEDKERVALVVHPGTARLGSPDEEFFHSPLGHPPQVRTIRQTIVKLGNKVQELEKQQVTILATPLPEESMKQELQNLRDEIKQLGREIRLQLKGELLGPQTDPSL

SEQ ID NO: 1017714 - protein, 184 aa, Homo sapiens
ERRQEDDVELGTHAVSKEGEIKQLGREIRLQLKAIEPQKEEADENYNSVNTRMRKTQHGVLSQQFVELINKCNSMQSEYREKNVERIRRQLKITNAGMVSDEELEQMIGQWASEVFCPYPDGQAGTRKANEIGRKETALNPIGADTFTFCSKEAGKTTMKHRSGGRGSQAHQEENFLCSPEGGT

SEQ ID NO: 1017715 - protein, 253 aa, Homo sapiens
MRDRTHELRQGDDSSDEEDKERVALVVHPGTARLGSPDEEFFHKVRTIRQTIVKLGNKVQELEKQQVTILATPLPEESMKQELQNLRDEIKQLGREIRLQLKAIEPQKEEADENYNSVNTRMRKTQHGVLSQQFVELINKCNSMQSEYREKNVERIRRQLKITNAGMVSDEELEQMIGQWASEVFCPYPDGQAGTRKANEIGRKETALNPIGADTFTFCSKEAGKTTMKHRSGGRGSQAHQEENFLCSPEGGT

SEQ ID NO: 1017716 - protein, 114 aa, Homo sapiens
MRDRTHELRQGDDSSDEEDKERVALVVHPGTARLGSPDEEFFHKVRTIRQTIVKLGNKVQELEKQQVTILATPLPEESMKQELQNLRDEIKQLGREIRLQLKGELLGPQTDPSL

SEQ ID NO: 1017717 - protein, 237 aa, Homo sapiens
MRDRTHELRQGDDSSDEEDKERVALVVHPGTARLGSPDEEFFHKVRTIRQTIVKLGNKVQELEKQQVTILATPLPEESMKQELQNLRDEIKQLGREIRLQLKAIEPQKEEADENYNSVNTRMRKTHSMQSEYREKNVERIRRQLKITNAGMVSDEELEQMIGQWASEVFCPYPDGQAGTRKANEIGRKETALNPIGADTFTFCSKEAGKTTMKHRSGGRGSQAHQEENFLCSPEGGT

SEQ ID NO: 1017718 - protein, 217 aa, Homo sapiens
  misc_feature (4)..(4): Xaa can be any naturally occurring amino acid
  misc_feature (36)..(36): Xaa can be any naturally occurring amino acid
  misc_feature (51)..(51): Xaa can be any naturally occurring amino acid
  misc_feature (215)..(215): Xaa can be any naturally occurring amino acid
RSHXYLGGFLAPEEEAGSHSLHVKNLTVEMAAQKIXKGLEHLAKTKKYLKXGFLKWKPNYNSAASEYGKTTVAFKNAKQFEQTKDACLKEAVAHENNRALFHAAKAYEQAGMMLKEMQKLPKAVQLIEKASMMYLENGTPDTAAMALERAGKLIENVDPEKAVQFYQQTANVFENEERLRQAVELLGKASRLLVRGRRFDEAALSIQKEKNIYKXIE

SEQ ID NO: 1017719 - protein, 96 aa, Homo sapiens
LWGGLRKTTIMAEGDGGASTSHGQEQQEVEEVLHTFKQPHLMRTHYLHNSTKRDGVKPGETSPMIQSPPTKLHLQQWELQFNVKFEQRHRLKPYQP

SEQ ID NO: 1017720 - protein, 180 aa, Homo sapiens
  misc_feature (1)..(1): Xaa can be any naturally occurring amino acid
  misc_feature (4)..(4): Xaa can be any naturally occurring amino acid
  misc_feature (12)..(12): Xaa can be any naturally occurring amino acid
  misc_feature (16)..(16): Xaa can be any naturally occurring amino acid
  misc_feature (20)..(20): Xaa can be any naturally occurring amino acid
  misc_feature (29)..(29): Xaa can be any naturally occurring amino acid
XPRXLRFTQISXWPMXMVEXESGRDEMRXPWVAVSVPLASHSCCGLPSPVAAATVSVVRNTTPSPSGPRVVTASWLWPALVHSTSLVSFPYKESLCTVSSVWRVTSLSFRDPDRAPASLAQHCQWDLPWGVTVILCHVLIKGEGLPVEERSQNGDHGTVKLLKLNAQRWIVRALFLERRS

SEQ ID NO: 1017721 - protein, 156 aa, Homo sapiens
MYHNSSQKRHWTFSSEEQLARLRADANRKFRCKAGGQRGRFFRMIQSFLSLMKNMTLCKYYETQVIGNLSVFKASNAKICVWVRLCMYFKRFYLNNLSKWNITPKDNNGSLVWHFCGLAKVDELQLYLVLSCVGKPSGRSPSVDQGEGTLKQILGI

SEQ ID NO: 1017722 - protein, 330 aa, Homo sapiens
  misc_feature (323)..(323): Xaa can be any naturally occurring amino acid
  misc_feature (326)..(326): Xaa can be any naturally occurring amino acid
MNSCDSAEAVLSSETSVAPSVLRLAMTSYSYRQSSATSSFGGLGGGSVRFGPGVAFRAPSIHGGSGGRGVSVSSARFVSSSSSGGYGGGLRRRPDRVRTGLLAGNEKLTMQNLNDRLASYLDKVRALEAANGELEVKIRDWYQKAGGLGPPATTATTTRPSRTCGTRFLVPPLRTPGLSCRSTTPVWLQMTSETKFETEQALRMSVEADINGLRRVLDELTLARTDLEMQIEGLKEELAYLKKNHEEEISTLRGQVGGQVSVEVDSLRAPISQDLSDMRSHMRSWRAEPEDAEPGYSRTEELNRESLAHGAAPDEQVEVLTAXPSXLEID

SEQ ID NO: 1017723 - protein, 102 aa, Homo sapiens
  misc_feature (9)..(9): Xaa can be any naturally occurring amino acid
VKSSLPPIXIIKFYWNTAMPINLQIVSGCFCALTAELSSCIRDLKTRIWLKSLKYVQKYFASTDFKNCTVIKPGRFITKQFLYFQYVMVQDMLSPSPMGRPE

SEQ ID NO: 1017724 - protein, 112 aa, Homo sapiens
MRCRPATVLSAGVRQEGWVEAPACLNLKGRALTRTGGQVTTRTQGARPLSPGGARGCAGLVQPKGFTQPAGKIHFFHLGPLDEGVVCEHLQVRPLRWVLDEAFIDKLLEVGG

SEQ ID NO: 1017725 - protein, 140 aa, Homo sapiens
EPRPSPRVVSPSWTKPMYILHILIDVSCLPKMYKTKLCPDHLGHMWSGLPEAVSRACVLNLGKINFLNWLRPVSDTLGSHKETGSRDLVSISFSKHNVSTVLGCVCLVSPSWLPSGTGFLSSLLPSLSGSTLQMLEFLRV

SEQ ID NO: 1017726 - protein, 140 aa, Homo sapiens; identical to SEQ ID NO: 1017725

SEQ ID NO: 1017727 - protein, 212 aa, Homo sapiens
MAHEWELGAEAGGSLLLCAALLAVGMRPEAMRLGRVQVAADLDALIWLCYYALVHFALEGPFVYLSLVETLANSDGLIASLWKEYGKADARCGLFLSNHCVCWKFVTVALAWVSGLMFLIYGIVKEKYYRHFLQITLCRVASCMAAWMTFLPEWLTEKSPNLNTSEHGLVLLAFSVYLAQRGVWAPDPRDCYCGQSWIGTLRRTASRKESQF

SEQ ID NO: 1017728 - protein, 112 aa, Homo sapiens
ILPLLQNCQWWFPMTTPQSQGLPWPSRLAQSDPANVPSATICQPLLAPAPGLHMLFSLPRMPFPQPPGSDGEHLLILQSQAGREHLWRCRLTSQAEGVILPGDVVTSLTTLG

SEQ ID NO: 1017729 - protein, 112 aa, Homo sapiens; identical to SEQ ID NO: 1017728

SEQ ID NO: 1017730 - protein, 300 aa, Homo sapiens
QVSGFRTIRDGGGWFRLLYRGQDPGGGAHRPDLFAEGLLEFLRPAVQQLDSHVHAVRESQVELRDQIDNLATELCRINEGQKVALESGPHILRRFLVPGDAVVWYHHPNRMLRTGLETAKPQLCARKQPQGEAMLVCGNYPPWLPQAITDEPMDFSKLKYLFPSLLVSTDYARILGDQSPIDLQDLKGERNVCWTHSVYPIYVGGPGDLTEQNESKDYINMVWFFTNELSSTFLGVRGLLLRIVTEALDVMPVMGGRASRISSGTGGAQKILPFAGTAGLIIKKGRDRREVLSSFCYIVD

SEQ ID NO: 1017731 - protein, 239 aa, Homo sapiens
MGLTIFSQLQVLHCVPVHVPMKMKSSLQWTCSWGLPQVLCVLNGTEAALAEPPKSQDGKGRAPPPCPARPCPQQQDRGCRPASSSEAGSLQACPGARQVAAPGLSLPAGSAALRRGGRHASCADHAPGPPERPAGPGRGTAGTGRSPPPSAARQCTRLVDFAAPGGAFPGGRGRREAASMHFMWRLLAPPVASCSAGRPAPSGGPAADQLAGVETRLLTPPCMQRHLEAARPLRLWVWM

SEQ ID NO: 1017732 - protein, 102 aa, Homo sapiens
  misc_feature (81)..(82): Xaa can be any naturally occurring amino acid
  misc_feature (84)..(84): Xaa can be any naturally occurring amino acid
  misc_feature (92)..(92): Xaa can be any naturally occurring amino acid
NLSSASAIMGNPKVKAHGKEGADFLGRCHESTWMIFKGTFAQLSELHCDKLHVDPENFKLLGNVLVTVFAIPFPAKNFPRXXQXSCQKMVTXVASALSSRYH

SEQ ID NO: 1017733 - protein, 91 aa, Homo sapiens
  misc_feature (81)..(81): Xaa can be any naturally occurring amino acid
MLSVAARSGPFAPVLSATSRGVAGALRPLVQATVPATPEQPVLDLKRPFLSRESLSGQARSAVPFGSGLPDEVPYNIVAVXILGIRYNLPE

SEQ ID NO: 1017734 - protein, 289 aa, Homo sapiens
  misc_feature (6)..(6): Xaa can be any naturally occurring amino acid
RLLALXYAWKRRPVTGLAVGAAVAMLSVAARSGPFAPVLSATSRGVAGALRPLVQATVPATPEQPVLDLKRPFLSRESLSGQAVRRPLVASVGLNVPASVCYSHTDIKVPDFSEYRRLEVLDSTKSSRESSEARKGFSYLVTGVTTVGVAYAAKECRHPVRNPSMSASADVLALAKNRNQVIRYSRRQEHGFHKWRGKTPVLCVIEPRKEIEQEAAVELSQFEGPQSDLDRVKKLNGYPDRCMPHLGSVSLANAEIGGIRPCMVPHDALAGNMGRSLTVSHVVPDNGWG

SEQ ID NO: 1017735 - protein, 76 aa, Homo sapiens
  misc_feature (6)..(6): Xaa can be any naturally occurring amino acid
RLLALXYAWKRRPVTGLAVGAAVAMLSVAARSGPFAPVLSATSRGVCATLQKLGERTIKAWTETRLRQRFPKGEFE

SEQ ID NO: 1017736 - protein, 133 aa, Homo sapiens
  misc_feature (18)..(18): Xaa can be any naturally occurring amino acid
RSSKVTQSACFLVPSALXLQPTACPVPSGLRGAPVPESGMTERGRFQGSPDCVELRTQYRFSGTLRSLWQAWSGSPGGQRAQWCPQQGGGQANPWDLMCTIHSFESLDANSGPVTVDGMPAIGRLWYRCPPRA

SEQ ID NO: 1017737 - protein, 212 aa, Homo sapiens [sequence omitted]

SEQ ID NO: 1017738 - protein, 570 aa, Homo sapiens
DHASDEFHDIYNGHMKEKKIHQMGLLLGGVKSTYMFDLLLETRKPDQVFQSYKPGEVMVKVHVVDLKAESVAAPITVRAYLNQTVTEFKQLISKAIHLPAETMRIVLERCYNDLRLLSVSSKTLKAEGFFRSNKVFVESSETLDYQMAFADSHLWKLLDRHANTIRLFVLLPEQSPVSYSKRTAYQKAGGDSGNVDDDCERVKGPVGSLKSVEAILEESTEKLKSLSLQQQQDGDNGDSSKSTETSDFENIESPLNERDSSASVDNRELEQHIQTSDPENFQSEERSDSDVNNDRSTSSVDSDILSSSHSSDTLCNADNAQIPLANGLDSHSITSSRRTKANEGKKETWDTAEEDSGTDSEYDESGKSRGEMQYMYFKAEPYAADEGSGEGHKWLMVHVDKRITLAAFKQHLEPFVGVLSSHFKVFRVYASNQEFESVRLNETLSSFSDDNKITIRLGRALKKGEYRVKVYQLLVNEQEPCKFLLDAVFAKGMTVRQSTRGINFLSSGQQCGSELSIRQVSSNGKQQHGTRILAPVFPGLIIFYEGRLFLFPATGKVSLKFLMGLQKIHV

SEQ ID NO: 1017739 - protein, 72 aa, Homo sapiens
QHRVTPKPLVDSNSPVGAREAERSRVYLSAQSFSAFSVGQGRKQAGPGSQFSKAAGPTRGHSPSPLDVANQN

SEQ ID NO: 1017740 - protein, 161 aa, Homo sapiens
MPGNHPAPSPGPVAGRLSRRLGAFRKAPDRRPRVKLPYPATSQAALPEALSKGRETPRPATHPARSQDVKPLSCPFDFLRDNVEWSEEQAAAAERKSPGEQYPAVCARRNKVDYEIKCPQILECISTKIQENWVFQRIDNWLLNGNFPEVWNLAKKIKKSL

SEQ ID NO: 1017741 - protein, 102 aa, Homo sapiens
MPGDNVEWSEEQAAAAERKSPGEQYPAVCARRNKVDYEIKCPQILEWISTKIKENWVFQRIDNWFLNGNFPEAWNLAKKIKKSFEGTGSWRTRVKYLNVRQQ

SEQ ID NO: 1017742 - protein, 230 aa, Homo sapiens
SVTCLLSPGPSPWLREGLAGRVLVASSVRLSELCCGLGDRGLSQGAGWGGPRSSEYLETQAHCVLELGHPSCCFSRPLPTPFLPAFLPPFLLFPHPLHVWKPPAWTTACTCVMALGASKEWTAGPDQAVTLRDSPSTLGYTAAAPLQGSPGPVLGISRPGPVTVRTTPADPGPVSPGPAPSQSATHTWLWASATSSSVGNSAAFSTQEALGAASCRRSCLRAPGSAGAAA

SEQ ID NO: 1017743 - protein, 230 aa, Homo sapiens; identical to SEQ ID NO: 1017742

SEQ ID NO: 1017744 - protein, 109 aa, Homo sapiens
MAKALPASSRVRRGHRPWSPTWRVRAPFGQRPLALAVISLPGALRVPDDCGVTLNGKARRLHLRMYAGPEGQRGEQEPNGHAGWETCVLFTAHLRLPAFSLTVCHEPHS

SEQ ID NO: 1017745 - protein, 145 aa, Homo sapiens
HNKYESGGGGGGGFGSSGLSARISMILQRLFRFSSVIRSAVSVHLRRNIGVTAVAFNKELDPIQKLLCDKIREYKSKRQTSGGPVDASSEYQQELERELFKLKQMFGNGKMDYFHTSQFVEYPNMRCPRKTTEVLKIMTVYINAW

SEQ ID NO: 1017746 - protein, 143 aa, Homo sapiens
  misc_feature (76)..(76): Xaa can be any naturally occurring amino acid
LPRNLSSATIRGTTFRLSSRHSRTLHCLCLLGFVKNAAVNRGVPLPVWVPAFHFFGRYVERRLRGHVVILFGSWRXRHPVFHSSSAIKWHFLSDTSRISPHKCISPHKHCNSWAHLPSPVTCHCGTLQVWPEPTRRQPREGQQ

SEQ ID NO: 1017747 - protein, 143 aa, Homo sapiens; identical to SEQ ID NO: 1017746
  misc_feature (76)..(76): Xaa can be any naturally occurring amino acid

SEQ ID NO: 1017748 - protein, 216 aa, Homo sapiens
MAGAAGRSNHGAQPNGMVLKPHFTKDWQRRVATCFNSRPRKIAKRKARQAKARRIAPRPALGPIRPIVRCPTVWYHTKVRAGPGFSLEELRVAGIHKKVARTIGIFVDPRRRNKSPESLQANVQRVKEYRSKLILFPRKPSAPKKGDSFAEKLKLAPQLAGPVMPVRNVYKKEKARVIPEEKKNFKAFASFRMARANARLFGIRAKKAKEAPEQDV

SEQ ID NO: 1017749 - protein, 128 aa, Homo sapiens [sequence omitted]

SEQ ID NO: 1017750 - protein, 124 aa, Homo sapiens
  misc_feature (11)..(11): Xaa can be any naturally occurring amino acid
  misc_feature (21)..(21): Xaa can be any naturally occurring amino acid
  misc_feature (45)..(45): Xaa can be any naturally occurring amino acid
  misc_feature (47)..(47): Xaa can be any naturally occurring amino acid
  misc_feature (52)..(55): Xaa can be any naturally occurring amino acid
  misc_feature (58)..(58): Xaa can be any naturally occurring amino acid
  misc_feature (62)..(62): Xaa can be any naturally occurring amino acid
  misc_feature (68)..(68): Xaa can be any naturally occurring amino acid
  misc_feature (70)..(71): Xaa can be any naturally occurring amino acid
  misc_feature (74)..(74): Xaa can be any naturally occurring amino acid
  misc_feature (76)..(76): Xaa can be any naturally occurring amino acid
  misc_feature (78)..(78): Xaa can be any naturally occurring amino acid
  misc_feature (81)..(81): Xaa can be any naturally occurring amino acid
  misc_feature (86)..(86): Xaa can be any naturally occurring amino acid
  misc_feature (88)..(88): Xaa can be any naturally occurring amino acid
  misc_feature (95)..(95): Xaa can be any naturally occurring amino acid
  misc_feature (101)..(101): Xaa can be any naturally occurring amino acid
  misc_feature (107)..(107): Xaa can be any naturally occurring amino acid
HSIEQHRGLAXGHNWGCVCFXLAHSAHMATHTIASSATHCFSQLXTXILALXXXXIVXALSXGFLATXSXXTIXVXMXSFXVHPEXQXIVCLCHXPMFSPXLHAMLXGQPAVFSWMRQTPEGKE

SEQ ID NO: 1017751 - protein, 157 aa, Homo sapiens
RLAYQGQQRLLGGHLASASEADEPSMLIRSRQSRIYFGGNFFDYPLKPGMDLVQKMGPLRCLQFAGSYMASAARPIQPEQTLEDFFINRFGRQLYLQFFKDYTEKVWGVPCRDINADWGAQRIKSLSIGSAAKQALKKIVTGKTDTQHTSLIESFLY

SEQ ID NO: 1017752 - protein, 198 aa, Homo sapiens
PDHPRDFLFIALRRRVLALLAPFIPRGSAGSALGRAALRFVRWAHCFWEGRADMVAAPPLLGLACRGRSRYPVAGSLERQPRGGMGSRRGSGGSAGELEVVQCCVDDQRNVQARWASGLWGRGNPWSRKSDGPLRALRRGGTGRRGWRGPVAPCACGLRGARVAGGSADQNRLIGKNLDKSRCCGPLSESFGGGTWRS

SEQ ID NO: 1017753 - protein, 77 aa, Homo sapiens
  misc_feature (2)..(2): Xaa can be any naturally occurring amino acid
WXYFCICVIQYNNLAYLEPFTIRGVLNEYFHNVCELDLVFNFYKVYTVVDEMFLAGEIRETSQTKVLKQLLMLQSLE

SEQ ID NO: 1017754 - protein, 259 aa, Homo sapiens
AYRRYGYPAGMPPDSPRELVPKQAPCSPSDPALPWTLGHGNQPPAVVPEPKARWSRGGRGEARRFFGVYLLYCLNPRYRGRVYVGFTVNTARRVHAAQMCVCLHKKGGGLCVTSCGEVPCGDGALLCVTGVFPVLLCACPSCGEMWGVWEARLDVPRCRALAALVGPSACERETCRSLSTVLRALAAQLLAAAAGALVTRTSRIHSIAALGVLPMNLRDREASMTFHELAWTEWLPSWAISGATPKRTPKVTPGHQRVD

SEQ ID NO: 1017755 - protein, 142 aa, Homo sapiens
MRNWSLAVVVSTPLSWTMLRPKDVTDSFIYDYATLSPSNLKSNLILVALPPSQHTGASREHGQVKVKKERMAYRCCSVRTVSKPESQDASLRIRLKTNKIREIQESWSRKRREGSVESIREQLLFQHSGDFTPGPEGASLFH

SEQ ID NO: 1017756 - protein, 262 aa, Homo sapiens
  misc_feature (23)..(23): Xaa can be any naturally occurring amino acid
  misc_feature (43)..(43): Xaa can be any naturally occurring amino acid
  misc_feature (48)..(48): Xaa can be any naturally occurring amino acid
  misc_feature (59)..(59): Xaa can be any naturally occurring amino acid
  misc_feature (69)..(69): Xaa can be any naturally occurring amino acid
  misc_feature (88)..(88): Xaa can be any naturally occurring amino acid
  misc_feature (91)..(92): Xaa can be any naturally occurring amino acid
CFSPPGCSRALSAPWPFPFRRVXLVCFPAFSAPAPPPVVCLRXLSRLXGASFRVALPAXPALCLLGGAXCRLRPGPRGPCVFAWGALXWRXXKGRLPSPHASAAQEPSWVHWTSFCDFSPVGHVDKHVSPPPTLIFWSSRLRARGDIMTFCPGLLIPGHREGSWAVSVCVPSCCPSVLDVSWARGPPGKLTPPVLGGGHGTPQVPPTLALKQPPGKQPESRTAGSLSGFLRPGGGSPAHGAVVPAAGLSVGASWGSLAPGRL

SEQ ID NO: 1017757 - protein, 103 aa, Homo sapiens
LSIRVGINLAVSRCLGFSLGLMLIYTISTRHVFSQRRMADRAMRFALFALIGGAGLLLTEALLWLLVRQIGVAPLAPSSAALWSFLFNFSVAKSLLFTSLNPT

SEQ ID NO: 1017758 - protein, 329 aa, Homo sapiens
MQAHEDTGVSGKCTQTVVFPFWLKKKNFVINIPLKSKREKKKLDAFIRAFGISSPRFHVQFIGKCYRHQQTPVSKNKCQEGKSMNNRKLQRRLHAALGSVEADGVQKGAATLSPRTPAAASSISFSMSCRVLDTLAELTDEQRPQGGLLVVVLDVTIDHVHRQAGLLFSGIQICHHLVIHSLFASEDQIKQVFAVRGISLAGALILSFLSSTSAKIPSVYRVLCPFLRRSVVHLVISWFLQTHKHLGLSGAGPGSFIVSPMFTKDRTLNAPEYAEDDQCTYHAPGSGCIEHTHRHTRHAGTTAWRQAAKSRGISRLGSHPTAAIPREPA

SEQ ID NO: 1017759 - protein, 144 aa, Homo sapiens
  misc_feature (80)..(80): Xaa can be any naturally occurring amino acid
  misc_feature (137)..(137): Xaa can be any naturally occurring amino acid
PSPHMYWEKDGMALDEVWDSSHFALQPGRAEDGPGASHGIAHPWRTRLHGLPAVYVCHARNGTATQQAGALLQGGTSPPXARPRTPTKAPAPGGGALKCAPKTFWVNEGKHSQVPLLRDGQARARDRMALGGPPAAXGTGRRLN

SEQ ID NO: 1017760 - protein, 108 aa, Homo sapiens
MAVWPMSGGRAHGVAQAQRAGRVQADAYGGRAAGYGVLYKGGILPWVAKFDCPRRECEHVCVWGQFFLMSGVRMPGPSGLSVCCQPPTGGTAVHNQCRVCCCGTVVNR

SEQ ID NO: 1017761 - protein, 39 aa, Homo sapiens
GLISEDPSAAAILMEGSYNKVFLAKGNIPAESYTFFIGH

SEQ ID NO: 1017762 - protein, 85 aa, Homo sapiens
  misc_feature (1)..(1): Xaa can be any naturally occurring amino acid
XVSLILHQLFGPSTFFFPCLFPEPGGLSSTRSWSGLPCQGHTDQLSYIKHPVFPGAITLMEGSYNKVFLAKGNIPAESYTFFIGH

SEQ ID NO: 1017763 - protein, 211 aa, Homo sapiens
MTLRKLLFFSRPPLPRLCPGGGAYPAVSQGGLVAARVGSAFPLWESLGQHEPKGCGQAWCSRVLWLHRLPKKDNPRRGLWLANCQRMDPSGQGLWELASEYIYFCSKHFEEDCFELEGISGYHRLKEGAVPTHIGVFSKLRRTSKTKGHSYPAGPLKSAGSDDAGSAVSEGRGPTTPFSPLHLLMSPAFLWNRSQICQFGGLPVWEAEAWP

SEQ ID NO: 1017764 - protein, 149 aa, Homo sapiens
MTLRKLLFFSRPPLPRLCPGGGAYPAVSQGGLVAARVGSAFPLCGSLGQHEPKGCGQAWCSRVLWLHRLPKKDNPRRGLWLANCQRMDPSGQGLWELASEYIYFCSKHFEEDCFELVGIRWASLPADAWGRMWGSRTDLGQVQGHGMST

SEQ ID NO: 1017765 - protein, 269 aa, Homo sapiens
FPVNGPRGPSLNWAGPTDRILAAIRTGTKGPDKGIDPCRTCGRASGLRVSQEGDMVERPTRYGLHLQLDLKRGRRVSLEKRLVAEEEEDEEEVEEDGLSSCSEEDDSELLQEITDNRDGKKEIQIEKIHLDTSSFVEELAGEKDLAHVVEIYDFEPALKTEDLLARFSEFQEKGFRIQWVDDTHALGIFPCRASAAEALTREFSVLKIRPLTQGTKQSKLKALQRPKLLRLVKERPQTNATVARRLVARALGLQHKKKERPAVRGPLPP

SEQ ID NO: 1017766 - protein, 160 aa, Homo sapiens
NIELAPVSRLPVILRNDFLKDGYHIQTLIFYDKQFHPIDLINTTFEDQADKYIFWRYAADRAKITNAYGFIWISELWLRKASIYSNKPIHTMPIIDERLQVIGIDSNNNQKCISWKIVRENEEKKPTLEISTADSKHDEKPYFMRSVLKAIGGDVNTMNN

SEQ ID NO: 1017767 - protein, 500 aa, Homo sapiens
MATVIPGDLSEVRDTQKVPSGKRKRGETKPRKNFPCQLCDKAFNSVEKLKVHSYSHTGERPYKCIQQDCTKAFVSKYKLQRHMATHSPEKTHKCNYCEKMFHRKDHLKNHLHTHDPNKETFKCEECGKNYNTKLGFKRHLALHAATSGDLTCKVCLQTFESTGVLLEHLKSHAGKSSGGVKEKKHQCEHCDRRFYTRKDVRRHMVVHTGRKDFLCQYCAQRFGRKDHLTRHMKKSHNQELLKVKTEPVDFLDPFTCNVSVPIKDELLPVMSLPSSELLSKPFTNTLQLNLYNTPFQSMQSSGSAHQMITTLPLGMTCPIDMDTVHPSHHLSFKYPFSSTSYAISIPEKEQPLKGEIESYLMELQGGVPSSSQDSQASSSSKLGLDPQIGSLDDGAGDLSLSKSSISISDPLNTPALDFSQLFNFIPLNGPPYNPLSVGSLGMSYSQEEAHSSVSQLPTQTQDLQDPANTIGLGSLHSLSAAFTSSLSTSTTLPRFHQAFQ

SEQ ID NO: 1017768 - protein, 44 aa, Homo sapiens
MVPPVKTRFLHLPGHLNAPAHTVPLPGVMELGQPLLGFSFSLGV

SEQ ID NO: 1017769 - protein, 242 aa, Homo sapiens
AASTPASRSGPFRRSRPGTGHVGKLWDAVAEGAVSASAGPRSQHVVFIASRFHGPRRPVVAPNPRRGTAQVGGQTPAPQPLPAPRPAPALRLRLRDRGLGPASASGLAWEALGQVGARGSAGLQAAGSGREGGVRAVAHLAGRAGRHVVQPLVPVGSELREAGPGAQGEVIRVRETRAAPAKLLEQALRARRRELRVPLVLLLVELVTVEVAGLEAEVVAVAEERLPRHLPRGREVLHGARA

SEQ ID NO: 1017770 - protein, 141 aa, Homo sapiens
  misc_feature (6)..(6): Xaa can be any naturally occurring amino acid
  misc_feature (88)..(88): Xaa can be any naturally occurring amino acid
  misc_feature (92)..(92): Xaa can be any naturally occurring amino acid
  misc_feature (95)..(95): Xaa can be any naturally occurring amino acid
  misc_feature (128)..(128): Xaa can be any naturally occurring amino acid
  misc_feature (138)..(138): Xaa can be any naturally occurring amino acid
LLLAPXRPGMFLAMGRSRRTAAPRASLARQMKATAAPTLDEIHRELRLRDPHDPSPTQTPSSTPTCQGAACTLSGLREVLHRFHQPEXPLPXQRXQEKAEAAELRALQSGRGGEGSGYGILCAPQAAXQCHGKFPLRXLEM

SEQ ID NO: 1017771 - protein, 96 aa, Homo sapiens
ADKLQLIQLMTHDASERPSQDRVSRPPDPQAICFHEDDPFFYGEHLRKRGLFVAELLFITGIIILTSGKCRQLSRLMPESLQVSPSETGADNPLGT

SEQ ID NO: 1017772 - protein, 229 aa, Homo sapiens
GSELIFASTGARAVAHSPQPTAMGWDLTVKMLAGNEFQVSLSSSMSVSELKAQITQKIGVHAFQQRLAVHPSGVVLQDRVPSCPAQGTVVPWSALVLLAGGDIDATNLWNILVRNNKGRSSSYEVRLTQTVANLKQQVSGLEGVQDDLFWLTFEGKPLEDQLPAGEEYGLKRPEHQVHEVCACGEAAQSLAGGAKGLHQTSEAGSRAGNKGCCTRRNKHNTKTHKQKQR

SEQ ID NO: 1017773 - protein, 311 aa, Homo sapiens; identical to SEQ ID NO: 884578

SEQ ID NO: 1017774 - protein, 336 aa, Homo sapiens
ATADERGVLESRTRSRHRAPRLPPAMPAPRAPRALAAAAPASGKAKLTHPGKAILAGGLAGGIEICITFPTEYVKTQLQLDERSHPPRYRGIGDCVRQTVRSHGVLGLYRGLSSLLYGSIPKAAVRFGMFEFLSNHMRDAQGRLDSTRGLLCGLGAGVAEAVVVVCPMETIKVKFIHDQTSPNPKYRGFFHGVREIVREQGLKGTYQGLTATVLKQGSNQAIRFFVMTSLRNWYRGDNPNKPMNPLITGVFGAIAGAASVFGNTPLDVIKTRMQGLEAHKYRNTWDCGLQILKKEGLKAFYKGTVPRLGRVCLDVAIVFVIYDEVVKLLNKVWKTD

SEQ ID NO: 1017775 - protein, 311 aa, Homo sapiens
ATADERGVLESRTRSRHRAPRLPPAMPAPRAPRALAAAAPASGKAKLTHPGKAILAGGLAGGIEICITFPTEYVKTQLQLDERSHPPRYRGIGDCVRQTVRSHGVLGLYRGLSSLLYGSIPKAAVRFGMFEFLSNHMRDAQGRLDSTRGLLCGLGAGVAEAVVVVCPMETIKVKFIHDQTSPNPKYRGFFHGVREIVREQGLKGTYQGLTATVLKQGSNQAIRFFVMTSLRNWYRGDNPNKPMNPLITGVFGAIAGAASVFGNTPLDVIKTRMQGLEAHKYRNTWDCGLQILKKEGLKAFYLPLSHMIPVQ

SEQ ID NO: 1017776 - protein, 311 aa, Homo sapiens; identical to SEQ ID NO: 1017775

SEQ ID NO: 1017777 - protein, 336 aa, Homo sapiens; identical to SEQ ID NO: 1017774

SEQ ID NO: 1017778 - protein, 336 aa, Homo sapiens; identical to SEQ ID NO: 1017774

SEQ ID NO: 1017779 - protein, 112 aa, Homo sapiens
MCPPCGLCVTPPLCPSVWPSHGWMCIWPMTLCPLVHVLTVNPVPVFHVLCHVTLCPASRGARVAWVLGPVALARSQSGAFHPALAYHSCLRASAWLHRIPGAAAPCFSRHWP

SEQ ID NO: 1017780 - protein, 336 aa, Homo sapiens; identical to SEQ ID NO: 1017774

SEQ ID NO: 1017781 - protein, 311 aa, Homo sapiens; identical to SEQ ID NO: 884578

SEQ ID NO: 1017782 - protein, 211 aa, Homo sapiens [sequence omitted]

SEQ ID NO: 1017783 - protein, 365 aa, Homo sapiens
GFRLDVCWARRDPQERRERGTRVQSSGTWIGAGAMGGEQEEERFDGMLLAMAQQHEGGVQELVNTFFSFLRRKTDFFIGGEEGMAEKLITQTFSHHNQLAQKTRREKRARQEAERREKAERAARLAKEAKSETSGPQIKELTDEEAERLQLEIDQKKDAENHEAQLKNGSLDSPGKQDTEEDEEEDEKDKGKLKPNLGNGADLPNYRWTQTLSELDLAVPFCVNFRLKGKDMVVDIQRRHLRVGLKGQPAIIDGELYNEVKVEESSWLIEDGKVVTVHLEKINKMEWWSRLVSSDPEINTKKINPENSKLSDLDSETRSMVEKMMYDQRQKSMGLPTSDEQKKQEILKKFMDQHPEMDFSKAKFN

SEQ ID NO: 1017784 - protein, 274 aa, Homo sapiens
GFRLDVCWARRDPQERRERGTRVQSSGTWIGAGAMGGEQEEERFDGMLLAMAQQHEGGVQELVNTFFSFLRRKTDFFIGGEEGMAEKLITQTFSHHNQLAQKTRAGDEMMMALACDVPDAGRVMNGWDAGLCHDLCQWKPHVMDDLSVPPGVNVDANLIEGWHDDVACMLMQDFGPTQNWDCQKTSMKGPMSSKEDWVQSFDIPPYERAMPEKYPMSDVNDINVTGTALKTGTNCSKTLTPPSLMQPCGRTLSKITRVTQNPCPELVPGRSLSG

SEQ ID NO: 1017785 - protein, 365 aa, Homo sapiens; identical to SEQ ID NO: 1017783

SEQ ID NO: 1017786 - protein, 132 aa, Homo sapiens
GSAAQKQKISFLENNLEQLTKVHKQLVRDNADLRCELPKLEKRLRATAERVKALESALKEAKENAMRDRKRYQQEVDRIKEAVRAKNMARRAHSAQIAKPIRPGHYPASSPTAVHAIRGGGGSSSNSTHYQK

SEQ ID NO: 1017787 - protein, 110 aa, Homo sapiens
FASHADFRSESVGQGARRCLSGLGEQTLGYRPGENVKGMKSSRGEDYWIRLLTARSKHFLKMERFNGRVCVSCSRVVTLHTPSYARMKNLYSPPPATAARATHLKLMSLR

SEQ ID NO: 1017788 - protein, 92 aa, Homo sapiens
FASHADFRSESVGQGARRCLSGLGEQTLGYRPGENVKGMKSSRGEDYWIRLLTARSKHFLKMERFNGRVCVSCSRVVTLHTPSYARMIMSLR

SEQ ID NO: 1017789 - protein, 112 aa, Homo sapiens
MASSSGSKAEFIVGGKYKLVRKIGSGSFGDIYLAINIANGEEVAGKLGAEKARHPQLLYESKLYKILQGGVGIPHILWYGQEEDYKVLVMDLLGPSLEDLFNFCARRFTMRT

SEQ ID NO: 1017790 - protein, 112 aa, Homo sapiens; identical to SEQ ID NO: 1017789

SEQ ID NO: 1017791 - protein, 135 aa, Homo sapiens
ATLLPVHKRPSLLCLNMANKGPSYGMSAEVQSKIEKKYDEELEERLVEWIVVQCGPDVGRPDRGALGFQVWLKNGVILSKLVNSLYPEGSKPVKVPENPPSMVFKQMEQVAQFLKAAEDYGVIKTDMFQTVDLYE

SEQ ID NO: 1017792 - protein, 106 aa, Homo sapiens
IFFKRLSLVLSSRLECNSTIIAYCSLKLLASSNPPASDPQVAGTTAMWHYTWLIFKTFLVEMGFRHVGQAGLELLTSGDPPTSASQSARITGVTYRAGRTSCFLAE

SEQ ID NO: 1017793 - protein, 229 aa, Homo sapiens
MNLERVSNEENIGTLCRKYYLGGVCFLPFLWLVNIFLFFREALPCSQPTPEQEPKSTGYVVALKLWGFLFWVIVLTFLITIFQIYPAPVWCPCGEIPLSSPYPVVHPLKKCLQNTGALCNSSQDRLLKARGAWYWEALSSDSPKELVSSGPHGSLVTIPQRRDPELTKNTTTQRKKRGGRRRTESLKPAWEGPTEAANGPGTRDRQEGGSTKNGDGLDTQPERQKATNR

SEQ ID NO: 1017794 - protein, 229 aa, Homo sapiens; identical to SEQ ID NO: 1017793

SEQ ID NO: 1017795 - protein, 105 aa, Homo sapiens
  misc_feature (56)..(56): Xaa can be any naturally occurring amino acid
  misc_feature (65)..(65): Xaa can be any naturally occurring amino acid
  misc_feature (88)..(88): Xaa can be any naturally occurring amino acid
RFTVFNNAHAFGGGKGAFQIVGEIFCTAGRGENSQCHCCADSQVGNAEVAAANSVXPTSTVVTTXKRRRPSQRLRRIPECGGSRKSIXNLFGNTVSFGEATIPIA

SEQ ID NO: 1017796 - protein, 447 aa, Homo sapiens
MESGIVKITSLDGHAYLCLPRSQHEFTVHFLCKVSQKSDSSAVLSETNNKAPKDKLVEKTGKICIRGNLPGQRLKNKENEFHCQIMKSKETLKKMSCVNGTEGREELPSPGTKHTCVYTWVKQCWSVAACPEEWKYPLSLALHFHNKISNMSKIDAHITQSRFLTSDISEERGKVVSVLPRALSLSCPVPHLHRWNFCDSLLQRQSDEYSYPELVKMVWYKGVTYRLTHQNMNSIEIYSGDGSVFKSEGAYFGNYFTYYSIQEGSGKREEKTYSVNNLPPDRPGSPFTVGSLIKQATRILQHCVKMRLSLSHNYRICCWKMVPGINDSNILPLVLKESLIPSVGRFLAYSDDKVHAIFLDGITLTLNWNFSSPIEKRQVNQGLNLGWCKLTFPDGQEQLIQIEHPEPYERYVTTVTSWCRRLTQTSPREMPTHSSSSVLQENWYLSF

SEQ ID NO: 1017797 - protein, 564 aa, Homo sapiens
MAAELRMILYEDDSVQVQYVDGSTLQLSPCGSEFLFEKSPPVSAHPLEQPERIRQRTHFVISTYREQLQRALDFRNSSATCPFLSETIIPSERKKHIFIDITEVRWPSLDTDGTMIYMESGIVKITSLDGHAYLCLPRSQHEFTVHFLCKVSQKSDSSAVLSETNNKAPKDKLVEKTGKICIRGNLPGQRLKNKENEFHCQIMKSKETLKKMSCVNGTEGREELPSPGTKHTCVYTWVKQCWSVAACPEEWKYPLSLALHFHNKISNMSKIDAHITQSRFLTSDISEERGKVVSVLPRALSLSCPVPHLHRWNFCDSLLQRQSDEYSYPELVKMVWYKGVTYRLTHQNMNSIEIYSGDGSVFKSEGAYFGNYFTYYSIQEGSGKREEKTYSVNNLPPDRPGSPFTVGSLIKQATRILQHCVKMRLSLSHNYRICCWKMVPGINDSNILPLVLKESLIPSVGRFLAYSDDKVHAIFLDGITLTLNWNFSSPIEKRQVNQGLNLGWCKLTFPDGQEQLIQIEHPEPYERYVTTVTSWCRRLTQTSPREMPTHSSSSVLQENWYLSF

SEQ ID NO: 1017798 - protein, 268 aa, Homo sapiens
HSFLNVTQYVVKPKNPANPVHRILGEQLDATRVSLRVRWCPSIILTRGAALITESLDCGPREDISSCNHPEKCNRKDIAPTLTLYVGKKQLVEIEKVVSTPNYSQVDIGLIKLKQKVSVNERVMPICLPSKDYAEVGRVGYVSGWGRNANFKFTDHLKYVMLPVADQDQCIRHYEGSTVPEKEDTEEPCRGAAHTELNTPSVLALSKYQEDTCYGDAGQCLCRSRPGGGHLVCDWDLKLDKSCAVAEYGVYVKVTSIQDWVQKTIAEN

SEQ ID NO: 1017799 - protein, 112 aa, Homo sapiens
KKKFQFYLERSHFQHTCCLATLSRGDHSSQLTAALSTSQTCSPSTCPPWHLPLSHIMRAESRGLFLRTLEVQHGPGRARRRIRSVPEDMQQLLLISVKCVKPCTGLWTTLSC

SEQ ID NO: 1017800 - protein, 320 aa, Homo sapiens
ERSGIMRESALEPGLCPRRRLGGPVHAVTVVTLLEKLASMLETLRERQGGLARRQGGLAGSVRRIQSGLGALSRSHDTTSNTLAQLLAKAERVELARQAPPKSARCAAQPQVQRLEANHGLLVARGKLHVLLFKEEGEVPASAFQKAPEPLGPGGPVRAWAQEQPEGRKLEESSERRSRWSPGAQQAVGSTGLQEGTEPFRKGPFRGRKGPEAPTIHSRSEPRRLGPGPERKKPRRNAQTCAWSPRWSQSLRRTTEEDPGRTGAAEKALGPIGRVLALKGWMFGLTTLVLVPLYQNKSFRPYNHAYEGGNPINKGGALDY

SEQ ID NO: 1017801 - protein, 95 aa, Homo sapiens
CPIIDMASAWAKRARGNVFMYHAPENYGHGSLELLADVQFALGLPFYPAYEGQFFLEEKSLSLKIMQYFSHFIRSGNPNYPYEFSRKVPTFANPL

SEQ ID NO: 1017802 - protein, 182 aa, Homo sapiens
SGRRARRGLKMAACGRVRRMFRLSAALHLLLLFAAGAEKLPGQGVHSQGQGPGANFVSFVGQAGGGGPAGQQLPQLPQSSQLQQQQQQQQQQQQPQPPQPPFPAGGPPARRGGAGAGGGWKLAEEESCREDVTRVCPKHTWSNNLAVLECLQDVREPENEISSDCNHLLWNYKAEPNYRSQT

SEQ ID NO: 1017803 - protein, 195 aa, Homo sapiens
QDPPSGDRLSSLRRLGLVYFLYLFLFSGLENTLSSFTHQRFQFSSLQQGKMFFLIGLTMATIQGAYARRIHPGGEVAAVKRALLLLVPAFLLIGWGRSLPVLGLGLLLYSFAAAVVVPCLSSVDAGYGSPGQKGTVMGTLRSQGALARAAGPLKTTWGDWLAGAQACFTTWSGLFLLPFFLLQKLSYPAQTLKAE

SEQ ID NO: 1017804 - protein, 236 aa, Homo sapiens
QDPPSGDRLSSLRRLGLVYFLYLFLFSGLENTLSSFTHQRFQFSSLQQGKMFFLIGLTMATIQGAYARRIHPGGEVAAVKRALLLLVPAFLLIGWGRSLPVLGLGLLLYSFAAAVVVPCLSSVDAGYGSPGQKGTVMGTLRSQGALARAAGPLKTKGAGGPPGEGAGRRRGRLGAKHQPPPPKRQPPRGLGDATVSPQWTGWLGAQACFTTWSGLFLLPFFLLQKLSYPAQTLKAE

SEQ ID NO: 1017805 - protein, 250 aa, Homo sapiens
IELVPLAHKDSQSTGITACATVPGLVQIKFYWNTATPTGKAKPTWLLCYNNRVEWRRSRTVWASKSKLLTSWLFIETFSDPQPKSSQADGTGLGFPVLVWLAPLSPDCLFPAFQKQAGGLGKKWNLQGVISPKPMLKDAMPSTRLFCALHRTGGLEQGRWTFRLEPGFLWWDVLWVPRPPYCIFRDRIWLGLRVYLALSDLYSGEIDVSFPDTDVAKQTGSGAGFAKARHGSGGLDRAPANSCCLTKDRM

SEQ ID NO: 1017806 - protein, 108 aa, Homo sapiens
GNISNVDTNGEHLESYEAEISTRPCLALAPDSPDNDLRAGQFGISARKPFTTLEVTVAPVCVYRILSAPNCMKCEARFTFTKRRHHCRACGKVFLCFPAVSPENVNLF

SEQ ID NO: 1017807 - protein, 236 aa, Homo sapiens
ARPSVDIYPLALRPCRIAEIQAQRDTREPTMAPFEPLASGILLLLWLIAPSRACTCVPPHPQTCFCNSDLVIRAKFVGTPEVNQTTLYQRYEIKMTKMYKGFQALGDAADIRFVYTPAMESVCGYFHRSHNRSEEFLIAGKLQDGLLHITTCSFVAPWNSLSLAQRRGFTKTYTVGCEECTVFPCLSIPCKLQSGTHCLWTDQLLQGSEKGFQSRHLACLPREPGCDLQSLGSQIA

SEQ ID NO: 1017808 - protein, 388 aa, Homo sapiens
MASLLGAYPWPEGLECPALDAELSDGQSPPAVPRPPGDKGSESRIRRPMNAFMVWAKDERKRLAVQNPDLHNAELSKMLGKSWKALTLSQKRPYVDEAERLRLQHMQDYPNYKYRPRRKKQAKRLCKRVDPGFLLSSLSRDQNALPEKRSGSRGALGEKEDRGEYSPGTALPSLRGCYHEGPAGGGGGGTPSSVDTYPYGLPTPPEMSPLDVLEPEQTFFFLPLPGGAWPSPPDSPTCQGTRTHRSTPKPSPCCHPLGSLALGQSPGVSMMSPVPGCPPSPAYYSPATYHPLHSNLQAHLGQLSPPPEHPGFDALDQLSQVELLGDMDRNEFDQYLNTPGHPDSATGAMALSGHVPVSQVTPTGPTETSLISVLADATATYYNSYSVS

SEQ ID NO: 1017809 - protein, 126 aa, Homo sapiens
  misc_feature (88)..(93): Xaa can be any naturally occurring amino acid
  misc_feature (95)..(95): Xaa can be any naturally occurring amino acid
  misc_feature (97)..(97): Xaa can be any naturally occurring amino acid
  misc_feature (102)..(103): Xaa can be any naturally occurring amino acid
  misc_feature (105)..(105): Xaa can be any naturally occurring amino acid
  misc_feature (109)..(109): Xaa can be any naturally occurring amino acid
  misc_feature (112)..(112): Xaa can be any naturally occurring amino acid
  misc_feature (116)..(116): Xaa can be any naturally occurring amino acid
  misc_feature (123)..(123): Xaa can be any naturally occurring amino acid
MASLLGAYPWPEGLECPALDAELSDGQSPPAVPRPPGDKGSESRIRRPMNAFMVWAKDERKRLAVQNPDLHNAELSKMLGKVVGRGRXXXXXXWXNXSILFXXVXDYSXLRXGRRXRLVCILXLGL

SEQ ID NO: 1017810 - protein, 189 aa, Homo sapiens
GRPKLINQGPGRGCGLSWTPRPVRGPGPRLPRQAKRGDPRAAMASLLGAYPWPEGLECPALDAELSDGQSPPAVPRPPGDKGSESRIRRPMNAFMVWAKDERKRLAVQNPDLHNAELSKMLGEERAAERAGGRGRAAGGWRHCRAGASAEPVEDPARGTRALFVPAWLAICASVGARGAQDSERGHLAR

SEQ ID NO: 1017811 - protein, 122 aa, Homo sapiens
MRLCLKQLPSTLSTYVLPAYTFRQTSLCARAILVTAVYFSGPPQYPVSPGFLTVPACIPVGAPLCDTPFLLCETPPHRCGCRGTHHCLGQSLCLPDAVRSSLVVVVRRACDGVLSIVWGAAH

SEQ ID NO: 1017812 - protein, 53 aa, Homo sapiens
MAELQMLLEEEIPGGRRALFDSYTNLERVADYCENNYIQSADKQRALEETQSL

SEQ ID NO: 1017813 - protein, 113 aa, Homo sapiens
  misc_feature (107)..(107): Xaa can be any naturally occurring amino acid
VKGEARPADFPADPPVASCRAVEPILSNASKVSEADAEAATFRANDHQHIRYNPLQDEWVLVSAHRNEGGPGQGSTVGRPKLSEEQVPRHDPFFKPSGVPGAIRSQXEKVKPV

SEQ ID NO: 1017814 - protein, 99 aa, Homo sapiens
PGAVAHSILQALWRGQSKLILSPGVRNWPVQHGETLTLLKLQKLAGCGGAFLQSQLLRRLRHENHLNPGAGDYSELRLCHMHSSLGERVKLCLKNNKIK

SEQ ID NO: 1017815 - protein, 185 aa, Homo sapiens
MLPLSLLKTAQNHPMLVELKNGETYNGHLVSCDNWMNINLREVICTVQGLGTKFWRDALKCYIQRHAPSMYLRIPNKIINMVNGGVWWPMAAAAEACSIISIIKATAWAALAEVCLVAGANVGSQTHAYAIHIIILAYMLTNSERPPIPAAAPPPTKVANSTPQSQTDLLIKEDACTMGNPLHNL

SEQ ID NO: 1017816 - protein, 103 aa, Homo sapiens
MLPLSLLKTAQNHPMLVELKNGETYNGHLVSCDNWMNINLREVICTVQGLGTKFWRDALKCYIQRHAPSMYLRIPNKIINMVNGGVWWPMVPAGLRECHCMHA

SEQ ID NO: 1017817 - protein, 120 aa, Homo sapiens
MFKFHQMKHIFEILDKMRCLRKRSTVSFLGVLVIFLLFMNLYIEDSYVVEGDKQLIRETSTHQLNSERYVHTFKDLSNFSGAINVTYRYLAATPLQRKPTQEAEEAKAQESPEPGRWRLQ

SEQ ID NO: 1017818 - protein, 544 aa, Homo sapiens
SGRITHASRLHRALLDLAERMFSLSLGINWFLYSTDYDSVFLKRQVLTTLPRLVSSSGPQAILPPQPPKALKLQTKRMFKFHQMKHIFEILDKMRCLRKRSTVSFLGVLVIFLLFMNLYIEDSYVVEGDKQLIRETSTHQLNSERYVHTFKDLSNFSGAINVTYRYLAATPLQRKRYLTIGLSSVKRKKGNYLLETIKSIFEQSSYEELKEISVVVHLADFNSSWRDAMVQDITQKFAHHIIARKIKVIHAPEEYYPILDGLKRNYNDPEDRVKFRSKQNVDYAFLLNFCANTSDYYVMLEDDVRCSKNFLTAIKKVIASLEGTYWVTLEFSKLGYIGKLYHSHDLPRLAHFLLMFYQEMPCDWLLTHFRGLLAQKNVIRFKPSLFQHMGYYSSYKGTENKLKDDDFEEESFDIPDNPPASLYTNMNVFENYEASKAYSSVDEYFWGKPPSTGDVFVIVFENPIIIKKIKVNTGTEDRQNDILHHGALDVGENVMPSKQRRQCSTYLRLGEFKNGTLKCQGVNPKIPFDIPCMRIYVTKTQKEW

SEQ ID NO: 1017819 - protein, 123 aa, Homo sapiens
  misc_feature (8)..(9): Xaa can be any naturally occurring amino acid
  misc_feature (74)..(74): Xaa can be any naturally occurring amino acid
  misc_feature (81)..(81): Xaa can be any naturally occurring amino acid
  misc_feature (120)..(120): Xaa can be any naturally occurring amino acid
  misc_feature (122)..(122): Xaa can be any naturally occurring amino acid
RREDGRPXXAPDEEAGEAAASRMEQMKQRIAEENIMKSNIDKKFSAHYDAVEAELKSSTVGLVTVNDMKAKQEXLVKEREXQLAKKEQFKELQMKLEKLREKERKKEAKRKISSLSFTLXEXE

SEQ ID NO: 1017820 - protein, 201 aa, Homo sapiens
RLSGNGSVGRNSNQRFHAAWSRMRSSNEEVAANCWKAAAETADIDSVHRRPRAQGTRSPASSRCHLPERITTREVTPLDQQPLDIQPVLRHDKEVLWTCMHGSPKTTSLAAFAASTETLTPTPERNEGVYTAIAVQEIQGNPASPAQEYRALYDYTAQNPDELDLSAGDILEVILEGEDGWWTVERNGQRGFVPGSYLEKL

SEQ ID NO: 1017821 - protein, 201 aa, Homo sapiens; identical to SEQ ID NO: 1017820

SEQ ID NO: 1017822 - protein, 110 aa, Homo sapiens
GENYDDKLRGMGGPVRWVTPILCPKGLPCPPWETCRIYCWVGERQAPPCRPFPAGPSNVMRFQSLGQNPDELDLSAGDILEVILEGEDGWWTVERNGQRGFVPGSYLEKL

SEQ ID NO: 1017823 - protein, 184 aa, Homo sapiens
GLEPTFALIRKMNLCWSNTKKEEKELERRKELKKIRVKYGLQNTEYEDEKTLKNPKYKDRAGKRREQVGSEGTFQRDDAPASVHSEITDSNKGRKMLEKMGWKKGEGLGKDGGGMKTPIQLQLRRTHAGLGTGKPSSFEDVHLLQNKNKKNWDKARERFTENFPETKPQKDDPGTMPWVKGTLE

SEQ ID NO: 1017824 - protein, 184 aa, Homo sapiens; identical to SEQ ID NO: 1017823

SEQ ID NO: 1017825 - protein, 184 aa, Homo sapiens; identical to SEQ ID NO: 1017823

SEQ ID NO: 1017826 - protein, 109 aa, Homo sapiens
LDDRCMPPCLAHFSTLGRDGGAPCSSSWYQHSWPQAVCFPWPPQVLGITGVSPCARRIPFNFAETISHSPFSASSYLLLPPPGLLCMTDSQLAASVELSVLTGNSLTLL

SEQ ID NO: 1017827 - protein, 79 aa, Homo sapiens
GSGVLGVRGAVRRVGPSGSAEVGTCCRPECYRLLDLWMRKRILRRRIVLNWFPLRRRKARRRKSLASAPRSQSQLSPGI

SEQ ID NO: 1017828 - protein, 113 aa, Homo sapiens [sequence omitted]

SEQ ID NO: 1017829 - protein, 411 aa, Homo sapiens
MLPAVGSVDEEEDPAEEDCPELVPIETTQSEEEEKSGLGAKIPVTIITGYLVIQRLSAEKDEQISWSQNNVFQTCPLGPFPYCSLGAGKTTLLNYILTEQHSSLAVSQGGELYEEWLELRNGCLCCSVKDNGLRAIENLMQKKGKFDYILLETTGLADPGAVASMFWVDAELGSDIYLDGIITIVDSKYGLKHLTEEKPDGLINEATRQVALADAILINKTDLVPEEDVKKLRTTIRSINGLGQILETQRSRVDLSNVLDLHAFDSLSGISLQKKLQHVPGTQPHLDQSIVTITFEVPGNAKEEHLNMFIQNLLWEKNVRNKDNHCMEVIRLKGLVSIKDKSQQVIVQGVHELYDLEETPVSWKDDTERTNRLVLLGRNLDKDILKQLFIATVTETEKQWTTRFQEDQVCT

SEQ ID NO: 1017830 - protein, 429 aa, Homo sapiens
MLPAVGSVDEEEDPAEEDCPELVPIETTQSEEEEKSGLGAKIPVTIITGYLVIQRLSAEKDEQISWSQNNVFQTCPLGPFPYCSLGAGKTTLLNYILTEQHSKRVAVILNEFGEGSALEKSLAVSQGGELYEEWLELRNGCLCCSVKDNGLRAIENLMQKKGKFDYILLETTGLADPGAVASMFWVDAELGSDIYLDGIITIVDSKYGLKHLTEEKPDGLINEATRQVALADAILINKTDLVPEEDVKKLRTTIRSINGLGQILETQRSRVDLSNVLDLHAFDSLSGISLQKKLQHVPGTQPHLDQSIVTITFEVPGNAKEEHLNMFIQNLLWEKNVRNKDNHCMEVIRLKGLVSIKDKSQQVIVQGVHELYDLEETPVSWKDDTERTNRLVLLGRNLDKDILKQLFIATVTETEKQWTTRFQEDQVCT

SEQ ID NO: 1017831 - protein, 113 aa, Homo sapiens [sequence omitted]

SEQ ID NO: 1017832 - protein, 395 aa, Homo sapiens
MLPAVGSADEEEDPAEEDCPELVPMETTQSEEEEKSGLGAKIPVTIITGYLGAGKTTLLNYILTEQHSKRVAVILNEFGEGSALEKSLAVSQGGELYEEWLELRNGCLCCSVKDNGLRAIENLMQKKGKFDYILLETTGLADPGAVASMFWVDAELGSDIYLDGIITIVDSKYGLKHLTEEKPDGLINEATRQVALADAILINKTDLVPEEDVKKLRTTIRSINGLGQILETQRSRVDLSNVLDLHAFDSLSGISLQKKLQHVPGTQPHLDQSIVTITFEVPGNAKEEHLNMFIQNLLWEKNVRNKDNHCMEVIRLKGLVSIKDKSQQVIVQGVHELYDLEETPVSWKDDTERTNRLVLLGRNLDKDILKQLFIATVTETEKQWTTRFQEDQVCT

SEQ ID NO: 1017833 - protein, 216 aa, Homo sapiens
MLTQLKAKSEGKLAKQICKVVLDHFEKQYSKELGDAWNTVREILTSPSCWQYAVLLNRFNYPFELEKDLHLKGYHTLSQGSLPNYPKSVKCYLSRTPGRIPSERHQIGNLKKYYLLNAASLLPVLALELRDGEKVLDLCAAPGGKSIALLQCACPGYLHCNEYDSLRLRWLRQTLESFIPQALINVIKVSELDGRKMGDAQPEMFDKVLVGCSVFK

SEQ ID NO: 1017834 - protein, 220 aa, Homo sapiens
MLTQLKAKSEGKLAKQICKVVLDHFEKQYSKELGDAWNTVREILTSPSCWQYAVLLNRFNYPFELEKDLHLKGYHTLSQGSLPNYPKSVKCYLSRTPGRIPSERHQIGNLKKYYLLNAASLLPVLALELRDGEKVLDLCAAPGGKSIALLQCACPGYLHCNEYDSLRLRWLRQTLESFIPQALINVIKVSELDGRKMGDAQPEMFDKVLLLHCDKLMDAQ

SEQ ID NO: 1017835 - protein, 301 aa, Homo sapiens
GTKLLKAGLRRHGGYPESLAGRARFRRRHSLWVRDPGGGGPRPYWPGAGPRFRLGAGGTGAAGGGEVPASPRALSLKQGLVPRRSRPRPLGAGCPAAACAEALVSSYPLLGAQRQVFSSPGPLVPSLVTYFIISLESSACLQAVIVLGVSFLGVRSSSKPATWPGCPCDQREEGWALHDVDLRRFKTYILLPRMVLSLVLFPQHPETTETSNPIPEKFGGKMEAPGGPGQDPDVWKPMEQIRNLHEEFQSPGQFQVVKDDVSLMCRRVEKQFYPIGQKREQIKVLEGGATEASGGNKSRAR

SEQ ID NO: 1017836 - protein, 98 aa, Homo sapiens
IALVVPPRGLDPKLRPLSILNNGKGLPLVALRLLHLSDFPDQGGRIGVQPGFPSMATIPLAQCSALPRASVSPSVELSVASTSKMWTLVRSRWLTPGL

SEQ ID NO: 1017837 - protein, 111 aa, Homo sapiens
IALVVPPRGLDPKLRPLSILNNGKGLPLVALRLLHLSDFPDQGGRIGVQPGFPSMATIPLAQCSALPRASVSPSVELSVASTSKMWTLVRSRWLTPVSNPSTLGDQGGPIT

SEQ ID NO: 1017838 - protein, 133 aa, Homo sapiens
MRLGDTGWSFTSFLLDPGLAGEGGSGTGLTCSDPRCRATRDTLWLHSRAAATKRLAPPPTGAGFEDARLPRGSSSAGLCSYVHSFDITSRGCVRSCVVSISHPLCAALLPASRMYNVEIHGTKFLQRPCRMVP

SEQ ID NO: 1017839 - protein, 298 aa, Homo sapiens
WDPGHRVRHKGRPGEHSTARSSYQQGPQGPGQAHAGVRHLEASIVPGHRPGGLGIKGYGQNACAIPETTVVIVTWWNVAPAAFAFRPWTLRVMGSAPPGPLLPSSVLDLGLPVTQPVSCLCTVSCPLGIPQSHPTPPKSKLQVRPCPESFSRCDLAYPGRLPCHDSNSLPIRAQGTWAVARLGRLKNLRMEAAVRGPDGAHHPGPKSSSWRASRLLPGYRAEAITMDAYVGRDLECGTTSPSPARNPSHSHGDTSAPITQREQDGAQRLLDTGPSPLSRDPPLMTDSTPLTLGSDPVG

SEQ ID NO: 1017840 - protein, 69 aa, Homo sapiens
  misc_feature (9)..(9): Xaa can be any naturally occurring amino acid
  misc_feature (16)..(16): Xaa can be any naturally occurring amino acid
  misc_feature (38)..(38): Xaa can be any naturally occurring amino acid
SLQENGKKXPKHPKGXLVPVEDIKAKMQASKKKRIEQXRAPTCKLSPKMGRKEKESQKIVHTEVINNPD

SEQ ID NO: 1017841 - protein, 137 aa, Homo sapiens
FGTEGRESEFSRVLPKLVWNSWAQAILPPPSVEIIGMSRGQFGQGQEPLDMFFWVNEISGEITYPPQKADAPAVSPESPQKKPPFQPRSVQEAPCSPQGPPAQRPALAPPSKPSLKDSGSRNPCPSAPTWARPKPEE

SEQ ID NO: 1017842 - protein, 274 aa, Homo sapiens
HQSLLSSDDQIFIYETAGVLIVNSEYPAERKQALMRNLLTPLMEKFKILLEKLMLAQDEERQASLADCLNHAVGFASRTSKAFSNKQTVKQCGCSEVYLDCLQDILASPQLSLTKGYSQKWSPYFPSSNDYCLEEEVLPFIPSASEHMLKDCEAKDLQEFIPLINQITANSRYRYPRFYNRCSCPCFMQFLEVLLRPAEENDQSAALEKQMLRRSYFAFLQTVTGSGMSEVIANQGAENVERVLVTVIQGAVEYPDPPNQQHHQTAAPPGQQTT

SEQ ID NO: 1017843 - protein, 271 aa, Homo sapiens
HQSLLSSDDQIFIYETAGVLIVNSEYPAERKQALMRNLLTPLMEKFKILLEKLMLAQDEERQASLADCLNHAVGFASRTSKAFSNKQTVKQCGCSEVYLDCLQDILASPQLSLTKGYSQKWSPYFPSSNDYCLEEEVLPFIPSASEHMLKDCEAKDLQEFIPLINQITANSRYRYPRFYNRCSCPCFMQFLEVLLRPAEENDQSAALEKQMLRRSYFAFLQTVTGSGMSEVIANQGAENVERVLVTVIQGAVEYPDPIAQKHMFYHPLKSW

SEQ ID NO: 1017844 - protein, 179 aa, Homo sapiens
  misc_feature (4)..(5): Xaa can be any naturally occurring amino acid
DKEXXKIKIIRELQLTKRVGRSASSSNCCLQFLEGSGEKNAPTAVLRKRQEEMRPLDIDEVEAPEEVEVLEPEEDFEQFLLPVINEMREDIASLIREHGRAYLRTRSKLWEMDNMLIQIKTQVEASEESALNHVQHPSGEADERVSELCEKAEEKAKEIAKMAEMLVELVWRIERSESS

SEQ ID NO: 1017845 - protein, 179 aa, Homo sapiens; identical to SEQ ID NO: 1017844
  misc_feature (4)..(5): Xaa can be any naturally occurring amino acid

SEQ ID NO: 1017846 - protein, 179 aa, Homo sapiens; identical to SEQ ID NO: 1017844
  misc_feature (4)..(5): Xaa can be any naturally occurring amino acid

SEQ ID NO: 1017847 - protein, 115 aa, Homo sapiens
NIRSGSEARVLSDVTFTFCRIVRPRQPPGTDPHPSPLITLETQKDTRIKLMKTHGRTSVSGTLEVKSYLLGVEQQNPWMVLSLTFLYPSLWTPPHQPFKTLMGKRSCRPVALAST

SEQ ID NO: 1017848 - protein, 147 aa, Homo sapiens
LVGRAEAGALGSARPAAIRGGTRRRATIMPGHLQEGFGCVVTNRFDQLFDDESDPFEVLKAAENKKKEAGGGGVGGPGAKSAAQAAAQTNSNAAGKQLRKESQKDRKNPLPPSVGVVDKKEETQPPVALKKEGIRRVGRRPDQQLQG

SEQ ID NO: 1017849 - protein, 84 aa, Homo sapiens
  misc_feature (8)..(8): Xaa can be any naturally occurring amino acid
  misc_feature (20)..(20): Xaa can be any naturally occurring amino acid
  misc_feature (78)..(78): Xaa can be any naturally occurring amino acid
SGHVDKFXDFMVKDVKNGEXFRADHLLKAHLQKLMSDKKCSVEKKSEMESVFGPSLYYTMDMQDTCGIFFVYYNVKSXITGNDL

SEQ ID NO: 1017850 - protein, 169 aa, Homo sapiens
GISNELPDIGDAAWLEDYLRTPMSSGNLRALGPTRLYPMNKLLCWSPSVSRKSFNIKLLGGLPKITQALLKTQRSGNPNRFGDEMGKTRAAPRREERPENPEIGLVKGADQVPGAAPRPVRLPSPPARTVPTPRSSSPSPPAPPCTADPGPPGKRPGLTWLGALGRSQV

SEQ ID NO: 1017851 - protein, 208 aa, Homo sapiens
KAAAAVAFGAEVGVRLALFAAFLVTELLPPFQRLIQPEEMWLYRNPYVEAEYFPTKPMFVIAFLSPLSLIFLAKVLKKADIKRQQTSLPGCQPCLLSLIFLAKFLKKADTRDSRQACLAASLALALNGVFTNTIKLIVGRPAPRISFYRCFPDGLAHSDLMCTGDKDVVNEGRIELHPVGHSSVYEYTYGSLPYAVVFHIIEFNLERD

SEQ ID NO: 1017852 - protein, 202 aa, Homo sapiens
  misc_feature (66)..(66): Xaa can be any naturally occurring amino acid
  misc_feature (76)..(76): Xaa can be any naturally occurring amino acid
  misc_feature (80)..(80): Xaa can be any naturally occurring amino acid
  misc_feature (103)..(103): Xaa can be any naturally occurring amino acid
  misc_feature (108)..(108): Xaa can be any naturally occurring amino acid
  misc_feature (133)..(133): Xaa can be any naturally occurring amino acid
  misc_feature (167)..(167): Xaa can be any naturally occurring amino acid
MAWETGHLNEVVRASEVDRVRTGSRQRKATLPSKVIREWRRTARSAMLTRLKITFLCSRGSYADTXGFFRAAPPDXDEHXSVRFSLSEVSIENKALHIAVQVXFIAAXSVTAHSAVLVIEDSLRSRWCDLSGXIGCCQAHVQQQCAPSSSERHVVALGPLGLQQKTXLLLGLEAEGEHVHRLRLTPRGKRRRWHRRRRNRVC

SEQ ID NO: 1017853 - protein, 91 aa, Homo sapiens
VWRMPLFEHYTRQVVDCQLADVNNIGKYRSAGACTAAAFLKEFVTHPKWAHLDIAGMMTNKDEVPYLRKGMTGRPTRLSSRFLLRFNQDNA

SEQ ID NO: 1017854 - protein, 79 aa, Homo sapiens
LPQPRIARLDRFIVLQHITFAPIAVTQPEEALVTDSGLEDRAKRAPRSPDCLFHEDWSLPFVNVMCHYILHVSLGMHLL

SEQ ID NO: 1017855 - protein, 137 aa, Homo sapiens
IVVLFGISITGGLFYTIFKELFSSSSPSKIYGRALEKCRSHPEVIGVFGESVKGYGEVTRRGRRQHVRFTEYVKDGLKHTCVKFYIEGSEPGKQGTVYAQVKENPGSGEYDFRYIFVEIESYPRRTIIIEDNRSQDD

SEQ ID NO: 1017856 - protein, 126 aa, Homo sapiens
IVVLFGISITGGLFYTIFKELFSSSSPSKIYGRALEKCRSHPEVIGVFGESVKGYGEVTRRGRRQHVRFTEYVKDGLKHTCVKFYIEGSEPGKQGTVYAQVKEVWESWDVGSEVLSAVLFKFWKGK

SEQ ID NO: 1017857 - protein, 137 aa, Homo sapiens; identical to SEQ ID NO: 1017855

SEQ ID NO: 1017858 - protein, 225 aa, Homo sapiens
  misc_feature (151)..(151): Xaa can be any naturally occurring amino acid
  misc_feature (183)..(183): Xaa can be any naturally occurring amino acid
  misc_feature (199)..(199): Xaa can be any naturally occurring amino acid
  misc_feature (218)..(218): Xaa can be any naturally occurring amino acid
LGHLLPLSSPDSGILSSEPTIWGPAFRHHPKGFPTFACPGVCPQGPLSGHGQKGPGPGSWGCGHSALSWITPVGDRSERAEAPCGVAPQARITGGSSAVAGQWPWQVSITYEGVHVCGGSLVSEQWVLSAAHCFHSEHHKEAYEVKLGATXKTPTPRTQGQHLKDIIPTPATPGGLQGDIALXNSADHTFSATSAICSXQQRSSQRLTDCTGWGMWPXVSSDAKH

SEQ ID NO: 1017859 - protein, 119 aa, Homo sapiens
MTGDEATQSQAVQEPGPAPDAAPEGCTYDRPCRWLQMADLRAETPDMLADGTRLQLAGVPVGVLRTPGLRCFYCCTGCGKVFWDGSHLGRVATHFRDMLESAPSPCEPSPAPSPASSPF

SEQ ID NO: 1017860 - protein, 174 aa, Homo sapiens
PMQQAKAVLKHFNVRVTHADIFSRCQACNCDQLPKGLQDMMKQLMWLSSHQEGPRSSGDEATQSQAVQEPGPAPDAAPEGCTYDRPCRWLQMADLRAETPDMLADGTRLQLAGVPVGVLRTPGLRCFYCCTGCGKVFWDGSHLGRVATHFRDMLESAPSPCEPSPAPSPASSPF

SEQ ID NO: 1017861 - protein, 115 aa, Homo sapiens
MAVRLGALGQPPDAVTTDAAPCVIWCCLALRGGLAGDWVSPLVPHVTALDTERGSVGGVDKGPLVTCPPDGLSSHTCTRISDRELQVGLAWEGGIHLSDSYGSIYTLRLDPSDPH

SEQ ID NO: 1017862 - protein, 115 aa, Homo sapiens
MAVRLGALGQPPDAVTTDAAPCVIWCCLALRGGLAGDWVSPLVPHVTALDTERGSVGGVDRDPWGLAPPTVSVVTPAPESLTDSCRLAWPGRAVSTLSDSYGSIYTLRLDPSDPH

SEQ ID NO: 1017863 - protein, 292 aa, Homo sapiens
LRARADVHRRGAGMGPLTLGAALHEHQPRARTEASRWLTRTLLASAPVQQMVASRHRGACGYLLSFIDAPLCTVVEGFACKFSAALPMASELGLPFLPRTCGGLSLYQKWKCLRVIARGVRGASCTLVAPKWCPVVLPTVGFQGPLTRFHVGTKWVCPSVERLGEGAPRGNPSDPSWRRLPAPPLVDDCVAKLSRAILMFDRALLNPKCERAFPCGWVLTPLDPCCTFYRHPFVLGWGGGLGPAFVDTWWTVWTPGPPLGGLSAWDKCLQGLHADVVRTRDVWGCLGGSELA

SEQ ID NO: 1017864 - protein, 122 aa, Homo sapiens; identical to SEQ ID NO: 789318

SEQ ID NO: 1017865 - protein, 86 aa, Homo sapiens
RFRGRRIDFTTVEKEDPAHFVISRKPRDSPEERLKSRKTGKSESPGACAAQSASRGCSREDPSASHCIRRPDLTYPLAFYPCAAVA

SEQ ID NO: 1017866 - protein, 272 aa, Homo sapiens
EFKPLLLNDLLMVLSPRLDHTRAVNYLQAKVKQLPLVKPHYAFSSEPVNNKSVNESLYQDFLLQEEDYQALRASLDAFDKFEKLSLAQSLEKNMNSLSSEEIAAYLFDRQQDAGNRVYELCTERQPLQGMQCSMLLNLGILIVWAEELLQWFCRKKKESAWSLSVYLLRSFKARCRPRNCMEAQYHGFAMPYFIQVMKEYFDKVATLDGSESLRTRRKNKLQRHNQCLWSSPSVMLAAGASVAVPPQATLVYGYTAPAVWTATRLVWVRHVE

SEQ ID NO: 1017867 - protein, 542 aa, Homo sapiens
SNTPGSYTDVSASSGYHLFQLTENHCEDIDQCDFPADCVGGDGININGSYRCLCPQGRSAGGWHEMPTHRSVQPRYPETMLTFPYGGACQEPFDGHPYDVCLAHEGFDRTLPEVPARVVREVEAVPTTETECYLNFDRLQWFFAELGSNYGHPKRDTQTRSAACSLGAGWGDHCEICLFSRSPAAAEFHSLCPDGKGYTQDNNIVNYGIPAHRDIDECMLFGSEICKEGKCVNTQPGYECYCKQGFYYDGNLLECVDVDECLDESNCRNGVCENTRGGYRCACTPPAEYSPAQRQCLSPEEMERAPERRDVCWSQRGEDGMCAGPLAGPALTFDDCCCRQGRGWGAQCRPCPPRGAGSHCPTSQSESNSFWDTSPLLLGKPPRDEDSSEEDSDECRCVSGRCVPRPGGAVCECPGGFQLDASRARCVDIDECRELNQRGLLCKSERCVNTSGSFRCVCKGRLRGAAGPHGGLRSPAPPADGAATPPSAQTSVITGGISREARAHFWPRLVGSGPRDPSGPGEPFPGRLENPEAPLTGPPSPG

SEQ ID NO: 1017868 - protein, 350 aa, Homo sapiens
CAQPTPPGCSCGTGAASVCHPADIDECMLFGSEICKEGKCVNTQPGYECYCKQGFYYDGNLLECVDVDECLDESNCRNGVCENTRGGYRCACTPPAEYSPAQRQCLSPEEMERAPERRDVCWSQRGEDGMCAGPLAGPALTFDDCCCRQGRGWGAQCRPCPPRGAGSHCPTSQSESNSFWDTSPLLLGKPPRDEDSSEEDSDECRCVSGRCVPRPGGAVCECPGGFQLDASRARCVDIDECRELNQRGLLCKSERCVNTSGSFRCVCKGRLRGAAGPHGGLRSPAPPADGAATPPSAQTSVITGGISREARAHFWPRLVGRDPGPFKGPENPSRGALRTPRGPYGAPIPG

SEQ ID NO: 1017869 - protein, 589 aa, Homo sapiens
SNTPGSYTDVSASSGYHLFQLTENHCEDIDQCDFPADCVGGDGININGSYRCLCPQGRSAGGWHEMPTHRSVQPRYPETMLTFPYGGACQEPFDGHPYDVCLAHEGFDRTLPEVPARVVREVEAVPTTETECYLNFDRLQWFFAELGSNYGHPKRDTQTRSAACSLGAGWGDHCEICLFSRSPAAAEFHSLCPDGKGYTQDNNIVNYGIPAHRDIDECMLFGSEICKEGKCVNTQPGYECYCKQGFYYDGNLLECVDVDECLDESNCRNGVCENTRGGYRCACTPPAEYSPAQRQCLSPEEMDVDECQDPAACRPGRCVNLPGSYRCECRPPWVPGPSGRDCQLPESPAERAPERRDVCWSQRGEDGMCAGPLAGPALTFDDCCCRQGRGWGAQCRPCPPRGAGSHCPTSQSESNSFWDTSPLLLGKPPRDEDSSEEDSDECRCVSGRCVPRPGGAVCECPGGFQLDASRARCVDIDECRELNQRGLLCKSERCVNTSGSFRCVCKGRLRGAAGPHGGLRSPAPPADGAATPPSAQTSVITGGISREARAHFWPRLVGSGPRDPSGPGEPFPGRLENPEGPLTGPPSPV

SEQ ID NO: 1017870 - protein, 198 aa, Homo sapiens
LGKTLQVISFIDVLFRHTPAKTVLAIVPVNTLQNWLAEFNMWLPPPEALPADNKPEEVQPRFFKVHILNDEHKTMASRAKVMADWVSEGGVLLMGYEMYRLLTLKKSFATGRPKKTKKRSHPVIIDLDEEDRQQEFGEQFEKALCRPGPDVVICDEGHRIKNCQASTSQALNNIRSRRRMVLTGYPLHNNSLSTGAWL

SEQ ID NO: 1017871 - protein, 258 aa, Homo sapiens
  misc_feature (65)..(65): Xaa can be any naturally occurring amino acid
  misc_feature (69)..(69): Xaa can be any naturally occurring amino acid
  misc_feature (73)..(73): Xaa can be any naturally occurring amino acid
  misc_feature (78)..(78): Xaa can be any naturally occurring amino acid
  misc_feature (81)..(82): Xaa can be any naturally occurring amino acid
  misc_feature (94)..(94): Xaa can be any naturally occurring amino acid
  misc_feature (96)..(96): Xaa can be any naturally occurring amino acid
  misc_feature (105)..(105): Xaa can be any naturally occurring amino acid
  misc_feature (107)..(107): Xaa can be any naturally occurring amino acid
  misc_feature (109)..(109): Xaa can be any naturally occurring amino acid
  misc_feature (115)..(115): Xaa can be any naturally occurring amino acid
  misc_feature (123)..(123): Xaa can be any naturally occurring amino acid
  misc_feature (127)..(128): Xaa can be any naturally occurring amino acid
  misc_feature (135)..(135): Xaa can be any naturally occurring amino acid
  misc_feature (137)..(137): Xaa can be any naturally occurring amino acid
  misc_feature (139)..(139): Xaa can be any naturally occurring amino acid
  misc_feature (149)..(149): Xaa can be any naturally occurring amino acid
  misc_feature (151)..(153): Xaa can be any naturally occurring amino acid
  misc_feature (157)..(157): Xaa can be any naturally occurring amino acid
  misc_feature (160)..(160): Xaa can be any naturally occurring amino acid
  misc_feature (162)..(162): Xaa can be any naturally occurring amino acid
  misc_feature (169)..(169): Xaa can be any naturally occurring amino acid
  misc_feature (174)..(176): Xaa can be any naturally occurring amino acid
  misc_feature (185)..(185): Xaa can be any naturally occurring amino acid
  misc_feature (193)..(193): Xaa can be any naturally occurring amino acid
  misc_feature (256)..(256): Xaa can be any naturally occurring amino acid
MTKGLVLGIYSKEKEDDVPQFTSAGENFDKLLAGKLRETLNISGPPLKAGKTRTFYWACIRTFPXPWCXVGPXAKQGXPGXXEHGKPGLMAKKXSXLLLPRGAGXFXTXGSRLWXWIPVGTLXLLRXXRCLVSLXRXPXAKKKNGCVGXAXXXWGSXGLXKXSPVCFWXKLGPXXXENAANKITXTQFAEIIXRISKVLVVKPRSISDPSLGLRNRQWDHSSVWPKDLTSPQSSWKFTTKAAPMQTNHPWCLLGKXYL

SEQ ID NO: 1017872 - protein, 173 aa, Homo sapiens
MDDEEGEGEEDDDDDEEEEGLEDIDEEGDEDEGEEDEDDDEGEEGEEDEGEDDYNRTLMDSNLPFFKFSPVPGSKLQSFFFFFFPLLWLSRPVFLRSLFSTPGFSIYWGGNTLSRIQWGKESLPLFCPKVHFYPFLSEQNLFGINTTELVVGKKKNRVPFALRGTLEGARPRV

SEQ ID NO: 1017873 - protein, 82 aa, Homo sapiens
MDDEEGEGEEDDDDDEEEEGLEDIDEEGDEDEGEEDEDDDEGEEGEEDEGEDDYNRTLMDSNLPPLIIIFIFFTFILISLLR

SEQ ID NO: 1017874 - protein, 126 aa, Homo sapiens
  misc_feature (25)..(25): Xaa can be any naturally occurring amino acid
  misc_feature (88)..(88): Xaa can be any naturally occurring amino acid
GEWGRATVTLVTGAARLARRQPARXHGEEAVGSRRRHLREVPWKPPFIGGEVQSRWAALGASEREASKSLGGAASLAFWGPTFWGPPXLRSRTLESEAIFCWRRRRRWRFPEVGLYSVSVRGKRSL

SEQ ID NO: 1017875 - protein, 94 aa, Homo sapiens
MWTFLGIAHFAPIYTEVGDFITCANREVLSVRAGVPLAWAWCSPYLLSATDNGGVSIGADKQTRSQVTPSSSDILSGLPFMASPVPHPPESNLV

SEQ ID NO: 1017876 - protein, 225 aa, Homo sapiens
MAYKAGLRHFQAFPLCWHGLDVYGASPETSCWLEVSAQFSSCQRTKAQQGRFLRLRWTGDCLQGSGGAIDRGPCLQQMLQTIHLGVAIQQQHFPPKADDKSPWTVQRGETLAAPRQVRMRRLALARENLKTAGTSGPALGSRAPAPVTPEQPNPQRPGPCPAPPRPHVHKHWHVEPGAGGRGRGRAREAIRRLASCGCVRPSHLGAGPAAAPRSLSGVRRVSQWA

SEQ ID NO: 1017877 - protein, 43 aa, Homo sapiens
MTQILSRASRSLNGVGNRSPTQVLSTSSFFPYPGVQNLRLEVD

SEQ ID NO: 1017878 - protein, 48 aa, Homo sapiens
MAPPVRVTLYAKSQNCLAENIKWMLECYFSVALGNKHFAFLTVQAPAF

SEQ ID NO: 1017879 - protein, 93 aa, Homo sapiens
MEKTELIQKAKLQAAKRYDDMATCMKAVTEQGPELSNEERNLLSVAYKNVVGGRSRPGGSSLASSRRPDTSDKKLQLIKDYREKVESELRSSA

SEQ ID NO: 1017880 - protein, 69 aa, Homo sapiens
FGTMGEVQDEPALPFVTVAMEKIKSPDSPSSSGGLGISKSDGSGRWRNGILLGAQEACPRDAAVHCRCP

SEQ ID NO: 1017881 - protein, 69 aa, Homo sapiens; identical to SEQ ID NO: 1017880

SEQ ID NO: 1017882 - protein, 34 aa, Homo sapiens
MCCEIYYRLLVLKMEKKSEELRNMDGLGNVEKGH

SEQ ID NO: 1017883 - protein, 34 aa, Homo sapiens; identical to SEQ ID NO: 1017882

SEQ ID NO: 1017884 - protein, 109 aa, Homo sapiens
  misc_feature (9)..(9): Xaa can be any naturally occurring amino acid
DKCEKACRXEEECLALNSTWGCFYNFDNHMERLHLKLFLHLSHLHPSPQAVSFLRTRTSSFSNIIGQINEEIGCILSLYPLTSSIILLLSSRRRRNSFTGKVEEIFPFW

SEQ ID NO: 1017885 - protein, 47 aa, Homo sapiens
MWLWWYSTAGAQEAPIKKKRPPVKEEDLKGARGNLTKNQEIKSKTYQ

SEQ ID NO: 1017886 - protein, 149 aa, Homo sapiens
MLRAPGCSSGPSVAPAGPWLALLSSLARCSLLEPRDPVASSLSPYFGTKTRYEDVNPVLLSGPLRLLWLWTPELLEGVTCTPGADMVSPHSAHGNTYPTVKQIRKLRQLHGFAAGHAGPRDGRGKIVPGTAADLGCSAGRLALCWYADL

SEQ ID NO: 1017887 - protein, 110 aa, Homo sapiens
SGLQCCPDAFYITVKRLLVWLLPGLAGLAVHQINLQTPPLYFVLCRSGHTCISDCLALTTLKQPTNFFSDLFPRLLMILIPCLNKSVFSFWMCSLTPSYHHTFCSLLLQA

SEQ ID NO: 1017888 - protein, 151 aa, Homo sapiens [sequence omitted]

SEQ ID NO: 1017889 - protein, 233 aa, Homo sapiens
MALKNKFSCLWILGLCLVATTSSKIPSITDPHFIDNCIEAHNEWRGKVNPPAADMKYMIWDKGLAKMAKAWANQCKFEHNDCLDKSYKCYAAFEYVGENIWLGGIKSFTPRHAITAWYNETQFYDFDSLSCSRVCGHYTQLVWANSFYVGCAVAMCPNLGGASTAIFVCNYGPAGNFANMPPYVRGESCSLCSKEEKCVKNLCKNPFLKPTGRAPQQTAFNPFSLGFLLLRIF

SEQ ID NO: 1017890 - protein, 259 aa, Homo sapiens
SVWSAQSGHPPHPPHPSMALKNKFSCLWILGLCLVATTSSKIPSITDPHFIDNCIEAHNEWRGKVNPPAADMKYMIWDKGLAKMAKAWANQCKFEHNDCLDKSYKCYAAFEYVGENIWLGGIKSFTPRHAITAWYNETQFYDFDSLSCSRVCGHYTQLVWANSFYVGCAVAMCPNLGGASTAIFVCNYGPAGNFANMPPYVRGESCSLCSKEEKCVKNLCRTPQLIIPNQNPFLKPTGRAPQQTAFNPFSLGFLLLRIF

SEQ ID NO: 1017891 - protein, 259 aa, Homo sapiens; identical to SEQ ID NO: 1017890

SEQ ID NO: 1017892 - protein, 143 aa, Homo sapiens
MTSWPRLGMWLLQEGWRGRWLWEMRTGRDGPHLGLLWSGTGVYTACSLQPLRVFMEPRTNFDLYKSCTQCGLRMSVTVITAVSRCLFDSALARLFLLLLHNPPVFDSLRCTGAPCRACSAFLVDFLLLRSQSSISTLLKLSNL

SEQ ID NO: 1017893 - protein, 117 aa, Homo sapiens
MILILIIVRAEVLGASYGAHLSRLYPSSTKVDPSREAQAATEYYVKTTPPHSRTNSLTHTHGAAAPVVGLVHAQCPSAHRLCPASLRPPRAVDIWAHSSPLKAPGAQPSRSALCNAG

SEQ ID NO: 1017894 - protein, 75 aa, Homo sapiens
  misc_feature (16)..(16): Xaa can be any naturally occurring amino acid
HFLPLDELEHSLGESXAQGSWWSGALGELGKYKNQGIMSGHQGVYGHYTGALHPERDQWGPSLQSSPVLRPWPCV

SEQ ID NO: 1017895 - protein, 350 aa, Homo sapiens
  misc_feature (2)..(2): Xaa can be any naturally occurring amino acid
  misc_feature (5)..(5): Xaa can be any naturally occurring amino acid
  misc_feature (30)..(30): Xaa can be any naturally occurring amino acid
  misc_feature (34)..(34): Xaa can be any naturally occurring amino acid
  misc_feature (36)..(36): Xaa can be any naturally occurring amino acid
  misc_feature (57)..(57): Xaa can be any naturally occurring amino acid
  misc_feature (109)..(110): Xaa can be any naturally occurring amino acid
  misc_feature (128)..(128): Xaa can be any naturally occurring amino acid
RXRLXFELVRKPLLTPIGTVHTDLPSQLQXRDKXQXHSKNQALNSTNGELNADDPTXGHSNAPITAPARGGGGRMKPNAAVSSRGERENAAATQVTLGRVQPPESSPCXXLGRDLVLSLGAHPRAPRXDACWKPERRLRGPGLAQAAPTPGTWGHFLHVRLWPKFLHLCLVLPSKSINYLKQGKEEKKNRGPPLPHSFPIRFFAEVSSVILEAPRGVTAARTAGQGYVCKVRALSPSIQRPFARRRGQPGRDGVLLELSCQALLGGGQALLPGVTAVAQVSPKPKGDRAEEEEDSEMKPDPPKQECCTTSSGAAGHGCCQLFPPGPGTGRWGARRMLSSLVRRRPGLTEW

SEQ ID NO: 1017896 - protein, 140 aa, Homo sapiens
MMVALRGASALLVLFLAAFLPPPQCTQDPAMVHYIYQRFRVLEQGLEKCTQATRAYIQEFQEFSKNISVMLGRCQTYTSEYKSAVGNLALRVERAQREIDYIQYLREADECIVSEDKTLADNVASKKLKNENKDPDSCCN

SEQ ID NO: 1017897 - protein, 30 aa, Homo sapiens
  misc_feature (11)..(11): Xaa can be any naturally occurring amino acid
ENHGLHPGLLXTFEQMRISKQEHTNQAPPA

SEQ ID NO: 1017898 - protein, 342 aa, Homo sapiens
ESQRCAVCGPFLGHQFLCFPPWLPPSPGSQLLLALVRPLPCGLSGFSGLNLRSATSMLTKPLQGAYPVPARGPHASLQEARIGKRSRPSIDSDPLLGQGGFGTFFARTPPHRSTPGGHQSDSPESCAAAGPPLSDSVHMPTTKYALLWKVGAGGVAPLACSDCYDWLRDTRQGIHSLAPSQRRIMHRPGTPLSTYTQQSKRPHLRARTAQRTDMTTHHEHKCTMRTPTTYQPAPYPTLQCIVATTDRTLHNRIRHKQHIPWIQNINSPRWGTRCPHRPSHSERYLAVPMRLASLDLSNGLGNALLASLGPFSDNGALKAACIPCTPYQENVGNTYSRDNPCN

SEQ ID NO: 1017899 - protein, 133 aa, Homo sapiens
MQPWALPTVGELWVCGRLARRSVCQRVMMPSRTNLATGIPSSNSEIFKALQHRRWATFDPSVYEKPLLKIPYKGQSHFATVLFLDWAPFSIIIGSLLLCSGYISKGGADRAVPVLIIGILVFLPGFYHLRIAY

SEQ ID NO: 1017900 - protein, 144 aa, Homo sapiens
MQPWALPTVGELWVCGRLARRSVCQRVMMPSRTNLATGIPSSNSEIFKALQHRRWATFDRSLLLCSGYISKGGADRAVPVLIIGILVFLPGFYHLAHRLLMHPKATVVTPMMTFQTLMTSTHPIAEEESQWNCPSFKISSRNYS

SEQ ID NO: 1017901 - protein, 133 aa, Homo sapiens; identical to SEQ ID NO: 1017899

SEQ ID NO: 1017902 - protein, 114 aa, Homo sapiens
MEVWQLEQVTKNKPFRVPPSFTPHMGCLWRLGHLVSNGSRTQQESMCSAWWLCVVGLLGACGLGMDAVEDTPCARLAGARADRVDRAWTFWMKSQWPQGRNDTRVTHQNVPPRL

SEQ ID NO: 1017903 - protein, 68 aa, Homo sapiens
GVPIPEVQKSFLSPVSSNAFLVALGSESILSCSLPVVVVTCKSPISHCLARAPYVDHLSAPVQQTGAL

SEQ ID NO: 1017904 - protein, 289 aa, Homo sapiens
MILLQHAVLPPPKQPSPSPPMSVATRSTGTLQLPPQKPFGQEASLPLAGEEELSKGGEQDCALEELCKPLYCKLCNVTLNSAQQAQAHYQGKNHGKKLRNYYAANSCPPPARMSNVVEPAATPVVPVPPQMGSFKPGGRVILATENDYCKLCDASFSSPAVAQAHYQGKNHAKRLRLAEAQSNSFSESSELGQRRARKEGNEFKMMPNRRNMYTVQNNSAGPYFNPRSRQRIPRDLAMCVTPSGQFYCSMCNVGAGEEMEFRQHLESKQHKSKVSEQRYRNEMENLGYV

SEQ ID NO: 1017905 - protein, 288 aa, Homo sapiens
MILLQHAVLPPPKQPSPSPPMSVATRSTGTLQLPPQKPFGQEASLPLAGEEELSKGGEQDCALEELCKPLYCKLCNVTLNSAQQAQAHYQGKNHGKKLRNYYAANSCPPPARMSNVVEPAATPVVPVPPQMGSFKPGGRVILATENDYCKLCDASFSSPAVAQAHYQGKNHAKRLRLAEAQSNSFSESSELGQRRARKEGNEFKMMPNRRNMYTVQNNSGPYFNPRSRQRIPRDLAMCVTPSGQFYCSMCNVGAGEEMEFRQHLESKQHKSKVSEQRYRNEMENLGYV

SEQ ID NO: 1017906 - protein, 288 aa, Homo sapiens; identical to SEQ ID NO: 1017905

SEQ ID NO: 1017907 - protein, 132 aa, Homo sapiens
SGGVVQESHFENQCFGQSPCRESSQASDCKFILDRFDHELRTSMLRLEGHDWYILNIISPVFQRDRDLTRYGPQPRGEDSRDEVESRCEKEIEKESREDQGYTLRTSTVPAVERGLLSVFRVELHLRMKSYN

SEQ ID NO: 1017908 - protein, 84 aa, Homo sapiens
GGELLPAGWPWRFTFPRLRALPRCSRRERNTFQALEEAVYRNIQACKELAQTTRTAYGPNGNEQKLVINHLEKLVCDKRCSNVF

SEQ ID NO: 1017909 - protein, 95 aa, Homo sapiens
RRVNCFLQAGHGASRSQGSGLCPDAQGGSESKWLQQATGMSTFQALEEAVYRNIQACKELAQTTRTAYGPNGNEQKLVINHLEKLVCDKRCSNVF

SEQ ID NO: 1017910 - protein, 85 aa, Homo sapiens
MTVFARTRSVRPFRGGFQVTKICCSLFVGHNDACWSVTSPMVTEMVRILRTVPFLAACYSGCVDDSQYLQQAGLYQTTPSSPDLP

SEQ ID NO: 1017911 - protein, 238 aa, Homo sapiens
RILPVEMAAAVAGMLRGGLLPQAGRLPTLQTVRYGSKAVTRHRRVMHFQRQKLMAVTDIYPPETSHPPIMPAISIPDSPHIREGDRRIIQVLLRLGEIAGMLLCHVTRPICDYVPVMRRKCVASEMVEDGNKVFISCDDPSLAGRTSERLRCSETVFARTRSVRPFRGGFQVTKICCSLFVGHNDACWSVTSPMVTEMVRILRTVPFLAACYSGCVDDSQYLQQAGLYQTTPSSPDLP

SEQ ID NO: 1017912 - protein, 72 aa, Homo sapiens
MEQRGQNAPAASGARKRHGPGPREARGARPGLRVPKTLVLVVAAVLLLDTISQKTVEIASPANMDRTIALTG

SEQ ID NO: 1017913 - protein, 91 aa, Homo sapiens
MEQRGQNAPAASGARKRHGPGPREARGARPGLRVPKTLVLVVAAVLLLVSAESALITQQDLSSPAETPHNKEVSPSEDGHLTHIQRRRVRV

SEQ ID NO: 1017914 - protein, 102 aa, Homo sapiens
  misc_feature (1)..(1): Xaa can be any naturally occurring amino acid
XPEGDRRPKEKLPVSAQVHVPEEKPTSQRNDDHFLKPGFGFARWLPKLISSGLCEDAWFTTCLQLVTPKTPWSPLEGQHLPSASLQVLPHPRTTWTIIYLVF

SEQ ID NO: 1017915 - protein, 139 aa, Homo sapiens
AGPPPAPPAEKPGWSRSVSPRKPAVYLGIKPARAGGKGRGAGSGKRGGGGMLSARENNNKIRVRGRCPRRNSEQTRGPALAPRPGAQEGDRQRRHEAGDAALVSSARGGGGGGGGGDLGAAGRGRAPNGRGLPSPAAGP

SEQ ID NO: 1017916 - protein, 76 aa, Homo sapiens
MRVSRNDSRGGGVPRPGKKKKPRAVEGGSQKGLWQEKPTTPEVGGRQGGGTRCVGSPHTRGERGGRSPIAIQKSNP

SEQ ID NO: 1017917 - protein, 122 aa, Homo sapiens
  misc_feature (6)..(6): Xaa can be any naturally occurring amino acid
  misc_feature (22)..(22): Xaa can be any naturally occurring amino acid
  misc_feature (34)..(34): Xaa can be any naturally occurring amino acid
  misc_feature (36)..(37): Xaa can be any naturally occurring amino acid
  misc_feature (42)..(42): Xaa can be any naturally occurring amino acid
MRSAPXHPPPPSRVCGHKRTPXHLPPRRPPPRSXTXXPTPPXRTPPPPLTLCQSELPHSVAQAAPAGPPPAWALWGKYWVPRLERWTEAQWVKALKSTQKPWPPRELETMYMLQSHYGRDTL

SEQ ID NO: 1017918 - protein, 337 aa, Homo sapiens
MVSQCLFLFYWPFCLPTSLGIVNIGVNNVQELIIAADMLQLTEVVHLCCEFLKGQIDPLNCIGIFQFSEQIACHDLLEFSENYIHVHFLEVHSGEEFLALTKDQLIKILRSEELSIEDEYQVFLAAMQWILKDLGKRRKHVVEVLDPIRFPLLPPQRLLKYIEGVSDFNLRVALQTLLKEYCEVCRSPKENKFCSFLQTSKVRPRKKARKYLYAVGGYTRLQGGRWSDSRALSCVERFDTFSQYWTTVSSLHQARSGLGVTVLGGMVYAIGGEKDSMIFDCTECYDPVTKQWTTVASMNHPRCGLGVCVCYGAIYALGGWVGAEIGNTIERFDPDEN

SEQ ID NO: 1017919 - protein, 415 aa, Homo sapiens
MANEDCPKAADSPFSSDKHAQLILAQINKMRNGQHFCDVQLQVGQESFKAHRLVLAASSPYFAALFTGGMKESSKDVVPILGIEAGIFQILLDFIYTGIVNIGVNNVQELIIAADMLQLTEVVHLCCEFLKGQIDPLNCIGIFQFSEQIACHDLLEFSENYIHVHFLEVHSGEEFLALTKDQLIKILRSEELSIEDEYQVFLAAMQWILKDLGKRRKHVVEVLDPIRFPLLPPQRLLKYIEGVSDFNLRVALQTLLKEYCEVCRSPKENKFCSFLQTSKVRPRKKARKYLYAVGGYTRLQGGRWSDSRALSCVERFDTFSQYWTTVSSLHQARSGLGVTVLGGMVYAIGGEKDSMIFDCTECYDPVTKQWTTVASMNHPRCGLGVCVCYGAIYALGGWVGAEIGNTIERFDPDEN

SEQ ID NO: 1017920 - protein, 127 aa, Homo sapiens
  misc_feature (28)..(28): Xaa can be any naturally occurring amino acid
  misc_feature (35)..(35): Xaa can be any naturally occurring amino acid
  misc_feature (117)..(117): Xaa can be any naturally occurring amino acid
PAALAMAAPATGLISVFSSSQELGAALXAGWPSAXMLLAGAAPVSRSACRAGLRLDASPRATRRRRPCRAKLSLARWTLGFCDERLVPFDHAESTYGLYPDASSLQELADSKKAKVXNNLNPEVAFG

SEQ ID NO: 1017921 - protein, 47 aa, Homo sapiens
MELKFHRLSVSYQMYVGVLEQVFLHLLGAHRTISKGSLNGCFGTAHY

SEQ ID NO: 1017922 - protein, 83 aa, Homo sapiens
MSAVNRAACEAVLRQYTDPYLNQDPVSAGCVRAIDVQGDKVSVQLELGYAAGLFKSGWAQMLQMAIEGLDGVTLAKVDIQCVI

SEQ ID NO: 1017923 - protein, 117 aa, Homo sapiens
  misc_feature (43)..(44): Xaa can be any naturally occurring amino acid
  misc_feature (54)..(54): Xaa can be any naturally occurring amino acid
  misc_feature (62)..(62): Xaa can be any naturally occurring amino acid
  misc_feature (74)..(75): Xaa can be any naturally occurring amino acid
  misc_feature (116)..(116): Xaa can be any naturally occurring amino acid
MVRVVSGEGLAVDCQFFIGAYNNCEVLDLPSPPTGALPEVLRXXQAVPLSMKKXVIFLLMGXVEENRGPVSSSXXLFGFSTGPIQDQISLSNLSKRKCPSLYSVRAAASLCTEYAXQ

SEQ ID NO: 1017924 - protein, 108 aa, Homo sapiens
  misc_feature (94)..(94): Xaa can be any naturally occurring amino acid
MVPRGPTATARFGVPAEGRTPPPFPGEPWKVCVNVHSFKPEELMVKTKDGYVEVSGKHEEKQQEGGIVSKNFTKKIQLPAEVDPVTVFASLSPXGLLIIEAPPGPSLL

SEQ ID NO: 1017925 - protein, 103 aa, Homo sapiens
  misc_feature (16)..(16): Xaa can be any naturally occurring amino acid
ANGQEDSKAPDGSTLXALGLPQPDFLLACILGPGVPSAFVDTCVPARAWKNIFHDFREIEVEVYMEACHSPVVSQLETGTSSMHAITKKHAALPVSMGFMLLG

SEQ ID NO: 1017926 - protein, 82 aa, Homo sapiens
PIWCVIQKKEQRGEGTLAWQPGDTGQPSCFRLHLVPAPASHTRAEALLLGEVQPMLGPAAAAASRSFNPSWGTQAAWDTAMR

SEQ ID NO: 1017927 - protein, 67 aa, Homo sapiens
MRKPQAGTGEAARDPSLRPARTVLVGDQDEYTAAENKSPRGTLCPTGEQRIHAREDACIFSRLFSEK

SEQ ID NO: 1017928 - protein, 141 aa, Homo sapiens
TALTTPSGSASLPCFWAGSPPALQPCVLASLLKRRLQSVPRVSEHLVDVWEIPTWWDLPACRALSWRAWYSLGSESSLPQPNRVGCGAWEAANSGFHRVEVRHEAARQVGPLPRAQASDPEDALASAVSGTQRLPQPSLCG

SEQ ID NO: 1017929 - protein, 131 aa, Homo sapiens
WNHAAFQRRQHHAGEVDKAHAGTAIAPFATDGGFYTTNRCVVISVLRFNTEFNKFRDHDFVVVERRHPEAATDHLYAGVEEIVAHSCMVTHAEVRLSGTQATAGFEDRVREWIHRVHWLTINQILPANSDV

SEQ ID NO: 1017930 - protein, 142 aa, Homo sapiens
LILLLSLFPAPAVVPGTPCRTLNEGKGRDFILQNVMNCLENHEFSVGGELRLGGGATSRTKAVSAQLENAVGDGVSSPKTPSTPAVGSTHWGLHPDGLPELKWVLCPCWINMWRCWWVGQVSYTTLYVLQMIWGYHCYFNKF

SEQ ID NO: 1017931 - protein, 72 aa, Homo sapiens
FGTMYVLEINKRITEEQARKAFDRATKLEQEFTECFSAIVEGDSFEEIYHKVKRDIEDLSGPYIWVPARERL

SEQ ID NO: 1017932 - protein, 72 aa, Homo sapiens; identical to SEQ ID NO: 1017931

SEQ ID NO: 1017933 - protein, 72 aa, Homo sapiens
  misc_feature (16)..(16): Xaa can be any naturally occurring amino acid
GPGGSCRIMQLGRGGXHATPQPQPSNQVTVILPSPRPQGFPSAPGGFPVASSWGLVKNNLGIIYFEVEDVCA

SEQ ID NO: 1017934 - protein, 99 aa, Homo sapiens
VADLQEPQGSSERRIPTTATTVPLSEINRNFGVHRATETRTPGGEWRRPEPQLRDDVSREKSWEWGSQFAHGGYPETESGRRWGWLNIHPRVWTGVRSV

SEQ ID NO: 1017935 - protein, 124 aa, Homo sapiens
MKRKQLKTQELPGECTLLVPPLLVPPQRPRNVPCVTFRSACRVFSTQQLVVNVSASCGFSVTLMILESLFHTFTTMSVAGRLRHNNFSNVINCEHLKVNFSQLPDEFSGAIYFSQIASSPRGMV

SEQ ID NO: 1017936 - protein, 95 aa, Homo sapiens
  misc_feature (66)..(66): Xaa can be any naturally occurring amino acid
  misc_feature (80)..(80): Xaa can be any naturally occurring amino acid
MGLASLGLTGVTVASLASRVPLPPPGSPGEQGPSGASGPAGPRGPLALLVLLAKDGLICLLALFGXLVRAPATGDAILLXPPSTWDSCPLSRAVP

SEQ ID NO: 1017937 - protein, 145 aa, Homo sapiens
THDHRKISCFPTLPNSFLPCNLMEIILQTRWNLRRSHLIPLSILRHADSSFWSTGVLQGQNNQAVMNCVLSSVRGMLKFCICVISAFSISRALTSLIFSSLSLLGEAIFVQVTTQIRELWYLTVSGSWIENTISVTNNEFAFILS

SEQ ID NO: 1017938 - protein, 216 aa, Homo sapiens
  misc_feature (23)..(23): Xaa can be any naturally occurring amino acid
  misc_feature (48)..(48): Xaa can be any naturally occurring amino acid
STDPNKQETGNVHVSERLQPGAXPERASAEASGHAGSPRSLVFALVIXLVPVGRGNYEELENSGDTTVESERPNKVTIPSTFAAVTIKETLNANINSTNFAPDENQLEFILMVLIPLILLVLLLLSVVFLATYYKRKRTKQEPSSQGSQSALQTYELGSENVKVPIFEEDTPSVMEIEMEELDKWMNSMNRNADFECLPTLKEEKESNHNPSDSES

SEQ ID NO: 1017939 - protein, 167 aa, Homo sapiens
  misc_feature (8)..(8): Xaa can be any naturally occurring amino acid
  misc_feature (12)..(12): Xaa can be any naturally occurring amino acid
  misc_feature (17)..(18): Xaa can be any naturally occurring amino acid
  misc_feature (25)..(25): Xaa can be any naturally occurring amino acid
  misc_feature (36)..(37): Xaa can be any naturally occurring amino acid
  misc_feature (40)..(40): Xaa can be any naturally occurring amino acid
QRVPPPQXAPPXLGQNXXGPPGDQXPPRNSRVGACXXVQXKGSPGNYEELENSGDTTVESERPNKVTIPSTFAAVTIKETLNANINSTNFAPDENQLEFILMVLIPLILLVLLLLSVVFLATYYKRKRTKQEPSSQGSQSALQTCKIQLSWKVIPAFCLESSHRNAL

SEQ ID NO: 1017940 - protein, 201 aa, Homo sapiens
  misc_feature (23)..(23): Xaa can be any naturally occurring amino acid
  misc_feature (48)..(48): Xaa can be any naturally occurring amino acid
STDPNKQETGNVHVSERLQPGAXPERASAEASGHAGSPRSLVFALVIXLVPVGRGNYEELENSGDTTVESERPNKVTIPSTFAAVTIKETLNANINSTNFAPDENQLEFILMVLIPLILLVLLLLSVVFLATYYKRKRTKQEPSSQGSQSALQTYELGSENVKVNRRLQQLYKYLNKSWSETEEPNPTLDLVHADNKPRSA

SEQ ID NO: 1017941 - protein, 184 aa, Homo sapiens
PRLFALTRARLGHGAGAFRPARVRGELRQGPGVPDTKAAFLLTILGFIDIFRRPAAGFVAGLGKVRPYSVYLFSFSMFFNGIADLAGSTAGDYGGLVVFCIFFGISYGMVGALQFEVLMAIVGTHKFSSAIGLVLLMEAVAVLVGPFGRQTPGCDPRLHVRVHSGGGRGAHLLPDFAAGQLLLH

SEQ ID NO: 1017942 - protein, 131 aa, Homo sapiens
GSSKPFNQNKNRYVDIPPYDYNRVELSEINGDAGSNYINASYIDGFKEPRKYIAAQGPRDETVDDFWRMIWEQKATVIVMVTRCEEGNRNKCAEYWPSMEEGTRAFGDVVVKINQHKRCPDYIIQKLNIVN

SEQ ID NO: 1017943 - protein, 272 aa, Homo sapiens
  misc_feature (5)..(6): Xaa can be any naturally occurring amino acid
APAPXXIQEVLRWGKLEDERAEQSLGELIGTLNAAKVRPDTEVVCAPLLPYIDVRPAEARFQDCVWLRRTCYKVTNGAFTGEISPWHDQRLAGPTVGGRLEATLERRHVFGESDEVIGQKVAMFWQRDSEIIACIGEKLDDEGKSWTSAEKVVITMRDKWSSHDNVKDWSKVCPGLMSLCGPLVLGKDCNSPTRSQEVTREVSDGLAVMSNVSDAVAQSHPFIYGGSVTGATCQAAGQPTDVEWFLVGGGYLKPECVDVILAKKEPIHFLPS

SEQ ID NO: 1017944 - protein, 68 aa, Homo sapiens
MMKPQAETGEAARDPSLRPARTVLVGVSLTKSRAAVCDLEDGSACVPLGCSLTRGSFSSKSRTPDPQG

SEQ ID NO: 1017945 - protein, 240 aa, Homo sapiens
GGEKPYECKDCGKSFTVSSSLTEHARIHTGEKPYECKQCGKAFTGRSGLTKHMRTHTGEKPYECKDCGKAYNRVYLLNEHVKTHTEEKPFICTVCRKSFRNSSCLNKHIQIHTGIKPYECKDCGKTFTVSSSLTEHIRTHTGEKPYECKVCGKAFTTSSHLIVHIRTHTGEKPYICKECGKAFASSSHLIEHRRTHTGEKPYICNECGKAFRASSHLHKHGRIHTGQKPYKCKECGKAYN

SEQ ID NO: 1017946 - protein, 118 aa, Homo sapiens
FASNHYERDFFIPCQKTLFTIGEQFSVLGQCGKAFSSTPNVVSQQACTRDRSLDYSRLKSRFLYVRTVENLLRIPHALTITLKFTLMRNLSNVKNVGKLSATLIHVEDMKDLSFSRCP

SEQ ID NO: 1017947 - protein, 253 aa, Homo sapiens
GGEKPYECKDCGKSFTVSSSLTEHARIHTGEKPYECKQCGKAFTGRSGLTKHMRTHTGEKPYECKDCGKAYNRVYLLNEHVKTHTEEKPFICTVCRKSFRNSSCLNKHIQIHTGIKPYECKDCGKTFTVSSSLTEHIRTHTGEKPYECKVCGKAFTTSSHLIVHIRTHTGEKPYICKECGKAFASSSHLIEHRRTHTGEKPYICNECGKAFRASSHLHKHGRIHTGQKPYKCKECGKAYNRFYLLKEHLKTYH

SEQ ID NO: 1017948 - protein, 119 aa, Homo sapiens
  misc_feature (79)..(79): Xaa can be any naturally occurring amino acid
  misc_feature (101)..(101): Xaa can be any naturally occurring amino acid
MQHELSSLWQLEKRILEDPGGKPAARRPGPSPTPGNCAGSWTEGRPPPDRALREAFHFVAGQRDAAAGTEATWPMAGPXGRHSPGSPFKKPRRAAAGSRYXRPASLPGAQHTGCGSGHP

SEQ ID NO: 1017949 - protein, 152 aa, Homo sapiens
MLGVSAQSFRADDGLQYRNSRTSALAATTGSQSEEVGSRSGLALMCLQAEAAECLPVRTGVQEHTCHLGSVTLGHEGQGLGGREAMSPPILSSVLAPHPLACLWTDAGTASRTATLETIYSSERPQACNPGKIFSTCCLCGMYKGMNGILLL

SEQ ID NO: 1017950 - protein, 157 aa, Homo sapiens
MDKALSFYIPTDFSSCSRLSYDKFFEDKLSNCLFNAPLPTDIISTPICGNQLVEMGEDCDCGTSEECTNICCDAKTCKIKATFQCALGECCEKCQFKKAGMVCRPAKDECDLPEMCNGNSGTCPDDRFQVNGFPCHHGKGHCLMGTCPTLRGQCTEL

SEQ ID NO: 1017951 - protein, 218 aa, Homo sapiens
MDNSGKEAEAMALLAEAERKVKNSQSFFSGLFGGINCLMRAIEIYTDMGQIHDCGQAPDLPVAEIYETELVDIEKAIAHYEQSADYYKGEESNSSANKCLLKVAGYAALLEQYQKAIDIYEQVGTNAMDSPLLKYSAKDYFFKAALCHFCIDMLNAKLAVQKYEELFPAFSDSRECKLMKKLLEAHDEQNVDSYTESVKEYDSISRLGPVAHQHCLLA

SEQ ID NO: 1017952 - protein, 284 aa, Homo sapiens
MDNSGKEAEAMALLAEAERKVKNSQSFFSGLFGGSSKIEEACEIYARAANMFKMAKNWSAAGNAFCQAAQLHLQLQSKHDAATCFVDAGNAFKNADPQEAINCLMRAIEIYTDMGQIHDCGQAPDLPVAEIYETELVDIEKAIAHYEQSADYYKGEESNSSANKCLLKVAGYAALLEQYQKAIDIYEQVGTNAMDSPLLKYSAKDYFFKAALCHFCIDMLNAKLAVQKYEELFPAFSDSRECKLMKKLLEAHDEQNVDSYTESVKEYDSISRLGPVAHQHCLLA

SEQ ID NO: 1017953 - protein, 176 aa, Homo sapiens
RAAWKAVFAARGNLRYFPAPNSSVMGVTDLTSFLFQSILPSYALPCMLPPGRQDLSSASLPGAVAALSPLRIMATAEVLNIGKKLYEGKTKEVYELLDSPGKVLLQSKDQITAGNAARKNHLEGKAAISNKITSCIFQLLQEAGIKTAFTRKCGETAFIGTAVVNMIPIDMGLQKE

SEQ ID NO: 1017954 - protein, 104 aa, Homo sapiens
MATAEVLNIGKKLYEGKTKEVYELLDSPGKVLLQSKDQITAGNAARKNHLEGKAAISNKITSCIFQLLQEAGIKTAFTRKCGETAFIGTAVVNMIPIDMGLQKE

SEQ ID NO: 1017955 - protein, 100 aa, Homo sapiens
LPLHLYMSKLEKMQEACGSKSVYDGPEQEEYSTFVIDDPQETYKTLKQVIAGVGALEQEHAQYKRDKFKKTKYGSQEHPIGDKSFQNYIRQQSETSTHSI

SEQ ID NO: 1017956 - protein, 187 aa, Homo sapiens
MLREQIVPVAESVTVHFNLACGVTRAVTPTPYDFRDARMEMTGYECLNQIIFTGESVMRHWKWSFQDVIHLDGAMTDGCETTRLGEKWDLQGENGQMMSCTCLGNGKGEFKCDPHEATCYDDGKTYHVGEQWQKEYLGAICSCTCFGGQRGWRCDNCRRPGGEPSPDRHYWPVLQPVFSEIPSEKKH

SEQ ID NO: 1017957 - protein, 204 aa, Homo sapiens
  misc_feature (105)..(105): Xaa can be any naturally occurring amino acid
MEAEVGEFPWQVSIQARSEPFCGGSILNKWWILTAAHCLYSEELFPEELSVVLGTNDLTSPSMEIKEVASIILHKDFKRANMDNDIALLLLASPIKLDDLKVPIXLPTQPGPATWRECWVAGWGQTNAADKNSVKTDLMKVPMVIMDWEECSKMFPKLTKNMLCAGYKNESYDACKVTRGYLPHLIGPHPLGTASARVFSLCCK

SEQ ID NO: 1017958 - protein, 281 aa, Homo sapiens
  misc_feature (105)..(105): Xaa can be any naturally occurring amino acid
MEAEVGEFPWQVSIQARSEPFCGGSILNKWWILTAAHCLYSEELFPEELSVVLGTNDLTSPSMEIKEVASIILHKDFKRANMDNDIALLLLASPIKLDDLKVPIXLPTQPGPATWRECWVAGWGQTNAADKNSVKTDLMKVPMVIMDWEECSKMFPKLTKNMLCAGYKNESYDACKGDSGGPLVCTPEPGEKWYQVGIISWGKSCGEKNTPGIYTSLVNYNLWIEKVTQLEGRPFNAEKRRTSVKQKPMGSPVSGVPEPGSPRSWLLLCPLSHVLFRAILY

SEQ ID NO: 1017959 - protein, 119 aa, Homo sapiens
NLFNSFKIKLAAALARCRIKHDALSIYHILPETVRKQELRASTLPLYAWINTCKISPEEVYNNLKRRGYNKVKSVLHIDDKVFAVDQHCYDVLIFPSHLKNDLINIDLFKDYKLIFQVN

SEQ ID NO: 1017960 - protein, 54 aa, Homo sapiens
NFSSKAGKWTWLAGRLDHIAVGPPRHQAVLHLARGREITRDHRPTAECRSNDQS

SEQ ID NO: 1017961 - protein, 178 aa, Homo sapiens
FQLNFTTMFDTDYVASINKSGYRYHPGEAKNLLAHSQYAFLIQMWGAGNIYNRRYFFNSVESLLSRPVVKDFCVMLVDINQFKRINAQWGHRVGDKVLVSIVDIIQQSIRPDDILARLEGEVFGLLFTELNSAQAKIIAERMRKNVELLTGFSNRYDVPEQMTISIGTVFSTGDTRNI

SEQ ID NO: 1017962 - protein, 135 aa, Homo sapiens
MGKRSASERGGGESERCASGSEACWSRDWDAPRLCGREGVNALRCYLSGDMHMQQFASFGQRSINGAISLMDPTCDHSSSIVILDKLAQGLTEIHPDNAILTSNPGSGDPSDDRPSQACSQCWMPSGSPLMFVPC

SEQ ID NO: 1017963 - protein, 135 aa, Homo sapiens
SGPASSGASIIYLLRRQIRYGNSVTKLFDMISYPLSPVSRNRLAQVKRKILVLDLDENLFISHHDGVLRTHSRPGYVLLIFILKVVNKQSILSGCLYIRGPMWISVLECGEPVVLDAGWLFTSNAVEIYGSAVAL

SEQ ID NO: 1017964 - protein, 95 aa, Homo sapiens
  misc_feature (13)..(13): Xaa can be any naturally occurring amino acid
SGTIFTTSSSPNXEAYAEEFGNETWGVTKAAEKQMKDKQDEEQRLKEEEEDKKRKEEEEAEDKEDDEDKDEDEEDEEDKEEDEEEDVPGQAKDEL

SEQ ID NO: 1017965 - protein, 95 aa, Homo sapiens; identical to SEQ ID NO: 1017964
  misc_feature (13)..(13): Xaa can be any naturally occurring amino acid

SEQ ID NO: 1017966 - protein, 95 aa, Homo sapiens; identical to SEQ ID NO: 1017964
  misc_feature (13)..(13): Xaa can be any naturally occurring amino acid

SEQ ID NO: 1017967 - protein, 95 aa, Homo sapiens; identical to SEQ ID NO: 1017964
  misc_feature (13)..(13): Xaa can be any naturally occurring amino acid

SEQ ID NO: 1017968 - protein, 447 aa, Homo sapiens
VVTKDQPLSMIFSYCSHGDLHEFLVMRSPHSDVGSTDDDRTVKSALEPPDFVHLVAQIAAGMEYLSSHHVVHKDLATRNVLVYDKLNVKISDLGLFREVYAADYYKLLGNSLLPIRWMAPEAIMYGKFSIDSDIWSYGVVLWEVFSYGLQPYCRYSNQDVVEMIRNRQVLPCPDDCPAWVYVLMIECWNEFPSRRPRFKDIHSRLRAWGNLSNYNSSAQTSGASNTTQTSSLSTSPVSNVSNARYVGPKQKAPPFPQPQFIPMKGQIRPMVPPPQLYVPVNGYQPVPAYGAYLPNFYPVQIPMQMAPQQVPPQMVPKPSSHHSGSGSTSTGYVTTAPSNTSMADRAALLSEGADDTQNAPEDGAQSTVQEAEEEEEGSVPETELLGDCDTLQVDEAQVQLEAEWHQGPGFGDRSPAETPQGPQSPLRRHHTQQSQEPAGQWACLQTG

SEQ ID NO: 1017969 - protein, 108 aa, Homo sapiens
  misc_feature (6)..(6): Xaa can be any naturally occurring amino acid
  misc_feature (23)..(23): Xaa can be any naturally occurring amino acid
  misc_feature (28)..(28): Xaa can be any naturally occurring amino acid
  misc_feature (51)..(51): Xaa can be any naturally occurring amino acid
  misc_feature (82)..(82): Xaa can be any naturally occurring amino acid
  misc_feature (105)..(105): Xaa can be any naturally occurring amino acid
RAPKVXSRRAPPRARPCPREEPXKEEGXPKKLRRPQLLPPRRPKVTGPQLXTQNPGSSEAAPSSKETPAATEAPSSTPKAQXPAASAEEPKPVEAPAANSDQTVXVKE

SEQ ID NO: 1017970 - protein, 227 aa, Homo sapiens
MELHYLAKKSNQADLCDARDWSSRGLPGDQADTAATRAALCCQKQCASTPRATEMEGSKLSSSPASPSSSLQNSTLQPDAFPPGLLHSGNNQITAERKVCNCCSQELETSFTYVDKNINLEQRNRSSPSAKGHNHPGELGWENPNEWSQEAAISLISEEDACIRFRSHVFTEVYRLWFNQAIWYLSPGILLVIISYIVPTESEGEPNTVAARRLGRLRNATAHRGTL

SEQ ID NO: 1017971 - protein, 136 aa, Homo sapiens
EEKSYPVPKGSLDIIILIFVLSAIVPDKMQKAINRLSRLLKPGGMVLLRDYGRYDMAQLRFKKGQCLSGNFYVRGDGTRVYFFTQEELDTLFTTAGLEKVQNLVDRRLQVNRGKQLTMYRVWIQCKYCKPLLSSTS

SEQ ID NO: 1017972 - protein, 300 aa, Homo sapiens
MKFLLDILLLLPLLIVCSLESFVKLFIPKRRKSVTGEIVLITGAGHGIGRLTAYEFAKLKSKLVLWDINKHGLEETAAKCKGLGAKVHTFVVDCSNREDIYSSAKKVKAEIGDVSILVNNAGVVYTSDLFATQDPQIEKTFEVNVLAHFWTTKAFLPAMTKNNHGHIVTVASAAGHVSVPFLLAYCSSKFAAVGFHKTLTDELAALQITGVKTTCLCPNFVNTGFIKNPSTSLGPTLEPEEVVNRLMHGILTEQKMIFIPSSIAFLTTLERILPERFLAVLKRKISVKFDAVIGYKMKAQ

SEQ ID NO: 1017973 - protein, 300 aa, Homo sapiens; identical to SEQ ID NO: 1017972

SEQ ID NO: 1017974 - protein, 264 aa, Homo sapiens
MKFLLDILLLLPLLIVCSLESFVKLFIPKRRKSVTGEIVLITGAGHGIGRLTAYEFAKLKSKLVLWDINKVKAEIGDVSILVNNAGVVYTSDLFATQDPQIEKTFEVNVLAHFWTTKAFLPAMTKNNHGHIVTVASAAGHVSVPFLLAYCSSKFAAVGFHKTLTDELAALQITGVKTTCLCPNFVNTGFIKNPSTSLGPTLEPEEVVNRLMHGILTEQKMIFIPSSIAFLTTLERILPERFLAVLKRKISVKFDAVIGYKMKAQ

SEQ ID NO: 1017975 - protein, 336 aa, Homo sapiens
MKFLLDILLLLPLLIVCSLESFVKLFIPKRRKSVTGEIVLITGAGHGIGRLTAYEFAKLKSKLVLWDINKHGLEETAAKCKGLGAKVHTFVVDCSNREDIYSSAKKVKAEIGDVSILVNNAGVVYTSDLFATQDPQIEKTFEVPCDLAPFSWAGAQWRDLGLNGTSCLRASKGISCLSLPSSVGFQTTKAFLPAMTKNNHGHIVTVASAAGHVSVPFLLAYCSSKFAAVGFHKTLTDELAALQITGVKTTCLCPNFVNTGFIKNPSTSLGPTLEPEEVVNRLMHGILTEQKMIFIPSSIAFLTTLERILPERFLAVLKRKISVKFDAVIGYKMKAQ

SEQ ID NO: 1017976 - protein, 155 aa, Homo sapiens
MKFLLDILLLLPLLIVCSLESFVKLFIPKRRKSVTGEIVLITGAGHGIGRLTAYEFAKLKSKLVLWDINKHGLEETAAKCKGLGAKVHTFVVDCSNREDIYSSAKKVKAEIGDVSILVNNAGVVYTSDLFATQDPQIEKTFEVDYKGISSCNDEE

SEQ ID NO: 1017977 - protein, 256 aa, Homo sapiens
MKFLLDILLLLPLLIVCSLESFVKLFIPKRRKSVTGEIVLITGAGHGIGRLTAYEFAKLKSKLVLWDINKHGLEETAAKCKGLGAKVHTFVVDCSNREDIYSSAKKTTKAFLPAMTKNNHGHIVTVASAAGHVSVPFLLAYCSSKFAAVGFHKTLTDELAALQITGVKTTCLCPNFVNTGFIKNPSTSLGPTLEPEEVVNRLMHGILTEQKMIFIPSSIAFLTTLERILPERFLAVLKRKISVKFDAVIGYKMKAQ

SEQ ID NO: 1017978 - protein, 282 aa, Homo sapiens
MKFLLDILLLLPLLIVCSLESFVKLFIPKRRKSVTGEIVLITGAGHGIGRLTAYEFAKLAKCKGLGAKVHTFVVDCSNREDIYSSAKKVKAEIGDVSILVNNAGVVYTSDLFATQDPQIEKTFEVNVLAHFWTTKAFLPAMTKNNHGHIVTVASAAGHVSVPFLLAYCSSKFAAVGFHKTLTDELAALQITGVKTTCLCPNFVNTGFIKNPSTSLGPTLEPEEVVNRLMHGILTEQKMIFIPSSIAFLTTLERILPERFLAVLKRKISVKFDAVIGYKMKAQ

SEQ ID NO: 1017979 - protein, 259 aa, Homo sapiens
LLRGMLRPENGMNPGGRACSELRSRHCTAAWATEPESVSKKKIAIVYKLTLIPLNEFTFLILFFEVKAEIGDVSILVNNAGVVYTSDLFATQDPQIEKTFEVNVLAHFWTTKAFLPAMTKNNHGHIVTVASAAGHVSVPFLLAYCSSKFAAVGFHKTLTDELAALQITGVKTTCLCPNFVNTGFIKNPSTSLGPTLEPEEVVNRLMHGILTEQKMIFIPSSIAFLTTLERILPERFLAVLKRKISVKFDAVIGYKMKAQ

SEQ ID NO: 1017980 - protein, 168 aa, Homo sapiens
EIKKGVGDIRVIVCDFIKTTKAFLPAMTKNNHGHIVTVASAAGHVSVPFLLAYCSSKFAAVGFHKTLTDELAALQITGVKTTCLCPNFVNTGFIKNPSTSLGPTLEPEEVVNRLMHGILTEQKMIFIPSSIAFLTTLERILPERFLAVLKRKISVKFDAVIGYKMKAQ

SEQ ID NO: 1017981 - protein, 300 aa, Homo sapiens; identical to SEQ ID NO: 1017972

SEQ ID NO: 1017982 - protein, 300 aa, Homo sapiens; identical to SEQ ID NO: 1017972

SEQ ID NO: 1017983 - protein, 115 aa, Homo sapiens
LDVNQTLSAIPAPPEPRLADHSRLGAGGQPGQHSETPSPPKKYENQSGVAARAALAGTQQAEAGESGREVAVSRDGSSTVQLRLMYERGDGGGAEEEEGEGSPGFSSVVMKMSSN

SEQ ID NO: 1017984 - protein, 138 aa, Homo sapiens
MGQIEWAMWAHEQALASGLILITGGIVATAGRFTQWYFGAYSIVAGVFVCCVCTPGEEEEGLQHGRWGQKYMTAVVKLFGPFTRNYYVRAVLHLLLSVPAVPAGHHPWDRLPGHCERHLPTGGCAWRAVDAHSSSKPR

SEQ ID NO: 1017985 - protein, 162 aa, Homo sapiens
VSKGAHFRCPFFRQPYGPNPRVKGAVPKPERGRGGPRPPSDLQCAPGSRSDMGHNLKDLAGTLCAGPRGMGTGLKLLLGAGAVAYGVRESVFTVEGGHRAIFFNRIGGVQQDTILAEGLHFRIPWFQYPIIYDIRARPRKISSPTGPKDLQMVNISLRVLSR

SEQ ID NO: 1017986 - protein, 137 aa, Homo sapiens
WITVVADLSSLLKDGNLYFLGALRLTILAVKLNRQRLIVCLEESLYIHNIRDMKGAALRSGRRLQTLQACVALSINNDNCYLAYPGSATIGEVQVFDTINLRARKDEFQLTTDLYDGLAFDASGNLNLATASHNGDR

SEQ ID NO: 1017987 - protein, 211 aa, Homo sapiens
MNLASQSGEAGAGQLLFANFNQDNTSLAVGSKSGYKFFSLSSVDKLEQIYECTDTEDVCIVERLFSSSLVAIVSLKAPRKLKVATLRREPEICNYSYSNTILAVKLNRQRLIVCLEESLYIHNIRDMKGAALRSGRRLQTLQACVALSINNDNCYLAYPGSATIGEVQVFDTINLRACKDEFQLTTDPYDGLAFDASGNLNLAPASDNGDR

SEQ ID NO: 1017988 - protein, 230 aa, Homo sapiens
MNLASQSGEAGAGQLLFANFNQDNTEVNGGINEQLVLAVALLVWSLAVGSKSGYKFFSLSSVDKLEQIYECTDTEDVCIVERLFSSSLVAIVSLKAPRKLKVATLRREPEICNYSYSNTILAVKLNRQRLIVCLEESLYIHNIRDMKGAALRSGRRLQTLQACVALSINNDNCYLAYPGSATIGEVQVFDTINLRSRKDEFQLTTDPYDGLAFDASGNLNLAPASDNGDR

SEQ ID NO: 1017989 - protein, 211 aa, Homo sapiens; identical to SEQ ID NO: 1017987

SEQ ID NO: 1017990 - protein, 191 aa, Homo sapiens
MNLASQSGEAGAGQLLFANFNQDNTWNRSMNAPIRKMCALVERLFSSSLVAIVSLKAPRKLKVATLRREPEICNYSYSNTILAVKLNRQRLIVCLEESLYIHNIRDMKGAALRSGRRLQTLQACVALSINNDNCYLAYPGSATIGEVQVFDTINLRACKDEFQLTTDPYDGLAFDASGNLNLAPASDNGDR

SEQ ID NO: 1017991 - protein, 101 aa, Homo sapiens
  misc_feature (2)..(2): Xaa can be any naturally occurring amino acid
  misc_feature (10)..(10): Xaa can be any naturally occurring amino acid
KXPLGTCEAXAKARVMDASAFEIFSKFPPTLYQDDTLTLAGCRPCAQKSTAAAGTPSPEVQPEIQSWSLSWSRPQSLSRSRSRPQSLSRTQSQPPIKHPPP

SEQ ID NO: 1017992 - protein, 128 aa, Homo sapiens
RRLPAVDRDYYLDRPLSFDSSAVKLEFQNIERDITRRLGQFSPVGQIMRRMCREYRMVVRMLEARGTEDFGLISQELYGAASDAFHAGDPTLADLGLMLSDYLNNIDGRGDLKDEAKTLTAKDAVALL

SEQ ID NO: 1017993 - protein, 177 aa, Homo sapiens
FAAASTETAQGNITHADLFTGEVRLRRQGLIHRLQYVDASLATSVDGVPVLLFGRGAKYAPEHSPERVGEGRGGPVHPLFGVGAGLQVARVPVRIRRILAARYAHDGVGLPEHKVAIFNHRHAAIGVQRAVLRRVDHTKSPARINCLIVQAELLGAPQLLFLTFDEFLRPQIFSMGR

SEQ ID NO: 1017994 - protein, 126 aa, Homo sapiens
  misc_feature (25)..(25): Xaa can be any naturally occurring amino acid
  misc_feature (31)..(31): Xaa can be any naturally occurring amino acid
  misc_feature (45)..(45): Xaa can be any naturally occurring amino acid
  misc_feature (50)..(50): Xaa can be any naturally occurring amino acid
  misc_feature (63)..(63): Xaa can be any naturally occurring amino acid
  misc_feature (67)..(68): Xaa can be any naturally occurring amino acid
  misc_feature (79)..(80): Xaa can be any naturally occurring amino acid
  misc_feature (85)..(85): Xaa can be any naturally occurring amino acid
  misc_feature (95)..(98): Xaa can be any naturally occurring amino acid
  misc_feature (109)..(109): Xaa can be any naturally occurring amino acid
  misc_feature (111)..(112): Xaa can be any naturally occurring amino acid
  misc_feature (114)..(114): Xaa can be any naturally occurring amino acid
  misc_feature (120)..(120): Xaa can be any naturally occurring amino acid
  misc_feature (123)..(123): Xaa can be any naturally occurring amino acid
  misc_feature (125)..(125): Xaa can be any naturally occurring amino acid
GDSVKFEGGEDASVAVEWSGDGSGXLQRSGXLGKTRDAAAEDSEXLGRKXQGTEPRPAGGGGXGAAXXNYLNQPSAAPXXAPRGXSASSMDPSSXXXXSTPPPGLLVPXSXXPXQHPPLXLAXPXP

SEQ ID NO: 1017995 - protein, 163 aa, Homo sapiens
FAAASTYKAIEIIKPGCRLGHIGEIIQKHAEKNGFSVVREFCGHGIGKVFHEEPQILHYGRAGTGMELKAGMTFTIEPMINQGKADTKVLGDGWTAITKDRKLSAQWEHTLLVTGTGYEIFTLRSDETIPRVSALIACTCRSVQNAYQNPRKANRCRRWTPVE

SEQ ID NO: 1017996 - protein, 320 aa, Homo sapiens
PSKPLHVIKGHSKSIQCLTVHKNGGKSYIYSGSHDGHINYWDSETGENDSFAGKGHTNQVSRMTVDESGQLISCSMDDTVRYTSPHAAGLQRTRSCETGRSAKVRSRSCPGGYAVVVCIGTGFCSPGLKESEERASDIDNPGYVAQNVVGSAPPAGDNGVGNLGGVDGNVRLYSILGTTAERLSGKLLEAKGPRGTPERVGVLNLPPTERAPSSSVCDSSMVGHSGSSRLAGTAYSGEPVFVYGHHAKIVCLAWSQDNEHFASGGMDMMVYVLDPVVTRKPESRSKMHTGCTMSDSLAWLDEHTLVTTSHDASVKEWTIT

SEQ ID NO: 1017997 - protein, 217 aa, Homo sapiens
METLGEAGPGGPVSPESVRHSRTDGGGPELQPVPPKGTCKTGLKLGCGNKTDNQEHWIPCEGELVKDDGAGPTGIRRKTLEKIKSDTPKAGSANSTGYPTIAKSTVDKPINEELKTAVKPLKQSLKNKRLRGKGRKMAQKAEQEEEGNEQKKKQREEDKTRRGHDKRRLTPTAAARKQAEGEDTHAAKRQRENKKRGQRKRQRDRRNRHQCHARQAQ

SEQ ID NO: 1017998 - protein, 120 aa, Homo sapiens
TVEPGKTVTFTLGDWYLNDKKLAAGDVKDIVWILDAKDVTAQFKGNKLEVNAPAAEGTMTLEIKGKLASDPTKELSQKKSVTVKKAGATPEPEKKSSGGGCDAGFSALALEKQKNYVKIK

SEQ ID NO: 1017999 - protein, 213 aa, Homo sapiens
QARVPSSADPGPAAQAAKSGDRLRQQPMSLILWICPGAKGSRIRRGVQEEQTLRPGSLCISVTPDAIPREASAIPRPVPELQHANLRVSGTSSLRGRVGEGASDSPGVFRYVTPARQPPGPERQRRSQASSGKPLRWPRGAHASTRSLFGRRSGAGYTARRALPLRRGGPRACDFPSVVLGQPGPAQENPRAQRRLHLRPPGAGRPPQVQARA

SEQ ID NO: 1018000 - protein, 104 aa, Homo sapiens
AVVRASTLPLSVFMVGVGGPNFEAMDHLAVDGGPLHTRSGQAAARDIVQFVPYRRFQNAPREALAQTVLAEVPTQLVSYFRAQGWAPLKPLPPSAKDPAQAPQA

SEQ ID NO: 1018001 - protein, 41 aa, Homo sapiens
MGRCAYFPFAFHRDCTFPEDSLAMLSVQPAELSAQISAVTE

SEQ ID NO: 1018002 - protein, 67 aa, Homo sapiens
GRRMCLESWKLDYPTFSYKWTLRACLEVLAGERTYSYTLDRRPVLLYRGWSSSSTERARSGGTHMER

SEQ ID NO: 1018003 - protein, 186 aa, Homo sapiens
NGATFFGRPKSGFIPTPAASTMPPKFDPNEVKVVYLRCTEGQVGATSALAPKIGPLGLSPKKVGDDIAKATGDWKGLRITVKLTIQNRQAQIEVVPSASALIIKALKEPPRDRKKQKNIKHSGNITFDEIVNIARQMRHRSLARELSGTIKEILGTAQSVGCNVDGRHPHDIIDDINSGAVECPAS

SEQ ID NO: 1018004 - protein, 176 aa, Homo sapiens
FAAYPCASYRDFESNKCFPCPDQGCPQMGHYADSFANNTSVEPQKFFLNTGEAKNFARWRYRVSLTFSGRTVTGQVKVSLFGSNGNTRQCDIFRGIIKPGVQHSNEFDAKLDVGTIEKVKFLWNNHVVNPSFPKVGAAKITVQKGEERTEHNFCSEETVREDILLTLLPCKTSDTM

SEQ ID NO: 1018005 - protein, 111 aa, Homo sapiens
IRGRVDISGFWLCAALGFGIIALNLFLAKPLLKLKIFTVTQVLEKRYNPMARQASAVIMLAYALMIGVTSILAIGTVLQVLFNLPFWLSVLLGGGVVVVYSVDAAANLVVV

SEQ ID NO: 1018006 - protein, 139 aa, Homo sapiens
IRGRVDQQVENRQFRGQALAVVVDKVAHHLDPGGADCAAQYTAQHVEVAVDFTAGNQVHARLDHRLAAALDRQAGFDGVEDFVVGQGQFVDVQAVKEVDVDRVHGLLTDGVRRSTLEKLLCAEGACYGALNTTCCTSTF

SEQ ID NO: 1018007 - protein, 384 aa, Homo sapiens
VPLRPGDWAGVSTADRGERRPLGPAFCDLPSAPRRRPGGAKRTRGARLPPGTLAPWIIKQFVVDIESRLRMEGVELKEEWQDEDFPIPLPEDDSIEADILAITGPEDQPGSLEVNGNKVRKKLMAPDISLTLDPSDGSVLSDDLDESGEIDLDGLDTPSENSNEFEWEDDLPKPKTTEVIRKGSITEYTAAEEKEDGRRWRMFRIGEQDHRVDMKAIEPYKKVISHGGYYGDGLNAIVVFAVCFMPESSQPNYRYLMDNLFKYVIGTLELLVAENYMIVYLNGATTRRKMPSLGWLRKCYQQIDRRLRKNLKSLIIVHPSWFIRTLLAVTRPFISSKFSQKIRYVFNLAELAELVPMEYVGIPECIKQVDQELNGKQDEPKNEQ

SEQ ID NO: 1018008 - protein, 135 aa, Homo sapiens
GQSAEQLDSEKVAHLCSVKGIGLVTAASLMSYLPELGEVGRHEIAALAGVAPYNDDSGKHKGKRHISGGRFAVRRSLYMASWIVIRYQPEFNARYKALRDKGKCAKVALIACMRVLLIRLNAMIRDGSEWKEHVA

SEQ ID NO: 1018009 - protein, 182 aa, Homo sapiens
SPIFSFLLPNPPLSLNACAFQFFFYPYGMRPGNHDEFLLVCKLPLHRLRLLGRGWLLAGTLRRALLRTQNGGGHSRVSRLTSYCVQDRLGGGAGLPQGCVALIAAGWVIRLGAPGVPPGGGRALQPQGWRGGGGLGQRAGVRVRTPRGGRGLGGRRRPVVREPAGAAAPQGRVPAGPGQAAA

SEQ ID NO: 1018010 - protein, 98 aa, Homo sapiens
LLHTPAHVLPSAAFLCSMFVNSLLLSKETKSAKEIPEDVDMEEEKESEDSDEENDFTEKVQDTSNTGLGEDIIHQLSKSEEKELRKFGKIDYSWIAAL

SEQ ID NO: 1018011 - protein, 158 aa, Homo sapiens
LLHTPAHVLPSAAFLCSMFVNSLLLSKETKSAKEIPEDVDMEEEKESEDSDEENDFTEKVQDTSNTGLGEDHYTSSVTIMYHNTSADVGLYAALVYVPFKPGDSQDQCPFVLLTDMLIFNGFHVYVRVVVRVGERVFARVAFVVGLTHASGYKSRAAA

SEQ ID NO: 1018012 - protein, 73 aa, Homo sapiens
MPHSPVLGTHESSPDHRLPRYAPTSSLPHSATCCRFRDTIHCATWIDLRIAHRNGGARGTSLAENSHELVEVR

SEQ ID NO: 1018013 - protein, 294 aa, Homo sapiens
KTGDLNETICTCSHLTSFGVLLDLPSTSVLPAQMMALTFITYIVCGLSSIFLSVTLVTYIAFEKIRRDYPSKILIQLCAALLLLNLVFLLDSWIALYKMQGLCISVAVFLHYFLLVSFTWMGLEAFHMYLALVKVFNTYIRKYILKFCIVGWGVPAVVVTIILTISPDNYGLGSYGKFPNGSPDDFCWINNNAVFYITVVGYFCVIFLLNVSMFIVVLVQLCRIKKKKQLGAQRKTSIQDLRSIAGLTFLLGITWGFAFFAWGPVNVTFMYLFAIFNTLQGKLYSIKYKLNDPS

SEQ ID NO: 1018014 - protein, 103 aa, Homo sapiens
  misc_feature (75)..(75): Xaa can be any naturally occurring amino acid
  misc_feature (87)..(87): Xaa can be any naturally occurring amino acid
  misc_feature (98)..(98): Xaa can be any naturally occurring amino acid
  misc_feature (101)..(101): Xaa can be any naturally occurring amino acid
MFPTTSQTTGWCTSLLALGRSHSDVTSYNPGKLEEQPCNQACSKKGFLFTNLELLYSFTLVPLSAVSRKYYFCHXIRILFCKMRRAXKYFKFSPSVSXLSXSF

SEQ ID NO: 1018015 - protein, 62 aa, Homo sapiens
IRGRVDPHPQLGVGILLELVLQAGEETAAVLDLRAFSEGFTAQGCELAQQFTLFFGHMSTRA

SEQ ID NO: 1018016 - protein, 280 aa, Homo sapiens
MDMSLELDIIKLNRSQRGGWGGCRGLRAVCRLPVAGRVWWVLQAAAQVNRGGGPIRNRPGIALRAAVEGGRNRPAPYSRPKQLPDKWQHDLFDSGFGGGAGVETGGKLCVVSNLDIGVSDADIQELFAEFGTLKKAAVHYDRSGRSLGAQNEFTLQQQADALNGHEAGTTASLLDGRPMNFSFVTSQIDAQRRACTERKQSVAGLETVALEGKGRVGGVHPGEGTPRMAPVEEARRLQEEIQQASKLTAEELDAHVDAYNAENDTVKKNSNPASDMTRSI

SEQ ID NO: 1018017 - protein, 222 aa, Homo sapiens
  misc_feature (49)..(49): Xaa can be any naturally occurring amino acid
RQITLDVPHNLFPFLEKKKNLLIEVHDYIRAYLGDTSEAKEFPKQFLEXRAKQKANQQRQQQHLPQQQQQQPPQQPPQQPQQQDSVWGMNHSTLHSVFQTNQSNNQQSNFEAVQSGKKKKKQKMVRADPSLLGFSVNASSERLNMGEIETLDDYWAPASGLAIPLLSADYGVSTFGHNTYITIYSLSLCNKSQNRSSQAFSSGPLCPRFFNPFLLVNISDYR

SEQ ID NO: 1018018 - protein, 263 aa, Homo sapiens
MAFLWLVSCFALVGATFGCGVPAIQPVLTGLSRIVNGEDESLAPGPWQVSLQDRTGFHFCGGSLISENWVVTAAHCGVKTTDVVVAGEFDQGSDEENVQVLKIAQVFKNPKFNSFTVRNDITLLKLATPAQFSETVSAVCLPTVDDDFPAGTLCATTGWGKTKYNALKTPDKLQQAALPIVSEAKCKESWGSKITDVMICAAPSGVSSCMGDSGGPLVCQKDGVWTLAGIVSWGSGFCSTSTPAVYALLTALMPWVQEILEAN

SEQ ID NO: 1018019 - protein, 143 aa, Homo sapiens
  misc_feature (66)..(66): Xaa can be any naturally occurring amino acid
ETWEEHGAPVLGEHLLCADALRRCTHLILTDAAGRQAASLPFCRGQGTCAVSPSSPCLEVCLADQXPSSSLLRKPLGNPSAQPTQGQLLRLPFPMATPVTVSASQQGSPPTHVHPNPSMRVPPPSPTDRHNGVNLGAIPCFHP

SEQ ID NO: 1018020 - protein, 130 aa, Homo sapiens
GIPEHCTGSGRDFSLRGLSCVALLSLSGLEAIQRTPKIQVYSRHPAENGKSNFLNCYVSGFHPSDIEVDLLKNGERIEKVEHSDLSFSKDWSFYLLYYTEFTPTEKDEYACRVNHVTLSQPKIVKWDRDM

SEQ ID NO: 1018021 - protein, 130 aa, Homo sapiens; identical to SEQ ID NO: 1018020

SEQ ID NO: 1018022 - protein, 130 aa, Homo sapiens; identical to SEQ ID NO: 1018020

SEQ ID NO: 1018023 - protein, 130 aa, Homo sapiens; identical to SEQ ID NO: 1018020

SEQ ID NO: 1018024 - protein, 130 aa, Homo sapiens; identical to SEQ ID NO: 1018020

SEQ ID NO: 1018025 - protein, 130 aa, Homo sapiens; identical to SEQ ID NO: 1018020

SEQ ID NO: 1018026 - protein, 70 aa, Homo sapiens
  misc_feature (57)..(57): Xaa can be any naturally occurring amino acid
  misc_feature (66)..(66): Xaa can be any naturally occurring amino acid
GVPLLCMNWLPLSYPAFCLILEHLVSQMPLVIASCKEQKSAHIGPNKGIEISWKYDXAGLNENWSXERGT

SEQ ID NO: 1018027 - protein, 103 aa, Homo sapiens
PDRPLVLTVEHKEKELIVKQGSKGTPQSLGLNLVKIQCHNEAVYQYHVTFSPNVECKSMRFGMLKDHQAVTGNVTAFDGSILYLPVKLQQVLELKSQRKTRQC

SEQ ID NO: 1018028 - protein, 338 aa, Homo sapiens
MLQKPKSVKLRALRSPRKFGVAGRSCQEVLRKGCLRFQLPERGSRLCLYEDGTELTEDYFPSVPDNAELVLLTLGQAWQGYVSDIRRFLSAFHEPQVGLIQAAQQLLCDEQAPQRQRLLADLLHNVSQNIAAETRAEDPPWFEGLESRFQSKSGYLRYSCESRIRSYLREVSSYPSTVGAEAQEEFLRVLGSMCQRLRSMQYNGSYFDRGAKGGSRLCTPEGWFSCQGPFDMDSCLSRHSINPYSNRESRILFSTWNLDHIIEKKRTIIPTLVEAIKEQDGREVDWEYFYGLLFTSENLKLVHIVCHKKTTHKLNCDPSRIYKPQTRLKRKQPVRKRQ

SEQ ID NO: 1018029 - protein, 103 aa, Homo sapiens
MLQKPKSVKLRALRSPRKFGVAGRSCQEVLRKGCLRFQLPERGSRLCLYEDGTELTEDYFPSVPDNAELVLLTLGQAWQGWFCHVSQDSLTLLGSSCPPALVS

SEQ ID NO: 1018030 - protein, 99 aa, Homo sapiens
CIRRYRHNTQKETKDEKKKNLEIEKKRTIIPTLVEAIKEQDGREVDWEYFYGLLFTSENLKLVHIVCHKKTTHKLNCDPSRIYKPQTRLKRKQPVRKRQ

SEQ ID NO: 1018031 - protein, 110 aa, Homo sapiens
MLQKPKSVKLRALRSPRKFGVAGRSCQEVLRKGCLRFQLPERGSRLCLYEDGTELTEDYFPSVPDNAELVLLTLGQAWQGCGRCERHQALPQCISRATGGAHPGRPAAAV

SEQ ID NO: 1018032 - protein, 115 aa, Homo sapiens
MLQKPKSVKLRALRSPRKFGVAGRSCQEVLRKGCLRFQLPERGSRLCLYEDGTELTEDYFPSVPDNAELVLLTLGQAWQGCEWQGLWRCERHQALPQCISRATGGAHPGRPAAAV

SEQ ID NO: 1018033 - protein, 234 aa, Homo sapiens
MKQYDPHILPCLAPGLEQDTDPEAPGLPCGLGGLLVFLAGLESRFQSKSGYLRYSCESRIRSYLREVSSYPSTVGAEAQEEFLRVLGSMCQRLRSMQYNGSYFDRGAKGGSRLCTPEGWFSCQGPFDMDSCLSRHSINPYSNRESRILFSTWNLDHIIEKKRTIIPTLVEAIKEQDGREVDWEYFYGLLFTSENLKLVHIVCHKKTTHKLNCDPSRIYKPQTRLKRKQPVRKRQ

SEQ ID NO: 1018034 - protein, 316 aa, Homo sapiens
PLLWPSGLCSFRGHGTWAHQVASRLCFPEPSEEGNVVSVGRRLRTRPRRASLFPGLLGNVDFRDRHPACASLQSSPGADPCGQGEDGSEQLGSRCHRLWDPEGLRTSAMLQKPKSVKLRALRSPRKFGVAGRSCQEVLRKGCLRFQLPERGSRLCLYEDGTELTEDYFPSVPDNAELVLLTLGQAWQGCEWQGLWDVSDIRRFLSAFHEPQVGLIQAAQQLLCDEQAPQRQRLLADLLHNVSQNIAAETRAEDPPWFEGLECRWRESWVQRNLCLSLTLWLPRLKGISLAQLRNGWDYRVEIPNPNSLGYLENRET

SEQ ID NO: 1018035 - protein, 80 aa, Homo sapiens
MLQKPKSVKLRALRSPRKFGVAGRSCQEVLRKGCLRFQLPERGSRLCLYEDGTELTEDYFPSVPDNAELVLLTLGQAWQG

SEQ ID NO: 1018036 - protein, 116 aa, Homo sapiens
MLQKPKSVKLRALRSPRKFGVAGRSCQEVLRKGCLRFQLPERGSRLCLYEDGTELTEDYFPSVPDNAELVLLTLGQAWQGSVGVRARTKTRDTSSLSPGDCQALGNGGRCGQRLFL

SEQ ID NO: 1018037 - protein, 270 aa, Homo sapiens
MLQKPKSVKLRALRSPRKFGVAGRSCQEVLRKGCLRFQLPERGSRLCLYEDGTELTEDYFPSVPDNAELVLLTLGQAWQGYVSDIRRFLSAFHEPQVGLIQAAQQLLCDEQAPQRQRLLADLLHNVSQNIAAETRAEDPPWFEGLESRFQSKSGYLRYSCESRIRSYLREVSSYPSTVGAEAQEEFLRVLGSMCQRLRSMQYNGSYFDRGAKGGSRLCTPEGWFSCQGPFDMDSCLSRHSINPYSNRESRILFSTWNLDHIDGVLLCGPG

SEQ ID NO: 1018038 - protein, 223 aa, Homo sapiens
RCSCVVSFHSCSKGAGNMAQQACPRAMAKNGLVICILVITLLLDQTTSHTSRLKARKHSKRRVRDKDGDLKTQIEKLWTEVNALKEIQALQTVCLRGTKVHKKCYLASEGLKHFHEANEDCISKGGILVIPRNSDEINALQDYGKRSLPGVNDFWLGINDMVTEGKFVDVNGIAISFLNWDRAQPNGGKRENCVLFSQSAQGKWSDEACRSSKRYICEFTIPQ

SEQ ID NO: 1018039 - protein, 136 aa, Homo sapiens
MRHKEVCLRGTKVHKKCYLASEGLKHFHEANEDCISKGGILVIPRNSDEINALQDYGKRSLPGVNDFWLGINDMVTEGKFVDVNGIAISFLNWDRAQPNGGKRENCVLFSQSAQGKWSDEACRSSKRYICEFTIPQ

SEQ ID NO: 1018040 - protein, 122 aa, Homo sapiens [sequence omitted]

SEQ ID NO: 1018041 - protein, 101 aa, Homo sapiens
KKEIEGEGGNSAASAEASTSLVIWLDPPTRRPPQRFLFPEKSSSSQVLRTRQSRSISGTNGQLLGAVPSPTGLLRPSANGHFLELLRVPLTSCSQLGNSNF

SEQ ID NO: 1018042 - protein, 101 aa, Homo sapiens; identical to SEQ ID NO: 1018041

SEQ ID NO: 1018043 - protein, 101 aa, Homo sapiens; identical to SEQ ID NO: 1018041

SEQ ID NO: 1018044 - protein, 128 aa, Homo sapiens
HEAGHCSALLLLLLGLAGPRGATAGVRTVITAETCRQSDSELQLQPACVSHCLWWEVLSQDPCKGGSLTFFLGFPGATWPAAVGEVLVGNFLQPPPEAPEKALVVREAPPLGPQAGASPGPGCHTSVS

SEQ ID NO: 1018045 - protein, 141 aa, Homo sapiens
  misc_feature (91)..(91): Xaa can be any naturally occurring amino acid
  misc_feature (94)..(94): Xaa can be any naturally occurring amino acid
MKPATALLCSCSCWAWLDPGEPRLGCGPSSLQKRAGRAIQNYNYNQHAYPTAYGGKYSVKTPAKGGVSPSSSASRVQPGLLQWVKFWYGGXKVXGHHKAEQGNFLQPPPEAPEKALVVREAPPLGPQAGASPGPGCHTSVS

SEQ ID NO: 1018046 - protein, 184 aa, Homo sapiens
  misc_feature (1)..(1): Xaa can be any naturally occurring amino acid
  misc_feature (30)..(30): Xaa can be any naturally occurring amino acid
  misc_feature (37)..(37): Xaa can be any naturally occurring amino acid
  misc_feature (159)..(159): Xaa can be any naturally occurring amino acid
  misc_feature (176)..(176): Xaa can be any naturally occurring amino acid
XKQYSPLPKKAEGDLGPSWFCGFSNLEPQXLEKRASXLHQRDVLLTELSNCTVRLYGNPNNLRLTKAQQLQAPLRSGVNLVFLENSINCFLEVAAKQLRIHSKKNTRIFLQVTSRAIVEDCSGIQFAPYTWSYPEIDKDFESSGLDRSKNNWNDVDDFXLAGARDMALPTLEYLPXEERNIQWD

SEQ ID NO: 1018047 - protein, 153 aa, Homo sapiens
FAAASTEEGGIGFVVADNPKIQQEVLVTPGRNADARVGQFVKVKITHWPTPRFQPQGDVIEVVGNYMAPGMEIDVALRTYDIPHVWPEAVLKEAAKLKPEVEDKDKEKRVDLRHLPFVTIDGEDARDFDDAVYCEAKPGKLRLFSGVDAAAKL

SEQ ID NO: 1018048 - protein, 103 aa, Homo sapiens
PGWGHHYRTPLPWPAVGLPKRGGLAIPDAAEKQMCGKGVELSSASLLQAPEHSCPGCQCGAFAFQRLGPLGLNSNLTAEGQVPYSPGVCLLIPAVSSGPDRKV

SEQ ID NO: 1018049 - protein, 435 aa, Homo sapiens
RGPRGREAKRLGGPASERGENKAAELARRAQCRDTLQLPPPPPSLALCSLILPPGPPPCRSLRWERTKSTKKVQVVPEAASQFLSPVGAEFVRVSLSEKGPPTVYKDVEVGCTAVLHGTAVLDYLTADILELAGNAARDNKKGRVTPRHILLAVANDEELNQLLKGVTIASGGVLPNIHPELLAREAGDPKEKLEAIITPPPAKKAKSPSQKKPVSKKAGGKKGARKSKKKQGEVSKAASADSTTEGTPADGFTVLSTKSLLGRTELIPVNSISGFEVRHNQSTNADIDLRRLGNLEKTRWQGVCGSCLELRKKNGPLEVAELLSAQAMAAAKFVIHCNSPVWGADKCEELLEKTVKNCLALADDKKLKYIAFPSIGSGRNGFPKQTAAQLILKAISSYFRVYQCPSTIKTVYSVLFDSEKYRLYVQEMAKQDAN

SEQ ID NO: 1018050 - protein, 438 aa, Homo sapiens
RGPRGREAKRLGGPASERGENKAAELARRAQCRDTLQLPPPPPSLALCSLILPPGPPPCRSRGGKKKSTKKVQVCQKQESFLSPVGAEFVRVSLSEKGPPTVYKDVEVGCTAVLHGTAVLDYLTADILELAGNAARDNKKGRVTPRHILLAVANDEELNQLLKGVTIASGGVLPNIHPELLAREAGDPKEKLEAIITPPPAKKAKSPSQKKPVSKKAGGKKGARKSKKKQGEVSKAASADSTTEGTPADGFTVLSTKSLFPGPEVAQLYRLDIASIDSDAVVHPKNTDFYIGGEVGNTLEKTRWQGVCGSCLELRKKNGPLEVAGAAVSQAMAAAKFVIHCNSPVWGADKCEELLEKTVKNCLALADDKKLKYIAFPSIGSGRNGFPKQTAAQLILKAISQLLRVYQCPSTIKTVYSVLFDSEKYRLYVQEMAKQDAN

SEQ ID NO: 1018051 - protein, 373 aa, Homo sapiens
MANTTGEPEEVSGALSPPSASAYVKLVLLGLIMCVSLAGNAILSLLVLKERALHKAPYYFLLDLCLADGIRSAVCFPFVLASVRHGSSWTFSALSCKIVAFMAVLFCFHAAFMLFCISVTRYMAIAHHRFYAKRMTLWTCAAVICMAWTLSVAMAFPPVFDVGTYKFIREEDQCIFEHRYFKANDTLGFMLMLAVLMAATHAVYGKLLLFEYRHRKMKPVQMVPAISQNWTFHGPGATGQAAANWIAGFGRGPMPPTLLGIRQNGHAASRRLLGMDEVKGEKQLGRMFYAITLLFLLLWSPYIVACYWRVFVKACAVPHRYLATAVWMSFAQAAVNPIVCFLLNKDLKKCLRTHAPCWGTGGAPAPREPYCVM

SEQ ID NO: 1018052 - protein, 373 aa, Homo sapiens; identical to SEQ ID NO: 1018051

SEQ ID NO: 1018053 - protein, 85 aa, Homo sapiens
WSGPIQERQLTGKIQNGLLKAGPGQPQACFLFIARCKLTLGVATRWRQTQPSLAWASVGATNWQAVQVPGIHFISFKITRPRIVD

SEQ ID NO: 1018054 - protein, 286 aa, Homo sapiens
MTLPIPDNVARQVSLCRSRDRIFVVGGKLLWLCLLGVAVLLPLLAIFWRGFSSEAGQGGGLVAARELVTSDNFHWLLGNSLKVSGSVAAIVVPLAYLFAYALQRTLIPGKAIWRGMSLLPLMAPSMLPGIALVYLFGNQGMLRGLLSDNIYGFWGIVLGEVIYTFPHALMILLSALSLADARLFDAASSMGASPARAFRSITWPATRQAVFAAFCLVFTLTITDFGVPVVVGGDYQVLALEAYKAVVGQQQFGRGALIGMVLLLPALFSFGVDAWLRRRHGDSMSG

SEQ ID NO: 1018055 - protein, 243 aa, Homo sapiens
  misc_feature (130)..(130): Xaa can be any naturally occurring amino acid
ENNRPPPDLCEFFCKHCRERPRSMVVIEVFTPVVQRILKHNMDFGKCPRLRLFTQEYIPALNELNAGMEVVKKFIQSMHGGTGHCPHPRVLPNLVAVCLAAIYSCYEEFINSRDNSPSLKEIRNGCQQRXRPEAHFTSALLHPSPDLVSQEATLSEARLKSVVVASSEIHVEVERTSTAKPALTASAGNDSEPNLIDCLMVSPACSTMSIELGPQADRTLGCYVEILKLLSDYDDWRPSLGQF

SEQ ID NO: 1018056 - protein, 142 aa, Homo sapiens
  misc_feature (15)..(15): Xaa can be any naturally occurring amino acid
  misc_feature (41)..(41): Xaa can be any naturally occurring amino acid
  misc_feature (48)..(49): Xaa can be any naturally occurring amino acid
  misc_feature (52)..(52): Xaa can be any naturally occurring amino acid
  misc_feature (56)..(56): Xaa can be any naturally occurring amino acid
  misc_feature (66)..(67): Xaa can be any naturally occurring amino acid
  misc_feature (70)..(70): Xaa can be any naturally occurring amino acid
  misc_feature (74)..(74): Xaa can be any naturally occurring amino acid
FTCLVILFACEAAAXIWGFVNKDQIAKDVKQFYDQALQQAXLDDDANXXKAXVKTXHETLNCCGSXXLTXLTTXVLKNNLCPSGSNIFSNLFKEDCPQKNDDLISGKLYLIGIAAIVVLVNMIFEKILSMVLCCGIRNSSLY

SEQ ID NO: 1018057 - protein, 92 aa, Homo sapiens
MARMDSTTQARKTSASLLTYLTPTKTTRAMSTSVHVPYTRMLCSMAAALPPAAYASKMAAPGEMYVRKISMVPEIYMAPANVGPIRNNFRGS

SEQ ID NO: 1018058 - protein, 92 aa, Homo sapiens; identical to SEQ ID NO: 1018057

SEQ ID NO: 1018059 - protein, 73 aa, Homo sapiens
STLRTNVLSFSGISRGMVVRTSMMADSGMLTLGLEALGGTKNSRRKRSYGHSPSAGAGGTSATEPTPWSRAAA

SEQ ID NO: 1018060 - protein, 232 aa, Homo sapiens
GAPHPPSRMHNSPTQNLPVPHCPPHNAHSPPRTSSSPASVNDSRGPRTTEPSTKSMMEVERKLAHRKTSKFPENPRESKQLAWERLVGEIAFQLDLQILSSIFPERVRLYGFTVSNIPEKIIQASLNPSDHKLDEKLCQRLTQRYVSVMNRLQSLGYNGRVHPALTEQLVNAYGILRERPELAASEGGPYTVDFLQRVVVETVHPGMLADALLLLSCLSQLAHDDGKPMFIW

SEQ ID NO: 1018061 - protein, 185 aa, Homo sapiens
GAPHPPSRMHNSPTQNLPVPHCPPHNAHSPPRTSSSPASVNDSRGPRTTEPSTKSMMEVERKLAHRKTSKFPENPQASLNPSDHKLDEKLCQRLTQRYVSVMNRLQSLGYNGRVHPALTEQLVNAYGILRERPELAASEGGPYTVDFLQRVVVETVHPGMLADALLLLSCLSQLAHDDGKPMFIW

SEQ ID NO: 1018062 - protein, 442 aa, Homo sapiens
  misc_feature (25)..(25): Xaa can be any naturally occurring amino acid
  misc_feature (34)..(34): Xaa can be any naturally occurring amino acid
  misc_feature (36)..(36): Xaa can be any naturally occurring amino acid
  misc_feature (38)..(40): Xaa can be any naturally occurring amino acid
LHFFNQSTPQPAHYTTAITFSSHYXGYHGDFYIXDXIXXXYRYPYLTTNNHHSLICGHHWFITYDDRPHLSVHSLQHVCKANKCHSFISHCPEYRNLIFVSMMSATTPSGGSTFTSTENTPTRSLLTSFPVTHSFSSSMSASSVGTTHTQSISSPPAITSTLHTTAESTPSPTTTMSFTTFTKMETPSSTVATTGTGQTTFTSSTATSPKTTTLTPTSDISTGSFKTAVSSTPPITSSITSTYTVTSMTTTTPLGPTATNTLPSFTSSVSSSTPVPSTEAITSGTTNTTPLSTLVTTFSNSDTSSTPTSETTYPTSLTSALTDSTTRTTYSTNMTGTLSTVTSLRPTSSSLLTTVTATVPTTNLVTTTTKITSQQYILDFTSSMATTETLLTQYSQIHFFNHHYRDPLTQYSQIHFFNHQYQDHLTQLSQLHFFDHHHRLDR

SEQ ID NO: 1018063 - protein, 265 aa, Homo sapiens
  misc_feature (2)..(2): Xaa can be any naturally occurring amino acid
AXFKSSIYRILIATDVASRGLDILRYRCHQPQHPRLPKIYIHRVGRTARAGRQGQAITLVTQYDIHLVHAIEEQSKKKRGGVLRGRGARCYMILTQVNVVRRECEIKLEAAHFDEKKEINKRKQLHPGSGIGPCAWQAKRKADAGPKINAEEAGRLQRMRGGWMTAECDSKAWQGLATTGSSTPTDTRLCGAIVRPSPLPGPGLEPHTAICPVLDLSMELRVGGTFLGGSSPSRGPTQCPTAKPVGARVVRALLLCPETTGWSLP

SEQ ID NO: 1018064 - protein, 104 aa, Homo sapiens
FAAASTAKPRSTEPQTGFSFPEVLNRWPQYSSDNFMPGMRKVRVYSVHEFQESTPSAEGLAGTEPVTTYKLAIGDRVNKIDHNSFQLVQSGVTLTREPETSTAS

SEQ ID NO: 1018065 - protein, 125 aa, Homo sapiens
ERPRPQLVLDMRGVGAVARSGPGLNAPRKGHLWGHSKKAAVCKPGGEPSPETSQKSANTLISGFQLQSNEKTNFFVSWFPFVIGTLMKPFSVALEMAENEGREIKCYNSEHGAHLPGSPELDSER

SEQ ID NO: 1018066 - protein, 170 aa, Homo sapiens
MSSPDAGYASDDQSQTQSALPAVMAGLGPCPWAESLSPIGDMKVKGEAPANSGAPAGAAGRAKGESRIRRPMNAFMVWAKDERNAVAQQNPDLHNAELSKMLGKSWKALTLGGESGPFVEEAERLRVQHFWGTNPNYKVPGLGGRKARLKRVEAGWKGLDFLGTGLVEPE

SEQ ID NO: 1018067 - protein, 162 aa, Homo sapiens
MQLWIPKDKSKDTDDIESPKRSIRDSGYIDCWDSERSDSLSPPRHGRDDSFDSLDSFGSRSRQTPSPDVVLRGSSDGRGSDSESDLPHRKLPDVKKDDMSARRTSHGEPKSAVPFNQYLPNKSNQTAYVPAPLRKKKAEKRGYRKKLEVTRHLPRWVGKKAL

SEQ ID NO: 1018068 - protein, 154 aa, Homo sapiens
MRKDTDDIESPKRSIRDSGYIDCWDSERSDSLSPPRHGRDDSFDSLDSFGSRSRQTPSPDVVLRGSSDGRGSDSESDLPHRKLPDVKKDDMSARRTSHGEPKSAVPFNQYLPNKSNQTAYVPAPLRKKKAEKRGYRKKLEVTRHLPRWVGKKAL

SEQ ID NO: 1018069 - protein, 154 aa, Homo sapiens; identical to SEQ ID NO: 1018068

SEQ ID NO: 1018070 - protein, 65 aa, Homo sapiens
MSARRTSHGEPKSAVPFNQYLPNKSNQTAYVPAPLRKKKAEKRGIPQEAWKYPPPPPLGGEEGPS

SEQ ID NO: 1018071 - protein, 261 aa, Homo sapiens
ENKCEGQSPRNNNVIPFKTRGEEQILPLHFNSSQCHENDNLVNVDVSVNLLEDLPTLKEKKKASNWQKFGDKDFRTGLENGILLCELLNAIKPGLVKKINRLPTPIAGLDNIILFLRGCKELGLKESQLFDPSDLQDTSNRVTVKSLDYSRKLKNVLVTIYWLGKAANSCTSYSGTTLNLKELKDVAQMRKDTDDIESPKRSIRDSGYIDCWDSERSDSLSPPRHGRDDSFDSLDSFGSRSRQTPSPDVVLRGSSDGRLET

SEQ ID NO: 1018072 - protein, 149 aa, Homo sapiens
  misc_feature (10)..(10): Xaa can be any naturally occurring amino acid
  misc_feature (19)..(20): Xaa can be any naturally occurring amino acid
ERPSVLAELXWMMSSPCAXXPGRASDKALSFVLKENDSGEVNWDAFSMPELHNFLRILQLEEEEHLRQILQKCSYCRQKIQEALHACPLGRPLVPPRWKGKTSKASANVHACVKCDKGQVGPVGIEVFMDGPPVLGGMNPENSEVSLLP

SEQ ID NO: 1018073 - protein, 194 aa, Homo sapiens
  misc_feature (20)..(20): Xaa can be any naturally occurring amino acid
MSHQLGGPGHSPPTMPDQLXSLIPALPLRTAGPSQLSGSRFPVAKSHTPGEQPLPATPASLSGGQPLRVSGCPHPCVPTDSKGCGESAAGDRCPPLLEAGRPATHGAPRNPEAACSRSQKSAPRGTAASGRGTCRWPRSRRRPRSPAGGSRWAAARTRRSQAGGAAAGSGGSGPRGRRRAACCRCRRSRGRRRS

SEQ ID NO: 1018074 - protein, 102 aa, Homo sapiens
RRTDISDKDPKSTGERLGSHSPGSEAWGTILSLQPCIFQPSSFTLLLALEDSREPGQALGDSSANAEDRTSEVPSLGTHTLATVTGNGERTLRSVTLTNTSM

SEQ ID NO: 1018075 - protein, 125 aa, Homo sapiens
  misc_feature (35)..(35): Xaa can be any naturally occurring amino acid
WLLTQHNICRCDRKLCSYPEGVNGFSVTQFSDSTXSLEESHTALGDRSYSESSSTSSSESLNSSAPRGERSTLEDSREPGQALGDSSANAEDRTSEVPSLGTHTLATVTGNGERTLRSVTLTNTS

SEQ ID NO: 1018076 - protein, 164 aa, Homo sapiens
MKTTIRWTKTHDATHAATRRDHESYLQGVTQPIEARTYDSRHGHNRRKNIGQIRTAVAPRLPQVPPPDKTVQQSTLSTNLGQRTHHQGKEDSPSERDGQGRHRRETTYAQEDKTCPPHHRPPPSEKKPRADKKQIYTAYGPTDGEDRHSYQWQTGASDAVTPHQ

SEQ ID NO: 1018077 - protein, 66 aa, Homo sapiens
HIIIGSPVPQDQLQIIIAVTDMLHHCQFTHPSYCTTIPTPTWLSSGHSIYGNPSVIQFCQSVSFLG

SEQ ID NO: 1018078 - protein, 86 aa, Homo sapiens
FLRLGLTLSPMVLECSGVILAHCSPDLPHPPISASSSWTTGGCTMPSQSLYFLQKWGFAMLPRLALNSWAQVIHSPRFPKVLGLQA

SEQ ID NO: 1018079 - protein, 104 aa, Homo sapiens
MWCMPHPKKPGHILVLLDTKGLGDVEKGDNQNDSWIFALAVLLNSTSMYNSMGTINQQAMDQLHYVTELTHRVQPKSSPDENENEDSADFASFFPDFVLTLRDF

SEQ ID NO: 1018080 - protein, 216 aa, Homo sapiens
CVVFNQGELDAMEYHTMIRELILDGSLQLIQEGLKSGFLYPLFEKQDKGSKPITLPLDACSLSELCEMAKHLPSLNEMEHQTLQLVEEDTSVTEQDLFLRVVENNSSFTKVITLMGQKYLLPPKSSFLLSDISCMQPLLNYRKTFDVIVIDPPWQNKSVKRSNRYSYLSPLQIQQIPIPKLAAPNCLLVTWVTNRQKHLRFIKEELLSLLVCGGSC

SEQ ID NO: 1018081 - protein, 216 aa, Homo sapiens; identical to SEQ ID NO: 1018080

SEQ ID NO: 1018082 - protein, 190 aa, Homo sapiens
FAAASTLAFDMNLAFVVLFEKGHAPQQGAFARAGRADQAHHFGMPDLQVDPLEYTQGAEALADIVQAHHGLRVAGELFGGLHGVTLFRDNGWQGALLDSHCGCLLIKRPTRVSRTMPRREQNSTSSSIADTQHQQGFDESEGLRADTGHDHGQLRDGDDRQHRGFLAQDGHQVDQRRQDDHQHLRNLVAQ

SEQ ID NO: 1018083 - protein, 77 aa, Homo sapiens
LHLHESCVLSLKFASSGRWFVSPGKDNLLNAWRTPYGASIFQSKESSSVLSCDISRNNKYIVTGSGDKKATVYEVVY

SEQ ID NO: 1018084 - protein, 178 aa, Homo sapiens
EKRENPPASRKCAKTGVSPGYLLWVLYTALTSTMGTHPAQGFRFWPPCALVGPSGAGYSKSFLLRRDSGPIRCTLNTAQTSCPVAACHSQRNQDPRTRYGPRRAALALLMEFKKGRTYVAGGARRRGLLAVLSSLCQERSQFQDALLFDLHCLFIVFLNVTLHDGVEDVDGGLPVGAE

SEQ ID NO: 1018085 - protein, 163 aa, Homo sapiens
STLVLRLRGGIQIFVKTLTGKTTTLEVESSDTIESVKTKIQDKEGIPPDQQSLIFVEKQLEDGRTLSDYNIQKESTLHLVLRLRGGMQIFVKTLTGKTITLEVESSDTIESVKTKIQDKEGIPPDQQRLIFAGKQLEDGRTLSDYNIQKESTLHLVLRLRGGN

SEQ ID NO: 1018086 - protein, 101 aa, Homo sapiens
KRYVLPTHACLPHPHRIIKCSWYQTQFCVRFYAYFLNTNSEATPCASCPTQRCFNHLTFNSFAAKDHITSMPVGYENWPTSCMKMLQELGRYIRESIAKPD

SEQ ID NO: 1018087 - protein, 430 aa, Homo sapiens
MDPGDAAILESSLRILYRLFESVLPPLPAALQSRMNVIDHVRDMAAAGLHSNVRLLSSLLLTMSNNNPELFSPPQKYQLLVYHADSLFHDKEYRNAVSKYTMALQQKKALSKTSKVRPSTGNSASTPQSQCLPSEIEVKYKMAECYTMLKQDKDAIAILDGIPSRQRTPKINMMLANLYKKAGQERPSVTSYKEVLRQCPLALDAILGLLSLSVKGAEVASMTMNVIQTVPNLDWLSVWIKAYAFVHTGDNSRAISTICSLEKKSLLRDNVDLLGSLADLYFRAGDNKNSVLKFEQAQMLDPYLIKGMDVYGYLLAREGRLEDVENLGCRLFNISDQHAEPWVVSGCHSFYSKRYSRALYLGAKAIQLNSNSVQALLLKGAALRNMGRVQEAIIHFREAIRLAPCRLDCYEGLIECYLASNSIREAHGNG

SEQ ID NO: 1018088 - protein, 259 aa, Homo sapiens
MDPGDAAILESSLRILYRLFESVLPPLPAALQSRMNVIDHVRDMAAAGLHSNVRLLSSLLLTMSNNNPELFSPPQKYQLLVYHADSLFHDKEYRNAVSKYTMALQQKKALSKTSKVRPSTGNSASTPQSQCLPSEIEVKYKMAECYTMLKQDKDAIAILDGIPSRQRTPKINMMLANLYKKAGQERPSVTSYKEVLRQCPLALDAILGLLSLSVKGAEVASMTMNVIQTVPNLDWLSVWIKAYAFVHTGDNSRAISTIW

SEQ ID NO: 1018089 - protein, 144 aa, Homo sapiens
MDPGDAAILESSLRILYRLFESVLPPLPAALQSRMNVIDHVRDMAAAGLHSNVRLLSSLLLTMSNNNPELRRELPGAEEKAAAVWERGAQGTWEQAGRSGRRRQRRLRGLRGRPGAEQTSERKLGSLGAGVKSRGDVASGGLET

SEQ ID NO: 1018090 - protein, 438 aa, Homo sapiens
MDPGDAAILESSLRILYRLFESVLPPLPAALQSRMNVIDHVRDMAAAGLHSNVRLLSSLLLTMSNNNPELFSPPQKYQLLVYHADSLFHDKEYRNAVSKYTMALQQKKALSKTSKVRPSTGNSASTPQSQCLPSEIEVKYKMAECYTMLKQDKDAIAILDGIPSRQRTPKINMMLANLYKKAGQERPSVTSYKEVLRQCPLALDAILGLLSLSVKGAEVASMTMNVIQTVPNLDWLSVWIKAYAFVHTGDNSRAISTICSLEKKSLLRDNVDLLGSLADLYFRAGDNKNSVLKFEQAQMLDPYLIKGMDVYGYLLAREGRLEDVENLGCRLFNISDQHAEPWVVSGCHSFYSKRYSRALYLGAKAIQLNSNSVQALLLKGAALRNMGRVQEAIIHFREAIRLAPCRLDCYEGKKEVPLGQHFPSVRIIWGLAGRGGSP

SEQ ID NO: 1018091 - protein, 176 aa, Homo sapiens
MDPGDAAILESSLRILYRLFESVLPPLPAALQSRMNVIDHVRDMAAAGLHSNVRLLSSLLLTMSNNNPELFSPPQKYQLLVYHADSLFHDKEYRNAVSKYTMALQQKKALSKTSKVRPSTGNSASTPQSQCLPSEIEVKYKMAECYTMLKQDKDAIAILDGIPSRQRTPKACCPFL

SEQ ID NO: 1018092 - protein, 295 aa, Homo sapiens
MCQYIAKHYNMSKSKVVNQFYSVEVGDSTFTVLKRYQNLKPIGSGAQGIVCAAYDAVLDRNVAIKKLSRPFQNQTHAKRAYRELVLMKCVNHKNIISLLNVFTPQKTLEEFQDVYLVMELMDANLCQVIQMELDHERMSYLLYQMLCGIKHLHSAGIIHRDLKPSNIVVKSDCTLKILDFGLARTAGTSFMMTPYVVTRYYRAPEVILGMGYKENVDIWSVGCIMGEMVRHKNPLSQERDYIDQVGTKVIEQLGNTMSQNSCTKLQPTSKETMLENRAEVLRELTFPKFFPDSLF

SEQ ID NO: 1018093 - protein, 314 aa, Homo sapiens
  misc_feature (8)..(8): Xaa can be any naturally occurring amino acid
NYCFGRKXYISTRPCFPNKTCQKMLIILTSALQIAHRCICRILLGSRVLAAKASGNCTLNSEDFIFNIGSAAYDAVLDRNVAIKKLSRPFQNQTHAKRAYRELVLMKCVNHKNIISLLNVFTPQKTLEEFQDVYLVMELMDANLCQVIQMELDHERMSYLLYQMLCGIKHLHSAGIIHRDLKPSNIVVKSDCTLKILDFGLARTAGTSFMMTPYVVTRYYRAPEVILGMGYKENVDIWSVGCIMGEMVRHKNPLSQERDYIDQVGTKVIEQLGNTMSQNSCTKLQPTSKETMLENRAEVLRELTFPKFFPDSLF

SEQ ID NO: 1018094 - protein, 80 aa, Homo sapiens
MGKTQKVKVLTGTGNVNVIHPNYPAARRDFLQTFRRGCWVRDAGPRRLRGTPELRLCPELVRVGRAGRCGLPDLLTWVVE

SEQ ID NO: 1018095 - protein, 392 aa, Homo sapiens
MVEADRPGKLFIGGLNLETDEKALEAEFGKYGRIVEVLLMKDRETNKSRGFAFVTFESPADAKAAARDMNGKSLDGKAIKVAQATKPAFESSRRGPPPPRSRGRPRFLRGTRGGGGGPRRSPSRGGPDDDGGYAADFDLRPSRAPMPMKRGPPPRRVGPPPKRAAPSGPARSSGGGMRGRALAVRGRDGYSGPPRREPLPPRRDPYLGPRDEGYSSRDGYSSRDYREPRGFAPSPGEYTHRDYGHSSVRDDCPLRGYSDRDGYGGRDRDYGDHLSRGSHREPFESYGELRGAAPGRGTPPSYGGGGRYEEYRGYSPDAYSGGRDSYSSSYGRSDRYSRGRHRVGRPDRGLSLSMERGCPPQRDSYSRSGCRVPRGGGRLGGRLERGGGRSRY

SEQ ID NO: 1018096 - protein, 392 aa, Homo sapiens; identical to SEQ ID NO: 1018095

SEQ ID NO: 1018097 - protein, 153 aa, Homo sapiens
WNLLRYNNSYLQKELCFHNANFPASSYILATGSHGLGLVYSGFGYKLPYPVLCFLGTRIAAMARPFLKRRESIARKNLELCFPQHSAEEREKMIAENFRSLGMALVETGMAWFWPDSRVRKWFDVEGLDNLKRAQMQNRGVMVVGVHFMSLEL

SEQ ID NO: 1018098 - protein, 175 aa, Homo sapiens
MSPTISHKDSSRQRRPGNFSHSLDMKSGPLPPGGWDDSHLDSAGREGDREALLGDTGTGDFLKAPQSFRAELSSILLLLFLYVLQGIPLGLAGSIPLILQSKNVSYTDQAFFSFVFWPFSLKLLWAPLVDAVYVKNFGRRKSWLVPTQYILGLFMIYLSTQVDRLLGNTDDRHPT

SEQ ID NO: 1018099 - protein, 157 aa, Homo sapiens
MSPTISHKDSSRQRRPGNFSHSLDMKSGPLPPGGWDDSHLDSAGREGDREALLGDTGTGDFFLYVLQGIPLGLAGSIPLILQSKNVSYTDQAFFSFVFWPFSLKLLWAPLVDAVYVKNFGRRKSWLVPTQYILGLFMIYLSTQVDRLLGNTDDRHPT

SEQ ID NO: 1018100 - protein, 285 aa, Homo sapiens
MHSARLDSFLSQLRWELLCGRDTGSPSMPGPLQPTSQTGPDVQPSHQLRASGALEEDSVCCVEEEEEEEEEAVVTEDRDAALGGPREHALDWDSGFSEVSGSTWREEELPVSQRPAPSAQPLRRQCLSVSGLPMPSRAPVASVPPVHHPRPKSTPDACLEHWQGLEAEDWTAALLNRGRSRQPLVLGDNCFADLVHNWMELPETGSEGGDGGGHRARARPPQFLLGLSEQLRRRLARARRTAMAGKRLSCPPRPEPELPADVSRFAALMSCRSRQPIICNDVSYL

SEQ ID NO: 1018101 - protein, 147 aa, Homo sapiens
  misc_feature (14)..(14): Xaa can be any naturally occurring amino acid
  misc_feature (28)..(28): Xaa can be any naturally occurring amino acid
  misc_feature (41)..(41): Xaa can be any naturally occurring amino acid
  misc_feature (44)..(48): Xaa can be any naturally occurring amino acid
MGHFTEEDKATITXLWGKVNVEDAGGEXLGRLLVVYPWTQXFFXXXXXLASASAIMGNPKVQANGKKAMTSLGDAINHLDDVKGTFPQLSELHCHKLHVDPENFKLLGNVLVTVLAIPFGKEFTPEVQASCQKMVTGVASALSSRYH

SEQ ID NO: 1018102 - protein, 146 aa, Homo sapiens
MAGELTPEEEAQYKKAFSAVDTDGNGTINAQELGAALKATGKNLSEAQLRKLISEVDSDGDGEISFQEFLTAARKARAGLEDLQVAFRAFDQDGDGHITVDELRRAMAGLGQPLPQEELDAMIREADVDQDGRVNYEEFARMLAQE

SEQ ID NO: 1018103 - protein, 146 aa, Homo sapiens; identical to SEQ ID NO: 1018102

SEQ ID NO: 1018104 - protein, 132 aa, Homo sapiens
EAIGHMKEGEEEKTKTYSALIWANKAIQKKDIDFLNDIKDFKNRPENTFARPSPKPLAVRARVIHFMETQYVDEHHFRLHLKTQAGTYIKEFVHGDFGRTKPNIGSLMNVTADILELDVESVDVDWPPALDD

SEQ ID NO: 1018105 - protein, 40 aa, Homo sapiens
MIISISDVYYDYSDSNYFLYYTETVCAFSLLPRHLGNPPP

SEQ ID NO: 1018106 - protein, 186 aa, Homo sapiens
  misc_feature (4)..(4): Xaa can be any naturally occurring amino acid
  misc_feature (27)..(27): Xaa can be any naturally occurring amino acid
  misc_feature (50)..(50): Xaa can be any naturally occurring amino acid
  misc_feature (52)..(52): Xaa can be any naturally occurring amino acid
  misc_feature (57)..(57): Xaa can be any naturally occurring amino acid
  misc_feature (66)..(67): Xaa can be any naturally occurring amino acid
  misc_feature (70)..(70): Xaa can be any naturally occurring amino acid
  misc_feature (72)..(72): Xaa can be any naturally occurring amino acid
  misc_feature (92)..(92): Xaa can be any naturally occurring amino acid
  misc_feature (113)..(113): Xaa can be any naturally occurring amino acid
  misc_feature (116)..(116): Xaa can be any naturally occurring amino acid
  misc_feature (128)..(128): Xaa can be any naturally occurring amino acid
  misc_feature (131)..(134): Xaa can be any naturally occurring amino acid
  misc_feature (136)..(137): Xaa can be any naturally occurring amino acid
  misc_feature (140)..(141): Xaa can be any naturally occurring amino acid
  misc_feature (143)..(143): Xaa can be any naturally occurring amino acid
  misc_feature (146)..(147): Xaa can be any naturally occurring amino acid
  misc_feature (155)..(155): Xaa can be any naturally occurring amino acid
  misc_feature (157)..(161): Xaa can be any naturally occurring amino acid
MELXMPLCRIASPLSSRVALCGPVCLXQSVLFWSQDVFGHPLWFCACPRXAXPQGEXERHRGRAPXXAGXTXTGGRQGRKQAPPGEGHSGGXPSNAFWFWGERGRNRGPGQQXGGXKEREKGPVGEDXKKXXXXKXXGGXXGXGEXXAGGKRKGXGXXXXXGSRGGRAGGSHIDIPFFPGTLASSW

SEQ ID NO: 1018107 - protein, 111 aa, Homo sapiens
RNAIYQNRLALDYLLAAEGGVCEKSDLTNYCLHIDDQGQVVEDIVKDITKLAHAPVQVWHGLNLGAMFGNWFPAIGGFKTLIIRVIIVIGTCLLLPCLIPVFLQMIKNFVA

SEQ ID NO: 1018108 - protein, 110 aa, Homo sapiens
MKPFFDLTDFYHFWRVPVKNSDPEKPSDVTFCDSLDFSVRSVLDDILAGKDIKRRKKCNRAWILNFTGGFTMILPDVPDIIELEMNRNSGYHMGYFRDSPDEISCICWYK

SEQ ID NO: 1018109 - protein, 188 aa, Homo sapiens
FRWDLIRACATCSSSGQQRAQGRMREDVSAGEDCGPLPEGGPEPRSSGAKPGPREGKRSYSMEHLRWGKPVGKKRRPVKVYPNGAEDESAEAFPLEFKRELTGQRLREGDGPDGPADDGAGAQADLEHSLLVAAEKKDEGPYRMEHFRWGSPPKDKRYGGFMTSEKSQTPLVTLFKNAIIKNAYKKGE

SEQ ID NO: 1018110 - protein, 188 aa, Homo sapiens; identical to SEQ ID NO: 1018109

SEQ ID NO: 1018111 - protein, 103 aa, Homo sapiens
RVRRLEVSGRAWWLTKWSWRFGRPRRMDHPRPGVRDQPGRHGETPSLQKIQKLARQWWCVPVSPATVRSEAGESLGPGRWRLQRAEIELLHSSLGDRARLRLK

SEQ ID NO: 1018112 - protein, 101 aa, Homo sapiens
PGRPSSSLAVSCPSPLPYFLICAFFSRNRKVGSRWGATPFIPVFPPLITSPHPRRSSQAWGGPPGGCGADSTFVLRRPGLLIEQCAAVNIFDNLLPIKFCL

SEQ ID NO: 1018113 - protein, 108 aa, Homo sapiens
  misc_feature (53)..(53): Xaa can be any naturally occurring amino acid
MVNDMRNPGLGGLQDSLELCYTTNLWQNSVGCVIRAECLSHAFSLSGPAHTSXSRATIHGLAGMLSLHTDELSTTLLTWEPEAEQASSERSGVEADIPTSRSIFLVLL

SEQ ID NO: 1018114 - protein, 92 aa, Homo sapiens
KAAEMTGVGPTPAWRRVEPFTQNEPGGELGKEHVGSGMRGGMNGGSSSVCKNSSAGLTGHHHSSLAVGSGQSCCPGRRGPCSLVSHYLLLSF

SEQ ID NO: 1018115 - protein, 2056 aa, Homo sapiens
AEASSLGRQSPRVVSCLEHSLCPGEPGLQTTAVVSMGSGDHQFNLAEILSQNYSVRGECEEASRCPDKPKEELEKDFISQSNDMPFDELLALYGYEASDPISDRESEGGDVAPNLPDMTLDKEQIAKDLLSGEEEEETQSSADDLTPSVTSHEASDLFPNRSGSRFLADEDREPGSSASSDTEEDSLPANKCKKEIMVGPQFQADLSNLHLNRHCEKIYENEDQLLWDPSVLPEREVEEFLYRAVKRRWHEMAGPQLPEGEAVKDSEQALYELVKCNFNVEEALRRLRFNVKVIRDGLCAWSEEECRNFEHGFRVHGKNFHLIQANKVRTRSVGECVEYYYLWKKSERYDYFAQQTRLGRRKYVPSGTTDADQDLDGSDPDGPGRPRPEQDTLTGMRTDPLSVDGTAGGLDEPGVASDGLPSSEPGPCSFQQLDESPAVPLSHRPPALADPASYQPAVTAPEPDASPRLAVDFALPKELPLISSHVDLSGDPEETVAPAQVALSVTEFGLIGIGDVNPFLAAHPTCPAPGLHSEPLSHCNSDDLLTPGRGRRMRPRLDLALPLGPPLSVFLTPSPPPGPWGSTSFCFRTRQDWGGGGWAVSPCPCPHRMDPRPHPAPSAPGTATRVRAAACTWDPSGSRGQKRPRRWDAGQSRPPSPFQPAEAREGVTAPAGRRAGRPAPHQQPPPGRPQLPAWLCLSTPGRAAGCPSPGGRGQLLLSANPVGHRAIYLAVRPPPQPRLPTPSSPLQEKPHFTPPPASSPSIPAPDPERLGWGPSATPGVGLRRQVIYIPFAVLPRYQGREPPEEPALLATQGPDSSLFPQPCRSSFCGKLPSKMAWSPGPPPPWPSRLFLFLFDTLEWGPPWAAARPAPGVVRPLVLEPLSELDSTIPHPTKDHTVKDNCLEPPFAVLFIKLDLKPGVPCGGSGGGWGGRCPRHLTWGPACLLEGPGKVVSNTGEGVHRGHDVVGYVIVHVSKGIVATMTGCEEGPRLGRGGRGSLLEVIFKLKHEGEWASFAESLPRGLAGVTADAEDRGLGLQEKLRAQRAEVGRGGDSEVMRPSFVLGVEATLGLHCFFVLFCFFFLDRVSHCRQAGVQWCDLGSLQPPPPEFTRFSCLSLPSSWDYRRPPPGITGARHHAQLLFIFFVEMGFLLIAQDGLYLLTLCSPASASQSAGITGVRHRARLRSALLIAPCRDGAGWLGCILSTSVREMWACMVMGYGEGRPPAEEVTVAWPQGLLVKDQDHLHDGCGRVRGLAGEPVPGAVRTRASHWATWVFGDGRRGVFIGAPQPADVFFRCARSSVFQLALPPAGNLQSSLGFFPPTALKIFQYHWFLSSLMRMCFGVLRCLMRVCFGVLRSLMRMCFGVLRCLMRMCFGVLSLMRMCFGVLSLMRMCFGVLRCLMRMCFGVLSLMRMCFGVLRCLMRMCFGVLRCLMRVCFGVLRCLMRMCFGVLRSLMRMCFGVLSPMRMCFGVLRCLMRMCFGVLSLMRMCFGVLSLMRMCFGVLRCLMRMCFGVLSLMRMCFGVLRSLMRMCFGVLSLMRMCFGVLRCLMRMCFGVLSLMRMCFGVLSLMRMCFGVLRCLMRMCFGVLSLMRMCFGVLRSLMRMCFGVLSLMRMCFGVLRCLMRMCFGVLSLMRMCFGVLSLMRMCFGVLRCLMRMCFGVLRSLMRMCFGVLMRMCFGVLRCLMRMCFGVLSLMRMCFGVLSLMRMCFGVLSLMRMCFGVLRCLMRVCFGVLRSLMRMCFGVLSLMRMCFGVLRCLMRMCFGVLSLTRMCFGVLSLKRMCCGVLRCLMRMYFGVLRCLMRMCFGVLRSLMRMCFGVLSLMRMCFGVLRCLMRMCFGVLRSLMRMCFGVLRSLMRMCFGVLSLMRMCFGVLRSLMRMCFGVLSLMRMCFGVLRCLMRMCFGVLRCLMRVCFGVLSLMRMCCGVLRCLMRMCFSVLMRLCFSVLSLMSMCFGVMSLMRMCFGVLRCLMRMYFGVLRCLMRMCFGVLRSLMRMCFGVLRSLMRMCFGVLSLMRMCFGVLSLMRMCFGVLMRMCFGVLRCLMRMCFGVHVQYVAFEIGFFHIH

SEQ ID NO: 1018116 - protein, 73 aa, Homo sapiens
DSPGLVQFQGSRVLQLFVLKGKVPSSANAVFLGYGGAMLAHPWQVWLLSSAKTLIPCEAGQCFSSRAVGGVTA

SEQ ID NO: 1018117 - protein, 126 aa, Homo sapiens
PLSLEETTASDLRCGSSAWLRTDLSDWHALEWPLFVQEYLSRHSRSQSVVRELRSWQLPPDRCGPWGLPSLWLCLPGLAPACSPGTRCLCLWAFSFLMTEALLVFSPESSLLHSLSRKGRARCHWV

SEQ ID NO: 1018118 - protein, 103 aa, Homo sapiens
  misc_feature (1)..(1): Xaa can be any naturally occurring amino acid
XSRSIENRSDEEEAADLPTKPTVISKFGFAFSWMTKKASTISIKLGSNKPKETVPTLAPSTFSGAAAFNEDEDSEPEEISRSKDEDEEYWKGYTNISWTKLLQ

SEQ ID NO: 1018119 - protein, 96 aa, Homo sapiens
  misc_feature (30)..(30): Xaa can be any naturally occurring amino acid
  misc_feature (32)..(32): Xaa can be any naturally occurring amino acid
ESPDSSSAHLYRGIFPVCARTQSRRLGWGXDXPVNFAMNVGKARGFFKKGDVVIVLTGWHPGSGFTNTMRVGPVAGDGPQSPSSSPCPTPFPQPIH

SEQ ID NO: 1018120 - protein, 96 aa, Homo sapiens; identical to SEQ ID NO: 1018119
  misc_feature (30)..(30): Xaa can be any naturally occurring amino acid
  misc_feature (32)..(32): Xaa can be any naturally occurring amino acid

SEQ ID NO: 1018121 - protein, 132 aa, Homo sapiens
PGHVMKVPRENHCSPGSSYQQSPGEMQLNTNYESLQNPAEFYDNYYAQHSIHNFQPPNNSGDGMWHGEFAQQQPPVVQDSPNHGSGSDGSSTRTGHGPSVLLPGLLPAVQRALFVRLTQRYQEDEEQTSTNS

SEQ ID NO: 1018122 - protein, 80 aa, Homo sapiens
IDDKDEFLKPLEFDHHFPLSQIIPKAPGKIIPSRNTDTSVVVSWEESKDAKELVGYYIEASVAGSGKWEPCNNNPVKGSR

SEQ ID NO: 1018123 - protein, 223 aa, Homo sapiens
YVLEKKHRGSETHWPCLRRAGEPQSWDSSSVFPPQSPSSLNQGRCWLPLCEGSALWEMKRTSRSLLVDMCWARRHRVSQGKDFGLGFRMGPLGAIVVARGNECERTILPPDSPVPFLTHRAPGSGRKKPEKPAAISYEPLGRGADGEHRAGVLPLRTACSTPARPRRHLLAGAPLCLHRALAGAEPPPKRSHSRIFKAALSNPLSDRADLGQPLAVMVAGGGD

SEQ ID NO: 1018124 - protein, 82 aa, Homo sapiens
MTPRQDLVIGLTRTHGSHPPIGQNQTKSSRPQDQTQQSTRSTKEQGNRAASTKARRRGTRKEMPQHETADRERATLEQGTPQ

SEQ ID NO: 1018125 - protein, 209 aa, Homo sapiens
  misc_feature (34)..(34): Xaa can be any naturally occurring amino acid
PLAYCTWLLTVGFPRQDTHQVLRPCTLTTVVQHXHWTTPPQRNKDQLIRAAVKFLDTDTICYRVEEPETLVELQRNEWDPIIEWAEKRYGVEISSSTSIMGPSIPAKTREVLVSHLASYNTWALQGIEFVAAQLKSMVLTLGLIDLRLTVEQAVLLSRLEEEYQIQKWGNIEWAHDYELQELRARTAAGTLFIHLCSESTTVKHKLLKE

SEQ ID NO: 1018126 - protein, 106 aa, Homo sapiens
SWSNKWHSLTSSLVPSGLASVPAAASVARSYRVEEPETLVELQRNEWDPIIEWAEKRYGVEISSSTSIMGPSIPAKTREVLVSHLASYNTWALQGPVSGEAQSVLG

SEQ ID NO: 1018127 - protein, 73 aa, Homo sapiens
GGRWRRPREVEGSEEALRGFRTACGAGFLGFWGLGLSVTLRFPPRHSALVRLSGGQPDFNPGAPGLASSECRR

SEQ ID NO: 1018128 - protein, 209 aa, Homo sapiens; identical to SEQ ID NO: 1018125
  misc_feature (34)..(34): Xaa can be any naturally occurring amino acid

SEQ ID NO: 1018129 - protein, 137 aa, Homo sapiens
  misc_feature (34)..(34): Xaa can be any naturally occurring amino acid
PLAYCTWLLTVGFPRQDTHQVLRPCTLTTVVQHXHWTTPPQRNKDQLIRAAVKFLDTDTICYRVEEPETLVELQRNEWDPIIEWAEKRYGVEISSSTSIMGPSIPAKTREVLVSHLASYNTWALQGPVSGEAQSVLG

SEQ ID NO: 1018130 - protein, 130 aa, Homo sapiens
RPPRMGKSNSKLKPEVVEELTRKTYFTEKEVQQWYKGFIKTALTPTPCVHPAFFRIHTQPAALDPGGPGSPLPCPAPIPRLKPPAPIASNLCLSGKRQHEMEKATALCINQGLGCLAGSLRSSRSLARVL

SEQ ID NO: 1018131 - protein, 170 aa, Homo sapiens
VDRIFAMMDKNADGKLTLQEFQEGSKADPSIVQALSLYDGLVYPRLELDAWEPLTSFCAMRHLSPDTNPVRPPSLLPHPHTALTPTPCVHPAFFRIHTQPAALDPGGPGSPLPCPAPIPRLKPPAPIASNLCLSGKRQHEMEKATALCINQGLGCLAGSLRSSRSLARVL

SEQ ID NO: 1018132 - protein, 105 aa, Homo sapiens
VDRIFAMMDKNADGKLTLQEFQEGSKADPSIVQALSLYDGLVYSQAGAGCLGTTHLLLCHEATSALTPTPCVHPAFFRIHTTHSRLPLTREAPALLSPVLHPSPA

SEQ ID NO: 1018133 - protein, 104 aa, Homo sapiens
  misc_feature (8)..(8): Xaa can be any naturally occurring amino acid
FFLKKKIXARELPLNRGILALKAKEFGTRAKLVLPKWITFDYGIVRKQETLRFIYCINIPSMCIRSRERWRLLGNSAHALYQPLLRWWLQEKLNCQLQTSFFFF

SEQ ID NO: 1018134 - protein, 265 aa, Homo sapiens
MKKIFLKLHILQEKNHKCFSVLWLNEEKVIQRLVELIHPSQDEDRQSNASQTLCDIVRLGRDQGSQLQEALEPDPLLTALESQDCVEQLLKNMFDGDRTESCLVSGTQVLLTLLETRRVGTEGLVDSFSQGLERSYAVSSSVLHGIEPRLKDFHQLLLNPPKKKAILNTIGVLEEPLGNARLHGARSWQHCCTQTHPGSNRSSAGQHDGLTAGTCAFKVQPGNNFLDFPVELMIGGISSQAAREEEDRKPRDREQVEPPWNGDRA

SEQ ID NO: 1018135 - protein, 427 aa, Homo sapiens
MFWKFDLNTTSHVDKLLDKEHVTLQELMDEDDILQECKAQNQKLLDFLCRQQCMEELVSLITQDPPLDMEEKVRFKYPNTACELLTCDVPQISDRLGGDESLLSLLYDFLDHEPPLNPLLASFFSKTIGNLIARKTEQVITFLKKKDKFISLVLKHIGTSALMDLLLRLVSCVEPAGLRQDVLHWLNEEKVIQRLVELIHPSQDEDRQSNASQTLCDIVRLGRDQGSQLQEALEPDPLLTALESQDCVEQLLKNMFDGDRTESCLVSGTQVLLTLLETRRVGTEGLVDSFSQGLERSYAVSSSVLHGIEPRLKDFHQLLLNPPKKKAILNTIGVLEEPLGNARLHGARSWQHCCTQTHPGSNRSSAGQHDGLTAGTCAFKVQPGNNFLDFPVELMIGGISSQAAREEEDRKPRDREQVEPPWNGDRA

SEQ ID NO: 1018136 - protein, 536 aa, Homo sapiens
MESLVLKVKAASFGGLKSSSFGLFTSKPMDSARPVVCIDRRLQGLTLSCSCRVLGSLCRRVQVGKCHLHGKKNAASLVVRMGSRRPRELAQRDLSGIAVESSPDVGAVTMFWKFDLNTTSHVDKLLDKEHVTLQELMDEDDILQECKAQNQKLLDFLCRQQCMEELVSLITQDPPLDMEEKVRFKYPNTACELLTCDVPQISDRLGGDESLLSLLYDFLDHEPPLNPLLASFFSKTIGNLIARKTEQVITFLKKKDKFISLVLKHIGTSALMDLLLRLVSCVEPAGLRQDVLHWLNEEKVIQRLVELIHPSQDEDRQSNASQTLCDIVRLGRDQGSQLQEALEPDPLLTALESQDCVEQLLKNMFDGDRTESCLVSGTQVLLTLLETRRVGTEGLVDSFSQGLERSYAVSSSVLHGIEPRLKDFHQLLLNPPKKKAILNTIGVLEEPLGNARLHGARSWQHCCTQTHPGSNRSSAGQHDGLTAGTCAFKVQPGNNFLDFPVELMIGGISSQAAREEEDRKPGTEKQVEPPWNGDRA

SEQ ID NO: 1018137 - protein, 536 aa, Homo sapiens; identical to SEQ ID NO: 1018136

SEQ ID NO: 1018138 - protein, 427 aa, Homo sapiens
MFWKFDLNTTSHVDKLLDKEHVTLQELMDEDDILQECKAQNQKLLDFLCRQQCMEELVSLITQDPPLDMEEKVRFKYPNTACELLTCDVPQISDRLGGDESLLSLLYDFLDHEPPLNPLLASFFSKTIGNLIARKTEQVITFLKKKDKFISLVLKHIGTSALMDLLLRLVSCVEPAGLRQDVLHWLNEEKVIQRLVELIHPSQDEDRQSNASQTLCDIVRLGRDQGSQLQEALEPDPLLTALESQDCVEQLLKNMFDGDRTESCLVSGTQVLLTLLETRRVGTEGLVDSFSQGLERSYAVSSSVLHGIEPRLKDFHQLLLNPPKKKAILNTIGVLEEPLGNARLHGARSWQHCCTQTHPGSNRSSAGQHDGLTAGTCAFKVQPGNNFLDFPVELMIGGISSQAAREEEDRKPRDREQGEPPWNGDRA

SEQ ID NO: 1018139 - protein, 427 aa, Homo sapiens; identical to SEQ ID NO: 1018135

SEQ ID NO: 1018140 - protein, 447 aa, Homo sapiens
MDFQDLGLVLLRVDLQLAVTMFWKFDLNTTSHVDKLLDKEHVTLQELMDEDDILQECKAQNQKLLDFLCRQQCMEELVSLITQDPPLDMEEKVRFKYPNTACELLTCDVPQISDRLGGDESLLSLLYDFLDHEPPLNPLLASFFSKTIGNLIARKTEQVITFLKKKDKFISLVLKHIGTSALMDLLLRLVSCVEPAGLRQDVLHWLNEEKVIQRLVELIHPSQDEDRQSNASQTLCDIVRLGRDQGSQLQEALEPDPLLTALESQDCVEQLLKNMFDGDRTESCLVSGTQVLLTLLETRRVGTEGLVDSFSQGLERSYAVSSSVLHGIEPRLKDFHQLLLNPPKKKAILNTIGVLEEPLGNARLHGARSWQHCCTQTHPGSNRSSAGQHDGLTAGTCAFKVQPGNNFLDFPVELMIGGISSQAAREEEDRKPRDREQVEPPWNGDRA

SEQ ID NO: 1018141 - protein, 427 aa, Homo sapiens; identical to SEQ ID NO: 1018135

SEQ ID NO: 1018142 - protein, 106 aa, Homo sapiens
MCVLSGSGVCQAKSLYSRKRVQCCTKGEKVPVVYLDLSSDTERPLFLFQWLNEEKVIQRLVELIHPSQDEDVSVLLTELRASVQACAARSPTAAGQGAREGKSSLS

SEQ ID NO: 1018143 - protein, 95 aa, Homo sapiens
MFWKFDLNTTSHVDKLLDKEHVTLQELMDEDDILQECKAQNQKLLDFLCRQQCMEELVSLITQDPPLDMEEKVRFNVCTTAGDVHTQQSQQPQQF

SEQ ID NO: 1018144 - protein, 536 aa, Homo sapiens
MESLVLKVKAASFGGLKSSSSGLFTSKPMDSARPVVCIDRRLQGLTLSCSCRVLGSLCRRVQVGKCHLHGKKNAASLVVRMGSRRPRELAQRDLSGIAVESSPDVGAVTMFWKFDLNTTSHVDKLLDKEHVTLQELMDEDDILQECKAQNQKLLDFLCRQQCMEELVSLITQDPPLDMEEKVRFKYPNTACELLTCDVPQISDRLGGDESLLSLLYDFLDHEPPLNPLLASFFSKTIGNLIARKTEQVITFLKKKDKFISLVLKHIGTSALMDLLLRLVSCVEPAGLRQDVLHWLNEEKVIQRLVELIHPSQDEDRQSNASQTLCDIVRLGRDQGSQLQEALEPDPLLTALESQDCVEQLLKNMFDGDRTESCLVSGTQVLLTLLETRRVGTEGLVDSFSQGLERSYAVSSSVLHGIEPRLKDFHQLLLNPPKKKAILNTIGVLEEPLGNARLHGARSWQHCCTQTHPGSNRSSAGQHDGLTAGLVPLRYSLGITFGTSKVELMIGGISSQAAREEEDRKPRDREQVEPPWNGDRA

SEQ ID NO: 1018145 - protein, 536 aa, Homo sapiens; identical to SEQ ID NO: 1018144

SEQ ID NO: 1018146 - protein, 110 aa, Homo sapiens
ASGPPPFWSDRSAARGPESVSSRRPAVPVSVGAAPSAGPMCVRPARGRPGFASTSALASARASTRASEELPRRPARRAGKEIINLPLNEKNFLKAAYTPRKKPQMFFCFA

SEQ ID NO: 1018147 - protein, 427 aa, Homo sapiens; identical to SEQ ID NO: 1018135

SEQ ID NO: 1018148 - protein, 427 aa, Homo sapiens; identical to SEQ ID NO: 1018135

SEQ ID NO: 1018149 - protein, 198 aa, Homo sapiens
RPPTSWRGRKMATPLGWSKAGSGSVCLALDQLRDVIESQEELIHQLRNVMVLQDENFVSKEEFQAVEKKLVEEKAAHAKTKVLLAKEEEKLQFALGEVEVLSKQLEKEKLAFEKALSSVKSKVLQESSKKDQLITKCNGRREARALHHGYINGLFPNHPVPVSKAGFHSNTCPQLRIQAGPGGPHLRKGLKGPGRPRK

SEQ ID NO: 1018150 - protein, 261 aa, Homo sapiens
RPPTSWRGRKMATPLGWSKAGSGSVCLALDQLRDVIESQEELIHQLRNVMVLQDENFVSKEEFQAVEKKLVEEKAAHAKTKVLLAKEEEKLQFALGEVEVLSKQLEKEKLAFEKALSSVKSKVLQESSKKDQLITKCNEIESHIIKQEDILNGKENEIKELQQVISQQKQIFSPPPAGSVAGITCLTSGSRSSRKATWPRCWTRSIRKPQGHVRPAATSIPGKNKMAAAFLFSGCNPQPLPSLLWESPASSPCYFPPSWIV

SEQ ID NO: 1018151 - protein, 154 aa, Homo sapiens
MEVSICILGKNVIAHIMHGMFGHLLLTPVIPAFWELRWVHHLRSEIENSLAHMVKPHLYCKISIISWAWCAGACNPSVSREAEAGELLELKEGGGFNDPDQAPHSSLATDQTQFPKPKKKKRKQEEGTGSTGKCNFLMRESFSKEATSVKTCRS

SEQ ID NO: 1018152 - protein, 215 aa, Homo sapiens
RPPTSWRGRKMATPLGWSKAGSGSVCLALDQLRDVIESQEELIHQLRNVMVLQDENFVSKEEFQAVEKKLVEEKAAHAKTKVLLAKEEEKLQFALGEVEVLSKQLEKEKLAFEKALSSVKSKVLQESSKKDQLITKCNEIESHIIKQEDILNGKENEIKELQQVISQQKQIFRNHMSDFRIQKQQESYMAQVLDQKHKKASGTRQARSHQHPREK

SEQ ID NO: 1018153 - protein, 198 aa, Homo sapiens; identical to SEQ ID NO: 1018149

SEQ ID NO: 1018154 - protein, 162 aa, Homo sapiens
RPPTSWRGRKMATPLGWSKAGSGSVCLALDQLRDVIESQEELIHQLRNVMVLQDENFVSKEEFQAVEKKLVEEKAAHAKTKVLLAKEEEKLQFALGEVEVLSKQLEKEKLAFEKALSSVKSKVLQESSKKDQLITKCNAFGQACPLLSKDLLLPSCGSSGPE

SEQ ID NO: 1018155 - protein, 173 aa, Homo sapiens
RPPTSWRGRKMATPLGWSKAGSGSVCLALDQLRDVIESQEELIHQLRNVMVLQDENFVSKEEFQAVEKKLVEEKAAHAKTKVLLAKEEEKLQFALGEVEVLSKQLEKEKLAFEKALSSVKSKVLQESSKKDQLITKCNEIESHIIKQEDILNGKENEIKELQQVISQQKQIFR

SEQ ID NO: 1018156 - protein, 93 aa, Homo sapiens
  misc_feature (93)..(93): Xaa can be any naturally occurring amino acid
MNKILQVVQAKLSSPNKQRIKTKWPGQVIGWEVSAMHGLVSRGNFCAPTSQATQPWEEAGPGKALGTLVSVRKENCPGSSCNQCHNKSRVRPX

SEQ ID NO: 1018157 - protein, 158 aa, Homo sapiens [sequence omitted]

SEQ ID NO: 1018158 - protein, 158 aa, Homo sapiens [sequence omitted]

SEQ ID NO: 1018159 - protein, 87 aa, Homo sapiens
ASPLDGEMVIITTNDAVSRYLMVMEDCLHPKLQSTKRFINVVQLPGTMKRRVYEEAQGLRRRIVVKNLEKGKLQTSWETCAKDFADY

SEQ ID NO: 1018160 - protein, 80 aa, Homo sapiens
ASPLDGEMVIITTNDAVSRYLMVMEDCLHPKLQSTKRFINVVQLPGTMKRRVYDRIVVKNLEKGKLQTSWETCAKDFADY

SEQ ID NO: 1018161 - protein, 93 aa, Homo sapiens
ARLNHAEFEDQDDEARVQYEGFQTWDMRLKKHRWYKKILKSRDPIIFSVGWRRFQTIPLCYIEDHNGRQRLLKPYHSTGNWFLGNTVCQWHNA

SEQ ID NO: 1018162 - protein, 116 aa, Homo sapiens
KNYSVSAGDPPVTVMSLVETVPNTPQISPAMAKKINDDIKYQLMKEVRRFGQNYERIFILLEEVQGSMKVKRQFVEFTIKEAARFKKVVLIQQLEKALKEIDSHCHLRKVKHMRKR

SEQ ID NO: 1018163 - protein, 66 aa, Homo sapiens
FPQAFKTAPLLRTHLVTLAGSRHGISRVRLRLLKSPPRSKHRYEGAGLLSKLKKPTQRRERRRIYD

SEQ ID NO: 1018164 - protein, 223 aa, Homo sapiens
  misc_feature (69)..(69): Xaa can be any naturally occurring amino acid
AARTDWDPRSQAALSLRHLPRVRTTYGFCALLESPHTRRKESLLLGGPPAHRPRAHSCGGGGGPDAPLXTLCGPRGPGPATPAAPGGPRLPQDALAAGPRRCRLLRVPDGLLSRALRAGRSRRLARVRSVSSGNEDEERRAGSESPARAPSSSPLSSRAPLPERLEAKGTVALGRAGDALRLAAEYCPGTRRLRLRLLRAESLVGGAPGPRAVRCRLSLVLRP

SEQ ID NO: 1018165 - protein, 105 aa, Homo sapiens
RRSHPMGCVRCVARVIKADERRAGSESPARAPSSSPLSSRAPLPERLEAKGTVALGRAGDALRLAAEYCPGTRRLRLRLLRAESLVGGAPGPRAVRCRLSLVLRP

SEQ ID NO: 1018166 - protein, 68 aa, Homo sapiens
RHEGDRRGPRGWPGPDLAGRAGDALRLAAEYCPGTRRLRLRLLRAESLVGGAPGPRAVRCRLSLVLRP

SEQ ID NO: 1018167 - protein, 150 aa, Homo sapiens
QTEQDDSVHHGALRHGPTCSALARKPDKLTILRMAVSHMKSMRGTGNKSTDGAYKPSFLTEQELKHLILEAADGFLFVVAAETGRVIYVSDSVTPVLNQPQSEWFGSTLYEQVHPDDVEKLREQLCTSENSMTGRILDLKTGTVKKEGQQ

SEQ ID NO: 1018168 - protein, 147 aa, Homo sapiens
QTEQDDSVHHGALRHGPTCSALARKPDKLTILRMAVSHMKSMRGTGNKSTDGAYKPSFLTEQELKHLILEAADGFLFVVAAETGRVIYVSDSVTPVLNQPQSEWFGSTLYEQVHPDDVEKLREQLCTSENSMTGMQTSHALFMATTS

SEQ ID NO: 1018169 - protein, 75 aa, Homo sapiens
KPWVDMFQNKGMVLLSTFESLMTPGSGRSQEEMSGLKLNPCGRGSSPHVGFPRRSGSELFFQSVMWYKGRRHLKG

SEQ ID NO: 1018170 - protein, 72 aa, Homo sapiens
  misc_feature (1)..(1): Xaa can be any naturally occurring amino acid
  misc_feature (5)..(5): Xaa can be any naturally occurring amino acid
  misc_feature (68)..(68): Xaa can be any naturally occurring amino acid
  misc_feature (72)..(72): Xaa can be any naturally occurring amino acid
XLLPXKTTLSAIYIQTKPHGIDWLCFQCFLGAGFLAIVPRHSCGRPQFVMLDGGGSLSFTLSGGPGWXTRGX

SEQ ID NO: 1018171 - protein, 259 aa, Homo sapiens
IFRVPACRVSVRFGRKCVGYFGAVTWAGGLREAPGQSQPRAVPPQEPPSTASPGHCDAPSKRLPDAGTSGLRRLPSLLPLQQLRPSSLNLTQYVEASLCRRPAGLLEAQWARPGRAGTEPPRLGQWAWAGAVAEDLARPLQTPGDSHTAAAMATNKERLFAAGALGPGSGYPGAGFPFAFPGALRGGLPPFEMLSPSFRGLGQPDLPKEHGLSDRWRHRATRLTRAWCPSSSSTPYDILGVYKGHDYRVAHATGPRGLP

SEQ ID NO: 1018172 - protein, 127 aa, Homo sapiens
  misc_feature (102)..(108): Xaa can be any naturally occurring amino acid
  misc_feature (116)..(116): Xaa can be any naturally occurring amino acid
  misc_feature (119)..(120): Xaa can be any naturally occurring amino acid
  misc_feature (123)..(123): Xaa can be any naturally occurring amino acid
GSGQLSIVSFSSAGAAMAAVKTLNPKAEVARAQAALAVNISAGGGLQDVLRTNLGPKGTMKMLVSGAGDIKLTKDGNVLLHEMQIQHPTASLIAKVATAQDXXXXXXXIFNFLIIXELXXYVXFYIF

SEQ ID NO: 1018173 - protein, 83 aa, Homo sapiens
WLRRYGWLTTFEEGYVLSLALDSSVSIWSERQNTRPWGQSPGLDLAGRNQLCGLRRFLYHVGSGLMVYKMVRVAVGEYLVQPC

SEQ ID NO: 1018174 - protein, 762 aa, Homo sapiens
MLLLLHCLGVFLSCSGHIQDEHPQYHSPPDVVIPVRITGTTRGMTPPGWLSYILPFGGQKHIIHIKVKKLLFSKHLPVFTYTDQGAILEDQPFVQNNCYYHGYVEGDPESLVSLSTCFGGFQGILQINDFAYEIKPLAFSTTFEHLVYKMDSEEKQFSTMRSGFMQNEITCRMEFEEIDNSTQKQSSYVGWWIHFRIVEIVVVIDNYLYIRYERNDSKLLEDLYVIVNIVDSILDVIGVKVLLFGLEIWTNKNLIVVDDVRKSVHLYCKWKSENITPRMQHDTSHLFTTLGLRGLSGIGAFRGMCTPHRSCAIVTFMNKTLGTFSIAVAHHLGHNLGMNHDEDTCRCSQPRCIMHEGNPPITKFSNCSYGDFWEYTVERTKCLLETVHTKDIFNVKRCGNGVVEEGEECDCGPLKHCAKDPCCLSNCTLTDGSTCAFGLCCKDCKFLPSGKVCRKEVNECDLPEWCNGTSHKCPDDFYVEDGIPCKERGYCYEKSCHDRNEQCRRIFGAGANTASETCYKELNTLGDRVGHCGIKNATYIKCNISDVQCGRIQCENVTEIPNMSDHTTVHWARFNDIMCWSTDYHLGMKGPDIGEVKDGTECGIDHICIHRHCVHITILNSNCSPAFCNKRGICNNKHHCHCNYLWDPPNCLIKGYGGSVDSGPPPKRKKKKKFCYLCILLLIVLFILLCCLYRLCKKSKPIKKQQDVQTPSAKEEEKIQRRPHELPPQSQPWVMPSQSQPPVDLRICEDGGEETVYTLPNQ

SEQ ID NO: 1018175 - protein, 818 aa, Homo sapiens
MLLLLHCLGVFLSCSGHIQDEHPQYHSPPDVVIPVRITGTTRGMTPPGWLSYILPFGGQKHIIHIKVKKLLFSKHLPVFTYTDQGAILEDQPFVQNNCYYHGYVEGDPESLVSLSTCFGGFQGILQINDFAYEIKPLAFSTTFEHLVYKMDSEEKQFSTMRSGFMQNEITCRMEFEEIDNSTQKQSSYVGWWIHFRIVEIVVVIDNYLYIRYERNDSKLLEDLYVIVNIVDSILDVIGVKVLLFGLEIWTNKNLIVVDDVRKSVHLYCKWKSENITPRMQHDTSHLFTTLGLRGLSGIGAFRGMCTPHRSCAIVTFMNKTLGTFSIAVAHHLGHNLGMNHDEDTCRCSQPRCIMHEGNPPITKFSNCSYGDFWEYTVERTKCLLETVHTKDIFNVKRCGNGVVEEGEECDCGPLKHCAKDPCCLSNCTLTDGSTCAFGLCCKDCKFLPSGKVCRKEVNECDLPEWCNGTSHKCPDDFYVEDGIPCKERGYCYEKSCHDRNEQCRRIFGAGANTASETCYKELNTLGDRVGHCGIKNATYIKCNISDVQCGRIQCENVTEIPNMSDHTTVHWARFNDIMCWSTDYHLGMKGPDIGEVKDGTECGIDHICIHRHCVHITILNSNCSPAFCNKRGICNNKHHCHCNYLWDPPNCLIKGYGGSVDSGPPPKRKKKKKFCYLCILLLIVLFILLCCLYRLCKKSKPIKKQQDVQTPSAKEEEKIQRRPHELPPQSQPWVMPSQSQPPVTPSQSHPQVMPSQSQPPVTPSQSHPQLTPSQSQPPVMPSQSHPQLTPSQSQPPVTPSQRQPQLMPSQSQPPVTPS

SEQ ID NO: 1018176 - protein, 820 aa, Homo sapiens
MKMLLLLHCLGVFLSCSGHIQDEHPQYHSPPDVVIPVRITGTTRGMTPPGWLSYILPFGGQKHIIHIKVKKLLFSKHLPVFTYTDQGAILEDQPFVQNNCYYHGYVEGDPESLVSLSTCFGGFQGILQINDFAYEIKPLAFSTTFEHLVYKMDSEEKQFSTMRSGFMQNEITCRMEFEEIDNSTQKQSSYVGWWIYFRIVEIVVVIDNYLYIRYERNDSKLLEDLYVIVNIVDSILDVIGVKVLLFGLEIWTNKNLIVVDDVRKSVHLYCKWKSENITPRMQHDTSHLFTTLGLRGLSGIGAFRGMCTPHRSCAIVTFMNKTLGTFSIAVAHHLGHNLGMNHDEDTCRCSQPRCIMHEGNPPITKFSNCSYGDFWEYTVERTKCLLETVHTKDIFNVKRCGNGVVEEGEECDCGPLKHCAKDPCCLSNCTLTDGSTCAFGLCCKDCKFLPSGKVCRKEVNECDLPEWCNGTSHKCPDDFYVEDGIPCKERGYCYEKSCHDRNEQCRRIFGAGANTASETCYKELNTLGDRVGHCGIKNATYIKCNISDVQCGRIQCENVTEIPNMSDHTTVHWARFNDIMCWSTDYHLGMKGPDIGEVKDGTECGIDHICIHRHCVHITILNSNCSPAFCNKRGICNNKHHCHCNYLWDPPNCLIKGYGGSVDSGPPPKRKKKKKFCYLCILLLIVLFILLCCLYRLCKKSKPIKKQQDVQTPSAKEEEKIQRRPHELPPQSQPWVMPSQSQPHVTPYQSHPQVMPSQSQPPVTPSQSQPRVMPSQSQPPVMPSQSHPQLTPSQSQPPVTPSQRQPQLMPSQSQPPVTPS

SEQ ID NO: 1018177 - protein, 312 aa, Homo sapiens
LTTEFGQSININRLLGENDGETMSFEFYSVVLLLLCVKGLPECFANVQFEYEDPIVRGGKQLLHSPFFKVLVALACDLELDTLPCCAETHKWALVLEVTCMASRVAVALDKMNTVAPVCFLTECWLTKIPELIGMTADNMDVLHESHDIFTNESKTNNLLQWMNRRPDDWTLSAGGSGTIYGWGHNHRGQLGGIEGAKVKVPTPCEALATLRPVQLIGGEQTLFAVTADGKLYATGYGAGGRLGIGGTESVSTPTLLESIQHVFIKKVAVNSGGKHCLALSSEGEVYSWGEAEDGKLGHGNRSPCDRPRVIE

SEQ ID NO: 1018178 - protein, 280 aa, Homo sapiens
LTTEFGQSININRLLGENDGETMSFEFYSVVLLLLCVKGLPECFANVQFEYEDPIVRGGKQLLHSPFFKVLVALACDLELDTLPCCAETHKWALVLEVTCMASRVAVALDKMNTVAPVCFLMRWLRKFCDLIGMTADNMDVLHESHDIFKREQDEQLVARWMNRRPDDWTLSAGGSGTIYGWGHNHRGQLGGIEGAKVKVPTPCEALATLRPVQLIGGEQTLFAVTADGKVRALFLCHKVIEPEAVVAKGAVWFLARARICTKTFLRINDTVVCRKQLEF

SEQ ID NO: 1018179 - protein, 358 aa, Homo sapiens
MPSVSPAGPSAGAVPNATAVTTVRTNASGLEVPLFHLFARLDEELHGTFPGLCVALMAVHGAIFLAGLVLNGLALYVFCCRTRAKTPSVIYTINLVVTDLLVGLSLPTRFAVYYGARGCLRCAFPHVLGYFLNMHCSILFLTCICVDRYLAIVRPEAPAACRQPACARAVCAFVWLAAGAVTLSVLGVTGSRPCCRVFALTVLEFLLPLLVISVFTGRIMCALSRPGLLHQGRQRRVRAMQLLLTVLIIFLVCFTPFHARQVAVALWPDMPHHTSLVVYHVAVTLSSLNSCMDPIVYCFVTSGFQATVRGLFGQHGEREPSSGDVVSMHRSSKGSGRHHILSAGPHALTQALANGPEA

SEQ ID NO: 1018180 - protein, 140 aa, Homo sapiens
MQPWPQPRGPHRPPCGAGAHQCQLLLCPRHRGNWCLAGQGEWRFLGVCWGSSGGPALFQDSCCLRPLSETCPRQVDNRLVENFGVQEDLMDLHPVYVESQLMDADLEVSLVPPLEDQSLVAIPMEASSEEPPPPPPLPPE

SEQ ID NO: 1018181 - protein, 117 aa, Homo sapiens
LVLQEGLYPLGGLSPGEEWRFLGVCWGSSGGPALFQDSCCLRPLSETCPRQVDNRLVENFGVQEDLMDLHPVYVESQLMDADLEVSLVPPLEDQSLVAIPMEASSEEPPPPPPLPPE

SEQ ID NO: 1018182 - protein, 114 aa, Homo sapiens
CECSLGLSREALIALLVVLAGISASCFCALVIVAIGVLRAKGETCPRQVDNRLVENFGVQEDLMDLHPVYVESQLMDADLEVSLVPPLEDQSLVAIPMEASSEEPPPPPPLPPE

SEQ ID NO: 1018183 - protein, 194 aa, Homo sapiens
NAELKYTIVSGNNKGYFRMIQYQVTLLWKKNQHLLMWDASLVVNISDLGYPKSCTAVLVFLYVNDTAGNASYIYDLIRRTMETPLDRNIGDSSQPYQNEDYLTIMIAIIAGAMVVMCCDLRHRSGALSPCIKVQSSSEEQARCRMDVPKPGEQAKQEKTTKNEKEVSQKLSLNLLLSKSPNPDDAVHEPIKCDK

SEQ ID NO: 1018184 - protein, 69 aa, Homo sapiens
DPSWGQTWLLGVHAHCPLGQCHQDLSVAMRAQRGEAICLRSPSSGDEILMQDSQATLHLARSLGQLPLG

SEQ ID NO: 1018185 - protein, 69 aa, Homo sapiens; identical to SEQ ID NO: 1018184

SEQ ID NO: 1018186 - protein, 113 aa, Homo sapiens
MLKTASGPSALINNPGHGLTDSFHPEIEIMEEPFKFRPAQAPRNPNVTDLTAANVTNTAVIKSRELNPPPKELAPGKNGIELNSWNPQKFRGEHISKNALSLSKRQFKVSKDF

SEQ ID NO: 1018187 - protein, 120 aa, Homo sapiens
  misc_feature (108)..(108): Xaa can be any naturally occurring amino acid
PRLARQPVGTSNDQVPIAEGPAPPAGASLPVTGSCEALVIGQGSIFLSGDSVACLGAKASRWPLETPSSTAPPPRQQIQTFELKGFLFKGRGSLCSPVGVAQGWGPIXLNNGLVPVGKHT

SEQ ID NO: 1018188 - protein, 347 aa, Homo sapiens
NLASRGRCNRRGQSTVNVYVKSLRDFSTESMSLVPATNYIYTPLNQLKGGTIVNVYGVVKFFKPPYLSKGTDYCSVVTIVDQTNVKLTCLLFSGNYEALPIIYKNGDIVRFHRLKIQVYKKETQGITSSGFASLTFEGTLGAPIIPRTSSKYFNFTTEDHKMVEALRVWASTHMSPSWTLLKLCDVQPMQYFDLTCQLLGKAEVDGASFLLKVWDGTRTPFPSWRVLIQDLVLEGDLSHIHRLQNLTIDILVYDNHVHVARSLKVGSFLRIYSLHTKLQSMNSENQTMLSLEFHLHGGTSYGRGIRVLPESNSDVDQLKKDLESANLTANQHSDVICQSEPDDSFSK

SEQ ID NO: 1018189 - protein, 266 aa, Homo sapiens
NLASRGRCNRRGQSTVNVYVKSLRDFSTESMSLVPATNYIYTPLNQLKGGTIVNVYGVVKFFKPPYLSKGTDYCSVVTIVDQTNVKLTCLLFSGNYEALPIIYKNGDIVRFHRLKIQVYKKETQGITSSGFASLTFEGTLGAPIIPRTSSKYFNFTTEDHKMVEALRVWASTHMSPSWTLLKLCDVQPMQYFDLTCQLLGKAEVDGASFLLKVWDGTRTPFPSWRVLIQDLVLEGDLSHIHRLQNLTIDILVYDNHVHVARSLKVM

SEQ ID NO: 1018190 - protein, 172 aa, Homo sapiens
MEVQKNNPKEKLTFLLCIWPILEQLMDFPGVKQSKYMPRASVCNVLLTCCKDNVCRLWVETFLPNDCLLYGGDCSHWTESINLTNNFKRNASSKERVQNALEVNLRHFRRGRRRSLALVAHTGYLPHQQDPHHVHRNTPLHANALCHFHIAASINPANRHSTSSIYYISESK

SEQ ID NO: 1018191 - protein, 408 aa, Homo sapiens
MEVQKNNPKEKLTFLLCIWPILEQLMDFPGVKQSKYMPRASVCNVLLTCCKDNVCRLWVETFLPNDCLLYGGDCSHWTESINLTNNFKRNASSKERVQNALEVNLRHFRRGRRRSLALVAHTGYLPHQQDPHHVHRNTPLHANALCHFHIAASINPATDIPLLPSITSLSLNENEEKTGPFVVHWLNNKELHFTLSMEVFLQQLRKSFEQPSSEASVEDSNQADVKSDEETDDGVDDLKINPEKKELGCDKMVPNSSFTSLSSAAIDHQIEVLLSEWSKNADMLFSIHPMDGSLLVWHVDWLDEYQPGMFRQVQVSFVSRIPVAFPTGDANSLCKSIMMYACTKNVDLAIQQGKQKPSGLTRSTSMLISSGHNKSSNSLKLSIFTPNVMMISKHADGSLNQWLVSFAE

SEQ ID NO: 1018192 - protein, 123 aa, Homo sapiens
  misc_feature (1)..(1): Xaa can be any naturally occurring amino acid
  misc_feature (81)..(81): Xaa can be any naturally occurring amino acid
  misc_feature (83)..(84): Xaa can be any naturally occurring amino acid
  misc_feature (112)..(112): Xaa can be any naturally occurring amino acid
XNTPPPLTGMLMRTNGEQEADSEIQYEEEEEGGEEEEEEEEGDGEEEDGDEDEEAESATGKRAAEDDEDDDVDTKKQGRLXHXXPLPPTSFFSFKSLVVISELVSSCRIRQXKRAPTLEVTPH

SEQ ID NO: 1018193 - protein, 180 aa, Homo sapiens
  misc_feature (1)..(1): Xaa can be any naturally occurring amino acid
  misc_feature (113)..(113): Xaa can be any naturally occurring amino acid
  misc_feature (116)..(116): Xaa can be any naturally occurring amino acid
  misc_feature (150)..(150): Xaa can be any naturally occurring amino acid
XNTPPPLTGMLMRTNGEQEADSEIQYEEEEEGGEEEEEEEEGDGEEEDGDEDEEAESATGKRAAEDDEDDDVDTKKQKTDEDDYDFQKKKKKKKKKSGRSNSRPLDVDAQNFXGVXGLREDDRRGDVQIGDIVTVGEPASEQDMRFNVLXVTKAAGTKKQFPEVLRLDIGPLPTMCFFLL

SEQ ID NO: 1018194 - protein, 69 aa, Homo sapiens
LDQKSCWDEELQTCVVDFLAFCLFYSQGWGITTKEVVFWPGVVAHACNPSTLGGRGGWITRSGDQDHPG

SEQ ID NO: 1018195 - protein, 42 aa, Homo sapiens
MTTERIRRGKTNKVLHIQGEGTHSRALNIGRHFPHGTSSSAP

SEQ ID NO: 1018196 - protein, 100 aa, Homo sapiens
  misc_feature (16)..(16): Xaa can be any naturally occurring amino acid
PPVIFASLVQNVTKMXEDVRCVCNIDCSQTNFNPLCASDGKSYDNACQIKEASCQKQEKIEVMSLGRCQDNTTTTTKSEDGHYARTDYAEKRKQEESVCY

SEQ ID NO: 1018197 - protein, 146 aa, Homo sapiens
  misc_feature (16)..(16): Xaa can be any naturally occurring amino acid
PPVIFASLVQNVTKMXEDVRCVCNIDCSQTNFNPLCASDGKSYDNACQIKEASCQKQEKIEVMSLGRCQDNVHTKIHFKEDFSLCAKMKSEENSLLGSYSISKMQCLFTMDSRVYCSICVDYRILRGSQQPSRSVSIQWDCIVTMP

SEQ ID NO: 1018198 - protein, 215 aa, Homo sapiens
  misc_feature (16)..(16): Xaa can be any naturally occurring amino acid
PPVIFASLVQNVTKMXEDVRCVCNIDCSQTNFNPLCASDGKSYDNACQIKEASCQKQEKIEVMSLGRCQDNTTTTTKSEDGHYARTDYAENANKLEESAREHHIPCPEHYNGFCMHGKCEHSINMQEPSCRCDAGYTGQHCEKKDYSVLYVVPGPVRFQYVLIAAVIGTIQIAVICVVVLCITRKCPRSNRIHRQKQNTGHYSSDNTTRASTRLI

SEQ ID NO: 1018199 - protein, 160 aa, Homo sapiens
MVLVKLDLRKKAASIADSIILCWKLPGPVSAKKRLGTHPGNQPPNPPPPRRETLPLKFTSPDTNLPKLNRLQPLCPDPTLTAFPFTPIWAFWPKVLRLWGKRRAVMALRWVSYSPEDNRSLLCFTIYQELYPGCNTQALAFFPLLDYNPLSNSKVVVFFN

SEQ ID NO: 1018200 - protein, 400 aa, Homo sapiens
  misc_feature (6)..(6): Xaa can be any naturally occurring amino acid
  misc_feature (31)..(31): Xaa can be any naturally occurring amino acid
  misc_feature (35)..(35): Xaa can be any naturally occurring amino acid
  misc_feature (37)..(37): Xaa can be any naturally occurring amino acid
  misc_feature (40)..(40): Xaa can be any naturally occurring amino acid
  misc_feature (46)..(47): Xaa can be any naturally occurring amino acid
  misc_feature (50)..(50): Xaa can be any naturally occurring amino acid
  misc_feature (66)..(66): Xaa can be any naturally occurring amino acid
  misc_feature (71)..(71): Xaa can be any naturally occurring amino acid
  misc_feature (83)..(83): Xaa can be any naturally occurring amino acid
  misc_feature (88)..(88): Xaa can be any naturally occurring amino acid
  misc_feature (106)..(106): Xaa can be any naturally occurring amino acid
  misc_feature (112)..(112): Xaa can be any naturally occurring amino acid
  misc_feature (129)..(129): Xaa can be any naturally occurring amino acid
  misc_feature (148)..(148): Xaa can be any naturally occurring amino acid
  misc_feature (162)..(162): Xaa can be any naturally occurring amino acid
  misc_feature (165)..(165): Xaa can be any naturally occurring amino acid
  misc_feature (168)..(168): Xaa can be any naturally occurring amino acid
  misc_feature (171)..(172): Xaa can be any naturally occurring amino acid
IYFFWXGTLYLETIYFCHDHFGWYLGWGHCXWLPXLXTLXGLYLCXXPCXCPPRPPWRPAAGPGGXHIFRXKTTKKDLFRRTXGGCLXWGRKPKVIECSYTSADGXRHHSKXLVSGFWGVARHFNYVGXLMGNLAYYLACGGGHLLPXFYIIYMAILLTHRXLRXEHXAAXXNGRNWERYTAAVLLPPAAWNLLRARPREKPCGAVKSVFCQVHGGWHPSSNSRSLSFLICKLERAQQLAGVQYLITLCSLFVPSREFRVSSTAVLPVQTEFSLITCPWGRRMTQSPLLVLWRQFTCIGAQATLDSAHTGEQEVFPRPVIRLHLLSAKIIKWEWGVRVSMYCLSGLDPPPLAALQSWVGPVRVSPWVACTVLSWDTGEKGASMSFPSCSCAQLQECSAGV

SEQ ID NO: 1018201 - protein, 507 aa, Homo sapiens
SGLGARRRSALCFAVLNLSSGRVFARSDLPDPAKHLLFWSLKYVIMAKFRRRTCIILALFILFIFSLMMGLKMLRPNTATFGAPFGLDLLPELHQRTIHLGKNFDFQKSDRINSETNTKNLKSVEITMKPSKASELNLDELPPLNNYLHVFYYSWYGNPQFDGKYIHWNHPVLEHWDPRIAKNYPQGRHNPPDDIGSSFYPELGSYSSRDPSVIETHMRQMRSASIGVLALSWYPPDVNDENGEPTDNLVPTILDKAHKYNLKVTFHIEPYSNRDDQNMYKNVKYIIDKYGNHPAFYRYKTKTGNALPMFYVYDSYITKPEKWANLLTTSGSRSIRNSPYDGLFIALLVEEKHKYDILQSGFDGIYTYFATNGFTYGSSHQNWASLKLICDKYNLIFIPSVGPGYIDTSIRPWNTQNTRNRINGKYYEIGLSAALQTRPSLISITSFNEWHEGTQIEKAVPKRTSNTVYLDYRPHKPGLYLELTRKWSEKYSKERATYALDRQLPVS

SEQ ID NO: 1018202 - protein, 254 aa, Homo sapiens
SGLGARRRSALCFAVLNLSSGRVFARSDLPDPAKHLLFWSLKYVIMAKFRRRTCIILALFILFIFSLMMGLKMLRPNTATFGAPFGLDLLPELHQRTIHLGKNFDFQKSDRINSETNTKNLKSVEITMKPSKASELNLDELPPLNNYLHVFYYSWYGNPQFDGKYIHWNHPVLEHWDPRIAKNYPQGRHNPPDDIGSSFYPELGSYSSRDPSVIETHMRQMRSASIGNYCIYIYMCVFVSVYMHINDFLCNFTS

SEQ ID NO: 1018203 - protein, 138 aa, Homo sapiens
MASPGCLLCVLGLLLCGAASLELSRAHERHPQEAHTSGILMQNCRSKVMTNYGRYYIAASYVKYCGVCRCESCTRKAGSSEKDYEILYTSINGILYPGGSVDLRRSDYAKVAILYNLSIQRSDDGDYSPVWGTCLGYE

SEQ ID NO: 1018204 - protein, 120 aa, Homo sapiens
MVLSEHKCLKLLPRHRVTGPGRPRYYSAFLLPQRDSRGGQFNNLALWHSGSRSHGFFGAYTLYGLLVPLVPTLLYDSGGHPHPGPVAFGLPPPGVKGGAGAHMAHFLLAPNPWQQGKGFA

SEQ ID NO: 1018205 - protein, 150 aa, Homo sapiens
MWSSWGGGHRPRGVRGVPRKVVELGVLPGLLPPWVRMPEKQWVITMAASILDTYQAPGTILEPSPSPQLSGAAQRGAVAYQGCRVPQGRGAQRSGKDVAGGQGCACRKTPLTTGAAFTATFRQAGTNSQRAIIPRAASWHPRGHMPRAEE

SEQ ID NO: 1018206 - protein, 345 aa, Homo sapiens
  misc_feature (243)..(243): Xaa can be any naturally occurring amino acid
  misc_feature (261)..(261): Xaa can be any naturally occurring amino acid
  misc_feature (345)..(345): Xaa can be any naturally occurring amino acid
ITAINLNARKMLGLSSPGRQCWVNPLLKWSARRFFTEQIDEKRQDVVANFNGLSVIATRDAIRSGDDLLGAIISFRSKDEISTLNAQLTQIKQYVESLRTLRHEHLNWMSTLNGLLQMKEYDRVLAMVQGESQAQQQLIDSLREAFADRQVAGLLFGKVQRARELGLKMIIVPGSQLSQLPPGLDSTEFAAIVGNLLDNAFEASLRSDEGNKIVELFLSDEGDDVVIEVADQGCGVPESLRDXIFEQGVSTRADEPGEHGXAWVVLDCQLRNALRWCITLEDMILGTLISIYFQSETYDSSINPFDCEDQTPLAEMHAERKARMIYERFKAVVNLVDNHFLAVKX

SEQ ID NO: 1018207 - protein, 263 aa, Homo sapiens
ITAINLNARKMLGLSSPGRQCWVNPLLKWSARRFFTEQIDEKRQDVVANFNGLSVIATRDAIRSGDDLLGAIISFRSKDEISTLNAQLTQIKQYVESLRTLRHEHLNWMSTLNGLLQMKEYDRVLAMVQGESQAQQQLIDSLREAFADRQVAGLLFGKVQRARELGLKMIIVPGSQLSQLPPGLDSTEFAAIVGNLLDNAFEASLRSDEGNKIVELFLSDEGDDVVIEVADQGCGVPESLRDIGLYLIASYVTRCGGVLLSKI

SEQ ID NO: 1018208 - protein, 136 aa, Homo sapiens
DFLYCNFLLDGFTKEILREKSAGRMNPAMPAQSGLKAKERRVQEGPGRSLGGSASSKGCAVCSGLSWREQFACLGFLIEMKFKYPKNQSLESDQSAAFSTSRKLCRPHLCHRSGTFCHPPVKQSFPLPYSSSTGNC

SEQ ID NO: 1018209 - protein, 136 aa, Homo sapiens; identical to SEQ ID NO: 1018208

SEQ ID NO: 1018210 - protein, 274 aa, Homo sapiens
ESKAKLSSDVLTLLIKQYCRESGVRNLQKQVEKVLRKSAYKIVSGEAESVEVTPENLQDFVGKPVFTVERMYDVTPPGVVMGLAWTAMGGSTLFVETSLRRPQDKDAKGDKDGSLEVTGQLGEVMKESARIAYTFARAFLMQHAPANDYLVTSHIHLHVPEGATPKDGPSAGCTIVTALLSLAMGRPVRQNLAMTGEVSLTGKILPVGGIKEKTIAAKRAGVTCIVLPAENKKDFYDLAAFITEGLEVHFVEHYREIFDIAFPDEQAEALAVER

SEQ ID NO: 1018211 - protein, 290 aa, Homo sapiens
ESKAKLSSDVLTLLIKQYCRESGVRNLQKQVEKVLRKSAYKIVSGEAESVEVTPENLQDFVGKPVFTVERMYDVTPPGVVMGLAWTAMGGSTLFVETSLRRPQDKDAKGDKDGSLEVTGQLGEVMKESALLLGRYEPSAPKEALFPSNWPMPNRGPPPPWAQNDYLVTSHIHLHVPEGATPKDGPSAGCTIVTALLSLAMGRPVRQNLAMTGEVSLTGKILPVGGIKEKTIAAKRAGVTCIVLPAENKKDFYDLAAFITEGLEVHFVEHYREIFDIAFPDEQAEALAVER

SEQ ID NO: 1018212 - protein, 93 aa, Homo sapiens
ESKAKLSSDVLTLLIKQYCRESGVRNLQKQVEKVLRKSAYKIVSGEAESVEVTPENLQDFVGKPVFTVDVEHYREIFDIAFPDEQAEALAVER

SEQ ID NO: 1018213 - protein, 221 aa, Homo sapiens
EAEAVAAIFSSLLECYRHHVPRMVSAGRGLGAVWSPTHVQVTVLQARGLRAKGPGGTSDAYAVIQVGKEKQMARYACGAPVLAAKEAHLRAAIAGVLRTPWPPATLRVTVLHRAAVSAFEQVPWNRAEGGPWRESWHRRTPGPAKGKNGRATQVGKSHTRDKQGAHSEADAPTLGGLDNSSLTDDNKLDCPGIVGTFQCTANSSRHIPLETADGSKNQGGS

SEQ ID NO: 1018214 - protein, 103 aa, Homo sapiens
EAEAVAAIFSSLLECYRHHVPRMVSAGRGLGAVWSPTHVQVTVLQARGLRAKGPGGTSDAYAVIQVGKEKYATSVSERSLGAPVWREEATYELPSLLVRTRGR

SEQ ID NO: 1018215 - protein, 63 aa, Homo sapiens
  misc_feature (4)..(4): Xaa can be any naturally occurring amino acid
FAGXSTSRSSTKLRSDLIATDNRSQSAQSLDRVGKKLREPLHILQATLGDTQADVDAAGNLVG

SEQ ID NO: 1018216 - protein, 96 aa, Homo sapiens
AAASTLRPVPQDPQAWLATQGNVDKLVKLSGAKASDIPLLLQGNVYPLAADQVTVLGKPTAQAITDTAAFLKEQGKVDAVLPDYVDAAANLGVVVE

SEQ ID NO: 1018217 - protein, 151 aa, Homo sapiens
TRLTAASILNADYTKSSFWETMVTDCLNQYEEKYLLLRVEQMSSLLILFFARSDRAYNIKEVGGSTKKTGFGGITGNKGALAITFDYGATSFCFVNTHLSAGASNIDERRNDYNNIYRNITFPRSKTIPHHDSLFWLGDLNYRITLTNDEV

SEQ ID NO: 1018218 - protein, 124 aa, Homo sapiens
FLWAMTPPPPPPPLPGPWALADPFREPLAPGLGSLVVLFGATAGALGRDLGSDETDLIAPRFGKWLSRGAARWGRCTNRVVRAEAASPEYSSASEAMRTERRERMEAGKRQVDKDAARQYHHSW

SEQ ID NO: 1018219 - protein, 173 aa, Homo sapiens
IRGRVDLEDRRLGAIIPILGAAFGLGDPDRLAVIANRMVDVRRQQLISRHLLFAPGNRAVHDETLVQAHQVADKRLLQQVVTDGDTWRGQAGVVHGVVDEGRVHHDVAVVGQEQVGAAVLELLDAGISHPVGRALDGVVDVKLDFCPVAGHGGDPGELTAQFMGDHWLEPPTR

SEQ ID NO: 1018220 - protein, 121 aa, Homo sapiens
PAPSEACASGSWARRHQAGTALLRGTRVCADADSPVVCSSHVAEMEPLHGGSFPSPWMAQQPLLSVTTCDLLPYSSAAHPRLQGHLTLSQGIPDPGSRPRLVHSGSIVHAQTISGLAGLLD

SEQ ID NO: 1018221 - protein, 161 aa, Homo sapiens
  misc_feature (2)..(2): Xaa can be any naturally occurring amino acid
  misc_feature (17)..(17): Xaa can be any naturally occurring amino acid
  misc_feature (19)..(19): Xaa can be any naturally occurring amino acid
  misc_feature (29)..(29): Xaa can be any naturally occurring amino acid
  misc_feature (32)..(32): Xaa can be any naturally occurring amino acid
MXYKDDDDVVVSFAKWXSXFWATAGERRXREXSGNATDCKPPVTGKPPCPAHFLCFPEFHHLTAILEGILMRTRNSDADRLTVFLEGILMRTKNFDAVATYGITENTQRMGHSRSHWNQKEDPIPKLRNFQSPLNGNCALEPSVLPLWDLKAERREMKENA

SEQ ID NO: 1018222 - protein, 49 aa, Homo sapiens
RSRYFLDFLTRPVLREAFGCCGPASTRAPWSCSARLPLQEKLTAHCPAA

SEQ ID NO: 1018223 - protein, 101 aa, Homo sapiens
FFEMECRSVTQAAVQWCYLGSLQPPPLGFKQFSCFSLTSTWDYKPEPPRVANFFVFLVETGFHHVGQAGLELLASGDPPAWASQSARITGMSHCARLYIFC

SEQ ID NO: 1018224 - protein, 118 aa, Homo sapiens
SRPRRRTPKRKAKKRRHRIRPRTPDCTGLCSYRFRAYQNPRSTPNCRSRACREKALKTAKSFASKLCSHRFRSVFEVISGLADRPPHIPHRHHRHLDFRVMVAAPQNHPGRRGREFSS

SEQ ID NO: 1018225 - protein, 323 aa, Homo sapiens
  misc_feature (25)..(25): Xaa can be any naturally occurring amino acid
  misc_feature (47)..(47): Xaa can be any naturally occurring amino acid
  misc_feature (51)..(51): Xaa can be any naturally occurring amino acid
  misc_feature (55)..(55): Xaa can be any naturally occurring amino acid
QAGELPREVRTAQARSSTLLQQGPXPGPQDTVERPFYDLWASDNPLXGRLXAQDXFFLEQTKKKGVKRPARLHTKPSQAPAVEVAPAGASYNPSFEDHQTLLSAAHEVELQRQKEAEKLERQLALPATEQAATQESTFQELCEGLLEESDGEGEPGQGRGAGGLGMPRSVPRPPAWPPQRRRRSSSGGGRRLCTGCGYSRPRCGPPGSGTRRLFRLRGIKAQVALRLAELARRQRRRQARREAEADKPRRLGRLKYQAPDIDVQLSSELTDSLRTLKPEGNILRDRFKSFQRRNMIEPRERAKFKRKYKVKLVEKRAFREIQL

SEQ ID NO: 1018226 - protein, 338 aa, Homo sapiens
  misc_feature (25)..(25): Xaa can be any naturally occurring amino acid
  misc_feature (47)..(47): Xaa can be any naturally occurring amino acid
  misc_feature (51)..(51): Xaa can be any naturally occurring amino acid
  misc_feature (55)..(55): Xaa can be any naturally occurring amino acid
  misc_feature (181)..(182): Xaa can be any naturally occurring amino acid
  misc_feature (205)..(205): Xaa can be any naturally occurring amino acid
  misc_feature (207)..(207): Xaa can be any naturally occurring amino acid
  misc_feature (209)..(209): Xaa can be any naturally occurring amino acid
  misc_feature (226)..(226): Xaa can be any naturally occurring amino acid
  misc_feature (230)..(230): Xaa can be any naturally occurring amino acid
  misc_feature (233)..(233): Xaa can be any naturally occurring amino acid
  misc_feature (239)..(241): Xaa can be any naturally occurring amino acid
  misc_feature (248)..(248): Xaa can be any naturally occurring amino acid
  misc_feature (253)..(253): Xaa can be any naturally occurring amino acid
  misc_feature (257)..(257): Xaa can be any naturally occurring amino acid
  misc_feature (259)..(259): Xaa can be any naturally occurring amino acid
QAGELPREVRTAQARSSTLLQQGPXPGPQDTVERPFYDLWASDNPLXGRLXAQDXFFLEQTKKKGVKRPARLHTKPSQAPAVEVAPAGASYNPSFEDHQTLLSAAHEVELQRQKEAEKLERQLALPATEQAATQESTFQELCEGLLEESDGEGEPGQGRGGPPLAPPRPPPPPPPPPAPPXXPPAPPPPPPPPPPPPPPLPLPPXPXSXPPGSPPPRPASSPPPPXLPPXPRXPPPPPXXXPPPPPPXPPPPXPPRXLXLPQPRRLGRLKYQAPDIDVQLSSELTDSLRTLKPEGNILRDRFKSFQRRNMIEPRERAKFKRKYKVKLVEKRAFREIQL

SEQ ID NO: 1018227 - protein, 112 aa, Homo sapiens
MESCTVTQAGVQWPISAHCTLCLRGSDNSPASASRDAGTTGMRHHARLIFVFLVEMGFAMLARLVSEILTSGDPPASASQSAGITGMSQPLYLAPFACPFQHHMPVRSDLAS

SEQ ID NO: 1018228 - protein, 82 aa, Homo sapiens
ASDETKAAEEPSKVEEKKAEEAGASAAACEAPSAAGPCAPPEQEAAPAEEPAAAAASSACAAPSQEAQPECSPEAPPAEAAE

SEQ ID NO: 1018229 - protein, 82 aa, Homo sapiens; identical to SEQ ID NO: 1018228

SEQ ID NO: 1018230 - protein, 278 aa, Homo sapiens
DHCGSTMPSDPVLDYQLGEMWSHLNRLLFWSIFSSVTCRKAVLDCEAMKTNEFPSPCLDSKTKVVMKGQNVSMFCSHKNKSLQITYSLFRRKTHLGTQDGKGEPAIFNLSITEAHESGPYKCKAQVTSCSKYSRDFSFTIVDPVTSPVLNIMVIQTETDRHITLHCLSVNGSLPINYTFFENHVAISPAISKYDREPAEFNLTKKNPGEEEEYRCEAKNRLPNYATYSHPVTMPSTGGDSCPFCLKLLLPGLLLLLVVIILILAFWVLPKYKTEKFEK

SEQ ID NO: 1018231 - protein, 117 aa, Homo sapiens
GTRDIQTRILHQDLRHRHLVSEASREMLFVLGESPLPSLPPSPARTETVPAARHTSCQLLVKRTCLKTTLLPLVNHFRLWGPPGHEQHHPEAFKVFWIHHRTLQPQPARIPPGMKVL

SEQ ID NO: 1018232 - protein, 233 aa, Homo sapiens
GEAPGLPPGARRALGSRPPAGPAAFREEAVPAASRARSRAPSPAGARPLTRQGVRRVGCGTGGTWRQRGEPAVRAAAQPLGAPQTPRGAPAPWRPGSGSRSMDFPKTSPGVHDACHVWVARLETRDCGEAGSFPPGTFSLMIVWISRRSEACACLSRREWGTRCVCPSPRFAKSTARIVDFGASVGEVFKAGGRCSWKLGEEACSPAIFSSRGFKARHLRGGWGEESLIDLFY

SEQ ID NO: 1018233 - protein, 141 aa, Homo sapiens
GRGAGAAARCSARSREPPARWSRSLPGGSGAGSVQGALSGTLTCRRPAAYPAGRAQGRVRDRGDLEAEGRTGLSAPQHSRWERLRPRAGRRLHGDRARGAGLWTFRRRARESMMHVTSGSRGWRPGTAEKPDRFPLELSLS

SEQ ID NO: 1018234 - protein, 108 aa, Homo sapiens
DSRSHIAHTLTTHTPVFLSLQRTFREITLLQVSGLGPPVQSPCPGTDLSRQERNWPSWAPEHSPSWPSSRLRLSPQEFGDHPNIISLLDVIRAENDRDIYLVFEFMGE

SEQ ID NO: 1018235 - protein, 191 aa, Homo sapiens
DSTVRPAGVLAAMCTVVDPRIVRRYLLRRQLGQGAYGIVWKAVDRRTGEVVAIKKIFDAFRDKTDAQRTFREITAPQEFGDHPNIISLLDVIRAENDRDIYLVFEFMGAPPAPTPTACAPSLRPDLNAVIRNGGLLQDVHVRSIFYQLLRATRFLHSGHVVHRDQKPSNVLLDATAMKLCDFGLAVPGRPP

SEQ ID NO: 1018236 - protein, 131 aa, Homo sapiens
IRGRVDLGSNTDVYLARVNWFPDSSTLAVQRESRDQKTLVLLRADATSGSARELLSEHSDKWIDLNDNLAFVTRAHQLIWASSRSGFQHLYLYDWDGNLIRPLTQGDWMVTGDNDSHGIRGVDAGANLVIV

SEQ ID NO: 1018237 - protein, 82 aa, Homo sapiens
  misc_feature (11)..(11): Xaa can be any naturally occurring amino acid
SYACQSSALSXITDPPLLTWLPGAIKWPQGKCSQTLNEETGAQGKGGGFRLENACFKVPLGVMVVMVGMDRGYPWSQNQEMT

SEQ ID NO: 1018238 - protein, 114 aa, Homo sapiens
MKIGPLVWTFVRMTLCSKGHLGTQAGGGFQGTMGTDPQRQKGVGRGGPHRGGYGSVPTRHLPELGHMATPGQLATQGASRPGGGASGFGEALAGPTGPPDPPVSVGASIRGDVA

SEQ ID NO: 1018239 - protein, 127 aa, Homo sapiens
  misc_feature (3)..(3): Xaa can be any naturally occurring amino acid
FAXASTPSGPTAAQRVASELLEGITPALLDERFARATLYYSQREFEEQLLLRCLEPGQDFQALAHWGLEHFQWLSPWQRADLPKQALLELDQRLFKSLEEPLAGLLGRGDVEGFWREYSNLEQLGWL

SEQ ID NO: 1018240 - protein, 148 aa, Homo sapiens
  misc_feature (33)..(33): Xaa can be any naturally occurring amino acid
DAFPNIEKVSNITSPVLIIHAREDEVIDFSHGXLYERCPKAVEPLWVEGAGHNDIELYSQYLVRLRRFISQELPSPSAPSGGPNRPDLSNKAAPGPPPRPAPTQGLHVDPRAAQVEALPGAPAMKGLWTMYRQQTYALLSFWKQEENK

SEQ ID NO: 1018241 - protein, 69 aa, Homo sapiens
RVFTNVCSYTPGCVSKGSPASSPAWHPEWAPAGPAAIWVSFLSLPGAGIGLLLSSPEPLSQRTLDPKRT

SEQ ID NO: 1018242 - protein, 156 aa, Homo sapiens
MATPPAPGAGTAAPSAPRPPPPRPSWLRLDPAARGARLPFPGSPGTTRRAPRESAPLAPALRSDPGQPLAACNGPPGEPRADPGVSTRCAATMIPQGKLTGGRSCGSRPRMGRGERAELSFPAAAPRLKRGLGFWFFFCGNSSVEILLACHTTHPF

SEQ ID NO: 1018243 - protein, 121 aa, Homo sapiens
  misc_feature (38)..(38): Xaa can be any naturally occurring amino acid
LDGAQDLGLAAGTVAVRDAAALFGRLDITDFGVEAHRXLEVFVKGIGDAVHAAHRLEHGGGKLRDLSNTKAPHSLGLSRVCSSSGARVTPVMVASARHARVAGAYRTLVLQVAVEVAVHFE

SEQ ID NO: 1018244 - protein, 127 aa, Homo sapiens
MDVFKKGFSIAKEGVVGAVEKTKQGVTEAAEKTKEGVMYVGAKTKEGVVQSVTSVAEKTKEQANAVSEAVVSSVNTVATKTVEEVENIAVTSGVVHKEALKQPVPSQEDEAAKAEEQVAEETKSGGD

SEQ ID NO: 1018245 - protein, 54 aa, Homo sapiens
MTRLPEPTQWLDALMTQDVSLLALGVVAASILAYALSMLCWLAALRDLPLGRGR

SEQ ID NO: 1018246 - protein, 77 aa, Homo sapiens
MQLGNWKSEVGISGLTSTLENRDTREDGRRNAVAIHYLGKDGPWGLQLQRARQQMSPRNPGSNEVVTFGGYDGTFSR

SEQ ID NO: 1018247 - protein, 286 aa, Homo sapiens
RHEPAAPDAGCALPGAERPRARARATGPAGAVLIPSPVKSYRGWLVMGEPSREEYKIQSFDAETQQLLKRALKDPGAVDLEKVANVIVDHSLQDCVFSKEAGRMCYAIIQAESKQAGQSVFRRGLLNRLQQEYQAREQLRARSLQGWVCYVTFICNIFDYLRVNNMPMMALVNPVYDCLFRLAQPDSLSKEEEVDCLVLQLHRVGEQLEKMNGQRMDELFVLIRDGFLLPTGLSSLAQLLLLEIIEFGRPAGRQRQLPTSITTAKSPTRPPDQGFLTSTGLSSTHL

SEQ ID NO: 1018248 - protein, 305 aa, Homo sapiens
MGEPSREEYKIQSFDAETQQLLKTALKDPGAVDLEKVANVIVDHSLQDCVFSKEAGRMCYAIIQAESKQAGQSVFRRGLLNRLQQEYQAREQLRARSLQGWVCYVTFICNIFDYLRVNNMPMMALVNPVYDCLFRLGPARQFEQGGGGGLFVCCSCTGLGSSWRNDGQRMDELFVLIRDGFLLPTGLSSLASCCCWRSLSSGGRLEDNASCPQVLLQRSLRLGLQIRASSPDWPFFYPPLKLAVESLPHPKTFPFQTLSVFPSRLSHLLVRCFPLMPWSCPEPLSPPQPTTARQRRATPKSHCTV

SEQ ID NO: 1018249 - protein, 93 aa, Homo sapiens
GLQPLLKFESRNQQVRNPEIPDPLRKMFSPEGERRAAGAEGGLGALRRRLQDPPAGPGRADAGCSRGAAPRSEVRAAGARPRRRSAVLLLLVF

SEQ ID NO: 1018250 - protein, 247 aa, Homo sapiens
ENCFLHRSGRGINEMVSNAQCLNVPVNGPMLRLKANDFAQKLGHNDFKCSNGWLDRFKSRYGLVFRAQPVEATGVPVDPSTVWYQNVLPYYLNDYHPKNVFNIKETGLLYRMLPTNTFAFKGETCSVGKLCKDRITLVVGTNMDGSEKLPLLVIGKKRTPHCFKGLKSLPVCYEANRMAWMTSDVFEQWMRKLDEEFQAQQRRVVIFVESFPAHPEVKNLKSIELAFFPSCLSSKCIAMKQGVIKSL

SEQ ID NO: 1018251 - protein, 209 aa, Homo sapiens
ENTKKRTFVAADREILSSANAGPELSVYRCGSDKVPPMIYGTNFIELPYHGESNRAMLDCTARRAELHSGLSAIYPTHQHQKTIDMLDELSMVPEGVVLGVDPCRQDAQLLGTEQDFARSPLKVLGHYWTCRISSKANFAKITRSENLHVSHILQKAKIEVSEDGTKASAATTAILIARSSPPWFISRQDLFCLASDIILQVLCYSWGR

SEQ ID NO: 1018252 - protein, 469 aa, Homo sapiens [sequence omitted]

SEQ ID NO: 1018253 - protein, 103 aa, Homo sapiens
  misc_feature (6)..(6): Xaa can be any naturally occurring amino acid
  misc_feature (27)..(27): Xaa can be any naturally occurring amino acid
  misc_feature (58)..(58): Xaa can be any naturally occurring amino acid
  misc_feature (69)..(69): Xaa can be any naturally occurring amino acid
  misc_feature (72)..(73): Xaa can be any naturally occurring amino acid
  misc_feature (82)..(82): Xaa can be any naturally occurring amino acid
  misc_feature (94)..(94): Xaa can be any naturally occurring amino acid
DLIEKXLDISRPKMQEVVANLQYDDGXGMNREATADDLIKVVEELTRIHEPRAGAPFXDPPQKLSPAPXPLXXTILFLAMGXLSLSQLPPEPQXPYVEVGRAS
